United States Patent Application Publication US 2011/0183924 A1 - sequence listing, part 140

SEQ ID NO: 371199 - DNA, 8286 bp, Homo sapiens
  misc_feature (4950)..(4950): n is a, c, g, or t
agaagaatcatctcctgcttcaatctgctgctggataggaactaatcagagagagagaagcggaagacggagaaggagggagtcgaaggctttcccgatcacaaatctcacctccactacaactctctttatacttttcttgcagaaataataatagaaataaggaggtggtggggtttccaaaaatcttaaccttcaaccatctggggaaaaggcaaaaatcccatctaccgcaactctcagttcgagagtaaaggtttcccaacagtgatgtcacaagattgaccacattgatcacaatatggagtctggagaacggttaccatcctcagcagcctcctctactacaccaacttcatcttcgacaccttctgtggcttcagtagtttcaaaaggtggcctttccactggagttgcttcacttagctctacaatcaacccatgtggacatttattcagaacagctggggatcaaccgtttaacctgtccacagtgtcgagtgccttcccaatggtcagccacccagtctttggtctacattcagccagctcagggcattcagaatttggtggtttggggacacttggtacacccacagccttagccgcacatccccaactagcatcttttccagcagaatggtggcgaacaactgatgctcatactcgtacaggagcaaccttctttccaccattactgggaattccaccactatttgctcccccagcccagaatcatgattcttcttcattccattcaaggacttcgggaaaaagtaatcgaaatggtcccgaaaaaggtgtaaatgggtcaataaatggaagtaatacatcatctgtaattggtatcaacacatctgtactatccactactgcttcaagttccatgggacaaactaaaagtacaagctcaggtggaggaaatcgaaaatgtaatcaggaacaaagcaaaaaccagcctttggatgctagagttgacaaaatcaaagataagaaaccaaggaagaaagcaatggaaagttctagcaacagtgatagtgattcaggcacatcatcagacacctcaagtgaaggcattagtagcagtgattcagatgatctagaagaagatgaagaagaagaagatcaaagtattgaagaaagtgaagatgatgattctgattcagagagtgaagcacaacataaaagtaacaaccaggtgctattacatggtatttcagacccaaaagcagatggacagaaagcaactgaaaaagcccaggaaaaaagaatacaccagccattacctcttgcgtctgaatcccagactcactcattccaatcccagcagaagcagcctcaggttttgtcacagcagcttccatttattttccaaagctctcaggcaaaggaggaatctgtgaacaaacacaccagtgtaatacagtctacgggattggtgtccaatgtgaaacctttatctttggtaaatcaagccaaaaaggaaacttacatgaaactcatagttccttctcctgatgttcttaaagcagggaataaaaatacctctgaagaatctagtttattgaccagtgaattgagatccaaacgggaacaatataaacaggcattcccatcacagttaaagaaacaagagtcatcgaagagcctgaagaaggttattgcagctttgtcaaatccaaaagcaacctctagttcaccagcacatccaaaacaaacattagaaaacaaccacccaaatccattcttgacaaatgcacttttaggtaatcaccaaccaaatggagttattcaaagtgtcattcaagaagctcctctagcacttactaccaaaactaaaatgcagagcaagattaatgaaaacattgctgctgcaagtagcacccctttttcctcacctgtaaatctgagtacaagtgggagaagaacccctggcaatcagacacctgtaatgccctctgcctctcccatcctgcatagtcaagggaaggaaaaagcagttagcaataatgtaaacccagtaaaaacacagcatcactcccatcctgcaaaatctttagtggaacaattcagaggaacagattcagacattcccagtagtaaagattctgaagattcaaatgaggatgaagaggaagatgatgaagaagaagatgaggaagatgatgaagatgatgaatctgatgacagccaatcaggcacttccaaaagaagaagagtaacagatgaacgtgaactgcgtattccattggaatatggctggcagagagagacaagaataagaaactttggagggcgccttcaaggagaagtagcatattatgctccatgtggaaagaaacttaggcagtaccctgaagtaataaagtatctcagcagaaatggaataatggatatctcaagggacaatttcagcttcagtgcaaaaataagagtgggtgacttctatgaagccagagatggaccgcagggaatgcagtggtgtcttttgaaagaagaggatgtcattcctcgtatcagggcaatggaaggtcgtagaggaagaccaccaaatccagatagacaacgagcaagagaggaatccaggatgagacgtcggaaaggtcgacctccaaatgttggcaatgctgaattcctagataacgcagatgcaaagttgctaagaaaactgcaagctcaagaaatagccaggcaagcagcacaaataaagcttttgagaaaacttcaaaagcaggaacaggctcgggttgctaaagaagccaaaaaacaacaagcaataatggctgctgaggagaagcggaagcaaaaagaacagataaagattatgaaacagcaggaaaaaattaagagaatacagcaaatcagaatggaaaaagaacttcgagctcagcaaattctagaggctaaaaagaaaaagaaggaagaagcggcaaatgccaaattattggaggccgagaaacgaataaaggaaaaagaaatgagaagacaacaagctgttcttctgaaacatcaggaacgagagcgaaggcgacaacacatgatgcttatgaaagctatggaagctcgtaaaaaagcagaagaaaaagagcggttgaaacaagaaaaacgtgatgagaaaagattaaataaagagcgtaaactagagcagcgaagattagaattagaaatggcaaaggaactaaagaagcctaatgaagacatgtgcttagcagaccaaaagcctttgccagagttgcctcgtattccaggacttgttctctctggaagtacattttcagactgtctcatggtggtgcagttcttacgaaactttggtaaagttttgggctttgatgtgaatattgatgttccaaacctgagtgttcttcaagagggattgctaaatataggggacagcatgggtgaagtacaagacttgcttgtgaggctcctctcagctgctgtatgtgatccaggtctaataacaggatacaaggctaaaacagctcttggagaacatttgctgaatgttggtgtgaatcgagacaatgtttccgagattttacagatatttatggaagcccactgtggacaaactgagcttactgaaagtctgaagaccaaagcttttcaggctcacactccagcacagaaagcttcagtcctggctttcctgatcaatgaactggcatgcagcaagagtgtggtcagtgaaatcgacaagaacattgattatatgtcaaacttgaggagagataaatgggtggtagaaggtaaactccgcaagctcagaatcattcatgctaagaaaacaggcaaaagagacacttcaggtggcattgatctgggagaagagcagcatcccttgggcacacccactccaggacgcaagcgaagaaggaagggaggagacagtgattatgacgatgatgatgacgatgacagtgatgaccaaggggatgaagatgatgaggatgaagaagataaagaagacaaaaaaggaaaaaagactgatatctgtgaagatgaggatgaaggtgaccaagcagcaagtgttgaagagctggaaaaacagattgaaaaactgagtaaacaacagagtcagtacagaaggaagctctttgatgcgtctcactcattgcgttcagtgatgtttggccaagatcgttacagacgccggtactggattcttccccaatgtggggggatttttgtagaaggcatggagagtggtgaaggactagaagaaattgcaaaagaaagagaaaaactgaaaaaggcagaaagtgtccagatcaaagaagaaatgtttgagacttctggggacagtttaaattgttcaaatacagatcactgtgaacaaaaggaagatcttaaagaaaaagataacacaaatctattccttcagaaacctggctctttttccaaattaagcaagcttttggaagtagctaagatgcctcctgagtcagaggttatgacccccaaaccaaatgctggtgcaaatgggtgcacgttgtcttatcagaacagtggaaaacattcactgggcagcgttcagtcaacagcaacgcaaagcaatgtggaaaaggcagactctaataatctgtttaatactggttcaagtggtccagggaagttctacagtcctctccccaatgaccagttactaaaaacgctgactgaaaagaatagacaatggtttagtcttttgccacgaacaccctgtgatgacacttcacttactcatgccgatatgtcaactgcttctttggtgactcctcagtctcagccaccatctaagtcaccttcacctaccccagctcctcttggatcttctgctcagaatcctgttggcttaaatccatttgctttatcacctcttcaggtgaaaggtggagtatctatgatgggacttcagttttgtggatggcccactggtgtggttacttctaatattccatttacatnatctgtacctagtctaggatcggggttagggttatcagaaggaaatggtaattcattcttgacttccaatgttgcttcaagtaaaagtgaatctccagtaccacagaatgaaaaggccacttcagctcaacctgcagctgttgaagtagcaaaaccagtagattttcctagtccaaaacctattccagaagaaatgcagtttggttggtggagaattattgacccagaggacctaaaagctttgctcaaagtgctgcatctcagaggaataagagaaaaggcattacaaaaacaaattcagaaacatttggattatattactcaagcctgcctcaagaataaggatgttgctattattgaactgaatgaaaatgaagaaaaccaagtaactcgagatattgtggagaactggtcagtagaagaacaagcaatggaaatggatttgagtgtccttcaacaggtagaagatctagaaaggagagttgcatcagcaagtttgcaagtgaagggttggatgtgtccagagcctgcatcagaaagggaggacttggtatattttgaacataaatcatttactaaattgtgcaaggagcatgatggagaatttactggcgaagacgaaagcagtgcacatgcactagaacggaagagtgacaaccccctagatatagctgtaaccaggctggctgatttggagcggaacattgaaagaaggtatctgaagagccccttaagtaccaccattcagatcaaactggataatgtgggcacagttactgtccctgctcctgcaccatccgttagtggtgatggtgacgggtaggttattgagattaacttgaaaaattattgtgcttctttgctaattggagcctattttctattgcctgttatctatgtatcttcttgtatgtctgtgatccatacggatcatgctatttgcatggtgctttgtaaaaactttttttttgttatgtgcgttgataatcctgcaaagtgatcttacatctacctggttgtgactaagctttgaggcacgtagccacagtctgtgcactacatcaaatttagttgcttaaaccttatacttattggctgttacatgtttttgtcattgcttggctttcagtgtgatgattgtttcacattccgtaatcgtaagtgtggacatgacctacttaatttttctatatttcaatgcagaattgaagaggatattgctccagggctcagggtatggagaagggcattatcagaagctcgcagtgctgcacaggtagctctgtgcattcagcaattacagaaatcaatagcatgggaaaaatcaattatgaaagtttactgccaaatctgtcgaaagggagataatgaagaactgcttcttctttgtgatggctgtgacaaaggctgtcatacctactgccatagacccaagattacaacaatcccagatggagactggttttgtccagcttgcattgctaaggcaagtggtcaaactctaaaaatcaaaaaacttcatgtcaaaggaaaaaagactaatgagtcaaagaaaggcaagaaggtaactttaacaggagatactgaagatgaagactctgcatctacaagtagttcactaaaaagaggaaacaaagacctcaagaaaagaaaaatggaggaaaacacttctattaacttgtcaaaacaagaaagttttacttcagttaagaaacctaaaagagatgactccaaggacctagctctttgcagtatgattctgactgaaatggaaactcatgaggatgcatggccttttctacttcctgtaaacttgaaacttgttcctggttataagaaagttattaagaagcctatggatttttccacaattagagagaaactaagtagtggacagtatccaaaccttgaaacctttgctctagatgtcaggcttgtttttgacaactgtgaaacatttaatgaagatgattctgatataggcagagctggccacaatatgaggaagtattttgaaaaaaagtggacagatactttcaaagtgagctgaagttataataatctctttatttttttccttctaaacaaggacaaatgagaccagcaatgtgaactgtatttacataaacgtgcaaggcacatacataatgactttctttttccttaagtataaaaaaaaagtatcagaagaatgataccatttttaaaggcttcattcctacaacaaccaaggccctcggttattggtttgtgtgatttatcagctaatttaggtagaacagggaagcacacccaaagaattttcaaaggaaagggtgttatagtgcaatagcaattaaaatatatcaaatcgcactgaatactcaacaccagagctctaatgtgggaaatggttctcctttccctctcaataaatatctatttttcatttttttactttgtagtttattttttagtgaatgtatttaattttatgaattatttatgattaaaccacatccagaatcttcgttttctgtgaaaaggaagaactagaaaattgctttaaatcttgaaaatacaaggaatgttttaaaatataaaacaaagccaagttaaactgtttacactgatgtgctataaaagcaccaaaaagaaactttactgtagagttacaagtacatttatatatatatgttgctgcatcacttgtgtagttaaattgtatttcaaaacagtgaaaaaattgacatgtatatactgttcattcttgtttatattaagtcttgttttaaatatgtattatgtgtatatattgtttgcagacattattgttcatgccttagaggattgtagcattttattttcgtctgaaggtaatgatagctatacagtctgtacagtaattatcctctaccaacactgtggcgtctccttaatcttggtagtgcctgcctttgaaacagggtgtaggggatattagttttccatttttctattttgttatataattttaagccaccagggcctaaattaaagtataatcatttgtatccatgtggaataaaattgtgacaatttcctacgcacacagtattttttcatagaaacatttccctcccatttgccttgcctcagaaataaatttaaaagacgtttgtaaccactgtgttttatctactgtgtgttgtggtggcctgttggaggcaaatagatcagattttttttgtacctacgtaagagtacttgaagttttatttaaaataaaatgttgtggaaaaggtagcattctttttttaggagtgttatttttcactatgtgtggcacggatacaataaaagacttttacaaactaa

SEQ ID NO: 371200 - DNA, 4958 bp, Homo sapiens
  misc_feature (2111)..(2111): n is a, c, g, or t
tacttttgaaatgtttatattttatttaatttttgctccagttatataatccatgttttgttaatatggatatgtcagttgattgaatatgcaagttgattaaaattaatgtctcttttgcaaagatctaagttcataattgagttcaaccaaaatttattaatggttgcttacttgtatgaagatacttcaagacactatgcttagttccatgggggttacagaaatgcccccagagaatttagcatcccaaaggaagctactggtacaatacaagaggggaaaaaaggtagcagcttattttactttagaagaatcgaaatcatggcttttaaaaaattaagctgtttttattttatttgtatttcattttattttcagcctttgccagagttgcctcgtattccaggacttgttctctctggaagtacattttcagactgtctcatggtggtgcagttcttacgaaactttggtaaagttttgggctttgatgtgaatattgatgttccaaacctgagtgttcttcaagagggattgctaaatataggggacagcatgggtgaagtacaagacttgcttgtgaggctcctctcagctgctgtatgtgatccaggtctaataacaggatacaaggctaaaacagctcttggagaacatttgctgaatgttggtgtgaatcgagacaatgtttccgagattttacagatatttatggaagcccactgtggacaaactgagcttactgaaagtctgaagaccaaagcttttcaggctcacactccagcacagaaagcttcagtcctggctttcctgatcaatgaactggcatgcagcaagagtgtggtcagtgaaatcgacaagaacattgattatatgtcaaacttgaggagagataaatgggtggtagaaggtaaactccgcaagctcagaatcattcatgctaagaaaacaggcaaaagagacacttcaggtggcattgatctgggagaagagcagcatcccttgggcacacccactccaggacgcaagcgaagaaggaagggaggagacagtgattatgacgatgatgatgacgatgacagtgatgaccaaggggatgaagatgatgaggatgaagaagataaagaagacaaaaaaggaaaaaagactgatatctgtgaagatgaggatgaaggtgaccaagcagcaagtgttgaagagctggaaaaacagattgaaaaactgagtaaacaacagagtcagtacagaaggaagctctttgatgcgtctcactcattgcgttcagtgatgtttggccaagatcgttacagacgccggtactggattcttccccaatgtggggggatttttgtagaaggcatggagagtggtgaaggactagaagaaattgcaaaagaaagagaaaaactgaaaaaggcagaaagtgtccagatcaaagaagaaatgtttgagacttctggggacagtttaaattgttcaaatacagatcactgtgaacaaaaggaagatcttaaagaaaaagataacacaaatctattccttcagaaacctggctctttttccaaattaagcaagcttttggaagtagctaagatgcctcctgagtcagaggttatgacccccaaaccaaatgctggtgcaaatgggtgcacgttgtcttatcagaacagtggaaaacattcactgggcagcgttcagtcaacagcaacgcaaagcaatgtggaaaaggcagactctaataatctgtttaatactggttcaagtggtccagggaagttctacagtcctctccccaatgaccagttactaaaaacgctgactgaaaagaatagacaatggtttagtcttttgccacgaacaccctgtgatgacacttcacttactcatgccgatatgtcaactgcttctttggtgactcctcagtctcagccaccatctaagtcaccttcacctaccccagctcctcttggatcttctgctcagaatcctgttggcttaaatccatttgctttatcacctcttcaggtgaaaggtggagtatctatgatgggacttcagttttgtggatggcccactggtgtggttacttctaatattccatttacatnatctgtacctagtctaggatcggggttagggttatcagaaggaaatggtaattcattcttgacttccaatgttgcttcaagtaaaagtgaatctccagtaccacagaatgaaaaggccacttcagctcaacctgcagctgttgaagtagcaaaaccagtagattttcctagtccaaaacctattccagaagaaatgcagtttggttggtggagaattattgacccagaggacctaaaagctttgctcaaagtgctgcatctcagaggaataagagaaaaggcattacaaaaacaaattcagaaacatttggattatattactcaagcctgcctcaagaataaggatgttgctattattgaactgaatgaaaatgaagaaaaccaagtaactcgagatattgtggagaactggtcagtagaagaacaagcaatggaaatggatttgagtgtccttcaacaggtagaagatctagaaaggagagttgcatcagcaagtttgcaagtgaagggttggatgtgtccagagcctgcatcagaaagggaggacttggtatattttgaacataaatcatttactaaattgtgcaaggagcatgatggagaatttactggcgaagacgaaagcagtgcacatgcactagaacggaagagtgacaaccccctagatatagctgtaaccaggctggctgatttggagcggaacattgaaagaagaattgaagaggatattgctccagggctcagggtatggagaagggcattatcagaagctcgcagtgctgcacaggtagctctgtgcattcagcaattacagaaatcaatagcatgggaaaaatcaattatgaaagtttactgccaaatctgtcgaaagggagataatgaagaactgcttcttctttgtgatggctgtgacaaaggctgtcatacctactgccatagacccaagattacaacaatcccagatggagactggttttgtccagcttgcattgctaaggcaagtggtcaaactctaaaaatcaaaaaacttcatgtcaaaggaaaaaagactaatgagtcaaagaaaggcaagaaggtaactttaacaggagatactgaagatgaagactctgcatctacaagtagttcactaaaaagaggaaacaaagacctcaagaaaagaaaaatggaggaaaacacttctattaacttgtcaaaacaagaaagttttacttcagttaagaaacctaaaagagatgactccaaggacctagctctttgcagtatgattctgactgaaatggaaactcatgaggatgcatggccttttctacttcctgtaaacttgaaacttgttcctggttataagaaagttattaagaagcctatggatttttccacaattagagagaaactaagtagtggacagtatccaaaccttgaaacctttgctctagatgtcaggcttgtttttgacaactgtgaaacatttaatgaagatgattctgatataggcagagctggccacaatatgaggaagtattttgaaaaaaagtggacagatactttcaaagtgagctgaagttataataatctctttatttttttccttctaaacaaggacaaatgagaccagcaatgtgaactgtatttacataaacgtgcaaggcacatacataatgactttctttttccttaagtataaaaaaaaagtatcagaagaatgataccatttttaaaggcttcattcctacaacaaccaaggccctcggttattggtttgtgtgatttatcagctaatttaggtagaacagggaagcacacccaaagaattttcaaaggaaagggtgttatagtgcaatagcaattaaaatatatcaaatcgcactgaatactcaacaccagagctctaatgtgggaaatggttctcctttccctctcaataaatatctatttttcatttttttactttgtagtttattttttagtgaatgtatttaattttatgaattatttatgattaaaccacatccagaatcttcgttttctgtgaaaaggaagaactagaaaattgctttaaatcttgaaaatacaaggaatgttttaaaatataaaacaaagccaagttaaactgtttacactgatgtgctataaaagcaccaaaaagaaactttactgtagagttacaagtacatttatatatatatgttgctgcatcacttgtgtagttaaattgtatttcaaaacagtgaaaaaattgacatgtatatactgttcattcttgtttatattaagtcttgttttaaatatgtattatgtgtatatattgtttgcagacattattgttcatgccttagaggattgtagcattttattttcgtctgaaggtaatgatagctatacagtctgtacagtaattatcctctaccaacactgtggcgtctccttaatcttggtagtgcctgcctttgaaacagggtgtaggggatattagttttccatttttctattttgttatataattttaagccaccagggcctaaattaaagtataatcatttgtatccatgtggaataaaattgtgacaatttcctacgcacacagtattttttcatagaaacatttccctcccatttgccttgcctcagaaataaatttaaaagacgtttgtaaccactgtgttttatctactgtgtgttgtggtggcctgttggaggcaaatagatcagattttttttgtacctacgtaagagtacttgaagttttatttaaaataaaatgttgtggaaaaggtagcattctttttttaggagtgttatttttcactatgtgtggcacggatacaataaaagacttttacaaactaa

SEQ ID NO: 371201 - DNA, 4870 bp, Homo sapiens
  misc_feature (2023)..(2023): n is a, c, g, or t
tgccgtccaccagtaactgaatactgaaagggggtagctgggaaaaagaaatgagaagacaacaagctgttcttctgaaacatcaggaacgagagcgaaggcgacaacacatgatgcttatgaaagctatggaagctcgtaaaaaagcagaagaaaaagagcggttgaaacaagaaaaacgtgatgagaaaagattaaataaagagcgtaaactagagcagcgaagattagaattagaaatggcaaaggaactaaagaagcctaatgaagacatgtgcttagcagaccaaaagcctttgccagagttgcctcgtattccaggacttgttctctctggaagtacattttcagactgtctcatggtggtgcagttcttacgaaactttggtaaagttttgggctttgatgtgaatattgatgttccaaacctgagtgttcttcaagagggattgctaaatataggggacagcatgggtgaagtacaagacttgcttgtgaggctcctctcagctgctgtatgtgatccaggtctaataacaggatacaaggctaaaacagctcttggagaacatttgctgaatgttggtgtgaatcgagacaatgtttccgagattttacagatatttatggaagcccactgtggacaaactgagcttactgaaagtctgaagaccaaagcttttcaggctcacactccagcacagaaagcttcagtcctggctttcctgatcaatgaactggcatgcagcaagagtgtggtcagtgaaatcgacaagaacattgattatatgtcaaacttgaggagagataaatgggtggtagaaggtaaactccgcaagctcagaatcattcatgctaagaaaacaggcaaaagagacacttcaggtggcattgatctgggagaagagcagcatcccttgggcacacccactccaggacgcaagcgaagaaggaagggaggagacagtgattatgacgatgatgatgacgatgacagtgatgaccaaggggatgaagatgatgaggatgaagaagataaagaagacaaaaaaggaaaaaagactgatatctgtgaagatgaggatgaaggtgaccaagcagcaagtgttgaagagctggaaaaacagattgaaaaactgagtaaacaacagagtcagtacagaaggaagctctttgatgcgtctcactcattgcgttcagtgatgtttggccaagatcgttacagacgccggtactggattcttccccaatgtggggggatttttgtagaaggcatggagagtggtgaaggactagaagaaattgcaaaagaaagagaaaaactgaaaaaggcagaaagtgtccagatcaaagaagaaatgtttgagacttctggggacagtttaaattgttcaaatacagatcactgtgaacaaaaggaagatcttaaagaaaaagataacacaaatctattccttcagaaacctggctctttttccaaattaagcaagcttttggaagtagctaagatgcctcctgagtcagaggttatgacccccaaaccaaatgctggtgcaaatgggtgcacgttgtcttatcagaacagtggaaaacattcactgggcagcgttcagtcaacagcaacgcaaagcaatgtggaaaaggcagactctaataatctgtttaatactggttcaagtggtccagggaagttctacagtcctctccccaatgaccagttactaaaaacgctgactgaaaagaatagacaatggtttagtcttttgccacgaacaccctgtgatgacacttcacttactcatgccgatatgtcaactgcttctttggtgactcctcagtctcagccaccatctaagtcaccttcacctaccccagctcctcttggatcttctgctcagaatcctgttggcttaaatccatttgctttatcacctcttcaggtgaaaggtggagtatctatgatgggacttcagttttgtggatggcccactggtgtggttacttctaatattccatttacatnatctgtacctagtctaggatcggggttagggttatcagaaggaaatggtaattcattcttgacttccaatgttgcttcaagtaaaagtgaatctccagtaccacagaatgaaaaggccacttcagctcaacctgcagctgttgaagtagcaaaaccagtagattttcctagtccaaaacctattccagaagaaatgcagtttggttggtggagaattattgacccagaggacctaaaagctttgctcaaagtgctgcatctcagaggaataagagaaaaggcattacaaaaacaaattcagaaacatttggattatattactcaagcctgcctcaagaataaggatgttgctattattgaactgaatgaaaatgaagaaaaccaagtaactcgagatattgtggagaactggtcagtagaagaacaagcaatggaaatggatttgagtgtccttcaacaggtagaagatctagaaaggagagttgcatcagcaagtttgcaagtgaagggttggatgtgtccagagcctgcatcagaaagggaggacttggtatattttgaacataaatcatttactaaattgtgcaaggagcatgatggagaatttactggcgaagacgaaagcagtgcacatgcactagaacggaagagtgacaaccccctagatatagctgtaaccaggctggctgatttggagcggaacattgaaagaagaattgaagaggatattgctccagggctcagggtatggagaagggcattatcagaagctcgcagtgctgcacaggtagctctgtgcattcagcaattacagaaatcaatagcatgggaaaaatcaattatgaaagtttactgccaaatctgtcgaaagggagataatgaagaactgcttcttctttgtgatggctgtgacaaaggctgtcatacctactgccatagacccaagattacaacaatcccagatggagactggttttgtccagcttgcattgctaaggcaagtggtcaaactctaaaaatcaaaaaacttcatgtcaaaggaaaaaagactaatgagtcaaagaaaggcaagaaggtaactttaacaggagatactgaagatgaagactctgcatctacaagtagttcactaaaaagaggaaacaaagacctcaagaaaagaaaaatggaggaaaacacttctattaacttgtcaaaacaagaaagttttacttcagttaagaaacctaaaagagatgactccaaggacctagctctttgcagtatgattctgactgaaatggaaactcatgaggatgcatggccttttctacttcctgtaaacttgaaacttgttcctggttataagaaagttattaagaagcctatggatttttccacaattagagagaaactaagtagtggacagtatccaaaccttgaaacctttgctctagatgtcaggcttgtttttgacaactgtgaaacatttaatgaagatgattctgatataggcagagctggccacaatatgaggaagtattttgaaaaaaagtggacagatactttcaaagtgagctgaagttataataatctctttatttttttccttctaaacaaggacaaatgagaccagcaatgtgaactgtatttacataaacgtgcaaggcacatacataatgactttctttttccttaagtataaaaaaaaagtatcagaagaatgataccatttttaaaggcttcattcctacaacaaccaaggccctcggttattggtttgtgtgatttatcagctaatttaggtagaacagggaagcacacccaaagaattttcaaaggaaagggtgttatagtgcaatagcaattaaaatatatcaaatcgcactgaatactcaacaccagagctctaatgtgggaaatggttctcctttccctctcaataaatatctatttttcatttttttactttgtagtttattttttagtgaatgtatttaattttatgaattatttatgattaaaccacatccagaatcttcgttttctgtgaaaaggaagaactagaaaattgctttaaatcttgaaaatacaaggaatgttttaaaatataaaacaaagccaagttaaactgtttacactgatgtgctataaaagcaccaaaaagaaactttactgtagagttacaagtacatttatatatatatgttgctgcatcacttgtgtagttaaattgtatttcaaaacagtgaaaaaattgacatgtatatactgttcattcttgtttatattaagtcttgttttaaatatgtattatgtgtatatattgtttgcagacattattgttcatgccttagaggattgtagcattttattttcgtctgaaggtaatgatagctatacagtctgtacagtaattatcctctaccaacactgtggcgtctccttaatcttggtagtgcctgcctttgaaacagggtgtaggggatattagttttccatttttctattttgttatataattttaagccaccagggcctaaattaaagtataatcatttgtatccatgtggaataaaattgtgacaatttcctacgcacacagtattttttcatagaaacatttccctcccatttgccttgcctcagaaataaatttaaaagacgtttgtaaccactgtgttttatctactgtgtgttgtggtggcctgttggaggcaaatagatcagattttttttgtacctacgtaagagtacttgaagttttatttaaaataaaatgttgtggaaaaggtagcattctttttttaggagtgttatttttcactatgtgtggcacggatacaataaaagacttttacaaactaa

SEQ ID NO: 371202 - DNA, 6412 bp, Homo sapiens
  misc_feature (4950)..(4950): n is a, c, g, or t
agaagaatcatctcctgcttcaatctgctgctggataggaactaatcagagagagagaagcggaagacggagaaggagggagtcgaaggctttcccgatcacaaatctcacctccactacaactctctttatacttttcttgcagaaataataatagaaataaggaggtggtggggtttccaaaaatcttaaccttcaaccatctggggaaaaggcaaaaatcccatctaccgcaactctcagttcgagagtaaaggtttcccaacagtgatgtcacaagattgaccacattgatcacaatatggagtctggagaacggttaccatcctcagcagcctcctctactacaccaacttcatcttcgacaccttctgtggcttcagtagtttcaaaaggtggcctttccactggagttgcttcacttagctctacaatcaacccatgtggacatttattcagaacagctggggatcaaccgtttaacctgtccacagtgtcgagtgccttcccaatggtcagccacccagtctttggtctacattcagccagctcagggcattcagaatttggtggtttggggacacttggtacacccacagccttagccgcacatccccaactagcatcttttccagcagaatggtggcgaacaactgatgctcatactcgtacaggagcaaccttctttccaccattactgggaattccaccactatttgctcccccagcccagaatcatgattcttcttcattccattcaaggacttcgggaaaaagtaatcgaaatggtcccgaaaaaggtgtaaatgggtcaataaatggaagtaatacatcatctgtaattggtatcaacacatctgtactatccactactgcttcaagttccatgggacaaactaaaagtacaagctcaggtggaggaaatcgaaaatgtaatcaggaacaaagcaaaaaccagcctttggatgctagagttgacaaaatcaaagataagaaaccaaggaagaaagcaatggaaagttctagcaacagtgatagtgattcaggcacatcatcagacacctcaagtgaaggcattagtagcagtgattcagatgatctagaagaagatgaagaagaagaagatcaaagtattgaagaaagtgaagatgatgattctgattcagagagtgaagcacaacataaaagtaacaaccaggtgctattacatggtatttcagacccaaaagcagatggacagaaagcaactgaaaaagcccaggaaaaaagaatacaccagccattacctcttgcgtctgaatcccagactcactcattccaatcccagcagaagcagcctcaggttttgtcacagcagcttccatttattttccaaagctctcaggcaaaggaggaatctgtgaacaaacacaccagtgtaatacagtctacgggattggtgtccaatgtgaaacctttatctttggtaaatcaagccaaaaaggaaacttacatgaaactcatagttccttctcctgatgttcttaaagcagggaataaaaatacctctgaagaatctagtttattgaccagtgaattgagatccaaacgggaacaatataaacaggcattcccatcacagttaaagaaacaagagtcatcgaagagcctgaagaaggttattgcagctttgtcaaatccaaaagcaacctctagttcaccagcacatccaaaacaaacattagaaaacaaccacccaaatccattcttgacaaatgcacttttaggtaatcaccaaccaaatggagttattcaaagtgtcattcaagaagctcctctagcacttactaccaaaactaaaatgcagagcaagattaatgaaaacattgctgctgcaagtagcacccctttttcctcacctgtaaatctgagtacaagtgggagaagaacccctggcaatcagacacctgtaatgccctctgcctctcccatcctgcatagtcaagggaaggaaaaagcagttagcaataatgtaaacccagtaaaaacacagcatcactcccatcctgcaaaatctttagtggaacaattcagaggaacagattcagacattcccagtagtaaagattctgaagattcaaatgaggatgaagaggaagatgatgaagaagaagatgaggaagatgatgaagatgatgaatctgatgacagccaatcaggcacttccaaaagaagaagagtaacagatgaacgtgaactgcgtattccattggaatatggctggcagagagagacaagaataagaaactttggagggcgccttcaaggagaagtagcatattatgctccatgtggaaagaaacttaggcagtaccctgaagtaataaagtatctcagcagaaatggaataatggatatctcaagggacaatttcagcttcagtgcaaaaataagagtgggtgacttctatgaagccagagatggaccgcagggaatgcagtggtgtcttttgaaagaagaggatgtcattcctcgtatcagggcaatggaaggtcgtagaggaagaccaccaaatccagatagacaacgagcaagagaggaatccaggatgagacgtcggaaaggtcgacctccaaatgttggcaatgctgaattcctagataacgcagatgcaaagttgctaagaaaactgcaagctcaagaaatagccaggcaagcagcacaaataaagcttttgagaaaacttcaaaagcaggaacaggctcgggttgctaaagaagccaaaaaacaacaagcaataatggctgctgaggagaagcggaagcaaaaagaacagataaagattatgaaacagcaggaaaaaattaagagaatacagcaaatcagaatggaaaaagaacttcgagctcagcaaattctagaggctaaaaagaaaaagaaggaagaagcggcaaatgccaaattattggaggccgagaaacgaataaaggaaaaagaaatgagaagacaacaagctgttcttctgaaacatcaggaacgagagcgaaggcgacaacacatgatgcttatgaaagctatggaagctcgtaaaaaagcagaagaaaaagagcggttgaaacaagaaaaacgtgatgagaaaagattaaataaagagcgtaaactagagcagcgaagattagaattagaaatggcaaaggaactaaagaagcctaatgaagacatgtgcttagcagaccaaaagcctttgccagagttgcctcgtattccaggacttgttctctctggaagtacattttcagactgtctcatggtggtgcagttcttacgaaactttggtaaagttttgggctttgatgtgaatattgatgttccaaacctgagtgttcttcaagagggattgctaaatataggggacagcatgggtgaagtacaagacttgcttgtgaggctcctctcagctgctgtatgtgatccaggtctaataacaggatacaaggctaaaacagctcttggagaacatttgctgaatgttggtgtgaatcgagacaatgtttccgagattttacagatatttatggaagcccactgtggacaaactgagcttactgaaagtctgaagaccaaagcttttcaggctcacactccagcacagaaagcttcagtcctggctttcctgatcaatgaactggcatgcagcaagagtgtggtcagtgaaatcgacaagaacattgattatatgtcaaacttgaggagagataaatgggtggtagaaggtaaactccgcaagctcagaatcattcatgctaagaaaacaggcaaaagagacacttcaggtggcattgatctgggagaagagcagcatcccttgggcacacccactccaggacgcaagcgaagaaggaagggaggagacagtgattatgacgatgatgatgacgatgacagtgatgaccaaggggatgaagatgatgaggatgaagaagataaagaagacaaaaaaggaaaaaagactgatatctgtgaagatgaggatgaaggtgaccaagcagcaagtgttgaagagctggaaaaacagattgaaaaactgagtaaacaacagagtcagtacagaaggaagctctttgatgcgtctcactcattgcgttcagtgatgtttggccaagatcgttacagacgccggtactggattcttccccaatgtggggggatttttgtagaaggcatggagagtggtgaaggactagaagaaattgcaaaagaaagagaaaaactgaaaaaggcagaaagtgtccagatcaaagaagaaatgtttgagacttctggggacagtttaaattgttcaaatacagatcactgtgaacaaaaggaagatcttaaagaaaaagataacacaaatctattccttcagaaacctggctctttttccaaattaagcaagcttttggaagtagctaagatgcctcctgagtcagaggttatgacccccaaaccaaatgctggtgcaaatgggtgcacgttgtcttatcagaacagtggaaaacattcactgggcagcgttcagtcaacagcaacgcaaagcaatgtggaaaaggcagactctaataatctgtttaatactggttcaagtggtccagggaagttctacagtcctctccccaatgaccagttactaaaaacgctgactgaaaagaatagacaatggtttagtcttttgccacgaacaccctgtgatgacacttcacttactcatgccgatatgtcaactgcttctttggtgactcctcagtctcagccaccatctaagtcaccttcacctaccccagctcctcttggatcttctgctcagaatcctgttggcttaaatccatttgctttatcacctcttcaggtgaaaggtggagtatctatgatgggacttcagttttgtggatggcccactggtgtggttacttctaatattccatttacatnatctgtacctagtctaggatcggggttagggttatcagaaggaaatggtaattcattcttgacttccaatgttgcttcaagtaaaagtgaatctccagtaccacagaatgaaaaggccacttcagctcaacctgcagctgttgaagtagcaaaaccagtagattttcctagtccaaaacctattccagaagaaatgcagtttggttggtggagaattattgacccagaggacctaaaagctttgctcaaagtgctgcatctcagaggaataagagaaaaggcattacaaaaacaaattcagaaacatttggattatattactcaagcctgcctcaagaataaggatgttgctattattgaactgaatgaaaatgaagaaaaccaagtaactcgagatattgtggagaactggtcagtagaagaacaagcaatggaaatggatttgagtgtccttcaacaggtagaagatctagaaaggagagttgcatcagcaagtttgcaagtgaagggttggatgtgtccagagcctgcatcagaaagggaggacttggtatattttgaacataaatcatttactaaattgtgcaaggagcatgatggagaatttactggcgaagacgaaagcagtgcacatgcactagaacggaagagtgacaaccccctagatatagctgtaaccaggctggctgatttggagcggaacattgaaagaaggtatctgaagagccccttaagtaccaccattcagatcaaactggataatgtgggcacagttactgtccctgctcctgcaccatccgttagtggtgatggtgacgggtaggttattgagattaacttgaaaaattattgtgcttctttgctaattggagcctattttctattgcctgttatctatgtatcttcttgtatgtctgtgatccatacggatcatgctatttgcatggtgctttgtaaaaactttttttttgttatgtgcgttgataatcctgcaaagtgatcttacatctacctggttgtgactaagctttgaggcacgtagccacagtctgtgcactacatcaaatttagttgcttaaaccttatacttattggctgttacatgtttttgtcattgcttggctttcagtgtgatgattgtttcacattccgtaatcgtaagtgtggacatgacctacttaatttttctatatttcaatgcagaattgaagaggatattgctccagggctcagggtatggagaagggcattatcagaagctcgcagtgctgcacaggtagctctgtgcattcagcaattacagaaatcaatagcatgggaaaaatcaattatgaaagttgtaagtgtttttatttaagaaatattataactaatttactttgtcctgtttcttccaacctccagatctttcttaattatacattacctattgtcataataatgtatgctatacttgagagtt

SEQ ID NO: 371203 - DNA, 5756 bp, Homo sapiens
  misc_feature (4950)..(4950): n is a, c, g, or t
  misc_feature (5705)..(5705): n is a, c, g, or t
agaagaatcatctcctgcttcaatctgctgctggataggaactaatcagagagagagaagcggaagacggagaaggagggagtcgaaggctttcccgatcacaaatctcacctccactacaactctctttatacttttcttgcagaaataataatagaaataaggaggtggtggggtttccaaaaatcttaaccttcaaccatctggggaaaaggcaaaaatcccatctaccgcaactctcagttcgagagtaaaggtttcccaacagtgatgtcacaagattgaccacattgatcacaatatggagtctggagaacggttaccatcctcagcagcctcctctactacaccaacttcatcttcgacaccttctgtggcttcagtagtttcaaaaggtggcctttccactggagttgcttcacttagctctacaatcaacccatgtggacatttattcagaacagctggggatcaaccgtttaacctgtccacagtgtcgagtgccttcccaatggtcagccacccagtctttggtctacattcagccagctcagggcattcagaatttggtggtttggggacacttggtacacccacagccttagccgcacatccccaactagcatcttttccagcagaatggtggcgaacaactgatgctcatactcgtacaggagcaaccttctttccaccattactgggaattccaccactatttgctcccccagcccagaatcatgattcttcttcattccattcaaggacttcgggaaaaagtaatcgaaatggtcccgaaaaaggtgtaaatgggtcaataaatggaagtaatacatcatctgtaattggtatcaacacatctgtactatccactactgcttcaagttccatgggacaaactaaaagtacaagctcaggtggaggaaatcgaaaatgtaatcaggaacaaagcaaaaaccagcctttggatgctagagttgacaaaatcaaagataagaaaccaaggaagaaagcaatggaaagttctagcaacagtgatagtgattcaggcacatcatcagacacctcaagtgaaggcattagtagcagtgattcagatgatctagaagaagatgaagaagaagaagatcaaagtattgaagaaagtgaagatgatgattctgattcagagagtgaagcacaacataaaagtaacaaccaggtgctattacatggtatttcagacccaaaagcagatggacagaaagcaactgaaaaagcccaggaaaaaagaatacaccagccattacctcttgcgtctgaatcccagactcactcattccaatcccagcagaagcagcctcaggttttgtcacagcagcttccatttattttccaaagctctcaggcaaaggaggaatctgtgaacaaacacaccagtgtaatacagtctacgggattggtgtccaatgtgaaacctttatctttggtaaatcaagccaaaaaggaaacttacatgaaactcatagttccttctcctgatgttcttaaagcagggaataaaaatacctctgaagaatctagtttattgaccagtgaattgagatccaaacgggaacaatataaacaggcattcccatcacagttaaagaaacaagagtcatcgaagagcctgaagaaggttattgcagctttgtcaaatccaaaagcaacctctagttcaccagcacatccaaaacaaacattagaaaacaaccacccaaatccattcttgacaaatgcacttttaggtaatcaccaaccaaatggagttattcaaagtgtcattcaagaagctcctctagcacttactaccaaaactaaaatgcagagcaagattaatgaaaacattgctgctgcaagtagcacccctttttcctcacctgtaaatctgagtacaagtgggagaagaacccctggcaatcagacacctgtaatgccctctgcctctcccatcctgcatagtcaagggaaggaaaaagcagttagcaataatgtaaacccagtaaaaacacagcatcactcccatcctgcaaaatctttagtggaacaattcagaggaacagattcagacattcccagtagtaaagattctgaagattcaaatgaggatgaagaggaagatgatgaagaagaagatgaggaagatgatgaagatgatgaatctgatgacagccaatcaggcacttccaaaagaagaagagtaacagatgaacgtgaactgcgtattccattggaatatggctggcagagagagacaagaataagaaactttggagggcgccttcaaggagaagtagcatattatgctccatgtggaaagaaacttaggcagtaccctgaagtaataaagtatctcagcagaaatggaataatggatatctcaagggacaatttcagcttcagtgcaaaaataagagtgggtgacttctatgaagccagagatggaccgcagggaatgcagtggtgtcttttgaaagaagaggatgtcattcctcgtatcagggcaatggaaggtcgtagaggaagaccaccaaatccagatagacaacgagcaagagaggaatccaggatgagacgtcggaaaggtcgacctccaaatgttggcaatgctgaattcctagataacgcagatgcaaagttgctaagaaaactgcaagctcaagaaatagccaggcaagcagcacaaataaagcttttgagaaaacttcaaaagcaggaacaggctcgggttgctaaagaagccaaaaaacaacaagcaataatggctgctgaggagaagcggaagcaaaaagaacagataaagattatgaaacagcaggaaaaaattaagagaatacagcaaatcagaatggaaaaagaacttcgagctcagcaaattctagaggctaaaaagaaaaagaaggaagaagcggcaaatgccaaattattggaggccgagaaacgaataaaggaaaaagaaatgagaagacaacaagctgttcttctgaaacatcaggaacgagagcgaaggcgacaacacatgatgcttatgaaagctatggaagctcgtaaaaaagcagaagaaaaagagcggttgaaacaagaaaaacgtgatgagaaaagattaaataaagagcgtaaactagagcagcgaagattagaattagaaatggcaaaggaactaaagaagcctaatgaagacatgtgcttagcagaccaaaagcctttgccagagttgcctcgtattccaggacttgttctctctggaagtacattttcagactgtctcatggtggtgcagttcttacgaaactttggtaaagttttgggctttgatgtgaatattgatgttccaaacctgagtgttcttcaagagggattgctaaatataggggacagcatgggtgaagtacaagacttgcttgtgaggctcctctcagctgctgtatgtgatccaggtctaataacaggatacaaggctaaaacagctcttggagaacatttgctgaatgttggtgtgaatcgagacaatgtttccgagattttacagatatttatggaagcccactgtggacaaactgagcttactgaaagtctgaagaccaaagcttttcaggctcacactccagcacagaaagcttcagtcctggctttcctgatcaatgaactggcatgcagcaagagtgtggtcagtgaaatcgacaagaacattgattatatgtcaaacttgaggagagataaatgggtggtagaaggtaaactccgcaagctcagaatcattcatgctaagaaaacaggcaaaagagacacttcaggtggcattgatctgggagaagagcagcatcccttgggcacacccactccaggacgcaagcgaagaaggaagggaggagacagtgattatgacgatgatgatgacgatgacagtgatgaccaaggggatgaagatgatgaggatgaagaagataaagaagacaaaaaaggaaaaaagactgatatctgtgaagatgaggatgaaggtgaccaagcagcaagtgttgaagagctggaaaaacagattgaaaaactgagtaaacaacagagtcagtacagaaggaagctctttgatgcgtctcactcattgcgttcagtgatgtttggccaagatcgttacagacgccggtactggattcttccccaatgtggggggatttttgtagaaggcatggagagtggtgaaggactagaagaaattgcaaaagaaagagaaaaactgaaaaaggcagaaagtgtccagatcaaagaagaaatgtttgagacttctggggacagtttaaattgttcaaatacagatcactgtgaacaaaaggaagatcttaaagaaaaagataacacaaatctattccttcagaaacctggctctttttccaaattaagcaagcttttggaagtagctaagatgcctcctgagtcagaggttatgacccccaaaccaaatgctggtgcaaatgggtgcacgttgtcttatcagaacagtggaaaacattcactgggcagcgttcagtcaacagcaacgcaaagcaatgtggaaaaggcagactctaataatctgtttaatactggttcaagtggtccagggaagttctacagtcctctccccaatgaccagttactaaaaacgctgactgaaaagaatagacaatggtttagtcttttgccacgaacaccctgtgatgacacttcacttactcatgccgatatgtcaactgcttctttggtgactcctcagtctcagccaccatctaagtcaccttcacctaccccagctcctcttggatcttctgctcagaatcctgttggcttaaatccatttgctttatcacctcttcaggtgaaaggtggagtatctatgatgggacttcagttttgtggatggcccactggtgtggttacttctaatattccatttacatnatctgtacctagtctaggatcggggttagggttatcagaaggaaatggtaattcattcttgacttccaatgttgcttcaagtaaaagtgaatctccagtaccacagaatgaaaaggccacttcagctcaacctgcagctgttgaagtagcaaaaccagtagattttcctagtccaaaacctattccagaagaaatgcagtttggttggtggagaattattgacccagaggacctaaaagctttgctcaaagtgctgcatctcagaggaataagagaaaaggcattacaaaaacaaattcagaaacatttggattatattactcaagcctgcctcaagaataaggatgttgctattattgaactgaatgaaaatgaagaaaaccaagtaactcgagatattgtggagaactggtcagtagaagaacaagcaatggaaatggatttgagtgtccttcaacaggtagaagatctagaaaggagagttgcatcagcaagtttgcaagtgaagggttggatgtgtccagagcctgcatcagaaagggaggacttggtatattttgaacataaatcatttactaaattgtgcaaggagcatgatggagaatttactggcgaagacgaaagcagtgcacatgcactagaacggaagagtgacaaccccctagatatagctgtaaccaggctggctgatttggagcggaacattgaaagaaggtatctgaagagccccttaagtaccaccattcagatcaaanaataaatgtttgagacttctggggacaggttattgttctccagatccttgt

SEQ ID NO: 371204 - DNA, 2307 bp, Homo sapiens
ctaatgtcatgttaattatttcatatgttaatgtgtacatgcttctgaagtgtgtgcaaggcattctgcctctagctttgttctttgcagtgtacttgaaatgtgcatttaccccaatagaactgctcacccgtcatgtggtccatatctgtgtaacgaaagatacatagatgtgtatggctactgtatatttgtaagcaagcggaatgttcattactaatataaattaggaattatggtgtgtttaacatcccaataactattattcatggcagagcgttaattttaaatgatttttcatgtattatagtactgccaaatctgtcgaaagggagataatgaagaactgcttcttctttgtgatggctgtgacaaaggctgtcatacctactgccatagacccaagattacaacaatcccagatggagactggttttgtccagcttgcattgctaaggcaagtggtcaaactctaaaaatcaaaaaacttcatgtcaaaggaaaaaagactaatgagtcaaagaaaggcaagaaggtaactttaacaggagatactgaagatgaagactctgcatctacaagtagttcactaaaaagaggaaacaaagacctcaagaaaagaaaaatggaggaaaacacttctattaacttgtcaaaacaagaaagttttacttcagttaagaaacctaaaagagatgactccaaggacctagctctttgcagtatgattctgactgaaatggaaactcatgaggatgcatggccttttctacttcctgtaaacttgaaacttgttcctggttataagaaagttattaagaagcctatggatttttccacaattagagagaaactaagtagtggacagtatccaaaccttgaaacctttgctctagatgtcaggcttgtttttgacaactgtgaaacatttaatgaagatgattctgatataggcagagctggccacaatatgaggaagtattttgaaaaaaagtggacagatactttcaaagtgagctgaagttataataatctctttatttttttccttctaaacaaggacaaatgagaccagcaatgtgaactgtatttacataaacgtgcaaggcacatacataatgactttctttttccttaagtataaaaaaaaagtatcagaagaatgataccatttttaaaggcttcattcctacaacaaccaaggccctcggttattggtttgtgtgatttatcagctaatttaggtagaacagggaagcacacccaaagaattttcaaaggaaagggtgttatagtgcaatagcaattaaaatatatcaaatcgcactgaatactcaacaccagagctctaatgtgggaaatggttctcctttccctctcaataaatatctatttttcatttttttactttgtagtttattttttagtgaatgtatttaattttatgaattatttatgattaaaccacatccagaatcttcgttttctgtgaaaaggaagaactagaaaattgctttaaatcttgaaaatacaaggaatgttttaaaatataaaacaaagccaagttaaactgtttacactgatgtgctataaaagcaccaaaaagaaactttactgtagagttacaagtacatttatatatatatgttgctgcatcacttgtgtagttaaattgtatttcaaaacagtgaaaaaattgacatgtatatactgttcattcttgtttatattaagtcttgttttaaatatgtattatgtgtatatattgtttgcagacattattgttcatgccttagaggattgtagcattttattttcgtctgaaggtaatgatagctatacagtctgtacagtaattatcctctaccaacactgtggcgtctccttaatcttggtagtgcctgcctttgaaacagggtgtaggggatattagttttccatttttctattttgttatataattttaagccaccagggcctaaattaaagtataatcatttgtatccatgtggaataaaattgtgacaatttcctacgcacacagtattttttcatagaaacatttccctcccatttgccttgcctcagaaataaatttaaaagacgtttgtaaccactgtgttttatctactgtgtgttgtggtggcctgttggaggcaaatagatcagattttttttgtacctacgtaagagtacttgaagttttatttaaaataaaatgttgtggaaaaggtagcattctttttttaggagtgttatttttcactatgtgtggcacggatacaataaaagacttttacaaactaa

SEQ ID NO: 371205 - DNA, 211 bp, Homo sapiens
catgcagcaagagtgtggtcaggtgagcatatgcccaggcttttccgtgatttttccattttgaatttttctaatcaaaaagtaatacaaattgattatagaaaattggaaagttacagactagcacaaagaagaaaattaaaattgtacttatctcagtatttagagatggccactaataatattttcatgtatttctttgtagtgtatt

SEQ ID NO: 371206 - DNA, 407 bp, Homo sapiens
tgcaaattcaaacatgttacttccactttcctgctgtaaatcatttgcttgctggagccacactaaaatttgtgctaataactttatttaataagatatgtagttgcccatgttcattttatgtacctgcttgtattaataagtattttattcttataacttggcaaatgattgaacaaattttgaataacaaaatagtctaggtcaaatctaatattgatattaaatatatacagtcataagattattttgaaaattagagagtaagattaatgaaaagcaaaataattcaatgttgctacataattctaagtttattccaacatatataatgattaagaagaatatgtgtacatggttttctttttaaggaaaaagagcggttgaaacaagaaaaacgtgatgag

SEQ ID NO: 371207 - DNA, 7724 bp, Homo sapiens
  misc_feature (4950)..(4950): n is a, c, g, or t
agaagaatcatctcctgcttcaatctgctgctggataggaactaatcagagagagagaagcggaagacggagaaggagggagtcgaaggctttcccgatcacaaatctcacctccactacaactctctttatacttttcttgcagaaataataatagaaataaggaggtggtggggtttccaaaaatcttaaccttcaaccatctggggaaaaggcaaaaatcccatctaccgcaactctcagttcgagagtaaaggtttcccaacagtgatgtcacaagattgaccacattgatcacaatatggagtctggagaacggttaccatcctcagcagcctcctctactacaccaacttcatcttcgacaccttctgtggcttcagtagtttcaaaaggtggcctttccactggagttgcttcacttagctctacaatcaacccatgtggacatttattcagaacagctggggatcaaccgtttaacctgtccacagtgtcgagtgccttcccaatggtcagccacccagtctttggtctacattcagccagctcagggcattcagaatttggtggtttggggacacttggtacacccacagccttagccgcacatccccaactagcatcttttccagcagaatggtggcgaacaactgatgctcatactcgtacaggagcaaccttctttccaccattactgggaattccaccactatttgctcccccagcccagaatcatgattcttcttcattccattcaaggacttcgggaaaaagtaatcgaaatggtcccgaaaaaggtgtaaatgggtcaataaatggaagtaatacatcatctgtaattggtatcaacacatctgtactatccactactgcttcaagttccatgggacaaactaaaagtacaagctcaggtggaggaaatcgaaaatgtaatcaggaacaaagcaaaaaccagcctttggatgctagagttgacaaaatcaaagataagaaaccaaggaagaaagcaatggaaagttctagcaacagtgatagtgattcaggcacatcatcagacacctcaagtgaaggcattagtagcagtgattcagatgatctagaagaagatgaagaagaagaagatcaaagtattgaagaaagtgaagatgatgattctgattcagagagtgaagcacaacataaaagtaacaaccaggtgctattacatggtatttcagacccaaaagcagatggacagaaagcaactgaaaaagcccaggaaaaaagaatacaccagccattacctcttgcgtctgaatcccagactcactcattccaatcccagcagaagcagcctcaggttttgtcacagcagcttccatttattttccaaagctctcaggcaaaggaggaatctgtgaacaaacacaccagtgtaatacagtctacgggattggtgtccaatgtgaaacctttatctttggtaaatcaagccaaaaaggaaacttacatgaaactcatagttccttctcctgatgttcttaaagcagggaataaaaatacctctgaagaatctagtttattgaccagtgaattgagatccaaacgggaacaatataaacaggcattcccatcacagttaaagaaacaagagtcatcgaagagcctgaagaaggttattgcagctttgtcaaatccaaaagcaacctctagttcaccagcacatccaaaacaaacattagaaaacaaccacccaaatccattcttgacaaatgcacttttaggtaatcaccaaccaaatggagttattcaaagtgtcattcaagaagctcctctagcacttactaccaaaactaaaatgcagagcaagattaatgaaaacattgctgctgcaagtagcacccctttttcctcacctgtaaatctgagtacaagtgggagaagaacccctggcaatcagacacctgtaatgccctctgcctctcccatcctgcatagtcaagggaaggaaaaagcagttagcaataatgtaaacccagtaaaaacacagcatcactcccatcctgcaaaatctttagtggaacaattcagaggaacagattcagacattcccagtagtaaagattctgaagattcaaatgaggatgaagaggaagatgatgaagaagaagatgaggaagatgatgaagatgatgaatctgatgacagccaatcaggcacttccaaaagaagaagagtaacagatgaacgtgaactgcgtattccattggaatatggctggcagagagagacaagaataagaaactttggagggcgccttcaaggagaagtagcatattatgctccatgtggaaagaaacttaggcagtaccctgaagtaataaagtatctcagcagaaatggaataatggatatctcaagggacaatttcagcttcagtgcaaaaataagagtgggtgacttctatgaagccagagatggaccgcagggaatgcagtggtgtcttttgaaagaagaggatgtcattcctcgtatcagggcaatggaaggtcgtagaggaagaccaccaaatccagatagacaacgagcaagagaggaatccaggatgagacgtcggaaaggtcgacctccaaatgttggcaatgctgaattcctagataacgcagatgcaaagttgctaagaaaactgcaagctcaagaaatagccaggcaagcagcacaaataaagcttttgagaaaacttcaaaagcaggaacaggctcgggttgctaaagaagccaaaaaacaacaagcaataatggctgctgaggagaagcggaagcaaaaagaacagataaagattatgaaacagcaggaaaaaattaagagaatacagcaaatcagaatggaaaaagaacttcgagctcagcaaattctagaggctaaaaagaaaaagaaggaagaagcggcaaatgccaaattattggaggccgagaaacgaataaaggaaaaagaaatgagaagacaacaagctgttcttctgaaacatcaggaacgagagcgaaggcgacaacacatgatgcttatgaaagctatggaagctcgtaaaaaagcagaagaaaaagagcggttgaaacaagaaaaacgtgatgagaaaagattaaataaagagcgtaaactagagcagcgaagattagaattagaaatggcaaaggaactaaagaagcctaatgaagacatgtgcttagcagaccaaaagcctttgccagagttgcctcgtattccaggacttgttctctctggaagtacattttcagactgtctcatggtggtgcagttcttacgaaactttggtaaagttttgggctttgatgtgaatattgatgttccaaacctgagtgttcttcaagagggattgctaaatataggggacagcatgggtgaagtacaagacttgcttgtgaggctcctctcagctgctgtatgtgatccaggtctaataacaggatacaaggctaaaacagctcttggagaacatttgctgaatgttggtgtgaatcgagacaatgtttccgagattttacagatatttatggaagcccactgtggacaaactgagcttactgaaagtctgaagaccaaagcttttcaggctcacactccagcacagaaagcttcagtcctggctttcctgatcaatgaactggcatgcagcaagagtgtggtcagtgaaatcgacaagaacattgattatatgtcaaacttgaggagagataaatgggtggtagaaggtaaactccgcaagctcagaatcattcatgctaagaaaacaggcaaaagagacacttcaggtggcattgatctgggagaagagcagcatcccttgggcacacccactccaggacgcaagcgaagaaggaagggaggagacagtgattatgacgatgatgatgacgatgacagtgatgaccaaggggatgaagatgatgaggatgaagaagataaagaagacaaaaaaggaaaaaagactgatatctgtgaagatgaggatgaaggtgaccaagcagcaagtgttgaagagctggaaaaacagattgaaaaactgagtaaacaacagagtcagtacagaaggaagctctttgatgcgtctcactcattgcgttcagtgatgtttggccaagatcgttacagacgccggtactggattcttccccaatgtggggggatttttgtagaaggcatggagagtggtgaaggactagaagaaattgcaaaagaaagagaaaaactgaaaaaggcagaaagtgtccagatcaaagaagaaatgtttgagacttctggggacagtttaaattgttcaaatacagatcactgtgaacaaaaggaagatcttaaagaaaaagataacacaaatctattccttcagaaacctggctctttttccaaattaagcaagcttttggaagtagctaagatgcctcctgagtcagaggttatgacccccaaaccaaatgctggtgcaaatgggtgcacgttgtcttatcagaacagtggaaaacattcactgggcagcgttcagtcaacagcaacgcaaagcaatgtggaaaaggcagactctaataatctgtttaatactggttcaagtggtccagggaagttctacagtcctctccccaatgaccagttactaaaaacgctgactgaaaagaatagacaatggtttagtcttttgccacgaacaccctgtgatgacacttcacttactcatgccgatatgtcaactgcttctttggtgactcctcagtctcagccaccatctaagtcaccttcacctaccccagctcctcttggatcttctgctcagaatcctgttggcttaaatccatttgctttatcacctcttcaggtgaaaggtggagtatctatgatgggacttcagttttgtggatggcccactggtgtggttacttctaatattccatttacatnatctgtacctagtctaggatcggggttagggttatcagaaggaaatggtaattcattcttgacttccaatgttgcttcaagtaaaagtgaatctccagtaccacagaatgaaaaggccacttcagctcaacctgcagctgttgaagtagcaaaaccagtagattttcctagtccaaaacctattccagaagaaatgcagtttggttggtggagaattattgacccagaggacctaaaagctttgctcaaagtgctgcatctcagaggaataagagaaaaggcattacaaaaacaaattcagaaacatttggattatattactcaagcctgcctcaagaataaggatgttgctattattgaactgaatgaaaatgaagaaaaccaagtaactcgagatattgtggagaactggtcagtagaagaacaagcaatggaaatggatttgagtgtccttcaacaggtagaagatctagaaaggagagttgcatcagcaagtttgcaagtgaagggttggatgtgtccagagcctgcatcagaaagggaggacttggtatattttgaacataaatcatttactaaattgtgcaaggagcatgatggagaatttactggcgaagacgaaagcagtgcacatgcactagaacggaagagtgacaaccccctagatatagctgtaaccaggctggctgatttggagcggaacattgaaagaagaattgaagaggatattgctccagggctcagggtatggagaagggcattatcagaagctcgcagtgctgcacaggtagctctgtgcattcagcaattacagaaatcaatagcatgggaaaaatcaattatgaaagtttactgccaaatctgtcgaaagggagataatgaagaactgcttcttctttgtgatggctgtgacaaaggctgtcatacctactgccatagacccaagattacaacaatcccagatggagactggttttgtccagcttgcattgctaaggcaagtggtcaaactctaaaaatcaaaaaacttcatgtcaaaggaaaaaagactaatgagtcaaagaaaggcaagaaggtaactttaacaggagatactgaagatgaagactctgcatctacaagtagttcactaaaaagaggaaacaaagacctcaagaaaagaaaaatggaggaaaacacttctattaacttgtcaaaacaagaaagttttacttcagttaagaaacctaaaagagatgactccaaggacctagctctttgcagtatgattctgactgaaatggaaactcatgaggatgcatggccttttctacttcctgtaaacttgaaacttgttcctggttataagaaagttattaagaagcctatggatttttccacaattagagagaaactaagtagtggacagtatccaaaccttgaaacctttgctctagatgtcaggcttgtttttgacaactgtgaaacatttaatgaagatgattctgatataggcagagctggccacaatatgaggaagtattttgaaaaaaagtggacagatactttcaaagtgagctgaagttataataatctctttatttttttccttctaaacaaggacaaatgagaccagcaatgtgaactgtatttacataaacgtgcaaggcacatacataatgactttctttttccttaagtataaaaaaaaagtatcagaagaatgataccatttttaaaggcttcattcctacaacaaccaaggccctcggttattggtttgtgtgatttatcagctaatttaggtagaacagggaagcacacccaaagaattttcaaaggaaagggtgttatagtgcaatagcaattaaaatatatcaaatcgcactgaatactcaacaccagagctctaatgtgggaaatggttctcctttccctctcaataaatatctatttttcatttttttactttgtagtttattttttagtgaatgtatttaattttatgaattatttatgattaaaccacatccagaatcttcgttttctgtgaaaaggaagaactagaaaattgctttaaatcttgaaaatacaaggaatgttttaaaatataaaacaaagccaagttaaactgtttacactgatgtgctataaaagcaccaaaaagaaactttactgtagagttacaagtacatttatatatatatgttgctgcatcacttgtgtagttaaattgtatttcaaaacagtgaaaaaattgacatgtatatactgttcattcttgtttatattaagtcttgttttaaatatgtattatgtgtatatattgtttgcagacattattgttcatgccttagaggattgtagcattttattttcgtctgaaggtaatgatagctatacagtctgtacagtaattatcctctaccaacactgtggcgtctccttaatcttggtagtgcctgcctttgaaacagggtgtaggggatattagttttccatttttctattttgttatataattttaagccaccagggcctaaattaaagtataatcatttgtatccatgtggaataaaattgtgacaatttcctacgcacacagtattttttcatagaaacatttccctcccatttgccttgcctcagaaataaatttaaaagacgtttgtaaccactgtgttttatctactgtgtgttgtggtggcctgttggaggcaaatagatcagattttttttgtacctacgtaagagtacttgaagttttatttaaaataaaatgttgtggaaaaggt

SEQ ID NO: 371208 - DNA, 7916 bp, Homo sapiens
  misc_feature (5142)..(5142): n is a, c, g, or t
agaagaatcatctcctgcttcaatctgctgctggataggaactaatcagagagagagaagcggaagacggagaaggagggagtcgaaggctttcccgatcacaaatctcacctccactacaactctctttatacttttcttgcagaaataataatagaaataaggaggtggtggggtttccaaaaatcttaaccttcaaccatctggggaaaaggcaaaaatcccatctaccgcaactctcagttcgagagtaaaggtttcccaacagtgatgtcacaagattgaccacattgatcacaatatggagtctggagaacggttaccatcctcagcagcctcctctactacaccaacttcatcttcgacaccttctgtggcttcagtagtttcaaaaggtggcctttccactggagttgcttcacttagctctacaatcaacccatgtggacatttattcagaacagctggggatcaaccgtttaacctgtccacagtgtcgagtgccttcccaatggtcagccacccagtctttggtctacattcagccagctcagggcattcagaatttggtggtttggggacacttggtacacccacagccttagccgcacatccccaactagcatcttttccagcagaatggtggcgaacaactgatgctcatactcgtacaggagcaaccttctttccaccattactgggaattccaccactatttgctcccccagcccagaatcatgattcttcttcattccattcaaggacttcgggaaaaagtaatcgaaatggtcccgaaaaaggtgtaaatgggtcaataaatggaagtaatacatcatctgtaattggtatcaacacatctgtactatccactactgcttcaagttccatgggacaaactaaaagtacaagctcaggtggaggaaatcgaaaatgtaatcaggaacaaagcaaaaaccagcctttggatgctagagttgacaaaatcaaagataagaaaccaaggaagaaagcaatggaaagttctagcaacagtgatagtgattcaggcacatcatcagacacctcaagtgaaggcattagtagcagtgattcagatgatctagaagaagatgaagaagaagaagatcaaagtattgaagaaagtgaagatgatgattctgattcagagagtgaagcacaacataaaagtaacaaccaggtgctattacatggtatttcagacccaaaagcagatggacagaaagcaactgaaaaagcccaggaaaaaagaatacaccagccattacctcttgcgtctgaatcccagactcactcattccaatcccagcagaagcagcctcaggttttgtcacagcagcttccatttattttccaaagctctcaggcaaaggaggaatctgtgaacaaacacaccagtgtaatacagtctacgggattggtgtccaatgtgaaacctttatctttggtaaatcaagccaaaaaggaaacttacatgaaactcatagttccttctcctgatgttcttaaagcagggaataaaaatacctctgaagaatctagtttattgaccagtgaattgagatccaaacgggaacaatataaacaggcattcccatcacagttaaagaaacaagagtcatcgaagagcctgaagaaggttattgcagctttgtcaaatccaaaagcaacctctagttcaccagcacatccaaaacaaacattagaaaacaaccacccaaatccattcttgacaaatgcacttttaggtaatcaccaaccaaatggagttattcaaagtgtcattcaagaagctcctctagcacttactaccaaaactaaaatgcagagcaagattaatgaaaacattgctgctgcaagtagcacccctttttcctcacctgtaaatctgagtacaagtgggagaagaacccctggcaatcagacacctgtaatgccctctgcctctcccatcctgcatagtcaagggaaggaaaaagcagttagcaataatgtaaacccagtaaaaacacagcatcactcccatcctgcaaaatctttagtggaacaattcagaggaacagattcagacattcccagtagtaaagattctgaagattcaaatgaggatgaagaggaagatgatgaagaagaagatgaggaagatgatgaagatgatgaatctgatgacagccaatcagaatcagatagtaattcagaatcagatacagaaggatcagaagaagaagatgatgatgataaagaccaagatgaatcagatagtgatactgaaggagagaaaacttcaatgaaactgaataaaacaacttcctctgtcaaaagcccttccatgagtctcacaggtcactcaacacctcgtaacctccacatagcaaaagccccaggctctgctcctgctgccttatgttctgaatcccagtcacctgcttttcttggtacatcttcttccacacttacttcaagcccacactctggcacttccaaaagaagaagagtaacagatgaacgtgaactgcgtattccattggaatatggctggcagagagagacaagaataagaaactttggagggcgccttcaaggagaagtagcatattatgctccatgtggaaagaaacttaggcagtaccctgaagtaataaagggaatgcagtggtgtcttttgaaagaagaggatgtcattcctcgtatcagggcaatggaaggtcgtagaggaagaccaccaaatccagatagacaacgagcaagagaggaatccaggatgagacgtcggaaaggtcgacctccaaatgttggcaatgctgaattcctagataacgcagatgcaaagttgctaagaaaactgcaagctcaagaaatagccaggcaagcagcacaaataaagcttttgagaaaacttcaaaagcaggaacaggctcgggttgctaaagaagccaaaaaacaacaagcaataatggctgctgaggagaagcggaagcaaaaagaacagataaagattatgaaacagcaggaaaaaattaagagaatacagcaaatcagaatggaaaaagaacttcgagctcagcaaattctagaggctaaaaagaaaaagaaggaagaagcggcaaatgccaaattattggaggccgagaaacgaataaaggaaaaagaaatgagaagacaacaagctgttcttctgaaacatcaggaacgagagcgaaggcgacaacacatgatgcttatgaaagctatggaagctcgtaaaaaagcagaagaaaaagagcggttgaaacaagaaaaacgtgatgagaaaagattaaataaagagcgtaaactagagcagcgaagattagaattagaaatggcaaaggaactaaagaagcctaatgaagacatgtgcttagcagaccaaaagcctttgccagagttgcctcgtattccaggacttgttctctctggaagtacattttcagactgtctcatggtggtgcagttcttacgaaactttggtaaagttttgggctttgatgtgaatattgatgttccaaacctgagtgttcttcaagagggattgctaaatataggggacagcatgggtgaagtacaagacttgcttgtgaggctcctctcagctgctgtatgtgatccaggtctaataacaggatacaaggctaaaacagctcttggagaacatttgctgaatgttggtgtgaatcgagacaatgtttccgagattttacagatatttatggaagcccactgtggacaaactgagcttactgaaagtctgaagaccaaagcttttcaggctcacactccagcacagaaagcttcagtcctggctttcctgatcaatgaactggcatgcagcaagagtgtggtcagtgaaatcgacaagaacattgattatatgtcaaacttgaggagagataaatgggtggtagaaggtaaactccgcaagctcagaatcattcatgctaagaaaacaggcaaaagagacacttcaggtggcattgatctgggagaagagcagcatcccttgggcacacccactccaggacgcaagcgaagaaggaagggaggagacagtgattatgacgatgatgatgacgatgacagtgatgaccaaggggatgaagatgatgaggatgaagaagataaagaagacaaaaaaggaaaaaagactgatatctgtgaagatgaggatgaaggtgaccaagcagcaagtgttgaagagctggaaaaacagattgaaaaactgagtaaacaacagagtcagtacagaaggaagctctttgatgcgtctcactcattgcgttcagtgatgtttggccaagatcgttacagacgccggtactggattcttccccaatgtggggggatttttgtagaaggcatggagagtggtgaaggactagaagaaattgcaaaagaaagagaaaaactgaaaaaggcagaaagtgtccagatcaaagaagaaatgtttgagacttctggggacagtttaaattgttcaaatacagatcactgtgaacaaaaggaagatcttaaagaaaaagataacacaaatctattccttcagaaacctggctctttttccaaattaagcaagcttttggaagtagctaagatgcctcctgagtcagaggttatgacccccaaaccaaatgctggtgcaaatgggtgcacgttgtcttatcagaacagtggaaaacattcactgggcagcgttcagtcaacagcaacgcaaagcaatgtggaaaaggcagactctaataatctgtttaatactggttcaagtggtccagggaagttctacagtcctctccccaatgaccagttactaaaaacgctgactgaaaagaatagacaatggtttagtcttttgccacgaacaccctgtgatgacacttcacttactcatgccgatatgtcaactgcttctttggtgactcctcagtctcagccaccatctaagtcaccttcacctaccccagctcctcttggatcttctgctcagaatcctgttggcttaaatccatttgctttatcacctcttcaggtgaaaggtggagtatctatgatgggacttcagttttgtggatggcccactggtgtggttacttctaatattccatttacatnatctgtacctagtctaggatcggggttagggttatcagaaggaaatggtaattcattcttgacttccaatgttgcttcaagtaaaagtgaatctccagtaccacagaatgaaaaggccacttcagctcaacctgcagctgttgaagtagcaaaaccagtagattttcctagtccaaaacctattccagaagaaatgcagtttggttggtggagaattattgacccagaggacctaaaagctttgctcaaagtgctgcatctcagaggaataagagaaaaggcattacaaaaacaaattcagaaacatttggattatattactcaagcctgcctcaagaataaggatgttgctattattgaactgaatgaaaatgaagaaaaccaagtaactcgagatattgtggagaactggtcagtagaagaacaagcaatggaaatggatttgagtgtccttcaacaggtagaagatctagaaaggagagttgcatcagcaagtttgcaagtgaagggttggatgtgtccagagcctgcatcagaaagggaggacttggtatattttgaacataaatcatttactaaattgtgcaaggagcatgatggagaatttactggcgaagacgaaagcagtgcacatgcactagaacggaagagtgacaaccccctagatatagctgtaaccaggctggctgatttggagcggaacattgaaagaagaattgaagaggatattgctccagggctcagggtatggagaagggcattatcagaagctcgcagtgctgcacaggtagctctgtgcattcagcaattacagaaatcaatagcatgggaaaaatcaattatgaaagtttactgccaaatctgtcgaaagggagataatgaagaactgcttcttctttgtgatggctgtgacaaaggctgtcatacctactgccatagacccaagattacaacaatcccagatggagactggttttgtccagcttgcattgctaaggcaagtggtcaaactctaaaaatcaaaaaacttcatgtcaaaggaaaaaagactaatgagtcaaagaaaggcaagaaggtaactttaacaggagatactgaagatgaagactctgcatctacaagtagttcactaaaaagaggaaacaaagacctcaagaaaagaaaaatggaggaaaacacttctattaacttgtcaaaacaagaaagttttacttcagttaagaaacctaaaagagatgactccaaggacctagctctttgcagtatgattctgactgaaatggaaactcatgaggatgcatggccttttctacttcctgtaaacttgaaacttgttcctggttataagaaagttattaagaagcctatggatttttccacaattagagagaaactaagtagtggacagtatccaaaccttgaaacctttgctctagatgtcaggcttgtttttgacaactgtgaaacatttaatgaagatgattctgatataggcagagctggccacaatatgaggaagtattttgaaaaaaagtggacagatactttcaaagtgagctgaagttataataatctctttatttttttccttctaaacaaggacaaatgagaccagcaatgtgaactgtatttacataaacgtgcaaggcacatacataatgactttctttttccttaagtataaaaaaaaagtatcagaagaatgataccatttttaaaggcttcattcctacaacaaccaaggccctcggttattggtttgtgtgatttatcagctaatttaggtagaacagggaagcacacccaaagaattttcaaaggaaagggtgttatagtgcaatagcaattaaaatatatcaaatcgcactgaatactcaacaccagagctctaatgtgggaaatggttctcctttccctctcaataaatatctatttttcatttttttactttgtagtttattttttagtgaatgtatttaattttatgaattatttatgattaaaccacatccagaatcttcgttttctgtgaaaaggaagaactagaaaattgctttaaatcttgaaaatacaaggaatgttttaaaatataaaacaaagccaagttaaactgtttacactgatgtgctataaaagcaccaaaaagaaactttactgtagagttacaagtacatttatatatatatgttgctgcatcacttgtgtagttaaattgtatttcaaaacagtgaaaaaattgacatgtatatactgttcattcttgtttatattaagtcttgttttaaatatgtattatgtgtatatattgtttgcagacattattgttcatgccttagaggattgtagcattttattttcgtctgaaggtaatgatagctatacagtctgtacagtaattatcctctaccaacactgtggcgtctccttaatcttggtagtgcctgcctttgaaacagggtgtaggggatattagttttccatttttctattttgttatataattttaagccaccagggcctaaattaaagtataatcatttgtatccatgtggaataaaattgtgacaatttcctacgcacacagtattttttcatagaaacatttccctcccatttgccttgcctcagaaataaatttaaaagacgtttgtaaccactgtgttttatctactgtgtgttgtggtggcctgttggaggcaaatagatcagattttttttgtacctacgtaagagtacttgaagttttatttaaaataaaatgttgtggaaaaggt

SEQ ID NO: 371209 - DNA, 8279 bp, Homo sapiens
  misc_feature (5505)..(5505): n is a, c, g, or t
agaagaatcatctcctgcttcaatctgctgctggataggaactaatcagagagagagaagcggaagacggagaaggagggagtcgaaggctttcccgatcacaaatctcacctccactacaactctctttatacttttcttgcagaaataataatagaaataaggaggtggtggggtttccaaaaatcttaaccttcaaccatctggggaaaaggcaaaaatcccatctaccgcaactctcagttcgagagtaaaggtgagtttaaaatcctcgggcgtgaggggtgcgggtgaggatgtaaattcccagtgttacaaagccggtggaaacagcagcggagaaactgcgctcgggcaagcgggggactccggagttgctgcgtggaggcgctcgccccgccgccctctcgccctccgccgctgtttatcctcgccggtcggtgcggctctttgttgtggtggccggaaggctggggtggttctcggggtcccgagtggagtttgggggaggaggacacggagatgtgccgtcctgggtgggaggtggggggtgcggcctcaggagaacgtaaactttattcctagaagccggtgcgggacttcgctggagtagggccgtgggttgtgctcccggccgggcaggcgctgccgccgcgagtccgccgcctttgtgccggccgccctggcttcgcgtctccttcctcttccccttcggcttccagcgctcaggtcgccgccaacagttttgcttctgggaaggtctatgtcagcacgcagaaggtttgaggagcattgcttctcatacagtaaggtttcccaacagtgatgtcacaagattgaccacattgatcacaatatggagtctggagaacggttaccatcctcagcagcctcctctactacaccaacttcatcttcgacaccttctgtggcttcagtagtttcaaaaggtggcctttccactggagttgcttcacttagctctacaatcaacccatgtggacatttattcagaacagctggggatcaaccgtttaacctgtccacagtgtcgagtgccttcccaatggtcagccacccagtctttggtctacattcagccagctcagggcattcagaatttggtggtttggggacacttggtacacccacagccttagccgcacatccccaactagcatcttttccagcagaatggtggcgaacaactgatgctcatactcgtacaggagcaaccttctttccaccattactgggaattccaccactatttgctcccccagcccagaatcatgattcttcttcattccattcaaggacttcgggaaaaagtaatcgaaatggtcccgaaaaaggtgtaaatgggtcaataaatggaagtaatacatcatctgtaattggtatcaacacatctgtactatccactactgcttcaagttccatgggacaaactaaaagtacaagctcaggtggaggaaatcgaaaatgtaatcaggaacaaagcaaaaaccagcctttggatgctagagttgacaaaatcaaagataagaaaccaaggaagaaagcaatggaaagttctagcaacagtgatagtgattcaggcacatcatcagacacctcaagtgaaggcattagtagcagtgattcagatgatctagaagaagatgaagaagaagaagatcaaagtattgaagaaagtgaagatgatgattctgattcagagagtgaagcacaacataaaagtaacaaccaggtgctattacatggtatttcagacccaaaagcagatggacagaaagcaactgaaaaagcccaggaaaaaagaatacaccagccattacctcttgcgtctgaatcccagactcactcattccaatcccagcagaagcagcctcaggttttgtcacagcagcttccatttattttccaaagctctcaggcaaaggaggaatctgtgaacaaacacaccagtgtaatacagtctacgggattggtgtccaatgtgaaacctttatctttggtaaatcaagccaaaaaggaaacttacatgaaactcatagttccttctcctgatgttcttaaagcagggaataaaaatacctctgaagaatctagtttattgaccagtgaattgagatccaaacgggaacaatataaacaggcattcccatcacagttaaagaaacaagagtcatcgaagagcctgaagaaggttattgcagctttgtcaaatccaaaagcaacctctagttcaccagcacatccaaaacaaacattagaaaacaaccacccaaatccattcttgacaaatgcacttttaggtaatcaccaaccaaatggagttattcaaagtgtcattcaagaagctcctctagcacttactaccaaaactaaaatgcagagcaagattaatgaaaacattgctgctgcaagtagcacccctttttcctcacctgtaaatctgagtacaagtgggagaagaacccctggcaatcagacacctgtaatgccctctgcctctcccatcctgcatagtcaagggaaggaaaaagcagttagcaataatgtaaacccagtaaaaacacagcatcactcccatcctgcaaaatctttagtggaacaattcagaggaacagattcagacattcccagtagtaaagattctgaagattcaaatgaggatgaagaggaagatgatgaagaagaagatgaggaagatgatgaagatgatgaatctgatgacagccaatcaggcacttccaaaagaagaagagtaacagatgaacgtgaactgcgtattccattggaatatggctggcagagagagacaagaataagaaactttggagggcgccttcaaggagaagtagcatattatgctccatgtggaaagaaacttaggcagtaccctgaagtaataaagtatctcagcagaaatggaataatggatatctcaagggacaatttcagcttcagtgcaaaaataagagtgggtgacttctatgaagccagagatggaccgcagggaatgcagtggtgtcttttgaaagaagaggatgtcattcctcgtatcagggcaatggaaggtcgtagaggaagaccaccaaatccagatagacaacgagcaagagaggaatccaggatgagacgtcggaaaggtcgacctccaaatgttggcaatgctgaattcctagataacgcagatgcaaagttgctaagaaaactgcaagctcaagaaatagccaggcaagcagcacaaataaagcttttgagaaaacttcaaaagcaggaacaggctcgggttgctaaagaagccaaaaaacaacaagcaataatggctgctgaggagaagcggaagcaaaaagaacagataaagattatgaaacagcaggaaaaaattaagagaatacagcaaatcagaatggaaaaagaacttcgagctcagcaaattctagaggctaaaaagaaaaagaaggaagaagcggcaaatgccaaattattggaggccgagaaacgaataaaggaaaaagaaatgagaagacaacaagctgttcttctgaaacatcaggaacgagagcgaaggcgacaacacatgatgcttatgaaagctatggaagctcgtaaaaaagcagaagaaaaagagcggttgaaacaagaaaaacgtgatgagaaaagattaaataaagagcgtaaactagagcagcgaagattagaattagaaatggcaaaggaactaaagaagcctaatgaagacatgtgcttagcagaccaaaagcctttgccagagttgcctcgtattccaggacttgttctctctggaagtacattttcagactgtctcatggtggtgcagttcttacgaaactttggtaaagttttgggctttgatgtgaatattgatgttccaaacctgagtgttcttcaagagggattgctaaatataggggacagcatgggtgaagtacaagacttgcttgtgaggctcctctcagctgctgtatgtgatccaggtctaataacaggatacaaggctaaaacagctcttggagaacatttgctgaatgttggtgtgaatcgagacaatgtttccgagattttacagatatttatggaagcccactgtggacaaactgagcttactgaaagtctgaagaccaaagcttttcaggctcacactccagcacagaaagcttcagtcctggctttcctgatcaatgaactggcatgcagcaagagtgtggtcagtgaaatcgacaagaacattgattatatgtcaaacttgaggagagataaatgggtggtagaaggtaaactccgcaagctcagaatcattcatgctaagaaaacaggcaaaagagacacttcaggtggcattgatctgggagaagagcagcatcccttgggcacacccactccaggacgcaagcgaagaaggaagggaggagacagtgattatgacgatgatgatgacgatgacagtgatgaccaaggggatgaagatgatgaggatgaagaagataaagaagacaaaaaaggaaaaaagactgatatctgtgaagatgaggatgaaggtgaccaagcagcaagtgttgaagagctggaaaaacagattgaaaaactgagtaaacaacagagtcagtacagaaggaagctctttgatgcgtctcactcattgcgttcagtgatgtttggccaagatcgttacagacgccggtactggattcttccccaatgtggggggatttttgtagaaggcatggagagtggtgaaggactagaagaaattgcaaaagaaagagaaaaactgaaaaaggcagaaagtgtccagatcaaagaagaaatgtttgagacttctggggacagtttaaattgttcaaatacagatcactgtgaacaaaaggaagatcttaaagaaaaagataacacaaatctattccttcagaaacctggctctttttccaaattaagcaagcttttggaagtagctaagatgcctcctgagtcagaggttatgacccccaaaccaaatgctggtgcaaatgggtgcacgttgtcttatcagaacagtggaaaacattcactgggcagcgttcagtcaacagcaacgcaaagcaatgtggaaaaggcagactctaataatctgtttaatactggttcaagtggtccagggaagttctacagtcctctccccaatgaccagttactaaaaacgctgactgaaaagaatagacaatggtttagtcttttgccacgaacaccctgtgatgacacttcacttactcatgccgatatgtcaactgcttctttggtgactcctcagtctcagccaccatctaagtcaccttcacctaccccagctcctcttggatcttctgctcagaatcctgttggcttaaatccatttgctttatcacctcttcaggtgaaaggtggagtatctatgatgggacttcagttttgtggatggcccactggtgtggttacttctaatattccatttacatnatctgtacctagtctaggatcggggttagggttatcagaaggaaatggtaattcattcttgacttccaatgttgcttcaagtaaaagtgaatctccagtaccacagaatgaaaaggccacttcagctcaacctgcagctgttgaagtagcaaaaccagtagattttcctagtccaaaacctattccagaagaaatgcagtttggttggtggagaattattgacccagaggacctaaaagctttgctcaaagtgctgcatctcagaggaataagagaaaaggcattacaaaaacaaattcagaaacatttggattatattactcaagcctgcctcaagaataaggatgttgctattattgaactgaatgaaaatgaagaaaaccaagtaactcgagatattgtggagaactggtcagtagaagaacaagcaatggaaatggatttgagtgtccttcaacaggtagaagatctagaaaggagagttgcatcagcaagtttgcaagtgaagggttggatgtgtccagagcctgcatcagaaagggaggacttggtatattttgaacataaatcatttactaaattgtgcaaggagcatgatggagaatttactggcgaagacgaaagcagtgcacatgcactagaacggaagagtgacaaccccctagatatagctgtaaccaggctggctgatttggagcggaacattgaaagaagaattgaagaggatattgctccagggctcagggtatggagaagggcattatcagaagctcgcagtgctgcacaggtagctctgtgcattcagcaattacagaaatcaatagcatgggaaaaatcaattatgaaagtttactgccaaatctgtcgaaagggagataatgaagaactgcttcttctttgtgatggctgtgacaaaggctgtcatacctactgccatagacccaagattacaacaatcccagatggagactggttttgtccagcttgcattgctaaggcaagtggtcaaactctaaaaatcaaaaaacttcatgtcaaaggaaaaaagactaatgagtcaaagaaaggcaagaaggtaactttaacaggagatactgaagatgaagactctgcatctacaagtagttcactaaaaagaggaaacaaagacctcaagaaaagaaaaatggaggaaaacacttctattaacttgtcaaaacaagaaagttttacttcagttaagaaacctaaaagagatgactccaaggacctagctctttgcagtatgattctgactgaaatggaaactcatgaggatgcatggccttttctacttcctgtaaacttgaaacttgttcctggttataagaaagttattaagaagcctatggatttttccacaattagagagaaactaagtagtggacagtatccaaaccttgaaacctttgctctagatgtcaggcttgtttttgacaactgtgaaacatttaatgaagatgattctgatataggcagagctggccacaatatgaggaagtattttgaaaaaaagtggacagatactttcaaagtgagctgaagttataataatctctttatttttttccttctaaacaaggacaaatgagaccagcaatgtgaactgtatttacataaacgtgcaaggcacatacataatgactttctttttccttaagtataaaaaaaaagtatcagaagaatgataccatttttaaaggcttcattcctacaacaaccaaggccctcggttattggtttgtgtgatttatcagctaatttaggtagaacagggaagcacacccaaagaattttcaaaggaaagggtgttatagtgcaatagcaattaaaatatatcaaatcgcactgaatactcaacaccagagctctaatgtgggaaatggttctcctttccctctcaataaatatctatttttcatttttttactttgtagtttattttttagtgaatgtatttaattttatgaattatttatgattaaaccacatccagaatcttcgttttctgtgaaaaggaagaactagaaaattgctttaaatcttgaaaatacaaggaatgttttaaaatataaaacaaagccaagttaaactgtttacactgatgtgctataaaagcaccaaaaagaaactttactgtagagttacaagtacatttatatatatatgttgctgcatcacttgtgtagttaaattgtatttcaaaacagtgaaaaaattgacatgtatatactgttcattcttgtttatattaagtcttgttttaaatatgtattatgtgtatatattgtttgcagacattattgttcatgccttagaggattgtagcattttattttcgtctgaaggtaatgatagctatacagtctgtacagtaattatcctctaccaacactgtggcgtctccttaatcttggtagtgcctgcctttgaaacagggtgtaggggatattagttttccatttttctattttgttatataattttaagccaccagggcctaaattaaagtataatcatttgtatccatgtggaataaaattgtgacaatttcctacgcacacagtattttttcatagaaacatttccctcccatttgccttgcctcagaaataaatttaaaagacgtttgtaaccactgtgttttatctactgtgtgttgtggtggcctgttggaggcaaatagatcagattttttttgtacctacgtaagagtacttgaagttttatttaaaataaaatgttgtggaaaaggt

SEQ ID NO: 371210 - DNA, 7979 bp, Homo sapiens
  misc_feature (5205)..(5205): n is a, c, g, or t
agaagaatcatctcctgcttcaatctgctgctggataggaactaatcagagagagagaagcggaagacggagaaggagggagtcgaaggctttcccgatcacaaatctcacctccactacaactctctttatacttttcttgcagaaataataatagaaataaggaggtggtggggtttccaaaaatcttaaccttcaaccatctggggaaaaggcaaaaatcccatctaccgcaactctcagttcgagagtaaaggtttcccaacagtgatgtcacaagattgaccacattgatcacaatatggagtctggagaacggttaccatcctcagcagcctcctctactacaccaacttcatcttcgacaccttctgtggcttcagtagtttcaaaaggtggcctttccactggagttgcttcacttagctctacaatcaacccatgtggacatttattcagaacagctggggatcaaccgtttaacctgtccacagtgtcgagtgccttcccaatggtcagccacccagtctttggtctacattcagccagctcagggcattcagaatttggtggtttggggacacttggtacacccacagccttagccgcacatccccaactagcatcttttccagcagaatggtggcgaacaactgatgctcatactcgtacaggagcaaccttctttccaccattactgggaattccaccactatttgctcccccagcccagaatcatgattcttcttcattccattcaaggacttcgggaaaaagtaatcgaaatggtcccgaaaaaggtgtaaatgggtcaataaatggaagtaatacatcatctgtaattggtatcaacacatctgtactatccactactgcttcaagttccatgggacaaactaaaagtacaagctcaggtggaggaaatcgaaaatgtaatcaggaacaaagcaaaaaccagcctttggatgctagagttgacaaaatcaaagataagaaaccaaggaagaaagcaatggaaagttctagcaacagtgatagtgattcaggcacatcatcagacacctcaagtgaaggcattagtagcagtgattcagatgatctagaagaagatgaagaagaagaagatcaaagtattgaagaaagtgaagatgatgattctgattcagagagtgaagcacaacataaaagtaacaaccaggtgctattacatggtatttcagacccaaaagcagatggacagaaagcaactgaaaaagcccaggaaaaaagaatacaccagccattacctcttgcgtctgaatcccagactcactcattccaatcccagcagaagcagcctcaggttttgtcacagcagcttccatttattttccaaagctctcaggcaaaggaggaatctgtgaacaaacacaccagtgtaatacagtctacgggattggtgtccaatgtgaaacctttatctttggtaaatcaagccaaaaaggaaacttacatgaaactcatagttccttctcctgatgttcttaaagcagggaataaaaatacctctgaagaatctagtttattgaccagtgaattgagatccaaacgggaacaatataaacaggcattcccatcacagttaaagaaacaagagtcatcgaagagcctgaagaaggttattgcagctttgtcaaatccaaaagcaacctctagttcaccagcacatccaaaacaaacattagaaaacaaccacccaaatccattcttgacaaatgcacttttaggtaatcaccaaccaaatggagttattcaaagtgtcattcaagaagctcctctagcacttactaccaaaactaaaatgcagagcaagattaatgaaaacattgctgctgcaagtagcacccctttttcctcacctgtaaatctgagtacaagtgggagaagaacccctggcaatcagacacctgtaatgccctctgcctctcccatcctgcatagtcaagggaaggaaaaagcagttagcaataatgtaaacccagtaaaaacacagcatcactcccatcctgcaaaatctttagtggaacaattcagaggaacagattcagacattcccagtagtaaagattctgaagattcaaatgaggatgaagaggaagatgatgaagaagaagatgaggaagatgatgaagatgatgaatctgatgacagccaatcagaatcagatagtaattcagaatcagatacagaaggatcagaagaagaagatgatgatgataaagaccaagatgaatcagatagtgatactgaaggagagaaaacttcaatgaaactgaataaaacaacttcctctgtcaaaagcccttccatgagtctcacaggtcactcaacacctcgtaacctccacatagcaaaagccccaggctctgctcctgctgccttatgttctgaatcccagtcacctgcttttcttggcacttccaaaagaagaagagtaacagatgaacgtgaactgcgtattccattggaatatggctggcagagagagacaagaataagaaactttggagggcgccttcaaggagaagtagcatattatgctccatgtggaaagaaacttaggcagtaccctgaagtaataaagtatctcagcagaaatggaataatggatatctcaagggacaatttcagcttcagtgcaaaaataagagtgggtgacttctatgaagccagagatggaccgcagggaatgcagtggtgtcttttgaaagaagaggatgtcattcctcgtatcagggcaatggaaggtcgtagaggaagaccaccaaatccagatagacaacgagcaagagaggaatccaggatgagacgtcggaaaggtcgacctccaaatgttggcaatgctgaattcctagataacgcagatgcaaagttgctaagaaaactgcaagctcaagaaatagccaggcaagcagcacaaataaagcttttgagaaaacttcaaaagcaggaacaggctcgggttgctaaagaagccaaaaaacaacaagcaataatggctgctgaggagaagcggaagcaaaaagaacagataaagattatgaaacagcaggaaaaaattaagagaatacagcaaatcagaatggaaaaagaacttcgagctcagcaaattctagaggctaaaaagaaaaagaaggaagaagcggcaaatgccaaattattggaggccgagaaacgaataaaggaaaaagaaatgagaagacaacaagctgttcttctgaaacatcaggaacgagagcgaaggcgacaacacatgatgcttatgaaagctatggaagctcgtaaaaaagcagaagaaaaagagcggttgaaacaagaaaaacgtgatgagaaaagattaaataaagagcgtaaactagagcagcgaagattagaattagaaatggcaaaggaactaaagaagcctaatgaagacatgtgcttagcagaccaaaagcctttgccagagttgcctcgtattccaggacttgttctctctggaagtacattttcagactgtctcatggtggtgcagttcttacgaaactttggtaaagttttgggctttgatgtgaatattgatgttccaaacctgagtgttcttcaagagggattgctaaatataggggacagcatgggtgaagtacaagacttgcttgtgaggctcctctcagctgctgtatgtgatccaggtctaataacaggatacaaggctaaaacagctcttggagaacatttgctgaatgttggtgtgaatcgagacaatgtttccgagattttacagatatttatggaagcccactgtggacaaactgagcttactgaaagtctgaagaccaaagcttttcaggctcacactccagcacagaaagcttcagtcctggctttcctgatcaatgaactggcatgcagcaagagtgtggtcagtgaaatcgacaagaacattgattatatgtcaaacttgaggagagataaatgggtggtagaaggtaaactccgcaagctcagaatcattcatgctaagaaaacaggcaaaagagacacttcaggtggcattgatctgggagaagagcagcatcccttgggcacacccactccaggacgcaagcgaagaaggaagggaggagacagtgattatgacgatgatgatgacgatgacagtgatgaccaaggggatgaagatgatgaggatgaagaagataaagaagacaaaaaaggaaaaaagactgatatctgtgaagatgaggatgaaggtgaccaagcagcaagtgttgaagagctggaaaaacagattgaaaaactgagtaaacaacagagtcagtacagaaggaagctctttgatgcgtctcactcattgcgttcagtgatgtttggccaagatcgttacagacgccggtactggattcttccccaatgtggggggatttttgtagaaggcatggagagtggtgaaggactagaagaaattgcaaaagaaagagaaaaactgaaaaaggcagaaagtgtccagatcaaagaagaaatgtttgagacttctggggacagtttaaattgttcaaatacagatcactgtgaacaaaaggaagatcttaaagaaaaagataacacaaatctattccttcagaaacctggctctttttccaaattaagcaagcttttggaagtagctaagatgcctcctgagtcagaggttatgacccccaaaccaaatgctggtgcaaatgggtgcacgttgtcttatcagaacagtggaaaacattcactgggcagcgttcagtcaacagcaacgcaaagcaatgtggaaaaggcagactctaataatctgtttaatactggttcaagtggtccagggaagttctacagtcctctccccaatgaccagttactaaaaacgctgactgaaaagaatagacaatggtttagtcttttgccacgaacaccctgtgatgacacttcacttactcatgccgatatgtcaactgcttctttggtgactcctcagtctcagccaccatctaagtcaccttcacctaccccagctcctcttggatcttctgctcagaatcctgttggcttaaatccatttgctttatcacctcttcaggtgaaaggtggagtatctatgatgggacttcagttttgtggatggcccactggtgtggttacttctaatattccatttacatnatctgtacctagtctaggatcggggttagggttatcagaaggaaatggtaattcattcttgacttccaatgttgcttcaagtaaaagtgaatctccagtaccacagaatgaaaaggccacttcagctcaacctgcagctgttgaagtagcaaaaccagtagattttcctagtccaaaacctattccagaagaaatgcagtttggttggtggagaattattgacccagaggacctaaaagctttgctcaaagtgctgcatctcagaggaataagagaaaaggcattacaaaaacaaattcagaaacatttggattatattactcaagcctgcctcaagaataaggatgttgctattattgaactgaatgaaaatgaagaaaaccaagtaactcgagatattgtggagaactggtcagtagaagaacaagcaatggaaatggatttgagtgtccttcaacaggtagaagatctagaaaggagagttgcatcagcaagtttgcaagtgaagggttggatgtgtccagagcctgcatcagaaagggaggacttggtatattttgaacataaatcatttactaaattgtgcaaggagcatgatggagaatttactggcgaagacgaaagcagtgcacatgcactagaacggaagagtgacaaccccctagatatagctgtaaccaggctggctgatttggagcggaacattgaaagaagaattgaagaggatattgctccagggctcagggtatggagaagggcattatcagaagctcgcagtgctgcacaggtagctctgtgcattcagcaattacagaaatcaatagcatgggaaaaatcaattatgaaagtttactgccaaatctgtcgaaagggagataatgaagaactgcttcttctttgtgatggctgtgacaaaggctgtcatacctactgccatagacccaagattacaacaatcccagatggagactggttttgtccagcttgcattgctaaggcaagtggtcaaactctaaaaatcaaaaaacttcatgtcaaaggaaaaaagactaatgagtcaaagaaaggcaagaaggtaactttaacaggagatactgaagatgaagactctgcatctacaagtagttcactaaaaagaggaaacaaagacctcaagaaaagaaaaatggaggaaaacacttctattaacttgtcaaaacaagaaagttttacttcagttaagaaacctaaaagagatgactccaaggacctagctctttgcagtatgattctgactgaaatggaaactcatgaggatgcatggccttttctacttcctgtaaacttgaaacttgttcctggttataagaaagttattaagaagcctatggatttttccacaattagagagaaactaagtagtggacagtatccaaaccttgaaacctttgctctagatgtcaggcttgtttttgacaactgtgaaacatttaatgaagatgattctgatataggcagagctggccacaatatgaggaagtattttgaaaaaaagtggacagatactttcaaagtgagctgaagttataataatctctttatttttttccttctaaacaaggacaaatgagaccagcaatgtgaactgtatttacataaacgtgcaaggcacatacataatgactttctttttccttaagtataaaaaaaaagtatcagaagaatgataccatttttaaaggcttcattcctacaacaaccaaggccctcggttattggtttgtgtgatttatcagctaatttaggtagaacagggaagcacacccaaagaattttcaaaggaaagggtgttatagtgcaatagcaattaaaatatatcaaatcgcactgaatactcaacaccagagctctaatgtgggaaatggttctcctttccctctcaataaatatctatttttcatttttttactttgtagtttattttttagtgaatgtatttaattttatgaattatttatgattaaaccacatccagaatcttcgttttctgtgaaaaggaagaactagaaaattgctttaaatcttgaaaatacaaggaatgttttaaaatataaaacaaagccaagttaaactgtttacactgatgtgctataaaagcaccaaaaagaaactttactgtagagttacaagtacatttatatatatatgttgctgcatcacttgtgtagttaaattgtatttcaaaacagtgaaaaaattgacatgtatatactgttcattcttgtttatattaagtcttgttttaaatatgtattatgtgtatatattgtttgcagacattattgttcatgccttagaggattgtagcattttattttcgtctgaaggtaatgatagctatacagtctgtacagtaattatcctctaccaacactgtggcgtctccttaatcttggtagtgcctgcctttgaaacagggtgtaggggatattagttttccatttttctattttgttatataattttaagccaccagggcctaaattaaagtataatcatttgtatccatgtggaataaaattgtgacaatttcctacgcacacagtattttttcatagaaacatttccctcccatttgccttgcctcagaaataaatttaaaagacgtttgtaaccactgtgttttatctactgtgtgttgtggtggcctgttggaggcaaatagatcagattttttttgtacctacgtaagagtacttgaagttttatttaaaataaaatgttgtggaaaaggt

SEQ ID NO: 371211 - DNA, 4980 bp, Homo sapiens
  misc_feature (2206)..(2206): n is a, c, g, or t
gttgtactgatactttactactatatgtctcttgacaaagatatttatagaagctgaacgaaaaagaatagataaagattatgaaacagcaggaaaaaattaagagaatacagcaaatcagaatggaaaaagaacttcgagctcagcaaattctagaggctaaaaagaaaaagaaggaagaagcggcaaatgccaaattattggaggccgagaaacgaataaaggaaaaagaaatgagaagacaacaagctgttcttctgaaacatcaggaacgagagcgaaggcgacaacacatgatgcttatgaaagctatggaagctcgtaaaaaagcagaagaaaaagagcggttgaaacaagaaaaacgtgatgagaaaagattaaataaagagcgtaaactagagcagcgaagattagaattagaaatggcaaaggaactaaagaagcctaatgaagacatgtgcttagcagaccaaaagcctttgccagagttgcctcgtattccaggacttgttctctctggaagtacattttcagactgtctcatggtggtgcagttcttacgaaactttggtaaagttttgggctttgatgtgaatattgatgttccaaacctgagtgttcttcaagagggattgctaaatataggggacagcatgggtgaagtacaagacttgcttgtgaggctcctctcagctgctgtatgtgatccaggtctaataacaggatacaaggctaaaacagctcttggagaacatttgctgaatgttggtgtgaatcgagacaatgtttccgagattttacagatatttatggaagcccactgtggacaaactgagcttactgaaagtctgaagaccaaagcttttcaggctcacactccagcacagaaagcttcagtcctggctttcctgatcaatgaactggcatgcagcaagagtgtggtcagtgaaatcgacaagaacattgattatatgtcaaacttgaggagagataaatgggtggtagaaggtaaactccgcaagctcagaatcattcatgctaagaaaacaggcaaaagagacacttcaggtggcattgatctgggagaagagcagcatcccttgggcacacccactccaggacgcaagcgaagaaggaagggaggagacagtgattatgacgatgatgatgacgatgacagtgatgaccaaggggatgaagatgatgaggatgaagaagataaagaagacaaaaaaggaaaaaagactgatatctgtgaagatgaggatgaaggtgaccaagcagcaagtgttgaagagctggaaaaacagattgaaaaactgagtaaacaacagagtcagtacagaaggaagctctttgatgcgtctcactcattgcgttcagtgatgtttggccaagatcgttacagacgccggtactggattcttccccaatgtggggggatttttgtagaaggcatggagagtggtgaaggactagaagaaattgcaaaagaaagagaaaaactgaaaaaggcagaaagtgtccagatcaaagaagaaatgtttgagacttctggggacagtttaaattgttcaaatacagatcactgtgaacaaaaggaagatcttaaagaaaaagataacacaaatctattccttcagaaacctggctctttttccaaattaagcaagcttttggaagtagctaagatgcctcctgagtcagaggttatgacccccaaaccaaatgctggtgcaaatgggtgcacgttgtcttatcagaacagtggaaaacattcactgggcagcgttcagtcaacagcaacgcaaagcaatgtggaaaaggcagactctaataatctgtttaatactggttcaagtggtccagggaagttctacagtcctctccccaatgaccagttactaaaaacgctgactgaaaagaatagacaatggtttagtcttttgccacgaacaccctgtgatgacacttcacttactcatgccgatatgtcaactgcttctttggtgactcctcagtctcagccaccatctaagtcaccttcacctaccccagctcctcttggatcttctgctcagaatcctgttggcttaaatccatttgctttatcacctcttcaggtgaaaggtggagtatctatgatgggacttcagttttgtggatggcccactggtgtggttacttctaatattccatttacatnatctgtacctagtctaggatcggggttagggttatcagaaggaaatggtaattcattcttgacttccaatgttgcttcaagtaaaagtgaatctccagtaccacagaatgaaaaggccacttcagctcaacctgcagctgttgaagtagcaaaaccagtagattttcctagtccaaaacctattccagaagaaatgcagtttggttggtggagaattattgacccagaggacctaaaagctttgctcaaagtgctgcatctcagaggaataagagaaaaggcattacaaaaacaaattcagaaacatttggattatattactcaagcctgcctcaagaataaggatgttgctattattgaactgaatgaaaatgaagaaaaccaagtaactcgagatattgtggagaactggtcagtagaagaacaagcaatggaaatggatttgagtgtccttcaacaggtagaagatctagaaaggagagttgcatcagcaagtttgcaagtgaagggttggatgtgtccagagcctgcatcagaaagggaggacttggtatattttgaacataaatcatttactaaattgtgcaaggagcatgatggagaatttactggcgaagacgaaagcagtgcacatgcactagaacggaagagtgacaaccccctagatatagctgtaaccaggctggctgatttggagcggaacattgaaagaagaattgaagaggatattgctccagggctcagggtatggagaagggcattatcagaagctcgcagtgctgcacaggtagctctgtgcattcagcaattacagaaatcaatagcatgggaaaaatcaattatgaaagtttactgccaaatctgtcgaaagggagataatgaagaactgcttcttctttgtgatggctgtgacaaaggctgtcatacctactgccatagacccaagattacaacaatcccagatggagactggttttgtccagcttgcattgctaaggcaagtggtcaaactctaaaaatcaaaaaacttcatgtcaaaggaaaaaagactaatgagtcaaagaaaggcaagaaggtaactttaacaggagatactgaagatgaagactctgcatctacaagtagttcactaaaaagaggaaacaaagacctcaagaaaagaaaaatggaggaaaacacttctattaacttgtcaaaacaagaaagttttacttcagttaagaaacctaaaagagatgactccaaggacctagctctttgcagtatgattctgactgaaatggaaactcatgaggatgcatggccttttctacttcctgtaaacttgaaacttgttcctggttataagaaagttattaagaagcctatggatttttccacaattagagagaaactaagtagtggacagtatccaaaccttgaaacctttgctctagatgtcaggcttgtttttgacaactgtgaaacatttaatgaagatgattctgatataggcagagctggccacaatatgaggaagtattttgaaaaaaagtggacagatactttcaaagtgagctgaagttataataatctctttatttttttccttctaaacaaggacaaatgagaccagcaatgtgaactgtatttacataaacgtgcaaggcacatacataatgactttctttttccttaagtataaaaaaaaagtatcagaagaatgataccatttttaaaggcttcattcctacaacaaccaaggccctcggttattggtttgtgtgatttatcagctaatttaggtagaacagggaagcacacccaaagaattttcaaaggaaagggtgttatagtgcaatagcaattaaaatatatcaaatcgcactgaatactcaacaccagagctctaatgtgggaaatggttctcctttccctctcaataaatatctatttttcatttttttactttgtagtttattttttagtgaatgtatttaattttatgaattatttatgattaaaccacatccagaatcttcgttttctgtgaaaaggaagaactagaaaattgctttaaatcttgaaaatacaaggaatgttttaaaatataaaacaaagccaagttaaactgtttacactgatgtgctataaaagcaccaaaaagaaactttactgtagagttacaagtacatttatatatatatgttgctgcatcacttgtgtagttaaattgtatttcaaaacagtgaaaaaattgacatgtatatactgttcattcttgtttatattaagtcttgttttaaatatgtattatgtgtatatattgtttgcagacattattgttcatgccttagaggattgtagcattttattttcgtctgaaggtaatgatagctatacagtctgtacagtaattatcctctaccaacactgtggcgtctccttaatcttggtagtgcctgcctttgaaacagggtgtaggggatattagttttccatttttctattttgttatataattttaagccaccagggcctaaattaaagtataatcatttgtatccatgtggaataaaattgtgacaatttcctacgcacacagtattttttcatagaaacatttccctcccatttgccttgcctcagaaataaatttaaaagacgtttgtaaccactgtgttttatctactgtgtgttgtggtggcctgttggaggcaaatagatcagattttttttgtacctacgtaagagtacttgaagttttatttaaaataaaatgttgtggaaaaggt

SEQ ID NO: 371212 - DNA, 7725 bp, Homo sapiens
  misc_feature (4878)..(4878): n is a, c, g, or t
agaagaatcatctcctgcttcaatctgctgctggataggaactaatcagagagagagaagcggaagacggagaaggagggagtcgaaggctttcccgatcacaaatctcacctccactacaactctctttatacttttcttgcagaaataataatagaaataaggaggtggtggggtttccaaaaatcttaaccttcaaccatctggggaaaaggcaaaaatcccatctaccgcaactctcagttcgagagtaaaggtttcccaacagtgatgtcacaagattgaccacattgatcacaatatggagtctggagaacggttaccatcctcagcagcctcctctactacaccaacttcatcttcgacaccttctgtggcttcagtagtttcaaaaggtggcctttccactggagttgcttcacttagctctacaatcaacccatgtggacatttattcagaacagctggggatcaaccgtttaacctgtccacagtgtcgagtgccttcccaatggtcagccacccagtctttggtctacattcagccagctcagggcattcagaatttggtggtttggggacacttggtacacccacagccttagccgcacatccccaactagcatcttttccagcagaatggtggcgaacaactgatgctcatactcgtacaggagcaaccttctttccaccattactgggaattccaccactatttgctcccccagcccagaatcatgattcttcttcattccattcaaggacttcgggaaaaagtaatcgaaatggtcccgaaaaaggtgtaaatgggtcaataaatggaagtaatacatcatctgtaattggtatcaacacatctgtactatccactactgcttcaagttccatgggacaaactaaaagtacaagctcaggtggaggaaatcgaaaatgtaatcaggaacaaagcaaaaaccagcctttggatgctagagttgacaaaatcaaagataagaaaccaaggaagaaagcaatggaaagttctagcaacagtgatagtgattcaggcacatcatcagacacctcaagtgaaggcattagtagcagtgattcagatgatctagaagaagatgaagaagaagaagatcaaagtattgaagaaagtgaagatgatgattctgattcagagagtgaagcacaacataaaagtaacaaccaggtgctattacatggtatttcagacccaaaagcagatggacagaaagcaactgaaaaagcccaggaaaaaagaatacaccagccattacctcttgcgtctgaatcccagactcactcattccaatcccagcagaagcagcctcaggttttgtcacagcagcttccatttattttccaaagctctcaggcaaaggaggaatctgtgaacaaacacaccagtgtaatacagtctacgggattggtgtccaatgtgaaacctttatctttggtaaatcaagccaaaaaggaaacttacatgaaactcatagttccttctcctgatgttcttaaagcagggaataaaaatacctctgaagaatctagtttattgaccagtgaattgagatccaaacgggaacaatataaacaggcattcccatcacagttaaagaaacaagagtcatcgaagagcctgaagaaggttattgcagctttgtcaaatccaaaagcaacctctagttcaccagcacatccaaaacaaacattagaaaacaaccacccaaatccattcttgacaaatgcacttttaggtaatcaccaaccaaatggagttattcaaagtgtcattcaagaagctcctctagcacttactaccaaaactaaaatgcagagcaagattaatgaaaacattgctgctgcaagtagcacccctttttcctcacctgtaaatctgagtacaagtgggagaagaacccctggcaatcagacacctgtaatgccctctgcctctcccatcctgcatagtcaagggaaggaaaaagcagttagcaataatgtaaacccagtaaaaacacagcatcactcccatcctgcaaaatctttagtggaacaattcagaggaacagattcagacattcccagtagtaaagattctgaagattcaaatgaggatgaagaggaagatgatgaagaagaagatgaggaagatgatgaagatgatgaatctgatgacagccaatcaggcacttccaaaagaagaagagtaacagatgaacgtgaactgcgtattccattggaatatggctggcagagagagacaagaataagaaactttggagggcgccttcaaggagaagtagcatattatgctccatgtggaaagaaacttaggcagtaccctgaagtaataaagtatctcagcagaaatggaataatggatatctcaagggacaatttcagcttcagtgcaaaaataagagtgggtgacttctatgaagccagagatggaccgcagggaatgcagtggtgtcttttgaaagaagaggatgtcattcctcgtatcagggcaatggaaggtcgtagaggaagaccaccaaatccagatagacaacgagcaagagaggaatccaggatgagacgtcggaaaggtcgacctccaaatgttggcaatgctgaattcctagataacgcagatgcaaagttgctaagaaaactgcaagctcaagaaatagccaggcaagcagcacaaataaagcttttgagaaaacttcaaaagcaggaacaggctcgggttgctaaagaagccaaaaaacaacaagcaataatggctgctgaggagaagcggaagcaaaaagaacagataaagattatgaaacagcaggaaaaaattaagagaatacagcaaatcagaatggaaaaagaacttcgagctcagcaaattctagaggctaaaaagaaaaagaaggaagaagcggcaaatgccaaattattggaggccgagaaacgaataaaggaaaaagaaatgagaagacaacaagctgttcttctgaaacatcaggaacgagagcgaaggcgacaacacatgatgcttatgaaagctatggaagctcgtaaaaaagcagaagaaaaagagcggttgaaacaagaaaaacgtgatgagaaaagattaaataaagagcgtaaactagagcagcgaagattagaattagaaatggcaaaggaactaaagaagcctaatgaagacatgtgcttagcagaccaaaagcctttgccagagttgcctcgtattccaggacttgttctctctggaagtacattttcagactgtctcatggtggtgcagttcttacgaaactttggtaaagttttgggctttgatgtgaatattgatgttccaaacctgagtgttcttcaagagggattgctaaatataggggacagcatgggtgaagtacaagacttgcttgtgaggctcctctcagctgctgtatgtgatccaggtctaataacaggatacaagatatttatggaagcccactgtggacaaactgagcttactgaaagtctgaagaccaaagcttttcaggctcacactccagcacagaaagcttcagtcctggctttcctgatcaatgaactggcatgcagcaagagtgtggtcagtgaaatcgacaagaacattgattatatgtcaaacttgaggagagataaatgggtggtagaaggtaaactccgcaagctcagaatcattcatgctaagaaaacaggcaaaagagacacttcaggtggcattgatctgggagaagagcagcatcccttgggcacacccactccaggacgcaagcgaagaaggaagggaggagacagtgattatgacgatgatgatgacgatgacagtgatgaccaaggggatgaagatgatgaggatgaagaagataaagaagacaaaaaaggaaaaaagactgatatctgtgaagatgaggatgaaggtgaccaagcagcaagtgttgaagagctggaaaaacagattgaaaaactgagtaaacaacagagtcagtacagaaggaagctctttgatgcgtctcactcattgcgttcagtgatgtttggccaagatcgttacagacgccggtactggattcttccccaatgtggggggatttttgtagaaggcatggagagtggtgaaggactagaagaaattgcaaaagaaagagaaaaactgaaaaaggcagaaagtgtccagatcaaagaagaaatgtttgagacttctggggacagtttaaattgttcaaatacagatcactgtgaacaaaaggaagatcttaaagaaaaagataacacaaatctattccttcagaaacctggctctttttccaaattaagcaagcttttggaagtagctaagatgcctcctgagtcagaggttatgacccccaaaccaaatgctggtgcaaatgggtgcacgttgtcttatcagaacagtggaaaacattcactgggcagcgttcagtcaacagcaacgcaaagcaatgtggaaaaggcagactctaataatctgtttaatactggttcaagtggtccagggaagttctacagtcctctccccaatgaccagttactaaaaacgctgactgaaaagaatagacaatggtttagtcttttgccacgaacaccctgtgatgacacttcacttactcatgccgatatgtcaactgcttctttggtgactcctcagtctcagccaccatctaagtcaccttcacctaccccagctcctcttggatcttctgctcagaatcctgttggcttaaatccatttgctttatcacctcttcaggtgaaaggtggagtatctatgatgggacttcagttttgtggatggcccactggtgtggttacttctaatattccatttacatnatctgtacctagtctaggatcggggttagggttatcagaaggaaatggtaattcattcttgacttccaatgttgcttcaagtaaaagtgaatctccagtaccacagaatgaaaaggccacttcagctcaacctgcagctgttgaagtagcaaaaccagtagattttcctagtccaaaacctattccagaagaaatgcagtttggttggtggagaattattgacccagaggacctaaaagctttgctcaaagtgctgcatctcagaggaataagagaaaaggcattacaaaaacaaattcagaaacatttggattatattactcaagcctgcctcaagaataaggatgttgctattattgaactgaatgaaaatgaagaaaaccaagtaactcgagatattgtggagaactggtcagtagaagaacaagcaatggaaatggatttgagtgtccttcaacaggtagaagatctagaaaggagagttgcatcagcaagtttgcaagtgaagggttggatgtgtccagagcctgcatcagaaagggaggacttggtatattttgaacataaatcatttactaaattgtgcaaggagcatgatggagaatttactggcgaagacgaaagcagtgcacatgcactagaacggaagagtgacaaccccctagatatagctgtaaccaggctggctgatttggagcggaacattgaaagaagaattgaagaggatattgctccagggctcagggtatggagaagggcattatcagaagctcgcagtgctgcacaggtagctctgtgcattcagcaattacagaaatcaatagcatgggaaaaatcaattatgaaagtttactgccaaatctgtcgaaagggagataatgaagaactgcttcttctttgtgatggctgtgacaaaggctgtcatacctactgccatagacccaagattacaacaatcccagatggagactggttttgtccagcttgcattgctaaggcaagtggtcaaactctaaaaatcaaaaaacttcatgtcaaaggaaaaaagactaatgagtcaaagaaaggcaagaaggtaactttaacaggagatactgaagatgaagactctgcatctacaagtagttcactaaaaagaggaaacaaagacctcaagaaaagaaaaatggaggaaaacacttctattaacttgtcaaaacaagaaagttttacttcagttaagaaacctaaaagagatgactccaaggacctagctctttgcagtatgattctgactgaaatggaaactcatgaggatgcatggccttttctacttcctgtaaacttgaaacttgttcctggttataagaaagttattaagaagcctatggatttttccacaattagagagaaactaagtagtggacagtatccaaaccttgaaacctttgctctagatgtcaggcttgtttttgacaactgtgaaacatttaatgaagatgattctgatataggcagagctggccacaatatgaggaagtattttgaaaaaaagtggacagatactttcaaagtgagctgaagttataataatctctttatttttttccttctaaacaaggacaaatgagaccagcaatgtgaactgtatttacataaacgtgcaaggcacatacataatgactttctttttccttaagtataaaaaaaaagtatcagaagaatgataccatttttaaaggcttcattcctacaacaaccaaggccctcggttattggtttgtgtgatttatcagctaatttaggtagaacagggaagcacacccaaagaattttcaaaggaaagggtgttatagtgcaatagcaattaaaatatatcaaatcgcactgaatactcaacaccagagctctaatgtgggaaatggttctcctttccctctcaataaatatctatttttcatttttttactttgtagtttattttttagtgaatgtatttaattttatgaattatttatgattaaaccacatccagaatcttcgttttctgtgaaaaggaagaactagaaaattgctttaaatcttgaaaatacaaggaatgttttaaaatataaaacaaagccaagttaaactgtttacactgatgtgctataaaagcaccaaaaagaaactttactgtagagttacaagtacatttatatatatatgttgctgcatcacttgtgtagttaaattgtatttcaaaacagtgaaaaaattgacatgtatatactgttcattcttgtttatattaagtcttgttttaaatatgtattatgtgtatatattgtttgcagacattattgttcatgccttagaggattgtagcattttattttcgtctgaaggtaatgatagctatacagtctgtacagtaattatcctctaccaacactgtggcgtctccttaatcttggtagtgcctgcctttgaaacagggtgtaggggatattagttttccatttttctattttgttatataattttaagccaccagggcctaaattaaagtataatcatttgtatccatgtggaataaaattgtgacaatttcctacgcacacagtattttttcatagaaacatttccctcccatttgccttgcctcagaaataaatttaaaagacgtttgtaaccactgtgttttatctactgtgtgttgtggtggcctgttggaggcaaatagatcagattttttttgtacctacgtaagagtacttgaagttttatttaaaataaaatgttgtggaaaaggtagcattctttttttaggagtgttatttttcactatgtgtggcacggatacaataaaagacttttacaaactaa

SEQ ID NO: 371213 - DNA, 7791 bp, Homo sapiens
  misc_feature (4950)..(4950): n is a, c, g, or t
agaagaatcatctcctgcttcaatctgctgctggataggaactaatcagagagagagaagcggaagacggagaaggagggagtcgaaggctttcccgatcacaaatctcacctccactacaactctctttatacttttcttgcagaaataataatagaaataaggaggtggtggggtttccaaaaatcttaaccttcaaccatctggggaaaaggcaaaaatcccatctaccgcaactctcagttcgagagtaaaggtttcccaacagtgatgtcacaagattgaccacattgatcacaatatggagtctggagaacggttaccatcctcagcagcctcctctactacaccaacttcatcttcgacaccttctgtggcttcagtagtttcaaaaggtggcctttccactggagttgcttcacttagctctacaatcaacccatgtggacatttattcagaacagctggggatcaaccgtttaacctgtccacagtgtcgagtgccttcccaatggtcagccacccagtctttggtctacattcagccagctcagggcattcagaatttggtggtttggggacacttggtacacccacagccttagccgcacatccccaactagcatcttttccagcagaatggtggcgaacaactgatgctcatactcgtacaggagcaaccttctttccaccattactgggaattccaccactatttgctcccccagcccagaatcatgattcttcttcattccattcaaggacttcgggaaaaagtaatcgaaatggtcccgaaaaaggtgtaaatgggtcaataaatggaagtaatacatcatctgtaattggtatcaacacatctgtactatccactactgcttcaagttccatgggacaaactaaaagtacaagctcaggtggaggaaatcgaaaatgtaatcaggaacaaagcaaaaaccagcctttggatgctagagttgacaaaatcaaagataagaaaccaaggaagaaagcaatggaaagttctagcaacagtgatagtgattcaggcacatcatcagacacctcaagtgaaggcattagtagcagtgattcagatgatctagaagaagatgaagaagaagaagatcaaagtattgaagaaagtgaagatgatgattctgattcagagagtgaagcacaacataaaagtaacaaccaggtgctattacatggtatttcagacccaaaagcagatggacagaaagcaactgaaaaagcccaggaaaaaagaatacaccagccattacctcttgcgtctgaatcccagactcactcattccaatcccagcagaagcagcctcaggttttgtcacagcagcttccatttattttccaaagctctcaggcaaaggaggaatctgtgaacaaacacaccagtgtaatacagtctacgggattggtgtccaatgtgaaacctttatctttggtaaatcaagccaaaaaggaaacttacatgaaactcatagttccttctcctgatgttcttaaagcagggaataaaaatacctctgaagaatctagtttattgaccagtgaattgagatccaaacgggaacaatataaacaggcattcccatcacagttaaagaaacaagagtcatcgaagagcctgaagaaggttattgcagctttgtcaaatccaaaagcaacctctagttcaccagcacatccaaaacaaacattagaaaacaaccacccaaatccattcttgacaaatgcacttttaggtaatcaccaaccaaatggagttattcaaagtgtcattcaagaagctcctctagcacttactaccaaaactaaaatgcagagcaagattaatgaaaacattgctgctgcaagtagcacccctttttcctcacctgtaaatctgagtacaagtgggagaagaacccctggcaatcagacacctgtaatgccctctgcctctcccatcctgcatagtcaagggaaggaaaaagcagttagcaataatgtaaacccagtaaaaacacagcatcactcccatcctgcaaaatctttagtggaacaattcagaggaacagattcagacattcccagtagtaaagattctgaagattcaaatgaggatgaagaggaagatgatgaagaagaagatgaggaagatgatgaagatgatgaatctgatgacagccaatcaggcacttccaaaagaagaagagtaacagatgaacgtgaactgcgtattccattggaatatggctggcagagagagacaagaataagaaactttggagggcgccttcaaggagaagtagcatattatgctccatgtggaaagaaacttaggcagtaccctgaagtaataaagtatctcagcagaaatggaataatggatatctcaagggacaatttcagcttcagtgcaaaaataagagtgggtgacttctatgaagccagagatggaccgcagggaatgcagtggtgtcttttgaaagaagaggatgtcattcctcgtatcagggcaatggaaggtcgtagaggaagaccaccaaatccagatagacaacgagcaagagaggaatccaggatgagacgtcggaaaggtcgacctccaaatgttggcaatgctgaattcctagataacgcagatgcaaagttgctaagaaaactgcaagctcaagaaatagccaggcaagcagcacaaataaagcttttgagaaaacttcaaaagcaggaacaggctcgggttgctaaagaagccaaaaaacaacaagcaataatggctgctgaggagaagcggaagcaaaaagaacagataaagattatgaaacagcaggaaaaaattaagagaatacagcaaatcagaatggaaaaagaacttcgagctcagcaaattctagaggctaaaaagaaaaagaaggaagaagcggcaaatgccaaattattggaggccgagaaacgaataaaggaaaaagaaatgagaagacaacaagctgttcttctgaaacatcaggaacgagagcgaaggcgacaacacatgatgcttatgaaagctatggaagctcgtaaaaaagcagaagaaaaagagcggttgaaacaagaaaaacgtgatgagaaaagattaaataaagagcgtaaactagagcagcgaagattagaattagaaatggcaaaggaactaaagaagcctaatgaagacatgtgcttagcagaccaaaagcctttgccagagttgcctcgtattccaggacttgttctctctggaagtacattttcagactgtctcatggtggtgcagttcttacgaaactttggtaaagttttgggctttgatgtgaatattgatgttccaaacctgagtgttcttcaagagggattgctaaatataggggacagcatgggtgaagtacaagacttgcttgtgaggctcctctcagctgctgtatgtgatccaggtctaataacaggatacaaggctaaaacagctcttggagaacatttgctgaatgttggtgtgaatcgagacaatgtttccgagattttacagatatttatggaagcccactgtggacaaactgagcttactgaaagtctgaagaccaaagcttttcaggctcacactccagcacagaaagcttcagtcctggctttcctgatcaatgaactggcatgcagcaagagtgtggtcagtgaaatcgacaagaacattgattatatgtcaaacttgaggagagataaatgggtggtagaaggtaaactccgcaagctcagaatcattcatgctaagaaaacaggcaaaagagacacttcaggtggcattgatctgggagaagagcagcatcccttgggcacacccactccaggacgcaagcgaagaaggaagggaggagacagtgattatgacgatgatgatgacgatgacagtgatgaccaaggggatgaagatgatgaggatgaagaagataaagaagacaaaaaaggaaaaaagactgatatctgtgaagatgaggatgaaggtgaccaagcagcaagtgttgaagagctggaaaaacagattgaaaaactgagtaaacaacagagtcagtacagaaggaagctctttgatgcgtctcactcattgcgttcagtgatgtttggccaagatcgttacagacgccggtactggattcttccccaatgtggggggatttttgtagaaggcatggagagtggtgaaggactagaagaaattgcaaaagaaagagaaaaactgaaaaaggcagaaagtgtccagatcaaagaagaaatgtttgagacttctggggacagtttaaattgttcaaatacagatcactgtgaacaaaaggaagatcttaaagaaaaagataacacaaatctattccttcagaaacctggctctttttccaaattaagcaagcttttggaagtagctaagatgcctcctgagtcagaggttatgacccccaaaccaaatgctggtgcaaatgggtgcacgttgtcttatcagaacagtggaaaacattcactgggcagcgttcagtcaacagcaacgcaaagcaatgtggaaaaggcagactctaataatctgtttaatactggttcaagtggtccagggaagttctacagtcctctccccaatgaccagttactaaaaacgctgactgaaaagaatagacaatggtttagtcttttgccacgaacaccctgtgatgacacttcacttactcatgccgatatgtcaactgcttctttggtgactcctcagtctcagccaccatctaagtcaccttcacctaccccagctcctcttggatcttctgctcagaatcctgttggcttaaatccatttgctttatcacctcttcaggtgaaaggtggagtatctatgatgggacttcagttttgtggatggcccactggtgtggttacttctaatattccatttacatnatctgtacctagtctaggatcggggttagggttatcagaaggaaatggtaattcattcttgacttccaatgttgcttcaagtaaaagtgaatctccagtaccacagaatgaaaaggccacttcagctcaacctgcagctgttgaagtagcaaaaccagtagattttcctagtccaaaacctattccagaagaaatgcagtttggttggtggagaattattgacccagaggacctaaaagctttgctcaaagtgctgcatctcagaggaataagagaaaaggcattacaaaaacaaattcagaaacatttggattatattactcaagcctgcctcaagaataaggatgttgctattattgaactgaatgaaaatgaagaaaaccaagtaactcgagatattgtggagaactggtcagtagaagaacaagcaatggaaatggatttgagtgtccttcaacaggtagaagatctagaaaggagagttgcatcagcaagtttgcaagtgaagggttggatgtgtccagagcctgcatcagaaagggaggacttggtatattttgaacataaatcatttactaaattgtgcaaggagcatgatggagaatttactggcgaagacgaaagcagtgcacatgcactagaacggaagagtgacaaccccctagatatagctgtaaccaggctggctgatttggagcggaacattgaaagaaggtatctgaagagccccttaagtaccaccattcagatcaaactggataatgtgggcacagttactgtccctgctcctgcaccatccgttagtggtgatggtgacggaattgaagaggatattgctccagggctcagggtatggagaagggcattatcagaagctcgcagtgctgcacaggtagctctgtgcattcagcaattacagaaatcaatagcatgggaactgcttcttctttgtgatggctgtgacaaaggctgtcatacctactgccatagacccaagattacaacaatcccagatggagactggttttgtccagcttgcattgctaaggcaagtggtcaaactctaaaaatcaaaaaacttcatgtcaaaggaaaaaagactaatgagtcaaagaaaggcaagaaggtaactttaacaggagatactgaagatgaagactctgcatctacaagtagttcactaaaaagaggaaacaaagacctcaagaaaagaaaaatggaggaaaacacttctattaacttgtcaaaacaagaaagttttacttcagttaagaaacctaaaagagatgactccaaggacctagctctttgcagtatgattctgactgaaatggaaactcatgaggatgcatggccttttctacttcctgtaaacttgaaacttgttcctggttataagaaagttattaagaagcctatggatttttccacaattagagagaaactaagtagtggacagtatccaaaccttgaaacctttgctctagatgtcaggcttgtttttgacaactgtgaaacatttaatgaagatgattctgatataggcagagctggccacaatatgaggaagtattttgaaaaaaagtggacagatactttcaaagtgagctgaagttataataatctctttatttttttccttctaaacaaggacaaatgagaccagcaatgtgaactgtatttacataaacgtgcaaggcacatacataatgactttctttttccttaagtatcaaggccctcggttattggtttgtgtgatttatcagctaatttaggtagaacagggaagcacacccaaagaattttcaaaggaaagggtgttatagtgcaatagcaattaaaatatatcaaatcgcactgaatactcaacaccagagctctaatgtgggaaatggttctcctttccctctcaataaatatctatttttcatttttttactttgtagtttattttttagtgaatgtatttaattttatgaattatttatgattaaaccacatccagaatcttcgttttctgtgaaaaggaagaactagaaaattgctttaaatcttgaaaatacaaggaatgttttaaaatataaaacaaagccaagttaaactgtttacactgatgtgctataaaagcaccaaaaagaaactttactgtagagttacaagtacatttatatatatatgttgctgcatcacttgtgtagttaaattgtatttcaaaacagtgaaaaaattgacatgtatatactgttcattcttgtttatattaagtcttgttttaaatatgtattatgtgtatatattgtttgcagacattattgttcatgccttagaggattgtagcattttattttcgtctgaaggtaatgatagctatacagtctgtacagtaattatcctctaccaacactgtggcgtctccttaatcttggtagtgcctgcctttgaaacagggtgtaggggatattagttttccatttttctattttgttatataattttaagccaccagggcctaaattaaagtataatcatttgtatccatgtggaataaaattgtgacaatttcctacgcacacagtattttttcatagaaacatttccctcccatttgccttgcctcagaaataaatttaaaagacgtttgtaaccactgtgttttatctactgtgtgttgtggtggcctgttggaggcaaatagatcagattttttttgtacctacgtaagagtacttgaagttttatttaaaataaaatgttgtggaaaaggtagcattctttttttaggagtgttatttttcactatgtgtggcacggatacaataaaagacttttacaaactaa

SEQ ID NO: 371214 - DNA, 4701 bp, Homo sapiens
  misc_feature (1854)..(1854): n is a, c, g, or t
cccctttaggccaaccgaggccaaatgttattttttttatggtatctgaatttttctattatgattattttcttttaaaaaattaagctgtttttattttatttgtatttcattttattttcagcctttgccagagttgcctcgtattccaggacttgttctctctggaagtacattttcagactgtctcatggtggtgcagttcttacgaaactttggtaaagttttgggctttgatgtgaatattgatgttccaaacctgagtgttcttcaagagggattgctaaatataggggacagcatgggtgaagtacaagacttgcttgtgaggctcctctcagctgctgtatgtgatccaggtctaataacaggatacaaggctaaaacagctcttggagaacatttgctgaatgttggtgtgaatcgagacaatgtttccgagattttacagatatttatggaagcccactgtggacaaactgagcttactgaaagtctgaagaccaaagcttttcaggctcacactccagcacagaaagcttcagtcctggctttcctgatcaatgaactggcatgcagcaagagtgtggtcagtgaaatcgacaagaacattgattatatgtcaaacttgaggagagataaatgggtggtagaaggtaaactccgcaagctcagaatcattcatgctaagaaaacaggcaaaagagacacttcaggtggcattgatctgggagaagagcagcatcccttgggcacacccactccaggacgcaagcgaagaaggaagggaggagacagtgattatgacgatgatgatgacgatgacagtgatgaccaaggggatgaagatgatgaggatgaagaagataaagaagacaaaaaaggaaaaaagactgatatctgtgaagatgaggatgaaggtgaccaagcagcaagtgttgaagagctggaaaaacagattgaaaaactgagtaaacaacagagtcagtacagaaggaagctctttgatgcgtctcactcattgcgttcagtgatgtttggccaagatcgttacagacgccggtactggattcttccccaatgtggggggatttttgtagaaggcatggagagtggtgaaggactagaagaaattgcaaaagaaagagaaaaactgaaaaaggcagaaagtgtccagatcaaagaagaaatgtttgagacttctggggacagtttaaattgttcaaatacagatcactgtgaacaaaaggaagatcttaaagaaaaagataacacaaatctattccttcagaaacctggctctttttccaaattaagcaagcttttggaagtagctaagatgcctcctgagtcagaggttatgacccccaaaccaaatgctggtgcaaatgggtgcacgttgtcttatcagaacagtggaaaacattcactgggcagcgttcagtcaacagcaacgcaaagcaatgtggaaaaggcagactctaataatctgtttaatactggttcaagtggtccagggaagttctacagtcctctccccaatgaccagttactaaaaacgctgactgaaaagaatagacaatggtttagtcttttgccacgaacaccctgtgatgacacttcacttactcatgccgatatgtcaactgcttctttggtgactcctcagtctcagccaccatctaagtcaccttcacctaccccagctcctcttggatcttctgctcagaatcctgttggcttaaatccatttgctttatcacctcttcaggtgaaaggtggagtatctatgatgggacttcagttttgtggatggcccactggtgtggttacttctaatattccatttacatnatctgtacctagtctaggatcggggttagggttatcagaaggaaatggtaattcattcttgacttccaatgttgcttcaagtaaaagtgaatctccagtaccacagaatgaaaaggccacttcagctcaacctgcagctgttgaagtagcaaaaccagtagattttcctagtccaaaacctattccagaagaaatgcagtttggttggtggagaattattgacccagaggacctaaaagctttgctcaaagtgctgcatctcagaggaataagagaaaaggcattacaaaaacaaattcagaaacatttggattatattactcaagcctgcctcaagaataaggatgttgctattattgaactgaatgaaaatgaagaaaaccaagtaactcgagatattgtggagaactggtcagtagaagaacaagcaatggaaatggatttgagtgtccttcaacaggtagaagatctagaaaggagagttgcatcagcaagtttgcaagtgaagggttggatgtgtccagagcctgcatcagaaagggaggacttggtatattttgaacataaatcatttactaaattgtgcaaggagcatgatggagaatttactggcgaagacgaaagcagtgcacatgcactagaacggaagagtgacaaccccctagatatagctgtaaccaggctggctgatttggagcggaacattgaaagaagaattgaagaggatattgctccagggctcagggtatggagaagggcattatcagaagctcgcagtgctgcacaggtagctctgtgcattcagcaattacagaaatcaatagcatgggaaaaatcaattatgaaagtttactgccaaatctgtcgaaagggagataatgaagaactgcttcttctttgtgatggctgtgacaaaggctgtcatacctactgccatagacccaagattacaacaatcccagatggagactggttttgtccagcttgcattgctaaggcaagtggtcaaactctaaaaatcaaaaaacttcatgtcaaaggaaaaaagactaatgagtcaaagaaaggcaagaaggtaactttaacaggagatactgaagatgaagactctgcatctacaagtagttcactaaaaagaggaaacaaagacctcaagaaaagaaaaatggaggaaaacacttctattaacttgtcaaaacaagaaagttttacttcagttaagaaacctaaaagagatgactccaaggacctagctctttgcagtatgattctgactgaaatggaaactcatgaggatgcatggccttttctacttcctgtaaacttgaaacttgttcctggttataagaaagttattaagaagcctatggatttttccacaattagagagaaactaagtagtggacagtatccaaaccttgaaacctttgctctagatgtcaggcttgtttttgacaactgtgaaacatttaatgaagatgattctgatataggcagagctggccacaatatgaggaagtattttgaaaaaaagtggacagatactttcaaagtgagctgaagttataataatctctttatttttttccttctaaacaaggacaaatgagaccagcaatgtgaactgtatttacataaacgtgcaaggcacatacataatgactttctttttccttaagtataaaaaaaaagtatcagaagaatgataccatttttaaaggcttcattcctacaacaaccaaggccctcggttattggtttgtgtgatttatcagctaatttaggtagaacagggaagcacacccaaagaattttcaaaggaaagggtgttatagtgcaatagcaattaaaatatatcaaatcgcactgaatactcaacaccagagctctaatgtgggaaatggttctcctttccctctcaataaatatctatttttcatttttttactttgtagtttattttttagtgaatgtatttaattttatgaattatttatgattaaaccacatccagaatcttcgttttctgtgaaaaggaagaactagaaaattgctttaaatcttgaaaatacaaggaatgttttaaaatataaaacaaagccaagttaaactgtttacactgatgtgctataaaagcaccaaaaagaaactttactgtagagttacaagtacatttatatatatatgttgctgcatcacttgtgtagttaaattgtatttcaaaacagtgaaaaaattgacatgtatatactgttcattcttgtttatattaagtcttgttttaaatatgtattatgtgtatatattgtttgcagacattattgttcatgccttagaggattgtagcattttattttcgtctgaaggtaatgatagctatacagtctgtacagtaattatcctctaccaacactgtggcgtctccttaatcttggtagtgcctgcctttgaaacagggtgtaggggatattagttttccatttttctattttgttatataattttaagccaccagggcctaaattaaagtataatcatttgtatccatgtggaataaaattgtgacaatttcctacgcacacagtattttttcatagaaacatttccctcccatttgccttgcctcagaaataaatttaaaagacgtttgtaaccactgtgttttatctactgtgtgttgtggtggcctgttggaggcaaatagatcagattttttttgtacctacgtaagagtacttgaagttttatttaaaataaaatgttgtggaaaaggtagcattctttttttaggagtgttatttttcactatgtgtggcacggatacaataaaagacttttacaaactaa

SEQ ID NO: 371215 - DNA, 6820 bp, Homo sapiens
  misc_feature (4950)..(4950): n is a, c, g, or t
agaagaatcatctcctgcttcaatctgctgctggataggaactaatcagagagagagaagcggaagacggagaaggagggagtcgaaggctttcccgatcacaaatctcacctccactacaactctctttatacttttcttgcagaaataataatagaaataaggaggtggtggggtttccaaaaatcttaaccttcaaccatctggggaaaaggcaaaaatcccatctaccgcaactctcagttcgagagtaaaggtttcccaacagtgatgtcacaagattgaccacattgatcacaatatggagtctggagaacggttaccatcctcagcagcctcctctactacaccaacttcatcttcgacaccttctgtggcttcagtagtttcaaaaggtggcctttccactggagttgcttcacttagctctacaatcaacccatgtggacatttattcagaacagctggggatcaaccgtttaacctgtccacagtgtcgagtgccttcccaatggtcagccacccagtctttggtctacattcagccagctcagggcattcagaatttggtggtttggggacacttggtacacccacagccttagccgcacatccccaactagcatcttttccagcagaatggtggcgaacaactgatgctcatactcgtacaggagcaaccttctttccaccattactgggaattccaccactatttgctcccccagcccagaatcatgattcttcttcattccattcaaggacttcgggaaaaagtaatcgaaatggtcccgaaaaaggtgtaaatgggtcaataaatggaagtaatacatcatctgtaattggtatcaacacatctgtactatccactactgcttcaagttccatgggacaaactaaaagtacaagctcaggtggaggaaatcgaaaatgtaatcaggaacaaagcaaaaaccagcctttggatgctagagttgacaaaatcaaagataagaaaccaaggaagaaagcaatggaaagttctagcaacagtgatagtgattcaggcacatcatcagacacctcaagtgaaggcattagtagcagtgattcagatgatctagaagaagatgaagaagaagaagatcaaagtattgaagaaagtgaagatgatgattctgattcagagagtgaagcacaacataaaagtaacaaccaggtgctattacatggtatttcagacccaaaagcagatggacagaaagcaactgaaaaagcccaggaaaaaagaatacaccagccattacctcttgcgtctgaatcccagactcactcattccaatcccagcagaagcagcctcaggttttgtcacagcagcttccatttattttccaaagctctcaggcaaaggaggaatctgtgaacaaacacaccagtgtaatacagtctacgggattggtgtccaatgtgaaacctttatctttggtaaatcaagccaaaaaggaaacttacatgaaactcatagttccttctcctgatgttcttaaagcagggaataaaaatacctctgaagaatctagtttattgaccagtgaattgagatccaaacgggaacaatataaacaggcattcccatcacagttaaagaaacaagagtcatcgaagagcctgaagaaggttattgcagctttgtcaaatccaaaagcaacctctagttcaccagcacatccaaaacaaacattagaaaacaaccacccaaatccattcttgacaaatgcacttttaggtaatcaccaaccaaatggagttattcaaagtgtcattcaagaagctcctctagcacttactaccaaaactaaaatgcagagcaagattaatgaaaacattgctgctgcaagtagcacccctttttcctcacctgtaaatctgagtacaagtgggagaagaacccctggcaatcagacacctgtaatgccctctgcctctcccatcctgcatagtcaagggaaggaaaaagcagttagcaataatgtaaacccagtaaaaacacagcatcactcccatcctgcaaaatctttagtggaacaattcagaggaacagattcagacattcccagtagtaaagattctgaagattcaaatgaggatgaagaggaagatgatgaagaagaagatgaggaagatgatgaagatgatgaatctgatgacagccaatcaggcacttccaaaagaagaagagtaacagatgaacgtgaactgcgtattccattggaatatggctggcagagagagacaagaataagaaactttggagggcgccttcaaggagaagtagcatattatgctccatgtggaaagaaacttaggcagtaccctgaagtaataaagtatctcagcagaaatggaataatggatatctcaagggacaatttcagcttcagtgcaaaaataagagtgggtgacttctatgaagccagagatggaccgcagggaatgcagtggtgtcttttgaaagaagaggatgtcattcctcgtatcagggcaatggaaggtcgtagaggaagaccaccaaatccagatagacaacgagcaagagaggaatccaggatgagacgtcggaaaggtcgacctccaaatgttggcaatgctgaattcctagataacgcagatgcaaagttgctaagaaaactgcaagctcaagaaatagccaggcaagcagcacaaataaagcttttgagaaaacttcaaaagcaggaacaggctcgggttgctaaagaagccaaaaaacaacaagcaataatggctgctgaggagaagcggaagcaaaaagaacagataaagattatgaaacagcaggaaaaaattaagagaatacagcaaatcagaatggaaaaagaacttcgagctcagcaaattctagaggctaaaaagaaaaagaaggaagaagcggcaaatgccaaattattggaggccgagaaacgaataaaggaaaaagaaatgagaagacaacaagctgttcttctgaaacatcaggaacgagagcgaaggcgacaacacatgatgcttatgaaagctatggaagctcgtaaaaaagcagaagaaaaagagcggttgaaacaagaaaaacgtgatgagaaaagattaaataaagagcgtaaactagagcagcgaagattagaattagaaatggcaaaggaactaaagaagcctaatgaagacatgtgcttagcagaccaaaagcctttgccagagttgcctcgtattccaggacttgttctctctggaagtacattttcagactgtctcatggtggtgcagttcttacgaaactttggtaaagttttgggctttgatgtgaatattgatgttccaaacctgagtgttcttcaagagggattgctaaatataggggacagcatgggtgaagtacaagacttgcttgtgaggctcctctcagctgctgtatgtgatccaggtctaataacaggatacaaggctaaaacagctcttggagaacatttgctgaatgttggtgtgaatcgagacaatgtttccgagattttacagatatttatggaagcccactgtggacaaactgagcttactgaaagtctgaagaccaaagcttttcaggctcacactccagcacagaaagcttcagtcctggctttcctgatcaatgaactggcatgcagcaagagtgtggtcagtgaaatcgacaagaacattgattatatgtcaaacttgaggagagataaatgggtggtagaaggtaaactccgcaagctcagaatcattcatgctaagaaaacaggcaaaagagacacttcaggtggcattgatctgggagaagagcagcatcccttgggcacacccactccaggacgcaagcgaagaaggaagggaggagacagtgattatgacgatgatgatgacgatgacagtgatgaccaaggggatgaagatgatgaggatgaagaagataaagaagacaaaaaaggaaaaaagactgatatctgtgaagatgaggatgaaggtgaccaagcagcaagtgttgaagagctggaaaaacagattgaaaaactgagtaaacaacagagtcagtacagaaggaagctctttgatgcgtctcactcattgcgttcagtgatgtttggccaagatcgttacagacgccggtactggattcttccccaatgtggggggatttttgtagaaggcatggagagtggtgaaggactagaagaaattgcaaaagaaagagaaaaactgaaaaaggcagaaagtgtccagatcaaagaagaaatgtttgagacttctggggacagtttaaattgttcaaatacagatcactgtgaacaaaaggaagatcttaaagaaaaagataacacaaatctattccttcagaaacctggctctttttccaaattaagcaagcttttggaagtagctaagatgcctcctgagtcagaggttatgacccccaaaccaaatgctggtgcaaatgggtgcacgttgtcttatcagaacagtggaaaacattcactgggcagcgttcagtcaacagcaacgcaaagcaatgtggaaaaggcagactctaataatctgtttaatactggttcaagtggtccagggaagttctacagtcctctccccaatgaccagttactaaaaacgctgactgaaaagaatagacaatggtttagtcttttgccacgaacaccctgtgatgacacttcacttactcatgccgatatgtcaactgcttctttggtgactcctcagtctcagccaccatctaagtcaccttcacctaccccagctcctcttggatcttctgctcagaatcctgttggcttaaatccatttgctttatcacctcttcaggtgaaaggtggagtatctatgatgggacttcagttttgtggatggcccactggtgtggttacttctaatattccatttacatnatctgtacctagtctaggatcggggttagggttatcagaaggaaatggtaattcattcttgacttccaatgttgcttcaagtaaaagtgaatctccagtaccacagaatgaaaaggccacttcagctcaacctgcagctgttgaagtagcaaaaccagtagattttcctagtccaaaacctattccagaagaaatgcagtttggttggtggagaattattgacccagaggacctaaaagctttgctcaaagtgctgcatctcagaggaataagagaaaaggcattacaaaaacaaattcagaaacatttggattatattactcaagcctgcctcaagaataaggatgttgctattattgaactgaatgaaaatgaagaaaaccaagtaactcgagatattgtggagaactggtcagtagaagaacaagcaatggaaatggatttgagtgtccttcaacaggtagaagatctagaaaggagagttgcatcagcaagtttgcaagtgaagggttggatgtgtccagagcctgcatcagaaagggaggacttggtatattttgaacataaatcatttactaaattgtgcaaggagcatgatggagaatttactggcgaagacgaaagcagtgcacatgcactagaacggaagagtgacaaccccctagatatagctgtaaccaggctggctgatttggagcggaacattgaaagaaggtatctgaagagccccttaagtaccaccattcagatcaaactggataatgtgggcacagttactgtccctgctcctgcaccatccgttagtggtgatggtgacggaattgaagaggatattgctccagggctcagggtatggagaagggcattatcagaagctcgcagtgctgcacaggtagctctgtgcattcagcaattacagaaatcaatagcatgggaactgcttcttctttgtgatggctgtgacaaaggctgtcatacctactgccatagacccaagattacaacaatcccagatggagactggttttgtccagcttgcattgctaaggcaagtggtcaaactctaaaaatcaaaaaacttcatgtcaaaggaaaaaagactaatgagtcaaagaaaggcaagaaggtaactttaacaggagatactgaagatgaagactctgcatctacaagtagttcactaaaaagaggaaacaaagacctcaagaaaagaaaaatggaggaaaacacttctattaacttgtcaaaacaagaaagttttacttcagttaagaaacctaaaagagatgactccaaggacctagctctttgcagtatgattctgactgaaatggaaactcatgaggatgcatggccttttctacttcctgtaaacttgaaacttgttcctggttataagaaagttattaagaagcctatggatttttccacaattagagagaaactaagtagtggacagtatccaaaccttgaaacctttgctctagatgtcaggcttgtttttgacaactgtgaaacatttaatgaagatgattctgatataggcagagctggccacaatatgaggaagtattttgaaaaaaagtggacagatactttcaaaccactatgttatgaggatgctttagcagcccagccctatggagcagccaatagctaccaccagcttaccagccctgtgcctgaggcatcttagaagtggatcctttagcccaagttaaacattcagatgaccggagccccagccaacatctcgactgaaacttcataagcaaccctgagccagaactatccagctaagccactcctgatttcttgacccacaaaaactatgagataataaatgtttattgttggtttaaaaaaatcc

SEQ ID NO: 371216 - DNA, 4070 bp, Homo sapiens
agaagaatcatctcctgcttcaatctgctgctggataggaactaatcagagagagagaagcggaagacggagaaggagggagtcgaaggctttcccgatcacaaatctcacctccactacaactctctttatacttttcttgcagaaataataatagaaataaggaggtggtggggtttccaaaaatcttaaccttcaaccatctggggaaaaggcaaaaatcccatctaccgcaactctcagttcgagagtaaaggtttcccaacagtgatgtcacaagattgaccacattgatcacaatatggagtctggagaacggttaccatcctcagcagcctcctctactacaccaacttcatcttcgacaccttctgtggcttcagtagtttcaaaaggtggcctttccactggagttgcttcacttagctctacaatcaacccatgtggacatttattcagaacagctggggatcaaccgtttaacctgtccacagtgtcgagtgccttcccaatggtcagccacccagtctttggtctacattcagccagctcagggcattcagaatttggtggtttggggacacttggtacacccacagccttagccgcacatccccaactagcatcttttccagcagaatggtggcgaacaactgatgctcatactcgtacaggagcaaccttctttccaccattactgggaattccaccactatttgctcccccagcccagaatcatgattcttcttcattccattcaaggacttcgggaaaaagtaatcgaaatggtcccgaaaaaggtgtaaatgggtcaataaatggaagtaatacatcatctgtaattggtatcaacacatctgtactatccactactgcttcaagttccatgggacaaactaaaagtacaagctcaggtggaggaaatcgaaaatgtaatcaggaacaaagcaaaaaccagcctttggatgctagagttgacaaaatcaaagataagaaaccaaggaagaaagcaatggaaagttctagcaacagtgatagtgattcaggcacatcatcagacacctcaagtgaaggcattagtagcagtgattcagatgatctagaagaagatgaagaagaagaagatcaaagtattgaagaaagtgaagatgatgattctgattcagagagtgaagcacaacataaaagtaacaaccaggtgctattacatggtatttcagacccaaaagcagatggacagaaagcaactgaaaaagcccaggaaaaaagaatacaccagccattacctcttgcgtctgaatcccagactcactcattccaatcccagcagaagcagcctcaggttttgtcacagcagcttccatttattttccaaagctctcaggcaaaggaggaatctgtgaacaaacacaccagtgtaatacagtctacgggattggtgtccaatgtgaaacctttatctttggtaaatcaagccaaaaaggaaacttacatgaaactcatagttccttctcctgatgttcttaaagcagggaataaaaatacctctgaagaatctagtttattgaccagtgaattgagatccaaacgggaacaatataaacaggcattcccatcacagttaaagaaacaagagtcatcgaagagcctgaagaaggttattgcagctttgtcaaatccaaaagcaacctctagttcaccagcacatccaaaacaaacattagaaaacaaccacccaaatccattcttgacaaatgcacttttaggtaatcaccaaccaaatggagttattcaaagtgtcattcaagaagctcctctagcacttactaccaaaactaaaatgcagagcaagattaatgaaaacattgctgctgcaagtagcacccctttttcctcacctgtaaatctgagtacaagtgggagaagaacccctggcaatcagacacctgtaatgccctctgcctctcccatcctgcatagtcaagggaaggaaaaagcagttagcaataatgtaaacccagtaaaaacacagcatcactcccatcctgcaaaatctttagtggaacaattcagaggaacagattcagacattcccagtagtaaagattctgaagattcaaatgaggatgaagaggaagatgatgaagaagaagatgaggaagatgatgaagatgatgaatctgatgacagccaatcaggcacttccaaaagaagaagagtaacagatgaacgtgaactgcgtattccattggaatatggctggcagagagagacaagaataagaaactttggagggcgccttcaaggagaagtagcatattatgctccatgtggaaagaaacttaggcagtaccctgaagtaataaagtatctcagcagaaatggaataatggatatctcaagggacaatttcagcttcagtgcaaaaataagagtgggtgacttctatgaagccagagatggaccgcagggaatgcagtggtgtcttttgaaagaagaggatgtcattcctcgtatcagggcaatggaaggtcgtagaggaagaccaccaaatccagatagacaacgagcaagagaggaatccaggatgagacgtcggaaaggtcgacctccaaatgttggcaatgctgaattcctagataacgcagatgcaaagttgctaagaaaactgcaagctcaagaaatagccaggcaagcagcacaaataaagcttttgagaaaacttcaaaagcaggaacaggctcgggttgctaaagaagccaaaaaacaacaagcaataatggctgctgaggagaagcggaagcaaaaagaacagataaagattatgaaacagcaggaaaaaattaagagaatacagcaaatcagaatggaaaaagaacttcgagctcagcaaattctagaggctaaaaagaaaaagaaggaagaagcggcaaatgccaaattattggaggccgagaaacgaataaaggaaaaagaaatgagaagacaacaagctgttcttctgaaacatcaggaacgagagcgaaggcgacaacacatgatgcttatgaaagctatggaagctcgtaaaaaagcagaagaaaaagagcggttgaaacaagaaaaacgtgatgagaaaagattaaataaagagcgtaaactagagcagcgaagattagaattagaaatggcaaaggaactaaagaagcctaatgaagacatgtgcttagcagaccaaaagcctttgccagagttgcctcgtattccaggacttgttctctctggaagtacattttcagactgtctcatggtggtgcagttcttacgaaactttggtaaagttttgggctttgatgtgaatattgatgttccaaacctgagtgttcttcaagagggattgctaaatataggggacagcatgggtgaagtacaagacttgcttgtgaggctcctctcagctgctgtatgtgatccaggtctaataacaggatacaaggctaaaacagctcttggagaacatttgctgaatgttggtgtgaatcgagacaatgtttccgagattttacagatatttatggaagcccactgtggacaaactgagcttactgaaagtctgaagaccaaagcttttcaggctcacactccagcacagaaagcttcagtcctggctttcctgatcaatgaactggcatgcagcaagagtgtggtcagtgaaatcgacaagaacattgattatatgtcaaacttgaggagagataaatgggtggtagaaggtaaactccgcaagctcagaatcattcatgctaagaaaacaggcaaaagagacacttcaggtggcattgatctgggagaagagcagcatcccttgggcacacccactccaggacgcaagcgaagaaggaagggaggagacagtgattatgacgatgatgatgacgatgacagtgatgaccaaggggatgaagatgatgaggatgaagaagataaagaagacaaaaaaggaaaaaagactgatatctgtgaagatgaggatgaaggtgaccaagcagcagtcttgagacactcggggtcctctagagtcacctcagcat

SEQ ID NO: 371217 - DNA, 312 bp, Homo sapiens
acctgtagctgagactacaagcgtgtgcctctatacctggctaattttttttattttaagtagagatggggtcttgaactcctgagctgaagcgatatccttccaccgtggccttccaaagtaccaggattacaggcatgagccaccacacccagccagattttaacttctcattatatactacgcaaacatatactaaggccagcaggagtatatatatgtgtactgtacttgaatttcacatccattttcttcgacattagcaactgggagatactgaaaggaagtttcaaaatattttagtgtggccag

SEQ ID NO: 371218 - DNA, 382 bp, Homo sapiens
catagtcctaacataaatattttcttttttacttttgagatggagtcttgccctgtcgcccaggctggagtgcagtggtgcaatctcagctcactgcaacctccacctcctggactcaagtgattctcccacctcagcctcccgagtagctggactacaggtgtgcgcccctgtgcccagctaaaaagtattttctatatgtttgatttttttaggagacagtatgccaaattccttaaatttggcagattctcatagtatatgatctcatgctctgaaagagggaaatagaccactggaaaaatggatagttctcagctagtgcattacacgcacatgcatacacacattagaaacaaaagaagcaaaaacgaaaacccaa

SEQ ID NO: 371219 - DNA, 551 bp, Homo sapiens
ttgcacgctggcctgcttgtgggctccctccgaggttcacactgactcctccttcctgtctaccttaatcatgaaaccgaattcatggggttgtattctccccaccctcagctcctcactgttctcagagggatgtgagggaactgaactctggtgccgtgctagggggtaggggcctctccctcactgctggactggagctgggctcctgtagacctgaggggtccctctctctagggtctcctgtagggcttatgactgtgaatccttgatgtcatgattttatgtgacgattcctaggagtccctgcccctagagtaggagcagggctggaccccaagcccctccctcttccatggagagaagagtgatctggcttctcctcggacctctgtgaatatttattctatttatggttcccgggaagttgtttggtgaaggaagcccctccctgggcattttctgcctatgctggaatagctccctcttctggtcctggctcagggggctgggattttgatatattttctaataaaggactttgtctcgca

SEQ ID NO: 371220 - DNA, 1971 bp, Homo sapiens
tggctagtacgaggctgtggttatcggcgagaccccgcccccgcagcgcccgcttccaagatggcggcagcgatgcctgcccggctgttggggtggcggtgacgacaggcagcaaaagaccagctggtcccagattcgctgctggagtgctggatggagcctttctctgccctctgtgacatttccaattttagataatgcctcacatctctgtccccccgggaccccctggagcccccatgatccctaagaagacagcttgaacctagatctcacccccaggatgttgcggaggctgctggagcggccttgcacgctggccctgcttgtgggctcccagctggctgtcatgatgtacctgtcactggggggcttccgaagtctcagtgccctatttggccgagatcagggaccgacatttgactattctcaccctcgtgatgtctacagtaacctcagtcacctgcctggggccccagggggtcctccagctcctcaaggtctgccctactgtccagaacgatctcctctcttagtgggtcctgtgtcggtgtcctttagcccagtgccatcactggcagagattgtggagcggaatccccgggtagaaccagggggccggtaccgccctgcaggttgtgagccccgctcccgaacagccatcattgtgcctcatcgtgcccgggagcaccacctgcgcctgctgctctaccacctgcaccccttcttgcagcgccagcagcttgcttatggcatctatgtcatccaccaggctggaaatggaacatttaacagggcaaaactgttgaacgttggggtgcgagaggccctgcgtgatgaagagtgggactgcctgttcttgcacgatgtggacctcttgccagaaaatgaccacaatctgtatgtgtgtgacccccggggaccccgccatgttgccgttgctatgaacaagtttggatacagcctcccgtacccccagtacttcggaggagtctcagcacttactcctgaccagtacctgaagatgaatggcttccccaatgaatactggggctggggtggtgaggatgacgacattgctaccagggtgcgcctggctgggatgaagatctctcggccccccacatctgtaggacactataagatggtgaagcaccgaggagataagggcaatgaggaaaatccccacagatttgacctcctggtccgtacccagaattcctggacgcaagatgggatgaactcactgacataccagttgctggctcgagagctggggcctctttataccaacatcacagcagacattgggactgaccctcggggtcctcgggctccttctgggccacgttacccacctggttcctcccaagccttccgtcaagagatgctgcaacgccggcccccagccaggcctgggcctctatctactgccaaccacacagccctccgaggttcacactgactcctccttcctgtctaccttaatcatgaaaccgaattcatggggttgtattctccccaccctcagctcctcactgttctcagagggatgtgagggaactgaactctggtgccgtgctagggggtaggggcctctccctcactgctggactggagctgggctcctgtagacctgaggggtccctctctctagggtctcctgtagggcttatgactgtgaatccttgatgtcatgattttatgtgacgattcctaggagtccctgcccctagagtaggagcagggctggaccccaagcccctccctcttccatggagagaagagtgatctggcttctcctcggacctctgtgaatatttattctatttatggttcccgggaagttgtttggtgaaggaagcccctccctgggcattttctgcctatgctggaatagctccctcttctggtcctggctcagggggctgggattttgatatattttctaataaaggactttgtctcgca

SEQ ID NO: 371221 - DNA, 1992 bp, Homo sapiens
tggctagtacgaggctgtggttatcggcgagaccccgcccccgcagcgcccgcttccaagatggcggcagcgatgcctgcccggctgttggggtggcggtgacgacaggcagcaaaagaccagctggtcccagattcgctgctggagtgctggatggagcctttctctgccctctgtgacatttccaattttagataatgcctcacatctctgtccccccgggaccccctggagcccccatgatccctaagaagacagcttgaacctagaattcccctctccctccctagatctcacccccaggatgttgcggaggctgctggagcggccttgcacgctggccctgcttgtgggctcccagctggctgtcatgatgtacctgtcactggggggcttccgaagtctcagtgccctatttggccgagatcagggaccgacatttgactattctcaccctcgtgatgtctacagtaacctcagtcacctgcctggggccccagggggtcctccagctcctcaaggtctgccctactgtccagaacgatctcctctcttagtgggtcctgtgtcggtgtcctttagcccagtgccatcactggcagagattgtggagcggaatccccgggtagaaccagggggccggtaccgccctgcaggttgtgagccccgctcccgaacagccatcattgtgcctcatcgtgcccgggagcaccacctgcgcctgctgctctaccacctgcaccccttcttgcagcgccagcagcttgcttatggcatctatgtcatccaccaggctggaaatggaacatttaacagggcaaaactgttgaacgttggggtgcgagaggccctgcgtgatgaagagtgggactgcctgttcttgcacgatgtggacctcttgccagaaaatgaccacaatctgtatgtgtgtgacccccggggaccccgccatgttgccgttgctatgaacaagtttggatacagcctcccgtacccccagtacttcggaggagtctcagcacttactcctgaccagtacctgaagatgaatggcttccccaatgaatactggggctggggtggtgaggatgacgacattgctaccagggtgcgcctggctgggatgaagatctctcggccccccacatctgtaggacactataagatggtgaagcaccgaggagataagggcaatgaggaaaatccccacagatttgacctcctggtccgtacccagaattcctggacgcaagatgggatgaactcactgacataccagttgctggctcgagagctggggcctctttataccaacatcacagcagacattgggactgaccctcggggtcctcgggctccttctgggccacgttacccacctggttcctcccaagccttccgtcaagagatgctgcaacgccggcccccagccaggcctgggcctctatctactgccaaccacacagccctccgaggttcacactgactcctccttcctgtctaccttaatcatgaaaccgaattcatggggttgtattctccccaccctcagctcctcactgttctcagagggatgtgagggaactgaactctggtgccgtgctagggggtaggggcctctccctcactgctggactggagctgggctcctgtagacctgaggggtccctctctctagggtctcctgtagggcttatgactgtgaatccttgatgtcatgattttatgtgacgattcctaggagtccctgcccctagagtaggagcagggctggaccccaagcccctccctcttccatggagagaagagtgatctggcttctcctcggacctctgtgaatatttattctatttatggttcccgggaagttgtttggtgaaggaagcccctccctgggcattttctgcctatgctggaatagctccctcttctggtcctggctcagggggctgggattttgatatattttctaataaaggactttgtctcgca

SEQ ID NO: 371222 - DNA, 1900 bp, Homo sapiens
tggctagtacgaggctgtggttatcggcgagaccccgcccccgcagcgcccgcttccaagatggcggcagcgatgcctgcccggctgttggggtggcggtgacgacaggcagcaaaagaccagataatgcctcacatctctgtccccccgggaccccctggagcccccatgatccctaagaagacagcttgaacctagatctcacccccaggatgttgcggaggctgctggagcggccttgcacgctggccctgcttgtgggctcccagctggctgtcatgatgtacctgtcactggggggcttccgaagtctcagtgccctatttggccgagatcagggaccgacatttgactattctcaccctcgtgatgtctacagtaacctcagtcacctgcctggggccccagggggtcctccagctcctcaaggtctgccctactgtccagaacgatctcctctcttagtgggtcctgtgtcggtgtcctttagcccagtgccatcactggcagagattgtggagcggaatccccgggtagaaccagggggccggtaccgccctgcaggttgtgagccccgctcccgaacagccatcattgtgcctcatcgtgcccgggagcaccacctgcgcctgctgctctaccacctgcaccccttcttgcagcgccagcagcttgcttatggcatctatgtcatccaccaggctggaaatggaacatttaacagggcaaaactgttgaacgttggggtgcgagaggccctgcgtgatgaagagtgggactgcctgttcttgcacgatgtggacctcttgccagaaaatgaccacaatctgtatgtgtgtgacccccggggaccccgccatgttgccgttgctatgaacaagtttggatacagcctcccgtacccccagtacttcggaggagtctcagcacttactcctgaccagtacctgaagatgaatggcttccccaatgaatactggggctggggtggtgaggatgacgacattgctaccagggtgcgcctggctgggatgaagatctctcggccccccacatctgtaggacactataagatggtgaagcaccgaggagataagggcaatgaggaaaatccccacagatttgacctcctggtccgtacccagaattcctggacgcaagatgggatgaactcactgacataccagttgctggctcgagagctggggcctctttataccaacatcacagcagacattgggactgaccctcggggtcctcgggctccttctgggccacgttacccacctggttcctcccaagccttccgtcaagagatgctgcaacgccggcccccagccaggcctgggcctctatctactgccaaccacacagccctccgaggttcacactgactcctccttcctgtctaccttaatcatgaaaccgaattcatggggttgtattctccccaccctcagctcctcactgttctcagagggatgtgagggaactgaactctggtgccgtgctagggggtaggggcctctccctcactgctggactggagctgggctcctgtagacctgaggggtccctctctctagggtctcctgtagggcttatgactgtgaatccttgatgtcatgattttatgtgacgattcctaggagtccctgcccctagagtaggagcagggctggaccccaagcccctccctcttccatggagagaagagtgatctggcttctcctcggacctctgtgaatatttattctatttatggttcccgggaagttgtttggtgaaggaagcccctccctgggcattttctgcctatgctggaatagctccctcttctggtcctggctcagggggctgggattttgatatattttctaataaaggactttgtctcgca

SEQ ID NO: 371223 - DNA, 1992 bp, Homo sapiens
  misc_feature (1)..(1): n is a, c, g, or t
nccaggctgtaccggccccgggtgttaggccctgactgtctctgcccctgctctccctctccctttctcttcagcagtaaccctcctccccacccccgctagaagaggggaaaggtagaaaagctggtcccagattcgctgctggagtgctggatggagcctttctctgccctctgtgacatttccaattttagataatgcctcacatctctgtccccccgggaccccctggagcccccatgatccctaagaagacagcttgaacctagaattcccctctccctccctagatctcacccccaggatgttgcggaggctgctggagcggccttgcacgctggccctgcttgtgggctcccagctggctgtcatgatgtacctgtcactggggggcttccgaagtctcagtgccctatttggccgagatcagggaccgacatttgactattctcaccctcgtgatgtctacagtaacctcagtcacctgcctggggccccagggggtcctccagctcctcaaggtctgccctactgtccagaacgatctcctctcttagtgggtcctgtgtcggtgtcctttagcccagtgccatcactggcagagattgtggagcggaatccccgggtagaaccagggggccggtaccgccctgcaggttgtgagccccgctcccgaacagccatcattgtgcctcatcgtgcccgggagcaccacctgcgcctgctgctctaccacctgcaccccttcttgcagcgccagcagcttgcttatggcatctatgtcatccaccaggctggaaatggaacatttaacagggcaaaactgttgaacgttggggtgcgagaggccctgcgtgatgaagagtgggactgcctgttcttgcacgatgtggacctcttgccagaaaatgaccacaatctgtatgtgtgtgacccccggggaccccgccatgttgccgttgctatgaacaagtttggatacagcctcccgtacccccagtacttcggaggagtctcagcacttactcctgaccagtacctgaagatgaatggcttccccaatgaatactggggctggggtggtgaggatgacgacattgctaccagggtgcgcctggctgggatgaagatctctcggccccccacatctgtaggacactataagatggtgaagcaccgaggagataagggcaatgaggaaaatccccacagatttgacctcctggtccgtacccagaattcctggacgcaagatgggatgaactcactgacataccagttgctggctcgagagctggggcctctttataccaacatcacagcagacattgggactgaccctcggggtcctcgggctccttctgggccacgttacccacctggttcctcccaagccttccgtcaagagatgctgcaacgccggcccccagccaggcctgggcctctatctactgccaaccacacagccctccgaggttcacactgactcctccttcctgtctaccttaatcatgaaaccgaattcatggggttgtattctccccaccctcagctcctcactgttctcagagggatgtgagggaactgaactctggtgccgtgctagggggtaggggcctctccctcactgctggactggagctgggctcctgtagacctgaggggtccctctctctagggtctcctgtagggcttatgactgtgaatccttgatgtcatgattttatgtgacgattcctaggagtccctgcccctagagtaggagcagggctggaccccaagcccctccctcttccatggagagaagagtgatctggcttctcctcggacctctgtgaatatttattctatttatggttcccgggaagttgtttggtgaaggaagcccctccctgggcattttctgcctatgctggaatagctccctcttctggtcctggctcagggggctgggattttgatatattttctaataaaggactttgtctcgca

SEQ ID NO: 371224 - DNA, 2137 bp, Homo sapiens
taggctaggtacgaggctgggtgtgaatcggccgaggggcagcgatgcctgcccggctgttggggtggcggtgacgacaggcagcaaaagaccagagtaaccctcctccccacccccgctagaagaggggaaaggtagaaaaggtagaggacgccacccccaccctactctccgccgagctccggggctgttcgcttacagcccccaggtggtcacggtccctgcacctgaggagttggcacccaggcacatgaagaatagaaggagcctgtttcctacttcgccctggctggtcccagattcgctgctggagtgctggatggagcctttctctgccctctgtgacatttccaattttagataatgcctcacatctctgtccccccgggaccccctggagcccccatgatccctaagaagacagcttgaacctagatctcacccccaggatgttgcggaggctgctggagcggccttgcacgctggccctgcttgtgggctcccagctggctgtcatgatgtacctgtcactggggggcttccgaagtctcagtgccctatttggccgagatcagggaccgacatttgactattctcaccctcgtgatgtctacagtaacctcagtcacctgcctggggccccagggggtcctccagctcctcaaggtctgccctactgtccagaacgatctcctctcttagtgggtcctgtgtcggtgtcctttagcccagtgccatcactggcagagattgtggagcggaatccccgggtagaaccagggggccggtaccgccctgcaggttgtgagccccgctcccgaacagccatcattgtgcctcatcgtgcccgggagcaccacctgcgcctgctgctctaccacctgcaccccttcttgcagcgccagcagcttgcttatggcatctatgtcatccaccaggctggaaatggaacatttaacagggcaaaactgttgaacgttggggtgcgagaggccctgcgtgatgaagagtgggactgcctgttcttgcacgatgtggacctcttgccagaaaatgaccacaatctgtatgtgtgtgacccccggggaccccgccatgttgccgttgctatgaacaagtttggatacagcctcccgtacccccagtacttcggaggagtctcagcacttactcctgaccagtacctgaagatgaatggcttccccaatgaatactggggctggggtggtgaggatgacgacattgctaccagggtgcgcctggctgggatgaagatctctcggccccccacatctgtaggacactataagatggtgaagcaccgaggagataagggcaatgaggaaaatccccacagatttgacctcctggtccgtacccagaattcctggacgcaagatgggatgaactcactgacataccagttgctggctcgagagctggggcctctttataccaacatcacagcagacattgggactgaccctcggggtcctcgggctccttctgggccacgttacccacctggttcctcccaagccttccgtcaagagatgctgcaacgccggcccccagccaggcctgggcctctatctactgccaaccacacagccctccgaggttcacactgactcctccttcctgtctaccttaatcatgaaaccgaattcatggggttgtattctccccaccctcagctcctcactgttctcagagggatgtgagggaactgaactctggtgccgtgctagggggtaggggcctctccctcactgctggactggagctgggctcctgtagacctgaggggtccctctctctagggtctcctgtagggcttatgactgtgaatccttgatgtcatgattttatgtgacgattcctaggagtccctgcccctagagtaggagcagggctggaccccaagcccctccctcttccatggagagaagagtgatctggcttctcctcggacctctgtgaatatttattctatttatggttcccgggaagttgtttggtgaaggaagcccctccctgggcattttctgcctatgctggaatagctccctcttctggtcctggctcagggggctgggattttgatatattttctaataaaggactttgtctcgca

SEQ ID NO: 371225 - DNA, 2295 bp, Homo sapiens
  misc_feature (15)..(15): n is a, c, g, or t
ggctgtactggtccnacgtcgttaaatagggcagcgatgcctgcccggctgttggggtggcggtgacgacaggcagcaaaagaccagctggtcccagattcgctgctggagtgctggatggagcctttctctgccctctgtgacatttccaattttagataatgcctcacatctctgtccccccgggaccccctggagcccccatgatccctaagaagacagcttgaacctagggtgagtctatctcttcccttctaaaattggaagagggggttctctagagactttctgaaatgaacatgagatttgaatgatgtaaacatttttgggggtgaggactgacagtagatggtgggagtggtttggggggaggtagaggagagcgaaacttgggctgaagtgacaggtggtagggttactggtggttacattctgtttccttgcgtgactgtgcacctgtgtgctcccttctgtgactttgttttctgctttttcctctttacccctggcatcaccttcaaccctacctactgacctctctgctggcttgctctcttcctgcctacccccagaattcccctctccctccctagatctcacccccaggatgttgcggaggctgctggagcggccttgcacgctggccctgcttgtgggctcccagctggctgtcatgatgtacctgtcactggggggcttccgaagtctcagtgccctatttggccgagatcagggaccgacatttgactattctcaccctcgtgatgtctacagtaacctcagtcacctgcctggggccccagggggtcctccagctcctcaaggtctgccctactgtccagaacgatctcctctcttagtgggtcctgtgtcggtgtcctttagcccagtgccatcactggcagagattgtggagcggaatccccgggtagaaccagggggccggtaccgccctgcaggttgtgagccccgctcccgaacagccatcattgtgcctcatcgtgcccgggagcaccacctgcgcctgctgctctaccacctgcaccccttcttgcagcgccagcagcttgcttatggcatctatgtcatccaccaggctggaaatggaacatttaacagggcaaaactgttgaacgttggggtgcgagaggccctgcgtgatgaagagtgggactgcctgttcttgcacgatgtggacctcttgccagaaaatgaccacaatctgtatgtgtgtgacccccggggaccccgccatgttgccgttgctatgaacaagtttggatacagcctcccgtacccccagtacttcggaggagtctcagcacttactcctgaccagtacctgaagatgaatggcttccccaatgaatactggggctggggtggtgaggatgacgacattgctaccagggtgcgcctggctgggatgaagatctctcggccccccacatctgtaggacactataagatggtgaagcaccgaggagataagggcaatgaggaaaatccccacagatttgacctcctggtccgtacccagaattcctggacgcaagatgggatgaactcactgacataccagttgctggctcgagagctggggcctctttataccaacatcacagcagacattgggactgaccctcggggtcctcgggctccttctgggccacgttacccacctggttcctcccaagccttccgtcaagagatgctgcaacgccggcccccagccaggcctgggcctctatctactgccaaccacacagccctccgaggttcacactgactcctccttcctgtctaccttaatcatgaaaccgaattcatggggttgtattctccccaccctcagctcctcactgttctcagagggatgtgagggaactgaactctggtgccgtgctagggggtaggggcctctccctcactgctggactggagctgggctcctgtagacctgaggggtccctctctctagggtctcctgtagggcttatgactgtgaatccttgatgtcatgattttatgtgacgattcctaggagtccctgcccctagagtaggagcagggctggaccccaagcccctccctcttccatggagagaagagtgatctggcttctcctcggacctctgtgaatatttattctatttatggttcccgggaagttgtttggtgaaggaagcccctccctgggcattttctgcctatgctggaatagctccctcttctggtcctggctcagggggctgggattttgatatattttctaataaaggactttgtctcgca

SEQ ID NO: 371226 - DNA, 1946 bp, Homo sapiens
tggctagtacgaggctgtggttatcggcgagaccccgcccccgcagcgcccgcttccaagatggcggcagcgatgcctgcccggctgttggggtggcggtgacgacaggcagcaaaagaccagctggtcccagattcgctgctggagtgctggatggagcctttctctgccctctgtgacatttccaattttagataatgcctcacatctctgtccccccgggaccccctggagcccccatgatccctaagaagacagcttgaacctagatctcacccccaggatgttgcggaggctgctggagcggccttgcacgctggccctgcttgtgggctcccagctggctgtcatgatgtacctgtcactggggggcttccgaagtctcagtgccctatttggccgagatcagggaccgacatttgactattctcaccctcgtgatgtctacagtaacctcagtcacctgcctggggccccagggggtcctccagctcctcaaggtctgccctactgtccagaacgatctcctctcttagtgggtcctgtgtcggtgtcctttagcccagtgccatcactggcagagattgtggagcggaatccccgggtagaaccagggggccggtaccgccctgcaggttgtgagccccgctcccgaacagccatcattgtgcctcatcgtgcccgggagcaccacctgcgcctgctgctctaccacctgcaccccttcttgcagcgccagcagcttgcttatggcatctatgtcatccaccaggctggaaatggaacatttaacagggcaaaactgttgaacgttggggtgcgagaggccctgcgtgatgaagagtgggactgcctgttcttgcacgatgtggacctcttgccagaaaatgaccacaatctgtatgtgtgtgacccccggggaccccgccatgttgccgttgctatgaacaagtttggatacagcctcccgtacccccagtacttcggaggagtctcagcacttactcctgaccagtacctgaagatgaatggcttccccaatgaatactggggctggggtggtgaggatgacgacattgctaccagggtgcgcctggctgggatgaagatctctcggccccccacatctgtaggacactataagatggtgaagcaccgaggagataagggcaatgaggaaaatccccacagaattcctggacgcaagatgggatgaactcactgacataccagttgctggctcgagagctggggcctctttataccaacatcacagcagacattgggactgaccctcggggtcctcgggctccttctgggccacgttacccacctggttcctcccaagccttccgtcaagagatgctgcaacgccggcccccagccaggcctgggcctctatctactgccaaccacacagccctccgaggttcacactgactcctccttcctgtctaccttaatcatgaaaccgaattcatggggttgtattctccccaccctcagctcctcactgttctcagagggatgtgagggaactgaactctggtgccgtgctagggggtaggggcctctccctcactgctggactggagctgggctcctgtagacctgaggggtccctctctctagggtctcctgtagggcttatgactgtgaatccttgatgtcatgattttatgtgacgattcctaggagtccctgcccctagagtaggagcagggctggaccccaagcccctccctcttccatggagagaagagtgatctggcttctcctcggacctctgtgaatatttattctatttatggttcccgggaagttgtttggtgaaggaagcccctccctgggcattttctgcctatgctggaatagctccctcttctggtcctggctcagggggctgggattttgatatattttctaataaaggactttgtctcgca

SEQ ID NO: 371227 - DNA, 1713 bp, Homo sapiens
tggctagtacgaggctgtggttatcggcgagaccccgcccccgcagcgcccgcttccaagatggcggcagcgatgcctgcccggctgttggggtggcggtgacgacaggcagcaaaagaccagctggtcccagattcgctgctggagtgctggatggagcctttctctgccctctgtgacatttccaattttagataatgcctcacatctctgtcccccagggggtcctccagctcctcaaggtctgccctactgtccagaacgatctcctctcttagtgggtcctgtgtcggtgtcctttagcccagtgccatcactggcagagattgtggagcggaatccccgggtagaaccagggggccggtaccgccctgcaggttgtgagccccgctcccgaacagccatcattgtgcctcatcgtgcccgggagcaccacctgcgcctgctgctctaccacctgcaccccttcttgcagcgccagcagcttgcttatggcatctatgtcatccaccaggctggaaatggaacatttaacagggcaaaactgttgaacgttggggtgcgagaggccctgcgtgatgaagagtgggactgcctgttcttgcacgatgtggacctcttgccagaaaatgaccacaatctgtatgtgtgtgacccccggggaccccgccatgttgccgttgctatgaacaagtttggatacagcctcccgtacccccagtacttcggaggagtctcagcacttactcctgaccagtacctgaagatgaatggcttccccaatgaatactggggctggggtggtgaggatgacgacattgctaccagggtgcgcctggctgggatgaagatctctcggccccccacatctgtaggacactataagatggtgaagcaccgaggagataagggcaatgaggaaaatccccacagatttgacctcctggtccgtacccagaattcctggacgcaagatgggatgaactcactgacataccagttgctggctcgagagctggggcctctttataccaacatcacagcagacattgggactgaccctcggggtcctcgggctccttctgggccacgttacccacctggttcctcccaagccttccgtcaagagatgctgcaacgccggcccccagccaggcctgggcctctatctactgccaaccacacagccctccgaggttcacactgactcctccttcctgtctaccttaatcatgaaaccgaattcatggggttgtattctccccaccctcagctcctcactgttctcagagggatgtgagggaactgaactctggtgccgtgctagggggtaggggcctctccctcactgctggactggagctgggctcctgtagacctgaggggtccctctctctagggtctcctgtagggcttatgactgtgaatccttgatgtcatgattttatgtgacgattcctaggagtccctgcccctagagtaggagcagggctggaccccaagcccctccctcttccatggagagaagagtgatctggcttctcctcggacctctgtgaatatttattctatttatggttcccgggaagttgtttggtgaaggaagcccctccctgggcattttctgcctatgctggaatagctccctcttctggtcctggctcagggggctgggattttgatatattttctaataaaggactttgtctcgca

SEQ ID NO: 371228 - DNA, 1892 bp, Homo sapiens
tggctagtacgaggctgtggttatcggcgagaccccgcccccgcagcgcccgcttccaagatggcggcagcgatgcctgcccggctgttggggtggcggtgacgacaggcagcaaaagaccagctggtcccagattcgctgctggagtgctggatggagcctttctctgccctctgtgacatttccaattttagataatgcctcacatctctgtccccccgggaccccctggagcccccatgatccctaagaagacagcttgaacctagatctcacccccaggatgttgcggaggctgctggagcggccttgcacgctggccctgcttgtgggctcccagctggctgtcatgatgtacctgtcactggggggcttccgaagtctcagtgccctatttggccgagatcagggaccgacatttgactattctcaccctcgtgatgtctacagtaacctcagtcacctgcctggggccccagggggtcctccagctcctcaaggtctgccctactgtccagaacgatctcctctcttagtgggtcctgtgtcggtgtcctttagcccagtgccatcactggcagagattgtggagcggaatccccgggtagaaccagggggccgctgctgctctaccacctgcaccccttcttgcagcgccagcagcttgcttatggcatctatgtcatccaccaggctggaaatggaacatttaacagggcaaaactgttgaacgttggggtgcgagaggccctgcgtgatgaagagtgggactgcctgttcttgcacgatgtggacctcttgccagaaaatgaccacaatctgtatgtgtgtgacccccggggaccccgccatgttgccgttgctatgaacaagtttggatacagcctcccgtacccccagtacttcggaggagtctcagcacttactcctgaccagtacctgaagatgaatggcttccccaatgaatactggggctggggtggtgaggatgacgacattgctaccagggtgcgcctggctgggatgaagatctctcggccccccacatctgtaggacactataagatggtgaagcaccgaggagataagggcaatgaggaaaatccccacagatttgacctcctggtccgtacccagaattcctggacgcaagatgggatgaactcactgacataccagttgctggctcgagagctggggcctctttataccaacatcacagcagacattgggactgaccctcggggtcctcgggctccttctgggccacgttacccacctggttcctcccaagccttccgtcaagagatgctgcaacgccggcccccagccaggcctgggcctctatctactgccaaccacacagccctccgaggttcacactgactcctccttcctgtctaccttaatcatgaaaccgaattcatggggttgtattctccccaccctcagctcctcactgttctcagagggatgtgagggaactgaactctggtgccgtgctagggggtaggggcctctccctcactgctggactggagctgggctcctgtagacctgaggggtccctctctctagggtctcctgtagggcttatgactgtgaatccttgatgtcatgattttatgtgacgattcctaggagtccctgcccctagagtaggagcagggctggaccccaagcccctccctcttccatggagagaagagtgatctggcttctcctcggacctctgtgaatatttattctatttatggttcccgggaagttgtttggtgaaggaagcccctccctgggcattttctgcctatgctggaatagctccctcttctggtcctggctcagggggctgggattttgatatattttctaataaaggactttgtctcgca

SEQ ID NO: 371229 - DNA, 1867 bp, Homo sapiens
tggctagtacgaggctgtggttatcggcgagaccccgcccccgcagcgcccgcttccaagatggcggcagcgatgcctgcccggctgttggggtggcggtgacgacaggcagcaaaagaccagctggtcccagattcgctgctggagtgctggatggagcctttctctgccctctgtgacatttccaattttagataatgcctcacatctctgtccccccgggaccccctggagcccccatgatccctaagaagacagcttgaacctagatctcacccccaggatgttgcggaggctgctggagcggccttgcacgctggccctgcttgtgggctcccagctggctgtcatgatgtacctgtcactggggggcttccgaagtctcagtgccctatttggccgagatcagggaccgacatttgactattctcaccctcgtgatgtctacagtaacctcagtcacctgcctggggccccagggggtcctccagctcctcaaggtctgccctactgtccagaacgatctcctctcttagtgggtcctgtgtcggtgtcctttagcccagtgccatcactggcagagattgtggagcggaatccccgggtagaaccagggggccgctgctgctctaccacctgcaccccttcttgcagcgccagcagcttgcttatggcatctatgtcatccaccaggctggaaatggaacatttaacagggcaaaactgttgaacgttggggtgcgagaggccctgcgtgatgaagagtgggactgcctgttcttgcacgatgtggacctcttgccagaaaatgaccacaatctgtatgtgtgtgacccccggggaccccgccatgttgccgttgctatgaacaagtttggatacagcctcccgtacccccagtacttcggaggagtctcagcacttactcctgaccagtacctgaagatgaatggcttccccaatgaatactggggctggggtggtgaggatgacgacattgctaccagggtgcgcctggctgggatgaagatctctcggccccccacatctgtaggacactataagatggtgaagcaccgaggagataagggcaatgaggaaaatccccacagaattcctggacgcaagatgggatgaactcactgacataccagttgctggctcgagagctggggcctctttataccaacatcacagcagacattgggactgaccctcggggtcctcgggctccttctgggccacgttacccacctggttcctcccaagccttccgtcaagagatgctgcaacgccggcccccagccaggcctgggcctctatctactgccaaccacacagccctccgaggttcacactgactcctccttcctgtctaccttaatcatgaaaccgaattcatggggttgtattctccccaccctcagctcctcactgttctcagagggatgtgagggaactgaactctggtgccgtgctagggggtaggggcctctccctcactgctggactggagctgggctcctgtagacctgaggggtccctctctctagggtctcctgtagggcttatgactgtgaatccttgatgtcatgattttatgtgacgattcctaggagtccctgcccctagagtaggagcagggctggaccccaagcccctccctcttccatggagagaagagtgatctggcttctcctcggacctctgtgaatatttattctatttatggttcccgggaagttgtttggtgaaggaagcccctccctgggcattttctgcctatgctggaatagctccctcttctggtcctggctcagggggctgggattttgatatattttctaataaaggactttgtctcgca

SEQ ID NO: 371230 - DNA, 1422 bp, Homo sapiens
aagggaattcgtgctggtgctaagggaattcgtgctggtgctaagggaattcgtgctggtgctaagggaattgtaccgccctgcaggttgtgagccccgctcccgaacagccatcattgtgcctcatcgtgcccgggagcaccacctgcgcctgctgctctaccacctgcaccccttcttgcagcgccagcagcttgcttatggcatctatgtcatccaccaggctggaaatggaacatttaacagggcaaaactgttgaacgttggggtgcgagaggccctgcgtgatgaagagtgggactgcctgttcttgcacgatgtggacctcttgccagaaaatgaccacaatctgtatgtgtgtgacccccggggaccccgccatgttgccgttgctatgaacaagtttggatacagcctcccgtacccccagtacttcggaggagtctcagcacttactcctgaccagtacctgaagatgaatggcttccccaatgaatactggggctggggtggtgaggatgacgacattgctaccagggtgcgcctggctgggatgaagatctctcggccccccacatctgtaggacactataagatggtgaagcaccgaggagataagggcaatgaggaaaatccccacagatttgacctcctggtccgtacccagaattcctggacgcaagatgggatgaactcactgacataccagttgctggctcgagagctggggcctctttataccaacatcacagcagacattgggactgaccctcggggtcctcgggctccttctgggccacgttacccacctggttcctcccaagccttccgtcaagagatgctgcaacgccggcccccagccaggcctgggcctctatctactgccaaccacacagccctccgaggttcacactgactcctccttcctgtctaccttaatcatgaaaccgaattcatggggttgtattctccccaccctcagctcctcactgttctcagagggatgtgagggaactgaactctggtgccgtgctagggggtaggggcctctccctcactgctggactggagctgggctcctgtagacctgaggggtccctctctctagggtctcctgtagggcttatgactgtgaatccttgatgtcatgattttatgtgacgattcctaggagtccctgcccctagagtaggagcagggctggaccccaagcccctccctcttccatggagagaagagtgatctggcttctcctcggacctctgtgaatatttattctatttatggttcccgggaagttgtttggtgaaggaagcccctccctgggcattttctgcctatgctggaatagctccctcttctggtcctggctcagggggctgggattttgatatattttctaataaaggactttgtctcgca

SEQ ID NO: 371231 - DNA, 1167 bp, Homo sapiens
ttctagaggatcccataaggcggccctgcgtgatgaagagtgggactgcctgttcttgcacgatgtggacctcttgccagaaaatgaccacaatctgtatgtgtgtgacccccggggaccccgccatgttgccgttgctatgaacaagtttggatacagcctcccgtacccccagtacttcggaggagtctcagcacttactcctgaccagtacctgaagatgaatggcttccccaatgaatactggggctggggtggtgaggatgacgacattgctaccagggtgcgcctggctgggatgaagatctctcggccccccacatctgtaggacactataagatggtgaagcaccgaggagataagggcaatgaggaaaatccccacagatttgacctcctggtccgtacccagaattcctggacgcaagatgggatgaactcactgacataccagttgctggctcgagagctggggcctctttataccaacatcacagcagacattgggactgaccctcggggtcctcgggctccttctgggccacgttacccacctggttcctcccaagccttccgtcaagagatgctgcaacgccggcccccagccaggcctgggcctctatctactgccaaccacacagccctccgaggttcacactgactcctccttcctgtctaccttaatcatgaaaccgaattcatggggttgtattctccccaccctcagctcctcactgttctcagagggatgtgagggaactgaactctggtgccgtgctagggggtaggggcctctccctcactgctggactggagctgggctcctgtagacctgaggggtccctctctctagggtctcctgtagggcttatgactgtgaatccttgatgtcatgattttatgtgacgattcctaggagtccctgcccctagagtaggagcagggctggaccccaagcccctccctcttccatggagagaagagtgatctggcttctcctcggacctctgtgaatatttattctatttatggttcccgggaagttgtttggtgaaggaagcccctccctgggcattttctgcctatgctggaatagctccctcttctggtcctggctcagggggctgggattttgatatattttctaataaaggactttgtctcgca

SEQ ID NO: 371232 - DNA, 1101 bp, Homo sapiens
tgtgtgtacagaaacatttaatcccttccttgcttttctctactctggatcccccatgataccctcacttttcccatagggtgcgcctggctgggatgaagatctctcggccccccacatctgtaggacactataagatggtgaagcaccgaggagataagggcaatgaggaaaatccccacaggtaggaagaaggaaggactgcctgggaattgttactggatcctcagggttctgtacccctagccaggaaaatcctaaaggtccctagatttctggctgttcctttctgggtcttagtctccaacctctaaccctcagatttgacctcctggtccgtacccagaattcctggacgcaagatgggatgaactcactgacataccagttgctggctcgagagctggggcctctttataccaacatcacagcagacattgggactgaccctcggggtcctcgggctccttctgggccacgttacccacctggttcctcccaagccttccgtcaagagatgctgcaacgccggcccccagccaggcctgggcctctatctactgccaaccacacagccctccgaggttcacactgactcctccttcctgtctaccttaatcatgaaaccgaattcatggggttgtattctccccaccctcagctcctcactgttctcagagggatgtgagggaactgaactctggtgccgtgctagggggtaggggcctctccctcactgctggactggagctgggctcctgtagacctgaggggtccctctctctagggtctcctgtagggcttatgactgtgaatccttgatgtcatgattttatgtgacgattcctaggagtccctgcccctagagtaggagcagggctggaccccaagcccctccctcttccatggagagaagagtgatctggcttctcctcggacctctgtgaatatttattctatttatggttcccgggaagttgtttggtgaaggaagcccctccctgggcattttctgcctatgctggaatagctccctcttctggtcctggctcagggggctgggattttgatatattttctaataaaggactttgtctcgca

SEQ ID NO: 371233 - DNA, 1318 bp, Homo sapiens
tggctagtacgaggctgtggttatcggcgagaccccgcccccgcagcgcccgcttccaagatggcggcagcgatgcctgcccggctgttggggtggcggtgacgacaggcagcaaaagaccagctggtcccagattcgctgctggagtgctggatggagcctttctctgccctctgtgacatttccaattttagataatgcctcacatctctgtccccccgggaccccctggagcccccatgatccctaagaagacagcttgaacctagatctcacccccaggatgttgcggaggctgctggagcggccttgcacgctggccctgcttgtgggctcccagctggctgtcatgatgtacctgtcactggggggcttccgaagtctcagtgccctatttggccgagatcagggaccgacatttgactattctcaccctcgtgatgtctacagtaacctcagtcacctgcctggggccccagggggtcctccagctcctcaaggtctgccctactgtccagaacgatctcctctcttagtgggtcctgtgtcggtgtcctttagcccagtgccatcactggcagagattgtggagcggaatccccgggtagaaccagggggccggtaccgccctgcaggttgtgagccccgctcccgaacagccatcattgtgcctcatcgtgcccgggagcaccacctgcgcctgctgctctaccacctgcaccccttcttgcagcgccagcagcttgcttatggcatctatgtcatccaccaggctggaaatggaacatttaacagggcaaaactgttgaacgttggggtgcgagaggccctgcgtgatgaagagtgggactgcctgttcttgcacgatgtggacctcttgccagaaaatgaccacaatctgtatgtgtgtgacccccggggaccccgccatgttgccgttgctatgaacaagtttggatacagcctcccgtacccccagtacttcggaggagtctcagcacttactcctgaccagtacctgaagatgaatggcttccccaatgaatactggggctggggtggtgaggatgacgacattgctaccagggtgcgcctggctgggatgaagatctctcggccccccacatctgtaggacactataagatggtgaagcaccgaggagataagggcaatgaggaaaatccccacagattgactcctggttccgtcccagaattctgacgcagatgggtaactcctgcactccgtggtggccaaaacggggccttttacaacttcagaattggatagctcgcggccggggcctttgggcaggtc

SEQ ID NO: 371234 - DNA, 868 bp, Homo sapiens
tggctagtacgaggctgtggttatcggcgagaccccgcccccgcagcgcccgcttccaagatggcggcagcgatgcctgcccggctgttggggtggcggtgacgacaggcagcaaaagaccagctggtcccagattcgctgctggagtgctggatggagcctttctctgccctctgtgacatttccaattttagataatgcctcacatctctgtccccccgggaccccctggagcccccatgatccctaagaagacagcttgaacctagaattcccctctccctccctagatctcacccccaggatgttgcggaggctgctggagcggccttgcacgctggccctgcttgtgggctcccagctggctgtcatgatgtacctgtcactggggggcttccgaagtctcagtgccctatttggccgagatcagggaccgacatttgactattctcaccctcgtgatgtctacagtaacctcagtcacctgcctggggccccagggggtcctccagctcctcaaggtctgccctactgtccagaacgatctcctctcttagctcctgtagggcttatgactgtgaatccttgatgtcatgattttatgtgacgattcctaggagtccctgcccctagagtaggagcagggctggaccccaagcccctccctcttccatggagagaagagtgatctggcttctcctcggacctctgtgaatatttattctatttatggttcccgggaagttgtttggtgaaggaagcccctccctgggcattttctgcctatgctggaatagctccctcttctggtcctggctcagggggctgggattttgatatattttctaataaaggactttgtctcgca

SEQ ID NO: 371235 - DNA, 158 bp, Homo sapiens
gggatgtgtccccagaagactcggggtatgcaaggatctttctctccctagcctcccgtacccccagtacttcggaggagtctcagcacttactcctgaccagtacctgaagatgaatggcttccccaatgaatactggggctggggtggtgaggatg

SEQ ID NO: 371236 - DNA, 1943 bp, Homo sapiens
taggctaggtacgaggctgggtgtgaatcggccgaggggcagcgatgcctgcccggctgttggggtggcggtgacgacaggcagcaaaagaccagctggtcccagattcgctgctggagtgctggatggagcctttctctgccctctgtgacatttccaattttagataatgcctcacatctctgtccccccgggaccccctggagcccccatgatccctaagaagacagcttgaacctagatctcacccccaggatgttgcggaggctgctggagcggccttgcacgctggccctgcttgtgggctcccagctggctgtcatgatgtacctgtcactggggggcttccgaagtctcagtgccctatttggccgagatcagggaccgacatttgactattctcaccctcgtgatgtctacagtaacctcagtcacctgcctggggccccagggggtcctccagctcctcaaggtctgccctactgtccagaacgatctcctctcttagtgggtcctgtgtcggtgtcctttagcccagtgccatcactggcagagattgtggagcggaatccccgggtagaaccagggggccggtaccgccctgcaggttgtgagccccgctcccgaacagccatcattgtgcctcatcgtgcccgggagcaccacctgcgcctgctgctctaccacctgcaccccttcttgcagcgccagcagcttgcttatggcatctatgtcatccaccaggctggaaatggaacatttaacagggcaaaactgttgaacgttggggtgcgagaggccctgcgtgatgaagagtgggactgcctgttcttgcacgatgtggacctcttgccagaaaatgaccacaatctgtatgtgtgtgacccccggggaccccgccatgttgccgttgctatgaacaagtttggatacagcctcccgtacccccagtacttcggaggagtctcagcacttactcctgaccagtacctgaagatgaatggcttccccaatgaatactggggctggggtggtgaggatgacgacattgctaccagggtgcgcctggctgggatgaagatctctcggccccccacatctgtaggacactataagatggtgaagcaccgaggagataagggcaatgaggaaaatccccacagatttgacctcctggtccgtacccagaattcctggacgcaagatgggatgaactcactgacataccagttgctggctcgagagctggggcctctttataccaacatcacagcagacattgggactgaccctcggggtcctcgggctccttctgggccacgttacccacctggttcctcccaagccttccgtcaagagatgctgcaacgccggcccccagccaggcctgggcctctatctactgccaaccacacagccctccgaggttcacactgactcctccttcctgtctaccttaatcatgaaaccgaattcatggggttgtattctccccaccctcagctcctcactgttctcagagggatgtgagggaactgaactctggtgccgtgctagggggtaggggcctctccctcactgctggactggagctgggctcctgtagacctgaggggtccctctctctagggtctcctgtagggcttatgactgtgaatccttgatgtcatgattttatgtgacgattcctaggagtccctgcccctagagtaggagcagggctggaccccaagcccctccctcttccatggagagaagagtgatctggcttctcctcggacctctgtgaatatttattctatttatggttcccgggaagttgtttggtgaaggaagcccctccctgggcattttctgcctatgctggaatagctccctcttctggtcctggctcagggggctgggattttgatatattttctaataaaggactttgtctcgca

SEQ ID NO: 371237 - DNA, 1921 bp, Homo sapiens
tggctagtacgaggctgtggttatcggcgagaccccgcccccgcagcgcccgcttccaagatggcggcagcgatgcctgcccggctgttggggtggcggtgacgacaggcagcaaaagaccagataatgcctcacatctctgtccccccgggaccccctggagcccccatgatccctaagaagacagcttgaacctagaattcccctctccctccctagatctcacccccaggatgttgcggaggctgctggagcggccttgcacgctggccctgcttgtgggctcccagctggctgtcatgatgtacctgtcactggggggcttccgaagtctcagtgccctatttggccgagatcagggaccgacatttgactattctcaccctcgtgatgtctacagtaacctcagtcacctgcctggggccccagggggtcctccagctcctcaaggtctgccctactgtccagaacgatctcctctcttagtgggtcctgtgtcggtgtcctttagcccagtgccatcactggcagagattgtggagcggaatccccgggtagaaccagggggccggtaccgccctgcaggttgtgagccccgctcccgaacagccatcattgtgcctcatcgtgcccgggagcaccacctgcgcctgctgctctaccacctgcaccccttcttgcagcgccagcagcttgcttatggcatctatgtcatccaccaggctggaaatggaacatttaacagggcaaaactgttgaacgttggggtgcgagaggccctgcgtgatgaagagtgggactgcctgttcttgcacgatgtggacctcttgccagaaaatgaccacaatctgtatgtgtgtgacccccggggaccccgccatgttgccgttgctatgaacaagtttggatacagcctcccgtacccccagtacttcggaggagtctcagcacttactcctgaccagtacctgaagatgaatggcttccccaatgaatactggggctggggtggtgaggatgacgacattgctaccagggtgcgcctggctgggatgaagatctctcggccccccacatctgtaggacactataagatggtgaagcaccgaggagataagggcaatgaggaaaatccccacagatttgacctcctggtccgtacccagaattcctggacgcaagatgggatgaactcactgacataccagttgctggctcgagagctggggcctctttataccaacatcacagcagacattgggactgaccctcggggtcctcgggctccttctgggccacgttacccacctggttcctcccaagccttccgtcaagagatgctgcaacgccggcccccagccaggcctgggcctctatctactgccaaccacacagccctccgaggttcacactgactcctccttcctgtctaccttaatcatgaaaccgaattcatggggttgtattctccccaccctcagctcctcactgttctcagagggatgtgagggaactgaactctggtgccgtgctagggggtaggggcctctccctcactgctggactggagctgggctcctgtagacctgaggggtccctctctctagggtctcctgtagggcttatgactgtgaatccttgatgtcatgattttatgtgacgattcctaggagtccctgcccctagagtaggagcagggctggaccccaagcccctccctcttccatggagagaagagtgatctggcttctcctcggacctctgtgaatatttattctatttatggttcccgggaagttgtttggtgaaggaagcccctccctgggcattttctgcctatgctggaatagctccctcttctggtcctggctcagggggctgggattttgatatattttctaataaaggactttgtctcgca

SEQ ID NO: 371238 - DNA, 2490 bp, Homo sapiens
taggctaggtacgaggctgggtgtgaatcggccgaggggcagcgatgcctgcccggctgttggggtggcggtgacgacaggcagcaaaagaccagagtaaccctcctccccacccccgctagaagaggggaaaggtagaaaaggtagaggacgccacccccaccctactctccgccgagctccggggctgttcgcttacagcccccaggtggtcacggtccctgcacctgaggagttggcacccaggcacatgaagaatagaaggagcctgtttcctacttcgccctgggtactccttaggccactccacggtcctgtcatgactctgtcgccacttcaactggttcttggtctgggggaaaacaatgtttccattagctgtcctgtccccactccccaatctgtcctgttggggtgggggtacgggggtggttaagtatgaacctgacacttatcattccagggtagcacgggagataggcgagggacctaccatctcctgctcctcctcttcctttccaaccactttccttcacttcgcctgctgggaaaccagcttcaccctgatcctgatctctggcggtgcaggtagctagttatcctttaccacttctgttccagctggtcccagattcgctgctggagtgctggatggagcctttctctgccctctgtgacatttccaattttagataatgcctcacatctctgtccccccgggaccccctggagcccccatgatccctaagaagacagcttgaacctagaattcccctctccctccctagatctcacccccaggatgttgcggaggctgctggagcggccttgcacgctggccctgcttgtgggctcccagctggctgtcatgatgtacctgtcactggggggcttccgaagtctcagtgccctatttggccgagatcagggaccgacatttgactattctcaccctcgtgatgtctacagtaacctcagtcacctgcctggggccccagggggtcctccagctcctcaaggtctgccctactgtccagaacgatctcctctcttagtgggtcctgtgtcggtgtcctttagcccagtgccatcactggcagagattgtggagcggaatccccgggtagaaccagggggccggtaccgccctgcaggttgtgagccccgctcccgaacagccatcattgtgcctcatcgtgcccgggagcaccacctgcgcctgctgctctaccacctgcaccccttcttgcagcgccagcagcttgcttatggcatctatgtcatccaccaggctggaaatggaacatttaacagggcaaaactgttgaacgttggggtgcgagaggccctgcgtgatgaagagtgggactgcctgttcttgcacgatgtggacctcttgccagaaaatgaccacaatctgtatgtgtgtgacccccggggaccccgccatgttgccgttgctatgaacaagtttggatacagcctcccgtacccccagtacttcggaggagtctcagcacttactcctgaccagtacctgaagatgaatggcttccccaatgaatactggggctggggtggtgaggatgacgacattgctaccagggtgcgcctggctgggatgaagatctctcggccccccacatctgtaggacactataagatggtgaagcaccgaggagataagggcaatgaggaaaatccccacagatttgacctcctggtccgtacccagaattcctggacgcaagatgggatgaactcactgacataccagttgctggctcgagagctggggcctctttataccaacatcacagcagacattgggactgaccctcggggtcctcgggctccttctgggccacgttacccacctggttcctcccaagccttccgtcaagagatgctgcaacgccggcccccagccaggcctgggcctctatctactgccaaccacacagccctccgaggttcacactgactcctccttcctgtctaccttaatcatgaaaccgaattcatggggttgtattctccccaccctcagctcctcactgttctcagagggatgtgagggaactgaactctggtgccgtgctagggggtaggggcctctccctcactgctggactggagctgggctcctgtagacctgaggggtccctctctctagggtctcctgtagggcttatgactgtgaatccttgatgtcatgattttatgtgacgattcctaggagtccctgcccctagagtaggagcagggctggaccccaagcccctccctcttccatggagagaagagtgatctggcttctcctcggacctctgtgaatatttattctatttatggttcccgggaagttgtttggtgaaggaagcccctccctgggcattttctgcctatgctggaatagctccctcttctggtcctggctcagggggctgggattttgatatattttctaataaaggactttgtctcgca

SEQ ID NO: 371239 - DNA, 2829 bp, Homo sapiens
taggctaggtacgaggctgggtgtgaatcggccgaggggcagcgatgcctgcccggctgttggggtggcggtgacgacaggcagcaaaagaccagagtaaccctcctccccacccccgctagaagaggggaaaggtagaaaaggtagaggacgccacccccaccctactctccgccgagctccggggctgttcgcttacagcccccaggtggtcacggtccctgcacctgaggagttggcacccaggcacatgaagaatagaaggagcctgtttcctacttcgccctgggtactccttaggccactccacggtcctgtcatgactctgtcgccacttcaactggttcttggtctgggggaaaacaatgtttccattagctgtcctgtccccactccccaatctgtcctgttggggtgggggtacgggggtggttaagtatgaacctgacacttatcattccagggtagcacgggagataggcgagggacctaccatctcctgctcctcctcttcctttccaaccactttccttcacttcgcctgctgggaaaccagcttcaccctgatcctgatctctggcggtgcaggtagctagttatcctttaccacttctgttccagctggtcccagattcgctgctggagtgctggatggagcctttctctgccctctgtgacatttccaattttagataatgcctcacatctctgtccccccgggaccccctggagcccccatgatccctaagaagacagcttgaacctagggtgagtctatctcttcccttctaaaattggaagagggggttctctagagactttctgaaatgaacatgagatttgaatgatgtaaacatttttgggggtgaggactgacagtagatggtgggagtggtttggggggaggtagaggagagcgaaacttgggctgaagtgacaggtggtagggttactggtggttacattctgtttccttgcgtgactgtgcacctgtgtgctcccttctgtgactttgttttctgctttttcctctttacccctggcatcaccttcaaccctacctactgacctctctgctggcttgctctcttcctgcctacccccagaattcccctctccctccctagatctcacccccaggatgttgcggaggctgctggagcggccttgcacgctggccctgcttgtgggctcccagctggctgtcatgatgtacctgtcactggggggcttccgaagtctcagtgccctatttggccgagatcagggaccgacatttgactattctcaccctcgtgatgtctacagtaacctcagtcacctgcctggggccccagggggtcctccagctcctcaaggtctgccctactgtccagaacgatctcctctcttagtgggtcctgtgtcggtgtcctttagcccagtgccatcactggcagagattgtggagcggaatccccgggtagaaccagggggccggtaccgccctgcaggttgtgagccccgctcccgaacagccatcattgtgcctcatcgtgcccgggagcaccacctgcgcctgctgctctaccacctgcaccccttcttgcagcgccagcagcttgcttatggcatctatgtcatccaccaggctggaaatggaacatttaacagggcaaaactgttgaacgttggggtgcgagaggccctgcgtgatgaagagtgggactgcctgttcttgcacgatgtggacctcttgccagaaaatgaccacaatctgtatgtgtgtgacccccggggaccccgccatgttgccgttgctatgaacaagtttggatacagcctcccgtacccccagtacttcggaggagtctcagcacttactcctgaccagtacctgaagatgaatggcttccccaatgaatactggggctggggtggtgaggatgacgacattgctaccagggtgcgcctggctgggatgaagatctctcggccccccacatctgtaggacactataagatggtgaagcaccgaggagataagggcaatgaggaaaatccccacagatttgacctcctggtccgtacccagaattcctggacgcaagatgggatgaactcactgacataccagttgctggctcgagagctggggcctctttataccaacatcacagcagacattgggactgaccctcggggtcctcgggctccttctgggccacgttacccacctggttcctcccaagccttccgtcaagagatgctgcaacgccggcccccagccaggcctgggcctctatctactgccaaccacacagccctccgaggttcacactgactcctccttcctgtctaccttaatcatgaaaccgaattcatggggttgtattctccccaccctcagctcctcactgttctcagagggatgtgagggaactgaactctggtgccgtgctagggggtaggggcctctccctcactgctggactggagctgggctcctgtagacctgaggggtccctctctctagggtctcctgtagggcttatgactgtgaatccttgatgtcatgattttatgtgacgattcctaggagtccctgcccctagagtaggagcagggctggaccccaagcccctccctcttccatggagagaagagtgatctggcttctcctcggacctctgtgaatatttattctatttatggttcccgggaagttgtttggtgaaggaagcccctccctgggcattttctgcctatgctggaatagctccctcttctggtcctggctcagggggctgggattttgatatattttctaataaaggactttgtctcgca

SEQ ID NO: 371240 - DNA, 2108 bp, Homo sapiens
tggctagtacgaggctgtggttatcggcgagaccccgcccccgcagcgcccgcttccaagatggcggcagcgatgcctgcccggctgttggggtggcggtgacgacaggcagcaaaagaccagctggtcccagattcgctgctggagtgctggatggagcctttctctgccctctgtgacatttccaattttagataatgcctcacatctctgtccccccgggaccccctggagcccccatgatccctaagaagacagcttgaacctagatctcacccccaggatgttgcggaggctgctggagcggccttgcacgctggccctgcttgtgggctcccagctggctgtcatgatgtacctgtcactggggggcttccgaagtctcagtgccctatttggccgagatcagggaccgacatttgactattctcaccctcgtgatgtctacagtaacctcagtcacctgcctggggccccagggggtcctccagctcctcaaggtctgccctactgtccagaacgatctcctctcttagtgggtcctgtgtcggtgtcctttagcccagtgccatcactggcagagattgtggagcggaatccccgggtagaaccagggggccggtaccgccctgcaggttgtgagccccgctcccgaacagccatcattgtgcctcatcgtgcccgggagcaccacctgcgcctgctgctctaccacctgcaccccttcttgcagcgccagcagcttgcttatggcatctatgtcatccaccaggctggaaatggaacatttaacagggcaaaactgttgaacgttggggtgcgagaggccctgcgtgatgaagagtgggactgcctgttcttgcacgatgtggacctcttgccagaaaatgaccacaatctgtatgtgtgtgacccccggggaccccgccatgttgccgttgctatgaacaagtttggatacagcctcccgtacccccagtacttcggaggagtctcagcacttactcctgaccagtacctgaagatgaatggcttccccaatgaatactggggctggggtggtgaggatgacgacattgctaccagggtgcgcctggctgggatgaagatctctcggccccccacatctgtaggacactataagatggtgaagcaccgaggagataagggcaatgaggaaaatccccacaggtaggaagaaggaaggactgcctgggaattgttactggatcctcagggttctgtacccctagccaggaaaatcctaaaggtccctagatttctggctgttcctttctgggtcttagtctccaacctctaaccctcagatttgacctcctggtccgtacccagaattcctggacgcaagatgggatgaactcactgacataccagttgctggctcgagagctggggcctctttataccaacatcacagcagacattgggactgaccctcggggtcctcgggctccttctgggccacgttacccacctggttcctcccaagccttccgtcaagagatgctgcaacgccggcccccagccaggcctgggcctctatctactgccaaccacacagccctccgaggttcacactgactcctccttcctgtctaccttaatcatgaaaccgaattcatggggttgtattctccccaccctcagctcctcactgttctcagagggatgtgagggaactgaactctggtgccgtgctagggggtaggggcctctccctcactgctggactggagctgggctcctgtagacctgaggggtccctctctctagggtctcctgtagggcttatgactgtgaatccttgatgtcatgattttatgtgacgattcctaggagtccctgcccctagagtaggagcagggctggaccccaagcccctccctcttccatggagagaagagtgatctggcttctcctcggacctctgtgaatatttattctatttatggttcccgggaagttgtttggtgaaggaagcccctccctgggcattttctgcctatgctggaatagctccctcttctggtcctggctcagggggctgggattttgatatattttctaataaaggactttgtctcgca

SEQ ID NO: 371241 - DNA, 1556 bp, Homo sapiens
ctatggcgctggtacgccccggagttacgggatagtaacctcagtcacctgcctggggccccagggggtcctccagctcctcaaggtctgccctactgtccagaacgatctcctctcttagtgggtcctgtgtcggtgtcctttagcccagtgccatcactggcagagattgtggagcggaatccccgggtagaaccagggggccggtaccgccctgcaggttgtgagccccgctcccgaacagccatcattgtgcctcatcgtgcccgggagcaccacctgcgcctgctgctctaccacctgcaccccttcttgcagcgccagcagcttgcttatggcatctatgtcatccaccaggctggaaatggaacatttaacagggcaaaactgttgaacgttggggtgcgagaggccctgcgtgatgaagagtgggactgcctgttcttgcacgatgtggacctcttgccagaaaatgaccacaatctgtatgtgtgtgacccccggggaccccgccatgttgccgttgctatgaacaagtttggatacagcctcccgtacccccagtacttcggaggagtctcagcacttactcctgaccagtacctgaagatgaatggcttccccaatgaatactggggctggggtggtgaggatgacgacattgctaccagggtgcgcctggctgggatgaagatctctcggccccccacatctgtaggacactataagatggtgaagcaccgaggagataagggcaatgaggaaaatccccacagatttgacctcctggtccgtacccagaattcctggacgcaagatgggatgaactcactgacataccagttgctggctcgagagctggggcctctttataccaacatcacagcagacattgggactgaccctcggggtcctcgggctccttctgggccacgttacccacctggttcctcccaagccttccgtcaagagatgctgcaacgccggcccccagccaggcctgggcctctatctactgccaaccacacagccctccgaggttcacactgactcctccttcctgtctaccttaatcatgaaaccgaattcatggggttgtattctccccaccctcagctcctcactgttctcagagggatgtgagggaactgaactctggtgccgtgctagggggtaggggcctctccctcactgctggactggagctgggctcctgtagacctgaggggtccctctctctagggtctcctgtagggcttatgactgtgaatccttgatgtcatgattttatgtgacgattcctaggagtccctgcccctagagtaggagcagggctggaccccaagcccctccctcttccatggagagaagagtgatctggcttctcctcggacctctgtgaatatttattctatttatggttcccgggaagttgtttggtgaaggaagcccctccctgggcattttctgcctatgctggaatagctccctcttctggtcctggctcagggggctgggattttgatatattttctaataaaggactttgtctcgca

SEQ ID NO: 371242 - DNA, 1491 bp, Homo sapiens
atctggtatacgtcgagcttggtgttaattcggacgaggcagaacatctctctctttgggtcctgtgtcggtgtcctttagcccagtgccatcactggcagagattgtggagcggaatccccgggtagaaccagggggccggtaccgccctgcaggttgtgagccccgctcccgaacagccatcattgtgcctcatcgtgcccgggagcaccacctgcgcctgctgctctaccacctgcaccccttcttgcagcgccagcagcttgcttatggcatctatgtcatccaccaggctggaaatggaacatttaacagggcaaaactgttgaacgttggggtgcgagaggccctgcgtgatgaagagtgggactgcctgttcttgcacgatgtggacctcttgccagaaaatgaccacaatctgtatgtgtgtgacccccggggaccccgccatgttgccgttgctatgaacaagtttggatacagcctcccgtacccccagtacttcggaggagtctcagcacttactcctgaccagtacctgaagatgaatggcttccccaatgaatactggggctggggtggtgaggatgacgacattgctaccagggtgcgcctggctgggatgaagatctctcggccccccacatctgtaggacactataagatggtgaagcaccgaggagataagggcaatgaggaaaatccccacagatttgacctcctggtccgtacccagaattcctggacgcaagatgggatgaactcactgacataccagttgctggctcgagagctggggcctctttataccaacatcacagcagacattgggactgaccctcggggtcctcgggctccttctgggccacgttacccacctggttcctcccaagccttccgtcaagagatgctgcaacgccggcccccagccaggcctgggcctctatctactgccaaccacacagccctccgaggttcacactgactcctccttcctgtctaccttaatcatgaaaccgaattcatggggttgtattctccccaccctcagctcctcactgttctcagagggatgtgagggaactgaactctggtgccgtgctagggggtaggggcctctccctcactgctggactggagctgggctcctgtagacctgaggggtccctctctctagggtctcctgtagggcttatgactgtgaatccttgatgtcatgattttatgtgacgattcctaggagtccctgcccctagagtaggagcagggctggaccccaagcccctccctcttccatggagagaagagtgatctggcttctcctcggacctctgtgaatatttattctatttatggttcccgggaagttgtttggtgaaggaagcccctccctgggcattttctgcctatgctggaatagctccctcttctggtcctggctcagggggctgggattttgatatattttctaataaaggactttgtctcgca

SEQ ID NO: 371243 - DNA, 1950 bp, Homo sapiens
tggctagtacgaggctgtggttatcggcgagaccccgcccccgcagcgcccgcttccaagatggcggcagcgatgcctgcccggctgttggggtggcggtgacgacaggcagcaaaagaccagctggtcccagattcgctgctggagtgctggatggagcctttctctgccctctgtgacatttccaattttagataatgcctcacatctctgtccccccgggaccccctggagcccccatgatccctaagaagacagcttgaacctagatctcacccccaggatgttgcggaggctgctggagcggccttgcacgctggccctgcttgtgggctcccagctggctgtcatgatgtacctgtcactggggggcttccgaagtctcagtgccctatttggccgagatcagggaccgacatttgactattctcaccctcgtgatgtctacagtaacctcagtcacctgcctggggccccagggggtcctccagctcctcaaggtctgccctactgtccagaacgatctcctctcttagtgggtcctgtgtcggtgtcctttagcccagtgccatcactggcagagattgtggagcggaatccccgggtagaaccagggggccggtaccgccctgcaggttgtgagccccgctcccgaacagccatcattgtgcctcatcgtgcccgggagcaccacctgcgcctgctgctctaccacctgcaccccttcttgcagcgccagcagcttgcttatggcatctatgtcatccaccaggctggaaatggaacatttaacagggcaaaactgttgaacgttggggtgcgagaggccctgcgtgatgaagagtgggactgcctgttcttgcacgatgtggacctcttgccagaaaatgaccacaatctgtatgtgtgtgacccccggggaccccgccatgttgccgttgctatgaacaagtttggatacagcctcccgtacccccagtacttcggaggagtctcagcacttactcctgaccagtacctgaagatgaatggcttccccaatgaatactggggctggggtggtgaggatgacgacattgctaccagggtgcgcctggctgggatgaagatctctcggccccccacatctgtaggacactataagatggtgaagcaccgaggagataagggcaatgaggaaaatccccacagatttgacctcctggtccgtacccagaattcctggacgcaagatgggatgaactcactgacataccagttgctggctcgagagctggggcctctttataccaacatcacagcagacattgggactgaccctcggggtcctcgggctccttctgggccacgttacccacctggttcctcccaagccttccgtcaagagatgctgcaacgccggcccccagccaggcctgggcctctatctactgccaaccacacagccctccgaggttcacactgactcctccttcctgtctaccttaatcatgaaaccgaattcatggggttgtattctccccaccctcagctcctcactgttctcagagggatgtgagggaactgaactctggtgccgtgctagggggtaggggcctctccctcactgctggactggagctgggctcctgtagacctgaggggtccctctctctagggtctcctgtagggcttatgactgtgatgtgacgattcctaggagtccctgcccctagagtaggagcagggctggaccccaagcccctccctcttccatggagagaagagtgatctggcttctcctcggacctctgtgaatatttattctatttatggttcccgggaagttgtttggtgaaggaagcccctccctgggcattttctgcctatgctggaatagctccctcttctggtcctggctcagggggctgggattttgatatattttctaataaaggactttgtctcgca

SEQ ID NO: 371244 - DNA, 964 bp, Homo sapiens
tgtgtgtacagaaacatttaatcccttccttgcttttctctactctggatcccccatgataccctcacttttcccatagggtgcgcctggctgggatgaagatctctcggccccccacatctgtaggacactataagatggtgaagcaccgaggagataagggcaatgaggaaaatccccacagatttgacctcctggtccgtacccagaattcctggacgcaagatgggatgaactcactgacataccagttgctggctcgagagctggggcctctttataccaacatcacagcagacattgggactgaccctcggggtcctcgggctccttctgggccacgttacccacctggttcctcccaagccttccgtcaagagatgctgcaacgccggcccccagccaggcctgggcctctatctactgccaaccacacagccctccgaggttcacactgactcctccttcctgtctaccttaatcatgaaaccgaattcatggggttgtattctccccaccctcagctcctcactgttctcagagggatgtgagggaactgaactctggtgccgtgctagggggtaggggcctctccctcactgctggactggagctgggctcctgtagacctgaggggtccctctctctagggtctcctgtagggcttatgactgtgaatccttgatgtcatgattttatgtgacgattcctaggagtccctgcccctagagtaggagcagggctggaccccaagcccctccctcttccatggagagaagagtgatctggcttctcctcggacctctgtgaatatttattctatttatggttcccgggaagttgtttggtgaaggaagcccctccctgggcattttctgcctatgctggaatagctccctcttctggtcctggctcagggggctgggattttgatatattttctaataaaggactttgtctcgca

SEQ ID NO: 371245 - DNA, 847 bp, Homo sapiens
tggctagtacgaggctgtggttatcggcgagaccccgcccccgcagcgcccgcttccaagatggcggcagcgatgcctgcccggctgttggggtggcggtgacgacaggcagcaaaagaccagctggtcccagattcgctgctggagtgctggatggagcctttctctgccctctgtgacatttccaattttagataatgcctcacatctctgtccccccgggaccccctggagcccccatgatccctaagaagacagcttgaacctagatctcacccccaggatgttgcggaggctgctggagcggccttgcacgctggccctgcttgtgggctcccagctggctgtcatgatgtacctgtcactggggggcttccgaagtctcagtgccctatttggccgagatcagggaccgacatttgactattctcaccctcgtgatgtctacagtaacctcagtcacctgcctggggccccagggggtcctccagctcctcaaggtctgccctactgtccagaacgatctcctctcttagctcctgtagggcttatgactgtgaatccttgatgtcatgattttatgtgacgattcctaggagtccctgcccctagagtaggagcagggctggaccccaagcccctccctcttccatggagagaagagtgatctggcttctcctcggacctctgtgaatatttattctatttatggttcccgggaagttgtttggtgaaggaagcccctccctgggcattttctgcctatgctggaatagctccctcttctggtcctggctcagggggctgggattttgatatattttctaataaaggactttgtctcgca

SEQ ID NO: 371246 - DNA, 269 bp, Homo sapiens
attttcatatggaattctatttcagaaatatgccaatttatccattctactgttgatagatacatgaattgtttccagttttaagctatttcaaatatgctattataaaaatggtagatattgcatgaatttctgtcaggtatacagctaggagttaaatggctgggtcagagtttatttggcttaactagagaatgccaaagtggttgtactaatttttcttcccacaggcagtgtatgagagttccacttgttctacaccctctcca

SEQ ID NO: 371247 - DNA, 252 bp, Homo sapiens
aatatgtgctaggtaccaagctaagtgctttgcctagatcacctcagttaagcctcgcactaattctatgaggtaggtgccaatatttgcctattttacaaatgaggaaactgaggctcagagaggtgaggtcccatctgcagttggactgtgagtaaacggcagagtgaggaccagaactcaagtgtgtcttactgcagagtcttggcttacgcagttcctagccatcttccgtgttagtttgttcttctg

SEQ ID NO: 371248 - DNA, 872 bp, Homo sapiens
gggttcctccgcagcggaggaaagaggatggcgacctcgtcgatgccggagtcagagaggaacgtggctacgaaagcctcggagtgaagttcccagaccctacgccccgctgtcaggcagcccgccgatcagatggaggagaacgaggtggagagcagcagcgacgcggcccctgggcctggccggcccgaggagccctctgagagcggcctgggtgtgggcacctcagaagccgtgtccgccgacagcagcgacgccgcggccgccccggggcaggcagaggccgatgactctggcgtggggcaaagctcggaccgcggcagccgttctcaggaggaggtatctgagagcagctcgagcgcagaccccctgcctaatagctacctccctgattcatcgtctgtgtctcatgggccagtggcaggggtgacaggcggtcccccagcacttgtgcactctagtgcactcccagaccccaacatgctggtgtccgactgcacagcttcctcctcggacctgggctcggccatcgacaagatcatcgagtccaccatcgggcccgacctcatccagaactgcatcactgtgaccagtgctgaggatggcggggccgagaccacacggtacctgatcctacagggcccagatgatggagccccattgacatcaccaatggccagttcccaggaactctgagataccgccagagggaaactttccagtcatcttgaggtcctcattgctctgtctgaaccctgggtgggccaccattatttccagagagctgagagtcgaaggatggcagcagaaagcttggtttttgtgaactgatgtccgggactgggggaagcctgcgtgtggtgatcgcaatt

SEQ ID NO: 371249 - DNA, 4459 bp, Homo sapiens
gggttcctccgcagcggaggaaagaggatggcgacctcgtcgatgccggagtcagagaggaacgtggctacgaaagcctcggagtgaagttcccagaccctacgccccgctgtcaggcagcccgccgatcagatggaggagaacgaggtggagagcagcagcgacgcggcccctgggcctggccggcccgaggagccctctgagagcggcctgggtgtgggcacctcagaagccgtgtccgccgacagcagcgacgccgcggccgccccggggcaggcagaggccgatgactctggcgtggggcaaagctcggaccgcggcagccgttctcaggaggaggtatctgagagcagctcgagcgcagaccccctgcctaatagctacctccctgattcatcgtctgtgtctcatgggccagtggcaggggtgacaggcggtcccccagcacttgtgcactctagtgcactcccagaccccaacatgctggtgtccgactgcacagcttcctcctcggacctgggctcggccatcgacaagatcatcgagtccaccatcgggcccgacctcatccagaactgcatcactgtgaccagtgctgaggatggcggggccgagaccacacggtacctgatcctacagggcccagatgatggagcccccatgacatcaccaatgtccagttccaccttggcccacagcctagcagccattgaggccctggcagatggccccacatccacatccacatgcctggaggcacagggtgggcccagctccccggtgcagctgcccccagcctccggtgccgaagagccggacctgcagagcctggaggccatgatggaggtggtggtggtgcagcagttcaaatgcaagatgtgccagtaccggagcagcaccaaggccacactgctgcgccacatgcgggaacgccacttccgtccagtagcagcagccgcagcagcagctggtaaaaaaggacgtctacggaagtggagcacctccaccaagagccaagaggaagagggaccagaggaggaggacgatgatgacattgtagacgctggagccattgatgacctggagggaggatagcgactataatccagctgaggatgagccccgaggccggcagcttcggctccagcgccccacccccagtaccccaaggccccgaaggagacctggccggccccggaagctgccccgcctggagatctcagacctcccagatggtgtggaaggagagcctctagtgagttcccagagtggacagagccctccagagccacaggatcccgaggctcccagctcctcaggcccaggacacctggtggccatgggcaaggtgagcaggacccctgtggaagctggtgtgagccagtcagatgcagagaacgcagccccctcctgcccggatgagcatgacactctgccccggcgccgaggtcgaccttccaggcgcttcctaggcaagaaataccgcaagtactattacaagtcgcccaaaccacttttgaggcccttcctgtgccgcatctgtggttctcgctttctgtcccacgaggacctgcgcttccacgtcaactcccatgaggctggcgatccccagctcttcaagtgcctgcagtgcagctatcgttcccgccgctggtcctcgctcaaggagcacatgttcaaccacgtgggcagcaagccctacaagtgtgacgagtgcagctacaccagtgtctaccggaaggacgtcattcggcacgccgctgtgcacagccgggaccggaagaagaggccagatccgactccaaagctgagctctttcccctgccctgtgtgtggccgtgtgtaccccatgcagaaaagactcacgcagcacatgaagacgcacagcactgagaagccccacatgtgtgacaagtgtggaaagtcctttaagaagcgctacaccttcaaaatgcacctgctcacgcacatccaggctgttgccaaccgcaggttcaagtgtgagttctgtgagtttgtttgtgaagacaagaaggcactgctgaaccaccagttgtcccacgtcagtgacaagcccttcaaatgcagcttttgtccctaccgcaccttccgagaggacttcttgctgtcccatgtggctgtcaagcacacaggggccaagcccttcgcctgtgagtactgccacttcagcacacggcacaagaagaacctgcgcctgcacgtacggtgccgacacgcaagcagcttcgaggaatgggggaggcgccaccctgaggagcccccctcccgccgtcgccccttcttctctctgcagcagattgaggagctgaagcagcagcacagtgcggcccctggaccacctcccagttccccaggacctcctgagatacccccagaggcgacaactttccagtcatctgaggctccctcattgctctgttctgacaccctgggcggcgccaccatcatctaccagcaaggagctgaggagtcgacagcgatggccacgcagacagccttggatcttctgctgaacatgagtgctcagcgggaactggggggcacagccctgcaggtggctgtggtgaagtcggaagatgtggaagcagggttagcatcccctggtgggcagccctcccctgaaggtgccactccacaggtggtcaccctccacgtggcagagccagggggcggtgcagcagccgagagccagctaggccctcctgacctaccgcagatcaccctggcacctggtccatttggtgggactggctacagtgtcatcacagcaccccctatggaggagggaacatcagctcctggcacaccttacagcgaggagcccgcaggagaggcagcccaggctgtggttgtgagtgacaccctaaaagaagctggcacccactacatcatggctactgatggtacccagttgcaccacattgagctcaccgcagatggctccatctccttcccaagtccagatgctctggcctctggtgccaaatggcccctgctgcagtgtgggggactgcccagagacggccctgagcccccatctccagccaagacccactgcgtaggggactcccagagctctgcctcctcacctcctgcaaccagcaaagccctgggcctggcagtgcccccgtcaccgccatctgcagccactgctgcatcaaagaagttttcctgcaagatctgtgccgaggccttccctggccgagctgagatggagagtcacaagcgggcccacgctgggcctggtgccttcaagtgccccgactgccccttcagtgcccgccagtggcccgaggtccgggcgcacatggcacagcactcaagcctacggccccaccagtgtagccagtgcagctttgcctccaagaacaagaaggacctgcgtcggcacatgctgactcacacaaaggagaagccttttgcatgccacctctgcgggcagcgtttcaaccgtaacgggcacctcaagttccacatccagcggctgcacagtcctgatgggaggaagtcaggaacccctacagcccgggcccctacccagaccccaacccagaccatcatcctgaacagtgatgacgaaacactggccaccctgcacactgcactccagtccagtcacggggtcctgggcccagagcggctacagcaggcactgagccaggaacacatcatcgttgcccaggaacagacagtgaccaatcaggaggaagccgcctacatccaagagatcaccacggcagatggccagaccgtacagcacctggtgacctccgacaaccaggtgcagtatatcatctcccaggatggtgtccagcacctgctcccccaggaatatgttgtggtccctgaaggccatcacatccaggtacaggagggccagatcacacacatccagtatgaacaaggagccccgttccttcaggagtcccagatccagtatgtgcctgtgtccccaggccagcagcttgtcacacaggctcaacttgaggctgcagcacactcagctgtcacagcagtggctgatgctgccatggcccaagcccagggcctgtttggtacagacgagacagtgcccgaacacattcaacagctgcagcaccagggcatcgagtacgacgtcatcaccctggccgatgactgagccccgagggcccaacacagatcatggatttgcggccagctctcctgggggtagggggccaccaggactcacctccctcttcatttaggatctccagatactggatagccagcatcctctcattcccagggagccagacctgtgctgttggggttaggggcagccatgggccccagccaggacatgctgggtgccccagcctgcaggcaggctttgggagagaaatttatttttgtttgggtggacccactggcctgtcagtctcaataaagggaccggagtccagtcctgaacagc

SEQ ID NO: 371250 - DNA, 3669 bp, Homo sapiens
gggttcctccgcagcggaggaaagaggatggcgacctcgtcgatgccggagtcagagaggaacgtggctacgaaagcctcggagtgaagttcccagaccctacgccccgctgtcaggcagcccgccgatcagatggaggagaacgaggtggagagcagcagcgacgcggcccctgggcctggccggcccgaggagccctctgagagcggcctgggtgtgggcacctcagaagccgtgtccgccgacagcagcgacgccgcggccgccccggggcaggcagaggccgatgactctggcgaggatagcgactataatccagctgaggatgagccccgaggccggcagcttcggctccagcgccccacccccagtaccccaaggccccgaaggagacctggccggccccggaagctgccccgcctggagatctcagacctcccagatggtgtggaaggagagcctctagtgagttcccagagtggacagagccctccagagccacaggatcccgaggctcccagctcctcaggcccaggacacctggtggccatgggcaaggtgagcaggacccctgtggaagctggtgtgagccagtcagatgcagagaacgcagccccctcctgcccggatgagcatgacactctgccccggcgccgaggtcgaccttccaggcgcttcctaggcaagaaataccgcaagtactattacaagtcgcccaaaccacttttgaggcccttcctgtgccgcatctgtggttctcgctttctgtcccacgaggacctgcgcttccacgtcaactcccatgaggctggcgatccccagctcttcaagtgcctgcagtgcagctatcgttcccgccgctggtcctcgctcaaggagcacatgttcaaccacgtgggcagcaagccctacaagtgtgacgagtgcagctacaccagtgtctaccggaaggacgtcattcggcacgccgctgtgcacagccgggaccggaagaagaggccagatccgactccaaagctgagctctttcccctgccctgtgtgtggccgtgtgtaccccatgcagaaaagactcacgcagcacatgaagacgcacagcactgagaagccccacatgtgtgacaagtgtggaaagtcctttaagaagcgctacaccttcaaaatgcacctgctcacgcacatccaggctgttgccaaccgcaggttcaagtgtgagttctgtgagtttgtttgtgaagacaagaaggcactgctgaaccaccagttgtcccacgtcagtgacaagcccttcaaatgcagcttttgtccctaccgcaccttccgagaggacttcttgctgtcccatgtggctgtcaagcacacaggggccaagcccttcgcctgtgagtactgccacttcagcacacggcacaagaagaacctgcgcctgcacgtacggtgccgacacgcaagcagcttcgaggaatgggggaggcgccaccctgaggagcccccctcccgccgtcgccccttcttctctctgcagcagattgaggagctgaagcagcagcacagtgcggcccctggaccacctcccagttccccaggacctcctgagatacccccagaggcgacaactttccagtcatctgaggctccctcattgctctgttctgacaccctgggcggcgccaccatcatctaccagcaaggagctgaggagtcgacagcgatggccacgcagacagccttggatcttctgctgaacatgagtgctcagcgggaactggggggcacagccctgcaggtggctgtggtgaagtcggaagatgtggaagcagggttagcatcccctggtgggcagccctcccctgaaggtgccactccacaggtggtcaccctccacgtggcagagccagggggcggtgcagcagccgagagccagctaggccctcctgacctaccgcagatcaccctggcacctggtccatttggtgggactggctacagtgtcatcacagcaccccctatggaggagggaacatcagctcctggcacaccttacagcgaggagcccgcaggagaggcagcccaggctgtggttgtgagtgacaccctaaaagaagctggcacccactacatcatggctactgatggtacccagttgcaccacattgagctcaccgcagatggctccatctccttcccaagtccagatgctctggcctctggtgccaaatggcccctgctgcagtgtgggggactgcccagagacggccctgagcccccatctccagccaagacccactgcgtaggggactcccagagctctgcctcctcacctcctgcaaccagcaaagccctgggcctggcagtgcccccgtcaccgccatctgcagccactgctgcatcaaagaagttttcctgcaagatctgtgccgaggccttccctggccgagctgagatggagagtcacaagcgggcccacgctgggcctggtgccttcaagtgccccgactgccccttcagtgcccgccagtggcccgaggtccgggcgcacatggcacagcactcaagcctacggccccaccagtgtagccagtgcagctttgcctccaagaacaagaaggacctgcgtcggcacatgctgactcacacaaaggagaagccttttgcatgccacctctgcgggcagcgtttcaaccgtaacgggcacctcaagttccacatccagcggctgcacagtcctgatgggaggaagtcaggaacccctacagcccgggcccctacccagaccccaacccagaccatcatcctgaacagtgatgacgaaacactggccaccctgcacactgcactccagtccagtcacggggtcctgggcccagagcggctacagcaggcactgagccaggaacacatcatcgttgcccaggaacagacagtgaccaatcaggaggaagccgcctacatccaagagatcaccacggcagatggccagaccgtacagcacctggtgacctccgacaaccaggtgcagtatatcatctcccaggatggtgtccagcacctgctcccccaggaatatgttgtggtccctgaaggccatcacatccaggtacaggagggccagatcacacacatccagtatgaacaaggagccccgttccttcaggagtcccagatccagtatgtgcctgtgtccccaggccagcagcttgtcacacaggctcaacttgaggctgcagcacactcagctgtcacagcagtggctgatgctgccatggcccaagcccagggcctgtttggtacagacgagacagtgcccgaacacattcaacagctgcagcaccagggcatcgagtacgacgtcatcaccctggccgatgactgagccccgagggcccaacacagatcatggatttgcggccagctctcctgggggtagggggccaccaggactcacctccctcttcatttaggatctccagatactggatagccagcatcctctcattcccagggagccagacctgtgctgttggggttaggggcagccatgggccccagccaggacatgctgggtgccccagcctgcaggcaggctttgggagagaaatttatttttgtttgggtggacccactggcctgtcagtctcaataaagggaccggagtccagtcctgaacagc

SEQ ID NO: 371251 - DNA, 3750 bp, Homo sapiens
tttagattgtccaaatggtttgcaagcatggaagtcacatctccctccttccctcccatcagccctccagctgcctgacctccctggggaatgccagtgttaaagcactcctattgcttcccgagccttagattgttctgtgaagtcaccaaagccgccattctggcctcccttggataaatggggcaaatgagactccgggagaggaatggctttgtctgtaggtgcacagcatgtcagtgacagagccgtgcctggaacccaggtctcctgactgggaggtcccagctctcgccgttgctctaatccaggccaggtcctactgtgctgacagaatgtcggctgttgggcggtagtatccatgctgccctctaaccacaggctgtctgtgtcatgtgactcaatgcacccatcagtggtctgtgatgagtgggtgggaggatattttggctggcctctggcccacttgtccacgtctgtcctggtgtgtcagtggctggcttgtgacctggcatgtccgtggcaggtgtggaaggagagcctctagtgagttcccagagtggacagagccctccagagccacaggatcccgaggctcccagctcctcaggcccaggacacctggtggccatgggcaaggtgagcaggacccctgtggaagctggtgtgagccagtcagatgcagagaacgcagccccctcctgcccggatgagcatgacactctgccccggcgccgaggtcgaccttccaggcgcttcctaggcaagaaataccgcaagtactattacaagtcgcccaaaccacttttgaggcccttcctgtgccgcatctgtggttctcgctttctgtcccacgaggacctgcgcttccacgtcaactcccatgaggctggcgatccccagctcttcaagtgcctgcagtgcagctatcgttcccgccgctggtcctcgctcaaggagcacatgttcaaccacgtgggcagcaagccctacaagtgtgacgagtgcagctacaccagtgtctaccggaaggacgtcattcggcacgccgctgtgcacagccgggaccggaagaagaggccagatccgactccaaagctgagctctttcccctgccctgtgtgtggccgtgtgtaccccatgcagaaaagactcacgcagcacatgaagacgcacagcactgagaagccccacatgtgtgacaagtgtggaaagtcctttaagaagcgctacaccttcaaaatgcacctgctcacgcacatccaggctgttgccaaccgcaggttcaagtgtgagttctgtgagtttgtttgtgaagacaagaaggcactgctgaaccaccagttgtcccacgtcagtgacaagcccttcaaatgcagcttttgtccctaccgcaccttccgagaggacttcttgctgtcccatgtggctgtcaagcacacaggggccaagcccttcgcctgtgagtactgccacttcagcacacggcacaagaagaacctgcgcctgcacgtacggtgccgacacgcaagcagcttcgaggaatgggggaggcgccaccctgaggagcccccctcccgccgtcgccccttcttctctctgcagcagattgaggagctgaagcagcagcacagtgcggcccctggaccacctcccagttccccaggacctcctgagatacccccagaggcgacaactttccagtcatctgaggctccctcattgctctgttctgacaccctgggcggcgccaccatcatctaccagcaaggagctgaggagtcgacagcgatggccacgcagacagccttggatcttctgctgaacatgagtgctcagcgggaactggggggcacagccctgcaggtggctgtggtgaagtcggaagatgtggaagcagggttagcatcccctggtgggcagccctcccctgaaggtgccactccacaggtggtcaccctccacgtggcagagccagggggcggtgcagcagccgagagccagctaggccctcctgacctaccgcagatcaccctggcacctggtccatttggtgggactggctacagtgtcatcacagcaccccctatggaggagggaacatcagctcctggcacaccttacagcgaggagcccgcaggagaggcagcccaggctgtggttgtgagtgacaccctaaaagaagctggcacccactacatcatggctactgatggtacccagttgcaccacattgagctcaccgcagatggctccatctccttcccaagtccagatgctctggcctctggtgccaaatggcccctgctgcagtgtgggggactgcccagagacggccctgagcccccatctccagccaagacccactgcgtaggggactcccagagctctgcctcctcacctcctgcaaccagcaaagccctgggcctggcagtgcccccgtcaccgccatctgcagccactgctgcatcaaagaagttttcctgcaagatctgtgccgaggccttccctggccgagctgagatggagagtcacaagcgggcccacgctgggcctggtgccttcaagtgccccgactgccccttcagtgcccgccagtggcccgaggtccgggcgcacatggcacagcactcaagcctacggccccaccagtgtagccagtgcagctttgcctccaagaacaagaaggacctgcgtcggcacatgctgactcacacaaaggagaagccttttgcatgccacctctgcgggcagcgtttcaaccgtaacgggcacctcaagttccacatccagcggctgcacagtcctgatgggaggaagtcaggaacccctacagcccgggcccctacccagaccccaacccagaccatcatcctgaacagtgatgacgaaacactggccaccctgcacactgcactccagtccagtcacggggtcctgggcccagagcggctacagcaggcactgagccaggaacacatcatcgttgcccaggaacagacagtgaccaatcaggaggaagccgcctacatccaagagatcaccacggcagatggccagaccgtacagcacctggtgacctccgacaaccaggtgcagtatatcatctcccaggatggtgtccagcacctgctcccccaggaatatgttgtggtccctgaaggccatcacatccaggtacaggagggccagatcacacacatccagtatgaacaaggagccccgttccttcaggagtcccagatccagtatgtgcctgtgtccccaggccagcagcttgtcacacaggctcaacttgaggctgcagcacactcagctgtcacagcagtggctgatgctgccatggcccaagcccagggcctgtttggtacagacgagacagtgcccgaacacattcaacagctgcagcaccagggcatcgagtacgacgtcatcaccctggccgatgactgagccccgagggcccaacacagatcatggatttgcggccagctctcctgggggtagggggccaccaggactcacctccctcttcatttaggatctccagatactggatagccagcatcctctcattcccagggagccagacctgtgctgttggggttaggggcagccatgggccccagccaggacatgctgggtgccccagcctgcaggcaggctttgggagagaaatttatttttgtttgggtggacccactggcctgtcagtctcaataaagggaccggagtccagtcctgaacagc

SEQ ID NO: 371252 - DNA, 4943 bp, Homo sapiens
tgcaacccggggggacgcgggggccgaagggctgaaccactgggcccggatggggctcacagagcggaacgctccacgagaatcgtgggggcgagggaaagggtcaagattaccagccattgaccaccctcccgggaagggccttagcctgggaagcacagcttctccgtcaagtttttcccgagctcccctcgcaatacaccaggaagctccgccccgtcggagactcaatcttcgcatctgcaaaatgggcgcaggggtgcaaatgggtggccgtggttgccggggctggggagatggcccacttgttccagccacggtcacctctcttctcagagtgaagttcccagaccctacgccccgctgtcaggcagcccgccgatcagatggaggagaacgaggtggagagcagcagcgacgcggcccctgggcctggccggcccgaggagccctctgagagcggcctgggtgtgggcacctcagaagccgtgtccgccgacagcagcgacgccgcggccgccccggggcaggcagaggccgatgactctggcgtggggcaaagctcggaccgcggcagccgttctcaggaggaggtatctgagagcagctcgagcgcagaccccctgcctaatagctacctccctgattcatcgtctgtgtctcatgggccagtggcaggggtgacaggcggtcccccagcacttgtgcactctagtgcactcccagaccccaacatgctggtgtccgactgcacagcttcctcctcggacctgggctcggccatcgacaagatcatcgagtccaccatcgggcccgacctcatccagaactgcatcactgtgaccagtgctgaggatggcggggccgagaccacacggtacctgatcctacagggcccagatgatggagcccccatgacatcaccaatgtccagttccaccttggcccacagcctagcagccattgaggccctggcagatggccccacatccacatccacatgcctggaggcacagggtgggcccagctccccggtgcagctgcccccagcctccggtgccgaagagccggacctgcagagcctggaggccatgatggaggtggtggtggtgcagcagttcaaatgcaagatgtgccagtaccggagcagcaccaaggccacactgctgcgccacatgcgggaacgccacttccgtccagtagcagcagccgcagcagcagctggtaaaaaaggacgtctacggaagtggagcacctccaccaagagccaagaggaagagggaccagaggaggaggacgatgatgacattgtagacgctggagccattgatgacctggagggaggatagcgactataatccagctgaggatgagccccgaggccggcagcttcggctccagcgccccacccccagtaccccaaggccccgaaggagacctggccggccccggaagctgccccgcctggagatctcagacctcccagatggtgtggaaggagagcctctagtgagttcccagagtggacagagccctccagagccacaggatcccgaggctcccagctcctcaggcccaggacacctggtggccatgggcaaggtgagcaggacccctgtggaagctggtgtgagccagtcagatgcagagaacgcagccccctcctgcccggatgagcatgacactctgccccggcgccgaggtcgaccttccaggcgcttcctaggcaagaaataccgcaagtactattacaagtcgcccaaaccacttttgaggcccttcctgtgccgcatctgtggttctcgctttctgtcccacgaggacctgcgcttccacgtcaactcccatgaggctggcgatccccagctcttcaagtgcctgcagtgcagctatcgttcccgccgctggtcctcgctcaaggagcacatgttcaaccacgtgggcagcaagccctacaagtgtgacgagtgcagctacaccagtgtctaccggaaggacgtcattcggcacgccgctgtgcacagccgggaccggaagaagaggccagatccgactccaaagctgagctctttcccctgccctgtgtgtggccgtgtgtaccccatgcagaaaagactcacgcagcacatgaagacgcacagcactgagaagccccacatgtgtgacaagtgtggaaagtcctttaagaagcgctacaccttcaaaatgcacctgctcacgcacatccaggctgttgccaaccgcaggttcaagtgtgagttctgtgagtttgtttgtgaagacaagaaggcactgctgaaccaccagttgtcccacgtcagtgacaagcccttcaaatgcagcttttgtccctaccgcaccttccgagaggacttcttgctgtcccatgtggctgtcaagcacacaggggccaagcccttcgcctgtgagtactgccacttcagcacacggcacaagaagaacctgcgcctgcacgtacggtgccgacacgcaagcagcttcgaggaatgggggaggcgccaccctgaggagcccccctcccgccgtcgccccttcttctctctgcagcagattgaggagctgaagcagcagcacagtgcggcccctggaccacctcccagttccccaggacctcctgagatacccccagaggcgacaactttccagtcatctgaggctccctcattgctctgttctgacaccctgggcggcgccaccatcatctaccagcaaggtgagctctgtaggaggataggagctcatggagggtaggacctctgagttgggcaggggcaggtcgtgctggtgggggctggaagatggggagggggtggtattgggtgccagttttctagcactttgtcaggcttaggtcccaccccacccaggagctgaggagtcgacagcgatggccacgcagacagccttggatcttctgctgaacatgagtgctcagcgggaactggggggcacagccctgcaggtggctgtggtgaagtcggaagatgtggaagcagggttagcatcccctggtgggcagccctcccctgaaggtgccactccacaggtggtcaccctccacgtggcagagccagggggcggtgcagcagccgagagccagctaggccctcctgacctaccgcagatcaccctggcacctggtccatttggtgggactggctacagtgtcatcacagcaccccctatggaggagggaacatcagctcctggcacaccttacagcgaggagcccgcaggagaggcagcccaggctgtggttgtgagtgacaccctaaaagaagctggcacccactacatcatggctactgatggtacccagttgcaccacattgaggtgaggcttggggatgccaaccactcccccacctccctccccttctcagtacctcatgctccctgtctctctacagctcaccgcagatggctccatctccttcccaagtccagatgctctggcctctggtgccaaatggcccctgctgcagtgtgggggactgcccagagacggccctgagcccccatctccagccaagacccactgcgtaggggactcccagagctctgcctcctcacctcctgcaaccagcaaagccctgggcctggcagtgcccccgtcaccgccatctgcagccactgctgcatcaaagaagttttcctgcaagatctgtgccgaggccttccctggccgagctgagatggagagtcacaagcgggcccacgctgggcctggtgccttcaagtgccccgactgccccttcagtgcccgccagtggcccgaggtccgggcgcacatggcacagcactcaagcctacggccccaccagtgtagccagtgcagctttgcctccaagaacaagaaggacctgcgtcggcacatgctgactcacacaaaggagaagccttttgcatgccacctctgcgggcagcgtttcaaccgtaacgggcacctcaagttccacatccagcggctgcacagtcctgatgggaggaagtcaggaacccctacagcccgggcccctacccagaccccaacccagaccatcatcctgaacagtgatgacgaaacactggccaccctgcacactgcactccagtccagtcacggggtcctgggcccagagcggctacagcaggcactgagccaggaacacatcatcgttgcccaggaacagacagtgaccaatcaggaggaagccgcctacatccaagagatcaccacggcagatggccagaccgtacagcacctggtgacctccgacaaccaggtgcagtatatcatctcccaggatggtgtccagcacctgctcccccaggaatatgttgtggtccctgaaggccatcacatccaggtacaggagggccagatcacacacatccagtatgaacaaggagccccgttccttcaggagtcccagatccagtatgtgcctgtgtccccaggccagcagcttgtcacacaggctcaacttgaggctgcagcacactcagctgtcacagcagtggctgatgctgccatggcccaagcccagggcctgtttggtacagacgagacagtgcccgaacacattcaacagctgcagcaccagggcatcgagtacgacgtcatcaccctggccgatgactgagccccgagggcccaacacagatcatggatttgcggccagctctcctgggggtagggggccaccaggactcacctccctcttcatttaggatctccagatactggatagccagcatcctctcattcccagggagccagacctgtgctgttggggttaggggcagccatgggccccagccaggacatgctgggtgccccagcctgcaggcaggctttgggagagaaatttatttttgtttgggtggacccactggcctgtcagtctcaataaagggaccggagtccagtcctgaacagc

SEQ ID NO: 371253 - DNA, 2597 bp, Homo sapiens
tgcaacccggggggacgcgggggccgaagggctgaaccactgggcccggatggggctcacagagcggaacgctccacgagaatcgtgggggcgagggaaagggtcaagattaccagccattgaccaccctcccgggaagggccttagcctgggaagcacagcttctccgtcaagtttttcccgagctcccctcgcaatacaccaggaagctccgccccgtcggagactcaatcttcgcatctgcaaaatgggcgcaggggtgcaaatgggtggccgtggttgccggggctggggagatggcccacttgttccagccacggtcacctctcttctcagagtgaagttcccagaccctacgccccgctgtcaggcagcccgccgatcagatggaggagaacgaggtggagagcagcagcgacgcggcccctgggcctggccggcccgaggagccctctgagagcggcctgggtgtgggcacctcagaagccgtgtccgccgacagcagcgacgccgcggccgccccggggcaggcagaggccgatgactctggcgtggggcaaagctcggaccgcggcagccgttctcaggaggaggtatctgagagcagctcgagcgcagaccccctgcctaatagctacctccctgattcatcgtctgtgtctcatgggccagtggcaggggtgacaggcggtcccccagcacttgtgcactctagtgcactcccagaccccaacatgctggtgtccgactgcacagcttcctcctcggacctgggctcggccatcgacaagatcatcgagtccaccatcgggcccgacctcatccagaactgcatcactgtgaccagtgctgaggatggcggggccgagaccacacggtacctgatcctacagggcccagatgatggagcccccatgacatcaccaatgtccagttccaccttggcccacagcctagcagccattgaggccctggcagatggccccacatccacatccacatgcctggaggcacagggtgggcccagctccccggtgcagctgcccccagcctccggtgccgaagagccggacctgcagagcctggaggccatgatggaggtggtggtggtgcagcagttcaaatgcaagatgtgccagtaccggagcagcaccaaggccacactgctgcgccacatgcgggaacgccacttccgtccagtagcagcagccgcagcagcagctggtaaaaaaggacgtctacggaagtggagcacctccaccaagagccaagaggaagagggaccagaggaggaggacgatgatgacattgtagacgctggagccattgatgacctggagggaggatagcgactataatccagctgaggatgagccccgaggccggcagcttcggctccagcgccccacccccagtaccccaaggccccgaaggagacctggccggccccggaagctgccccgcctggagatctcagacctcccagatggtgtggaaggagagcctctagtgagttcccagagtggacagagccctccagagccacaggatcccgaggctcccagctcctcaggcccaggacacctggtggccatgggcaaggtgagcaggacccctgtggaagctggtgtgagccagtcagatgcagagaacgcagccccctcctgcccggatgagcatgacactctgccccggcgccgaggtcgaccttccaggcgcttcctaggcaagaaataccgcaagtactattacaagtcgcccaaaccacttttgaggcccttcctgtgccgcatctgtggttctcgctttctgtcccacgaggacctgcgcttccacgtcaactcccatgaggctggcgatccccagctcttcaagtgcctgcagtgcagctatcgttcccgccgctggtcctcgctcaaggagcacatgttcaaccacgtgggcagcaagccctacaagtgtgacgagtgcagctacaccagtgtctaccggaaggacgtcattcggcacgccgctgtgcacagccgggaccggtcagtgtgggggtgggagggacctgggcaagagaggccaggttgggtggggaagtggaggcccgggataaccatggttcccacttaccgtgctcctgctctgagccagccccatttgctgcacactacaggcatgagcagaaaggcagttcaccccagttcatttggcttagaacaggacagtaccaggccttgaggtccccagctcagcctcttacctcttgtgagctttagtttctcatcaaacggggacagttgttgaagggattgaaggaaattgtgtacctaaaggagttcagtaaatgatccaagatcttctggactccagatcctactcatctctcacagggctgagagtgcacctgagacagagaaacacaagttcttatgcacctaatgattgctcacaggattataattcgatcccgagcttcaggaaggagttcgcttcatgagaggtggtgtgtgagcagaggttggagacagatcccctgggacagtagctccagctgtgtgtgtggaaaagccagcccaagatactttaaggtttcttttttttaaatg

SEQ ID NO: 371254 - DNA, 2512 bp, Homo sapiens
tgcaacccggggggacgcgggggccgaagggctgaaccactgggcccggatggggctcacagagcggaacgctccacgagaatcgtgggggcgagggaaagggtcaagattaccagccattgaccaccctcccgggaagggccttagcctgggaagcacagcttctccgtcaagtttttcccgagctcccctcgcaatacaccaggaagctccgccccgtcggagactcaatcttcgcatctgcaaaatgggcgcaggggtgcaaatgggtggccgtggttgccggggctggggagatggcccacttgttccagccacggtcacctctcttctcagagtgaagttcccagaccctacgccccgctgtcaggcagcccgccgatcagatggaggagaacgaggtggagagcagcagcgacgcggcccctgggcctggccggcccgaggagccctctgagagcggcctgggtgtgggcacctcagaagccgtgtccgccgacagcagcgacgccgcggccgccccggggcaggcagaggccgatgactctggcgtggggcaaagctcggaccgcggcagccgttctcaggaggaggtatctgagagcagctcgagcgcagaccccctgcctaatagctacctccctgattcatcgtctgtgtctcatgggccagtggcaggggtgacaggcggtcccccagcacttgtgcactctagtgcactcccagaccccaacatgctggtgtccgactgcacagcttcctcctcggacctgggctcggccatcgacaagatcatcgagtccaccatcgggcccgacctcatccagaactgcatcactgtgaccagtgctgaggatggcggggccgagaccacacggtacctgatcctacagggcccagatgatggagcccccatgacatcaccaatgtccagttccaccttggcccacagcctagcagccattgaggccctggcagatggccccacatccacatccacatgcctggaggcacagggtgggcccagctccccggtgcagctgcccccagcctccggtgccgaagagccggacctgcagagcctggaggccatgatggaggtggtggtggtgcagcagttcaaatgcaagatgtgccagtaccggagcagcaccaaggccacactgctgcgccacatgcgggaacgccacttccgtccagtagcagcagccgcagcagcagctggtaaaaaaggacgtctacggaagtggagcacctccaccaagagccaagaggaagagggaccagaggaggaggacgatgatgacattgtagacgctggagccattgatgacctggagggaggatagcgactataatccagctgaggatgagccccgaggccggcagcttcggctccagcgccccacccccagtaccccaaggccccgaaggagacctggccggccccggaagctgccccgcctggagatctcagacctcccagatggtgtggaaggagagcctctagtgagttcccagagtggacagagccctccagagccacaggatcccgaggctcccagctcctcaggcccaggacacctggtggccatgggcaaggtgagcaggacccctgtggaagctggtgtgagccagtcagatgcagagaacgcagccccctcctgcccggatgagcatgacactctgccccggcgccgaggtcgaccttccaggcgcttcctaggcaagaaataccgcaagtactattacaagtcgcccaaaccacttttgaggcccttcctgtgccgcatctgtggttctcgctttctgtcccacgaggacctgcgcttccacgtcaactcccatgaggctggcgatccccagctcttcaagtgcctgcagtgcagctatcgttcccgccgctggtcctcgctcaaggagcacatgttcaaccacgtgggcagcaagccctacaagtgtgacgagtgcagctacaccagtgtctaccggaaggacgtcattcggcacgccgctgtgcacagccgggaccggaagaagaggccagatccgactccaaagctgagctctttcccctgccctgtgtgtggccgtgtgtaccccatgcagaaaagactcacgcagcacatgaagacgcacagcactgagaagccccacatgtgtgacaagtgtggaaagtcctttaagaagcgctacaccttcaaaatgcacctgctcacgcacatccaggctgttgccaaccgcaggttcaagtgtgagttctgtgagtttgtttgtgaagacaagaaggcactgctgaaccaccagttgtcccacgtcagtgacaagcccttcaaatgcagcttttgtccctaccgcaccttccgagaggacttcttgctgtcccatgtggctgtcaagcacacaggggccaagcccttcgcctgtggttctcgctttctgtcccacgaggacctgcgcttccacgtcaactcccatgaggctggcgatccccagctctaacagtgccgta

SEQ ID NO: 371255 - DNA, 1205 bp, Homo sapiens
tgcaacccggggggacgcgggggccgaagggctgaaccactgggcccggatggggctcacagagcggaacgctccacgagaatcgtgggggcgagggaaagggtcaagattaccagccattgaccaccctcccgggaagggccttagcctgggaagcacagcttctccgtcaagtttttcccgagctcccctcgcaatacaccaggaagctccgccccgtcggagactcaatcttcgcatctgcaaaatgggcgcaggggtgcaaatgggtggccgtggttgccggggctggggagatggcccacttgttccagccacggtcacctctcttctcagagtgaagttcccagaccctacgccccgctgtcaggcagcccgccgatcagatggaggagaacgaggtggagagcagcagcgacgcggcccctgggcctggccggcccgaggagccctctgagagcggcctgggtgtgggcacctcagaagccgtgtccgccgacagcagcgacgccgcggccgccccggggcaggcagaggccgatgactctggcgtggggcaaagctcggaccgcggcagccgttctcaggaggaggtatctgagagcagctcgagcgcagaccccctgcctaatagctacctccctgattcatcgtctgtgtctcatgggccagtggcaggggtgacaggcggtcccccagcacttgtgcactctagtgcactcccagaccccaacatgctggtgtccgactgcacagcttcctcctcggacctgggctcggccatcgacaagatcatcgagtccaccatcgggcccgacctcatccagaactgcatcactgtgaccagtgctgaggatggcggggccgagaccacacggtacctgatcctacagggcccagatgatggagcccccatgacatcaccaatgtccagttccaccttggcccacagcctagcaccatgggccccagccaggacatgctgggtgccccagcctgcaggcaggctttgggagagaaatttatttttgtttgggtggacccactggcctgtcagtctcaataaagggaccggagtccagtcctgaacagcttactttgtctgcttgctgctgtagcctgtaccaggccaggtcttgtgaggtggaggctgcctggctccacagcgtgccctgtcctgccctgcccctgttaagtccggtgat

SEQ ID NO: 371256 - DNA, 2944 bp, Homo sapiens
gagtctggcgtgctggcctgggaagggaacctgcccgggggttgtttatgggggtgaggacaagaggggaggttttatcctccctcctccacttctttctccatctggccccttcttatgccttcctagactccaaagctgagctctttcccctgccctgtgtgtggccgtgtgtaccccatgcagaaaagactcacgcagcacatgaagacgcacagcactgagaagccccacatgtgtgacaagtgtggaaagtcctttaagaagcgctacaccttcaaaatgcacctgctcacgcacatccaggctgttgccaaccgcaggttcaagtgtgagttctgtgagtttgtttgtgaagacaagaaggcactgctgaaccaccagttgtcccacgtcagtgacaagcccttcaaatgcagcttttgtccctaccgcaccttccgagaggacttcttgctgtcccatgtggctgtcaagcacacaggggccaagcccttcgcctgtgagtactgccacttcagcacacggcacaagaagaacctgcgcctgcacgtacggtgccgacacgcaagcagcttcgaggaatgggggaggcgccaccctgaggagcccccctcccgccgtcgccccttcttctctctgcagcagattgaggagctgaagcagcagcacagtgcggcccctggaccacctcccagttccccaggacctcctgagatacccccagaggcgacaactttccagtcatctgaggctccctcattgctctgttctgacaccctgggcggcgccaccatcatctaccagcaaggtgagctctgtaggaggataggagctcatggagggtaggacctctgagttgggcaggggcaggtcgtgctggtgggggctggaagatggggagggggtggtattgggtgccagttttctagcactttgtcaggcttaggtcccaccccacccaggagctgaggagtcgacagcgatggccacgcagacagccttggatcttctgctgaacatgagtgctcagcgggaactggggggcacagccctgcaggtggctgtggtgaagtcggaagatgtggaagcagggttagcatcccctggtgggcagccctcccctgaaggtgccactccacaggtggtcaccctccacgtggcagagccagggggcggtgcagcagccgagagccagctaggccctcctgacctaccgcagatcaccctggcacctggtccatttggtgggactggctacagtgtcatcacagcaccccctatggaggagggaacatcagctcctggcacaccttacagcgaggagcccgcaggagaggcagcccaggctgtggttgtgagtgacaccctaaaagaagctggcacccactacatcatggctactgatggtacccagttgcaccacattgagctcaccgcagatggctccatctccttcccaagtccagatgctctggcctctggtgccaaatggcccctgctgcagtgtgggggactgcccagagacggccctgagcccccatctccagccaagacccactgcgtaggggactcccagagctctgcctcctcacctcctgcaaccagcaaagccctgggcctggcagtgcccccgtcaccgccatctgcagccactgctgcatcaaagaagttttcctgcaagatctgtgccgaggccttccctggccgagctgagatggagagtcacaagcgggcccacgctgggcctggtgccttcaagtgccccgactgccccttcagtgcccgccagtggcccgaggtccgggcgcacatggcacagcactcaagcctacggccccaccagtgtagccagtgcagctttgcctccaagaacaagaaggacctgcgtcggcacatgctgactcacacaaaggagaagccttttgcatgccacctctgcgggcagcgtttcaaccgtaacgggcacctcaagttccacatccagcggctgcacagtcctgatgggaggaagtcaggaacccctacagcccgggcccctacccagaccccaacccagaccatcatcctgaacagtgatgacgaaacactggccaccctgcacactgcactccagtccagtcacggggtcctgggcccagagcggctacagcaggcactgagccaggaacacatcatcgttgcccaggaacagacagtgaccaatcaggaggaagccgcctacatccaagagatcaccacggcagatggccagaccgtacagcacctggtgacctccgacaaccaggtgcagtatatcatctcccaggatggtgtccagcacctgctcccccaggaatatgttgtggtccctgaaggccatcacatccaggtacaggagggccagatcacacacatccagtatgaacaaggagccccgttccttcaggagtcccagatccagtatgtgcctgtgtccccaggccagcagcttgtcacacaggctcaacttgaggctgcagcacactcagctgtcacagcagtggctgatgctgccatggcccaagcccagggcctgtttggtacagacgagacagtgcccgaacacattcaacagctgcagcaccagggcatcgagtacgacgtcatcaccctggccgatgactgagccccgagggcccaacacagatcatggatttgcggccagctctcctgggggtagggggccaccaggactcacctccctcttcatttaggatctccagatactggatagccagcatcctctcattcccagggagccagacctgtgctgttggggttaggggcagccatgggccccagccaggacatgctgggtgccccagcctgcaggcaggctttgggagagaaatttatttttgtttgggtggacccactggcctgtcagtctcaataaagggaccggagtccagtcctgaacagc

SEQ ID NO: 371257 - DNA, 685 bp, Homo sapiens
tcgccatgcccgccccccccaccaacaggtgcagtatatcatctcccaggatggtgtccagcacctgctcccccaggaatatgttgtggtccctgaaggccatcacatccaggtacaggagggccagatcacacacatccagtatgaacaaggagccccgttccttcaggagtcccagatccagtatgtgcctgtgtccccaggccagcagcttgtcacacaggctcaacttgaggctgcagcacactcagctgtcacagcagtggctgatgctgccatggcccaagcccagggcctgtttggtacagacgagacagtgcccgaacacattcaacagctgcagcaccagggcatcgagtacgacgtcatcaccctggccgatgactgagccccgagggcccaacacagatcatggatttgcggccagctctcctgggggtagggggccaccaggactcacctccctcttcatttaggatctccagatactggatagccagcatcctctcattcccagggagccagacctgtgctgttggggttaggggcagccatgggccccagccaggacatgctgggtgccccagcctgcaggcaggctttgggagagaaatttatttttgtttgggtggacccactggcctgtcagtctcaataaagggaccggagtccagtcctgaacagc

SEQ ID NO: 371258 - DNA, 336 bp, Homo sapiens
atttacaagagacatggtagagggtcatttggtaacagggcagagccacagttgaaccctgggcccttctgacttgagtccatctgtggtgacagtcactcctcagttgatgcctgttgcttggggaagggggctcctgtggccctccatcttctcctagaaccttctccatgcccacagcgaggagcccgcaggagaggcagcccaggctgtggttgtgagtgacaccctaaaagaagctggcacccactacatcatggctactgatggtacccagttgcaccacattgaggtgaggcttggggatgccaaccactcccccacctccctcccctt

SEQ ID NO: 371259 - DNA, 1721 bp, Homo sapiens
tttagattgtccaaatggtttgcaagcatggaagtcacatctccctccttccctcccatcagccctccagctgcctgacctccctggggaatgccagtgttaaagcactcctattgcttcccgagccttagattgttctgtgaagtcaccaaagccgccattctggcctcccttggataaatggggcaaatgagactccgggagaggaatggctttgtctgtaggtgcacagcatgtcagtgacagagccgtgcctggaacccaggtctcctgactgggaggtcccagctctcgccgttgctctaatccaggccaggtcctactgtgctgacagaatgtcggctgttgggcggtagtatccatgctgccctctaaccacaggctgtctgtgtcatgtgactcaatgcacccatcagtggtctgtgatgagtgggtgggaggatattttggctggcctctggcccacttgtccacgtctgtcctggtgtgtcagtggctggcttgtgacctggcatgtccgtggcaggtgtggaaggagagcctctagtgagttcccagagtggacagagccctccagagccacaggatcccgaggctcccagctcctcaggcccaggacacctggtggccatgggcaaggtgagcaggacccctgtggaagctggtgtgagccagtcagatgcagagaacgcagccccctcctgcccggatgagcatgacactctgccccggcgccgaggtcgaccttccaggcgcttcctaggcaagaaataccgcaagtatgtggagcagaggtgagggtggggcatgcatgtggttaagccaccaaccccaccagacctttccgccacactctcatcctgcaggtactattacaagtcgcccaaaccacttttgaggcccttcctgtgccgcatctgtggttctcgctttctgtcccacgaggacctgcgcttccacgtcaactcccatgaggctggcgatccccagctcttcaagtgcctgcagtgcagctatcgttcccgccgctggtcctcgctcaaggagcacatgttcaaccacgtgggcagcaagccctacaagtgtgacgagtgcagctacaccagtgtctaccggaaggacgtcattcggcacgccgctgtgcacagccgggaccggtcagtgtgggggtgggagggacctgggcaagagaggccaggttgggtggggaagtggaggcccgggataaccatggttcccacttaccgtgctcctgctctgagccagccccatttgctgcacactacaggcatgagcagaaaggcagttcaccccagttcatttggcttagaacaggacagtaccaggccttgaggtccccagctcagcctcttacctcttgtgagctttagtttctcatcaaacggggacagttgttgaagggattgaaggaaattgtgtacctaaaggagttcagtaaatgatccaagatcttctggactccagatcctactcatctctcacagggctgagagtgcacctgagacagagaaacacaagttcttatgcacctaatgattgctcacaggattataattcgatcccgagcttcaggaaggagttcgcttcatgagaggtggtgtgtgagcagaggttggagacagatcccctgggacagtagctccagctgtgtgtgtggaaaagccagcccaagatactttaaggtttcttttttttaaatg

SEQ ID NO: 371260 - DNA, 4713 bp, Homo sapiens
tgcaacccggggggacgcgggggccgaagggctgaaccactgggcccggatggggctcacagagcggaacgctccacgagaatcgtgggggcgagggaaagggtcaagattaccagccattgaccaccctcccgggaagggccttagcctgggaagcacagcttctccgtcaagtttttcccgagctcccctcgcaatacaccaggaagctccgccccgtcggagactcaatcttcgcatctgcaaaatgggcgcaggggtgcaaatgggtggccgtggttgccggggctggggagatggcccacttgttccagccacggtcacctctcttctcagagtgaagttcccagaccctacgccccgctgtcaggcagcccgccgatcagatggaggagaacgaggtggagagcagcagcgacgcggcccctgggcctggccggcccgaggagccctctgagagcggcctgggtgtgggcacctcagaagccgtgtccgccgacagcagcgacgccgcggccgccccggggcaggcagaggccgatgactctggcgtggggcaaagctcggaccgcggcagccgttctcaggaggaggtatctgagagcagctcgagcgcagaccccctgcctaatagctacctccctgattcatcgtctgtgtctcatgggccagtggcaggggtgacaggcggtcccccagcacttgtgcactctagtgcactcccagaccccaacatgctggtgtccgactgcacagcttcctcctcggacctgggctcggccatcgacaagatcatcgagtccaccatcgggcccgacctcatccagaactgcatcactgtgaccagtgctgaggatggcggggccgagaccacacggtacctgatcctacagggcccagatgatggagcccccatgacatcaccaatgtccagttccaccttggcccacagcctagcagccattgaggccctggcagatggccccacatccacatccacatgcctggaggcacagggtgggcccagctccccggtgcagctgcccccagcctccggtgccgaagagccggacctgcagagcctggaggccatgatggaggtggtggtggtgcagcagttcaaatgcaagatgtgccagtaccggagcagcaccaaggccacactgctgcgccacatgcgggaacgccacttccgtccagtagcagcagccgcagcagcagctggtaaaaaaggacgtctacggaagtggagcacctccaccaagagccaagaggaagagggaccagaggaggaggacgatgatgacattgtagacgctggagccattgatgacctggagggaggatagcgactataatccagctgaggatgagccccgaggccggcagcttcggctccagcgccccacccccagtaccccaaggccccgaaggagacctggccggccccggaagctgccccgcctggagatctcagacctcccagatggtgtggaaggagagcctctagtgagttcccagagtggacagagccctccagagccacaggatcccgaggctcccagctcctcaggcccaggacacctggtggccatgggcaaggtgagcaggacccctgtggaagctggtgtgagccagtcagatgcagagaacgcagccccctcctgcccggatgagcatgacactctgccccggcgccgaggtcgaccttccaggcgcttcctaggcaagaaataccgcaagtactattacaagtcgcccaaaccacttttgaggcccttcctgtgccgcatctgtggttctcgctttctgtcccacgaggacctgcgcttccacgtcaactcccatgaggctggcgatccccagctcttcaagtgcctgcagtgcagctatcgttcccgccgctggtcctcgctcaaggagcacatgttcaaccacgtgggcagcaagccctacaagtgtgacgagtgcagctacaccagtgtctaccggaaggacgtcattcggcacgccgctgtgcacagccgggaccggaagaagaggccagatccgactccaaagctgagctctttcccctgccctgtgtgtggccgtgtgtaccccatgcagaaaagactcacgcagcacatgaagacgcacagcactgagaagccccacatgtgtgacaagtgtggaaagtcctttaagaagcgctacaccttcaaaatgcacctgctcacgcacatccaggctgttgccaaccgcaggttcaagtgtgagttctgtgagtttgtttgtgaagacaagaaggcactgctgaaccaccagttgtcccacgtcagtgacaagcccttcaaatgcagcttttgtccctaccgcaccttccgagaggacttcttgctgtcccatgtggctgtcaagcacacaggggccaagcccttcgcctgtgagtactgccacttcagcacacggcacaagaagaacctgcgcctgcacgtacggtgccgacacgcaagcagcttcgaggaatgggggaggcgccaccctgaggagcccccctcccgccgtcgccccttcttctctctgcagcagattgaggagctgaagcagcagcacagtgcggcccctggaccacctcccagttccccaggacctcctgagatacccccagaggcgacaactttccagtcatctgaggctccctcattgctctgttctgacaccctgggcggcgccaccatcatctaccagcaaggagctgaggagtcgacagcgatggccacgcagacagccttggatcttctgctgaacatgagtgctcagcgggaactggggggcacagccctgcaggtggctgtggtgaagtcggaagatgtggaagcagggttagcatcccctggtgggcagccctcccctgaaggtgccactccacaggtggtcaccctccacgtggcagagccagggggcggtgcagcagccgagagccagctaggccctcctgacctaccgcagatcaccctggcacctggtccatttggtgggactggctacagtgtcatcacagcaccccctatggaggagggaacatcagctcctggcacaccttacagcgaggagcccgcaggagaggcagcccaggctgtggttgtgagtgacaccctaaaagaagctggcacccactacatcatggctactgatggtacccagttgcaccacattgagctcaccgcagatggctccatctccttcccaagtccagatgctctggcctctggtgccaaatggcccctgctgcagtgtgggggactgcccagagacggccctgagcccccatctccagccaagacccactgcgtaggggactcccagagctctgcctcctcacctcctgcaaccagcaaagccctgggcctggcagtgcccccgtcaccgccatctgcagccactgctgcatcaaagaagttttcctgcaagatctgtgccgaggccttccctggccgagctgagatggagagtcacaagcgggcccacgctgggcctggtgccttcaagtgccccgactgccccttcagtgcccgccagtggcccgaggtccgggcgcacatggcacagcactcaagcctacggccccaccagtgtagccagtgcagctttgcctccaagaacaagaaggacctgcgtcggcacatgctgactcacacaaaggagaagccttttgcatgccacctctgcgggcagcgtttcaaccgtaacgggcacctcaagttccacatccagcggctgcacagtcctgatgggaggaagtcaggaacccctacagcccgggcccctacccagaccccaacccagaccatcatcctgaacagtgatgacgaaacactggccaccctgcacactgcactccagtccagtcacggggtcctgggcccagagcggctacagcaggcactgagccaggaacacatcatcgttgcccaggaacagacagtgaccaatcaggaggaagccgcctacatccaagagatcaccacggcagatggccagaccgtacagcacctggtgacctccgacaaccaggtgcagtatatcatctcccaggatggtgtccagcacctgctcccccaggaatatgttgtggtccctgaaggccatcacatccaggtacaggagggccagatcacacacatccagtatgaacaaggagccccgttccttcaggagtcccagatccagtatgtgcctgtgtccccaggccagcagcttgtcacacaggctcaacttgaggctgcagcacactcagctgtcacagcagtggctgatgctgccatggcccaagcccagggcctgtttggtacagacgagacagtgcccgaacacattcaacagctgcagcaccagggcatcgagtacgacgtcatcaccctggccgatgactgagccccgagggcccaacacagatcatggatttgcggccagctctcctgggggtagggggccaccaggactcacctccctcttcatttaggatctccagatactggatagccagcatcctctcattcccagggagccagacctgtgctgttggggttaggggcagccatgggccccagccaggacatgctgggtgccccagcctgcaggcaggctttgggagagaaatttatttttgtttgggtggacccactggcctgtcagtctcaataaagggaccggagtccagtcctgaacagc

SEQ ID NO: 371261 - DNA, 4825 bp, Homo sapiens
tgcaacccggggggacgcgggggccgaagggctgaaccactgggcccggatggggctcacagagcggaacgctccacgagaatcgtgggggcgagggaaagggtcaagattaccagccattgaccaccctcccgggaagggccttagcctgggaagcacagcttctccgtcaagtttttcccgagctcccctcgcaatacaccaggaagctccgccccgtcggagactcaatcttcgcatctgcaaaatgggcgcaggggtgcaaatgggtggccgtggttgccggggctggggagatggcccacttgttccagccacggtcacctctcttctcagagtgaagttcccagaccctacgccccgctgtcaggcagcccgccgatcagatggaggagaacgaggtggagagcagcagcgacgcggcccctgggcctggccggcccgaggagccctctgagagcggcctgggtgtgggcacctcagaagccgtgtccgccgacagcagcgacgccgcggccgccccggggcaggcagaggccgatgactctggcgtggggcaaagctcggaccgcggcagccgttctcaggaggaggtatctgagagcagctcgagcgcagaccccctgcctaatagctacctccctgattcatcgtctgtgtctcatgggccagtggcaggggtgacaggcggtcccccagcacttgtgcactctagtgcactcccagaccccaacatgctggtgtccgactgcacagcttcctcctcggacctgggctcggccatcgacaagatcatcgagtccaccatcgggcccgacctcatccagaactgcatcactgtgaccagtgctgaggatggcggggccgagaccacacggtacctgatcctacagggcccagatgatggagcccccatgacatcaccaatgtccagttccaccttggcccacagcctagcagccattgaggccctggcagatggccccacatccacatccacatgcctggaggcacagggtgggcccagctccccggtgcagctgcccccagcctccggtgccgaagagccggacctgcagagcctggaggccatgatggaggtggtggtggtgcagcagttcaaatgcaagatgtgccagtaccggagcagcaccaaggccacactgctgcgccacatgcgggaacgccacttccgtccagtagcagcagccgcagcagcagctggtaaaaaaggacgtctacggaagtggagcacctccaccaagagccaagaggaagagggaccagaggaggaggacgatgatgacattgtagacgctggagccattgatgacctggagggaggatagcgactataatccagctgaggatgagccccgaggccggcagcttcggctccagcgccccacccccagtaccccaaggccccgaaggagacctggccggccccggaagctgccccgcctggagatctcagacctcccagatggtgtggaaggagagcctctagtgagttcccagagtggacagagccctccagagccacaggatcccgaggctcccagctcctcaggcccaggacacctggtggccatgggcaaggtgagcaggacccctgtggaagctggtgtgagccagtcagatgcagagaacgcagccccctcctgcccggatgagcatgacactctgccccggcgccgaggtcgaccttccaggcgcttcctaggcaagaaataccgcaagtactattacaagtcgcccaaaccacttttgaggcccttcctgtgccgcatctgtggttctcgctttctgtcccacgaggacctgcgcttccacgtcaactcccatgaggctggcgatccccagctcttcaagtgcctgcagtgcagctatcgttcccgccgctggtcctcgctcaaggagcacatgttcaaccacgtgggcagcaagccctacaagtgtgacgagtgcagctacaccagtgtctaccggaaggacgtcattcggcacgccgctgtgcacagccgggaccggaagaagaggccagatccgactccaaagctgagctctttcccctgccctgtgtgtggccgtgtgtaccccatgcagaaaagactcacgcagcacatgaagacgcacagcactgagaagccccacatgtgtgacaagtgtggaaagtcctttaagaagcgctacaccttcaaaatgcacctgctcacgcacatccaggctgttgccaaccgcaggttcaagtgtgagttctgtgagtttgtttgtgaagacaagaaggcactgctgaaccaccagttgtcccacgtcagtgacaagcccttcaaatgcagcttttgtccctaccgcaccttccgagaggacttcttgctgtcccatgtggctgtcaagcacacaggggccaagcccttcgcctgtgagtactgccacttcagcacacggcacaagaagaacctgcgcctgcacgtacggtgccgacacgcaagcagcttcgaggaatgggggaggcgccaccctgaggagcccccctcccgccgtcgccccttcttctctctgcagcagattgaggagctgaagcagcagcacagtgcggcccctggaccacctcccagttccccaggacctcctgagatacccccagaggcgacaactttccagtcatctgaggctccctcattgctctgttctgacaccctgggcggcgccaccatcatctaccagcaaggagctgaggagtcgacagcgatggccacgcagacagccttggatcttctgctgaacatgagtgctcagcgggaactggggggcacagccctgcaggtggctgtggtgaagtcggaagatgtggaagcagggttagcatcccctggtgggcagccctcccctgaaggtgccactccacaggtggtcaccctccacgtggcagagccagggggcggtgcagcagccgagagccagctaggccctcctgacctaccgcagatcaccctggcacctggtccatttggtgggactggctacagtgtcatcacagcaccccctatggaggagggaacatcagctcctggcacaccttacagcgaggagcccgcaggagaggcagcccaggctgtggttgtgagtgacaccctaaaagaagctggcacccactacatcatggctactgatggtacccagttgcaccacattgagctcaccgcagatggctccatctccttcccaagtccagatgctctggcctctggtgccaaatggcccctgctgcagtgtgggggactgcccagagacggccctgagcccccatctccagccaagacccactgcgtaggggactcccagagctctgcctcctcacctcctgcaaccagcaaagccctgggcctggcagtgcccccgtcaccgccatctgcagccactgctgcatcaaagaagttttcctgcaagatctgtgccgaggccttccctggccgagctgagatggagagtcacaagcgggcccacgctgggcctggtgccttcaagtgccccgactgccccttcagtgcccgccagtggcccgaggtccgggcgcacatggcacagcactcaagcctacggccccaccagtgtagccagtgcagctttgcctccaagaacaagaaggacctgcgtcggcacatgctgactcacacaaaggagaagccttttgcatgccacctctgcgggcagcgtttcaaccgtaacgggcacctcaagttccacatccagcggctgcacagtcctgatgggaggaagtcaggaacccctacagcccgggcccctacccagaccccaacccagaccatcatcctgaacagtgatgacgaaacactggccaccctgcacactgcactccagtccagtcacggggtcctgggcccagagcggctacagcaggcactgagccaggaacacatcatcgttgcccaggaacagacagtgaccaatcaggaggaagccgcctacatccaagagatcaccacggcagatggccagaccgtacagcacctggtgacctccgacaaccaggtgcagtatatcatctcccaggatggtgtccagcacctgctcccccaggaatatgttgtggtccctgaaggccatcacatccaggtacaggagggccagatcacacacatccagtatgaacaaggagccccgttccttcaggagtcccagatccagtatgtgcctgtgtccccaggccagcagcttgtcacacaggctcaacttgaggctgcagcacactcagctgtcacagcagtggctgatgctgccatggcccaagcccagggcctgtttggtacagacgagacagtgcccgaacacattcaacagctgcagcaccagggcatcgagtacgacgtcatcaccctggccgatgactgagccccgagggcccaacacagatcatggatttgcggccagctctcctgggggtagggggccaccaggactcacctccctcttcatttaggatctccagatactggatagccagcatcctctcattcccagggagccagacctgtgctgttggggttaggggcagccatgggccccagccaggacatgctgggtgccccagcctgcaggcaggctttgggagagaaatttatttttgtttgggtggacccactggcctgtcagtctcaataaagggaccggagtccagtcctgaacagcttactttgtctgcttgctgctgtagcctgtaccaggccaggtcttgtgaggtggaggctgcctggctccacagcgtgccctgtcctgccctgcccctgttaagtccggtgat

SEQ ID NO: 371262 - DNA, 4867 bp, Homo sapiens
tgcaacccggggggacgcgggggccgaagggctgaaccactgggcccggatggggctcacagagcggaacgctccacgagaatcgtgggggcgagggaaagggtcaagattaccagccattgaccaccctcccgggaagggccttagcctgggaagcacagcttctccgtcaagtttttcccgagctcccctcgcaatacaccaggaagctccgccccgtcggagactcaatcttcgcatctgcaaaatgggcgcaggggtgcaaatgggtggccgtggttgccggggctggggagatggcccacttgttccagccacggtcacctctcttctcagagtgaagttcccagaccctacgccccgctgtcaggcagcccgccgatcagatggaggagaacgaggtggagagcagcagcgacgcggcccctgggcctggccggcccgaggagccctctgagagcggcctgggtgtgggcacctcagaagccgtgtccgccgacagcagcgacgccgcggccgccccggggcaggcagaggccgatgactctggcgtggggcaaagctcggaccgcggcagccgttctcaggaggaggtatctgagagcagctcgagcgcagaccccctgcctaatagctacctccctgattcatcgtctgtgtctcatgggccagtggcaggggtgacaggcggtcccccagcacttgtgcactctagtgcactcccagaccccaacatgctggtgtccgactgcacagcttcctcctcggacctgggctcggccatcgacaagatcatcgagtccaccatcgggcccgacctcatccagaactgcatcactgtgaccagtgctgaggatggcggggccgagaccacacggtacctgatcctacagggcccagatgatggagcccccatgacatcaccaatgtccagttccaccttggcccacagcctagcagccattgaggccctggcagatggccccacatccacatccacatgcctggaggcacagggtgggcccagctccccggtgcagctgcccccagcctccggtgccgaagagccggacctgcagagcctggaggccatgatggaggtggtggtggtgcagcagttcaaatgcaagatgtgccagtaccggagcagcaccaaggccacactgctgcgccacatgcgggaacgccacttccgtccagtagcagcagccgcagcagcagctggtaaaaaaggacgtctacggaagtggagcacctccaccaagagccaagaggaagagggaccagaggaggaggacgatgatgacattgtagacgctggagccattgatgacctggagggaggatagcgactataatccagctgaggatgagccccgaggccggcagcttcggctccagcgccccacccccagtaccccaaggccccgaaggagacctggccggccccggaagctgccccgcctggagatctcagacctcccagatggtgtggaaggagagcctctagtgagttcccagagtggacagagccctccagagccacaggatcccgaggctcccagctcctcaggcccaggacacctggtggccatgggcaaggtgagcaggacccctgtggaagctggtgtgagccagtcagatgcagagaacgcagccccctcctgcccggatgagcatgacactctgccccggcgccgaggtcgaccttccaggcgcttcctaggcaagaaataccgcaagtactattacaagtcgcccaaaccacttttgaggcccttcctgtgccgcatctgtggttctcgctttctgtcccacgaggacctgcgcttccacgtcaactcccatgaggctggcgatccccagctcttcaagtgcctgcagtgcagctatcgttcccgccgctggtcctcgctcaaggagcacatgttcaaccacgtgggcagcaagccctacaagtgtgacgagtgcagctacaccagtgtctaccggaaggacgtcattcggcacgccgctgtgcacagccgggaccggaagaagaggccagatccgactccaaagctgagctctttcccctgccctgtgtgtggccgtgtgtaccccatgcagaaaagactcacgcagcacatgaagacgcacagcactgagaagccccacatgtgtgacaagtgtggaaagtcctttaagaagcgctacaccttcaaaatgcacctgctcacgcacatccaggctgttgccaaccgcaggttcaagtgtgagttctgtgagtttgtttgtgaagacaagaaggcactgctgaaccaccagttgtcccacgtcagtgacaagcccttcaaatgcagcttttgtccctaccgcaccttccgagaggacttcttgctgtcccatgtggctgtcaagcacacaggggccaagcccttcgcctgtgagtactgccacttcagcacacggcacaagaagaacctgcgcctgcacgtacggtgccgacacgcaagcagcttcgaggaatgggggaggcgccaccctgaggagcccccctcccgccgtcgccccttcttctctctgcagcagattgaggagctgaagcagcagcacagtgcggcccctggaccacctcccagttccccaggacctcctgagatacccccagaggcgacaactttccagtcatctgaggctccctcattgctctgttctgacaccctgggcggcgccaccatcatctaccagcaaggtgagctctgtaggaggataggagctcatggagggtaggacctctgagttgggcaggggcaggtcgtgctggtgggggctggaagatggggagggggtggtattgggtgccagttttctagcactttgtcaggcttaggtcccaccccacccaggagctgaggagtcgacagcgatggccacgcagacagccttggatcttctgctgaacatgagtgctcagcgggaactggggggcacagccctgcaggtggctgtggtgaagtcggaagatgtggaagcagggttagcatcccctggtgggcagccctcccctgaaggtgccactccacaggtggtcaccctccacgtggcagagccagggggcggtgcagcagccgagagccagctaggccctcctgacctaccgcagatcaccctggcacctggtccatttggtgggactggctacagtgtcatcacagcaccccctatggaggagggaacatcagctcctggcacaccttacagcgaggagcccgcaggagaggcagcccaggctgtggttgtgagtgacaccctaaaagaagctggcacccactacatcatggctactgatggtacccagttgcaccacattgagctcaccgcagatggctccatctccttcccaagtccagatgctctggcctctggtgccaaatggcccctgctgcagtgtgggggactgcccagagacggccctgagcccccatctccagccaagacccactgcgtaggggactcccagagctctgcctcctcacctcctgcaaccagcaaagccctgggcctggcagtgcccccgtcaccgccatctgcagccactgctgcatcaaagaagttttcctgcaagatctgtgccgaggccttccctggccgagctgagatggagagtcacaagcgggcccacgctgggcctggtgccttcaagtgccccgactgccccttcagtgcccgccagtggcccgaggtccgggcgcacatggcacagcactcaagcctacggccccaccagtgtagccagtgcagctttgcctccaagaacaagaaggacctgcgtcggcacatgctgactcacacaaaggagaagccttttgcatgccacctctgcgggcagcgtttcaaccgtaacgggcacctcaagttccacatccagcggctgcacagtcctgatgggaggaagtcaggaacccctacagcccgggcccctacccagaccccaacccagaccatcatcctgaacagtgatgacgaaacactggccaccctgcacactgcactccagtccagtcacggggtcctgggcccagagcggctacagcaggcactgagccaggaacacatcatcgttgcccaggaacagacagtgaccaatcaggaggaagccgcctacatccaagagatcaccacggcagatggccagaccgtacagcacctggtgacctccgacaaccaggtgcagtatatcatctcccaggatggtgtccagcacctgctcccccaggaatatgttgtggtccctgaaggccatcacatccaggtacaggagggccagatcacacacatccagtatgaacaaggagccccgttccttcaggagtcccagatccagtatgtgcctgtgtccccaggccagcagcttgtcacacaggctcaacttgaggctgcagcacactcagctgtcacagcagtggctgatgctgccatggcccaagcccagggcctgtttggtacagacgagacagtgcccgaacacattcaacagctgcagcaccagggcatcgagtacgacgtcatcaccctggccgatgactgagccccgagggcccaacacagatcatggatttgcggccagctctcctgggggtagggggccaccaggactcacctccctcttcatttaggatctccagatactggatagccagcatcctctcattcccagggagccagacctgtgctgttggggttaggggcagccatgggccccagccaggacatgctgggtgccccagcctgcaggcaggctttgggagagaaatttatttttgtttgggtggacccactggcctgtcagtctcaataaagggaccggagtccagtcctgaacagc

SEQ ID NO: 371263 - DNA, 5034 bp, Homo sapiens
tgcaacccggggggacgcgggggccgaagggctgaaccactgggcccggatggggctcacagagcggaacgctccacgagaatcgtgggggcgagggaaagggtcaagattaccagccattgaccaccctcccgggaagggccttagcctgggaagcacagcttctccgtcaagtttttcccgagctcccctcgcaatacaccaggaagctccgccccgtcggagactcaatcttcgcatctgcaaaatgggcgcaggggtgcaaatgggtggccgtggttgccggggctggggagatggcccacttgttccagccacggtcacctctcttctcagagtgaagttcccagaccctacgccccgctgtcaggcagcccgccgatcagatggaggagaacgaggtggagagcagcagcgacgcggcccctgggcctggccggcccgaggagccctctgagagcggcctgggtgtgggcacctcagaagccgtgtccgccgacagcagcgacgccgcggccgccccggggcaggcagaggccgatgactctggcgtggggcaaagctcggaccgcggcagccgttctcaggaggaggtatctgagagcagctcgagcgcagaccccctgcctaatagctacctccctgattcatcgtctgtgtctcatgggccagtggcaggggtgacaggcggtcccccagcacttgtgcactctagtgcactcccagaccccaacatgctggtgtccgactgcacagcttcctcctcggacctgggctcggccatcgacaagatcatcgagtccaccatcgggcccgacctcatccagaactgcatcactgtgaccagtgctgaggatggcggggccgagaccacacggtacctgatcctacagggcccagatgatggagcccccatgacatcaccaatgtccagttccaccttggcccacagcctagcagccattgaggccctggcagatggccccacatccacatccacatgcctggaggcacagggtgggcccagctccccggtgcagctgcccccagcctccggtgccgaagagccggacctgcagagcctggaggccatgatggaggtggtggtggtgcagcagttcaaatgcaagatgtgccagtaccggagcagcaccaaggccacactgctgcgccacatgcgggaacgccacttccgtccagtagcagcagccgcagcagcagctggtaaaaaaggacgtctacggaagtggagcacctccaccaagagccaagaggaagagggaccagaggaggaggacgatgatgacattgtagacgctggagccattgatgacctggagggaggatagcgactataatccagctgaggatgagccccgaggccggcagcttcggctccagcgccccacccccagtaccccaaggccccgaaggagacctggccggccccggaagctgccccgcctggagatctcagacctcccagatggtgtggaaggagagcctctagtgagttcccagagtggacagagccctccagagccacaggatcccgaggctcccagctcctcaggcccaggacacctggtggccatgggcaaggtgagcaggacccctgtggaagctggtgtgagccagtcagatgcagagaacgcagccccctcctgcccggatgagcatgacactctgccccggcgccgaggtcgaccttccaggcgcttcctaggcaagaaataccgcaagtactattacaagtcgcccaaaccacttttgaggcccttcctgtgccgcatctgtggttctcgctttctgtcccacgaggacctgcgcttccacgtcaactcccatgaggctggcgatccccagctcttcaagtgcctgcagtgcagctatcgttcccgccgctggtcctcgctcaaggagcacatgttcaaccacgtgggcagcaagccctacaagtgtgacgagtgcagctacaccagtgtctaccggaaggacgtcattcggcacgccgctgtgcacagccgggaccggaagaagaggccagatccgactccaaagctgagctctttcccctgccctgtgtgtggccgtgtgtaccccatgcagaaaagactcacgcagcacatgaagacgcacagcactgagaagccccacatgtgtgacaagtgtggaaagtcctttaagaagcgctacaccttcaaaatgcacctgctcacgcacatccaggctgttgccaaccgcaggttcaagtgtgagttctgtgagtttgtttgtgaagacaagaaggcactgctgaaccaccagttgtcccacgtcagtgacaagcccttcaaatgcagcttttgtccctaccgcaccttccgagaggacttcttgctgtcccatgtggctgtcaagcacacaggggccaagcccttcgcctgtgagtactgccacttcagcacacggcacaagaagaacctgcgcctgcacgtacggtgccgacacgcaagcagcttcgaggaatgggggaggcgccaccctgaggagcccccctcccgccgtcgccccttcttctctctgcagcagattgaggagctgaagcagcagcacagtgcggcccctggaccacctcccagttccccaggacctcctgagatacccccagaggcgacaactttccagtcatctgaggctccctcattgctctgttctgacaccctgggcggcgccaccatcatctaccagcaaggtgagctctgtaggaggataggagctcatggagggtaggacctctgagttgggcaggggcaggtcgtgctggtgggggctggaagatggggagggggtggtattgggtgccagttttctagcactttgtcaggcttaggtcccaccccacccaggagctgaggagtcgacagcgatggccacgcagacagccttggatcttctgctgaacatgagtgctcagcgggaactggggggcacagccctgcaggtggctgtggtgaagtcggaagatgtggaagcagggttagcatcccctggtgggcagccctcccctgaaggtgccactccacaggtggtcaccctccacgtggcagagccagggggcggtgcagcagccgagagccagctaggccctcctgacctaccgcagatcaccctggcacctggtccatttggtgggactggctacagtgtcatcacagcaccccctatggaggagggaacatcagctcctggcacaccttacagcgaggagcccgcaggagaggcagcccaggctgtggttgtgagtgacaccctaaaagaagctggcacccactacatcatggctactgatggtacccagttgcaccacattgagctcaccgcagatggctccatctccttcccaagtccagatgctctggcctctggtgccaaatggcccctgctgcagtgtgggggactgcccagagacggccctgagcccccatctccagccaagacccactgcgtaggggactcccagagctctgcctcctcacctcctgcaaccagcaaagccctgggcctggcagtgcccccgtcaccgccatctgcagccactgctgcatcaaagaagttttcctgcaagatctgtgccgaggccttccctggccgagctgagatggagagtcacaagcgggcccacgctgggcctggtgccttcaagtgccccgactgccccttcagtgcccgccagtggcccgaggtccgggcgcacatggcacagcactcaagcctacggccccaccagtgtagccagtgcagctttgcctccaagaacaagaaggacctgcgtcggcacatgctgactcacacaaaggagaagccttttgcatgccacctctgcgggcagcgtttcaaccgtaacgggcacctcaagttccacatccagcggctgcacagtcctgatgggaggaagtcaggaacccctacagcccgggcccctacccagaccccaacccagaccatcatcctgaacagtgatgacgaaacactggccaccctgcacactgcactccagtccagtcacggggtcctgggcccagagcggctacagcaggcactgagccaggaacacatcatcgttgcccaggaacagacagtgaccaatcaggaggaagccgcctacatccaagagatcaccacggcagatggccagaccgtacagcacctggtgacctccgacaaccaggtgcagtatatcatctcccaggatggtgtccagcacctgctcccccaggaatatgttgtggtccctgaaggccatcacatccaggtaggccagacctgggatgagggtgctgtgtggtgaagggctgcatgacctctccctaggatcacagcttggcttcctctctgcaggtacaggagggccagatcacacacatccagtatgaacaaggagccccgttccttcaggagtcccaggtagggccgtggggggacagggagacctggggcacaggcaggtttctccaggccagcatcttatcagcttctcccctccagatccagtatgtgcctgtgtccccaggccagcagcttgtcacacaggctcaacttgaggctgcagcacactcagctgtcacagcagtggctgatgctgccatggcccaagcccagggcctgtttggtacagacgagacagtgcccgaacacattcaacagctgcagcaccagggcatcgagtacgacgtcatcaccctggccgatgactgagccccgagggcccaacacagatcatggatttgcggccagctctcctgggggtagggggccaccaggactcacctccctcttcatttaggatctccagatactggatagccagcatcctctcattcccagggagccagacctgtgctgttggggttaggggcagccatgggccccagccaggacatgctgggtgccccagcctgcaggcaggctttgggagagaaatttatttttgtttgggtggacccactggcctgtcagtctcaataaagggaccggagtccagtcctgaacagc

SEQ ID NO: 371264 - DNA, 1058 bp, Homo sapiens
tgcaacccggggggacgcgggggccgaagggctgaaccactgggcccggatggggctcacagagcggaacgctccacgagaatcgtgggggcgagggaaagggtcaagattaccagccattgaccaccctcccgggaagggccttagcctgggaagcacagcttctccgtcaagtttttcccgagctcccctcgcaatacaccaggaagctccgccccgtcggagactcaatcttcgcatctgcaaaatgggcgcaggggtgcaaatgggtggccgtggttgccggggctggggagatggcccacttgttccagccacggtcacctctcttctcagagtgaagttcccagaccctacgccccgctgtcaggcagcccgccgatcagatggaggagaacgaggtggagagcagcagcgacgcggcccctgggcctggccggcccgaggagccctctgagagcggcctgggtgtgggcacctcagaagccgtgtccgccgacagcagcgacgccgcggccgccccggggcaggcagaggccgatgactctggcgtggggcaaagctcggaccgcggcagccgttctcaggaggaggtatctgagagcagctcgagcgcagaccccctgcctaatagctacctccctgattcatcgtctgtgtctcatgggccagtggcaggggtgacaggcggtcccccagcacttgtgcactctagtgcactcccagaccccaacatgctggtgtccgactgcacagcttcctcctcggacctgggctcggccatcgacaagatcatcgagtccaccatcgggcccgacctcatccagagtgagtcaggcagaggagccccacaggggttttcctgcagtgtccggcagccagctgtgcccaccctagctgtgtgaactcaggcagattactttcccatgtggaatgtgcagagtgggaacagtcacccctgtctcatggtggtaaatgaggatttaatgagacaacactgtaaagttctcagcctagcgcctggcatgacagactctcaataaataatataaactgtt

SEQ ID NO: 371265 - DNA, 1018 bp, Homo sapiens
tgcaacccggggggacgcgggggccgaagggctgaaccactgggcccggatggggctcacagagcggaacgctccacgagaatcgtgggggcgagggaaagggtcaagattaccagccattgaccaccctcccgggaagggccttagcctgggaagcacagcttctccgtcaagtttttcccgagctcccctcgcaatacaccaggaagctccgccccgtcggagactcaatcttcgcatctgcaaaatgggcgcaggggtgcaaatgggtggccgtggttgccggggctggggagatggcccacttgttccagccacggtcacctctcttctcagagtgaagttcccagaccctacgccccgctgtcaggcagcccgccgatcagatggaggagaacgaggtggagagcagcagcgacgcggcccctgggcctggccggcccgaggagccctctgagagcggcctgggtgtgggcacctcagaagccgtgtccgccgacagcagcgacgccgcggccgccccggggcaggcagaggccgatgactctggcgtggggcaaagctcggaccgcggcagccgttctcaggtatggacccggctggacggcgtgggtggaggcaaggaccgcgagcagcagtgcctgacagccaagaggaaacaaggcttgtttgtagctaatacttggtgtttctggtttactgtgagccaggcaccaagccaaacccctaaaatggattttctcatttgagcttcataccttctaagacacataccattttttcccacatcttatagaaaaggatgccgaggtacagagtgcagacagagccaggattcaaatctaggctgtggtcttagctactatactacccacagtcctcacactttgagaggcagatgtctaggccaggagtggtagctcatcgcctgtaatcccagcactttggaaggctgaggtgggaggatcacttgagcccaggagttggagaccagcttgggcaaatagcgagacctcat

SEQ ID NO: 371266 - DNA, 1579 bp, Homo sapiens
gccagtaatccctgcaacttgggaggctgaggcgggagaatcgcttgaacccaggaggtggaggttgcagtgagccgagatcacgccattgcactccagcctctgggcaacaagagcaaaactgtctcaaaaaaaaaaaattcagggcccgatgggacctgcacaggtcccctcatctaacacctgtgttacatatgggtaaagtgagattttccaatttacctaataatgatggaatctatggcctttcattcttaggacacagcagcaccagatacggatccggcttggcctttctacccagcttcttgttagtgcacaggattttggttttcccaggtccactttgtctggttccctgaccagctgtcagcagggatccggggatttgttgccatctgtcctgacccagccaatgcccccaactctgccctctctgcaggcgcacatggcacagcactcaagcctacggccccaccagtgtagccagtgcagctttgcctccaagaacaagaaggacctgcgtcggcacatgctgactcacacaaaggagaagccttttgcatgccacctctgcgggcagcgtttcaaccgtaacgggcacctcaagttccacatccagcggctgcacagtcctgatgggaggaagtcaggaacccctacagcccgggcccctacccagaccccaacccagaccatcatcctgaacagtgatgacgaaacactggccaccctgcacactgcactccagtccagtcacggggtcctgggcccagagcggctacagcaggcactgagccaggaacacatcatcgttgcccaggaacagacagtgaccaatcaggaggaagccgcctacatccaagagatcaccacggcagatggccagaccgtacagcacctggtgacctccgacaaccaggtgcagtatatcatctcccaggatggtgtccagcacctgctcccccaggaatatgttgtggtccctgaaggccatcacatccaggtacaggagggccagatcacacacatccagtatgaacaaggagccccgttccttcaggagtcccagatccagtatgtgcctgtgtccccaggccagcagcttgtcacacaggctcaacttgaggctgcagcacactcagctgtcacagcagtggctgatgctgccatggcccaagcccagggcctgtttggtacagacgagacagtgcccgaacacattcaacagctgcagcaccagggcatcgagtacgacgtcatcaccctggccgatgactgagccccgagggcccaacacagatcatggatttgcggccagctctcctgggggtagggggccaccaggactcacctccctcttcatttaggatctccagatactggatagccagcatcctctcattcccagggagccagacctgtgctgttggggttaggggcagccatgggccccagccaggacatgctgggtgccccagcctgcaggcaggctttgggagagaaatttatttttgtttgggtggacccactggcctgtcagtctcaataaagggaccggagtccagtcctgaacagc

SEQ ID NO: 371267 - DNA, 484 bp, Homo sapiens
acagtagcagctggggcattgcaggttttcctggaccccaggtgagcatcctctcctctctgcccagctgcactccagtccagtcacggggtcctgggcccagagcggctacagcaggcactgagccaggaacacatcatcgttgcccaggaacagacagtgaccaatcaggtaagagtcaggactgggggccctctggccagcgacaggcaggggttggggtagagaaatgaggctagagctgtcttggtcctggcaggaggaagccgcctacatccaagagatcaccacggcagatggccagaccgtacagcacctggtgacctccgacaaccaggtgagctactagctactgttaatcccctcagctgtgacctcctaccctcccaaagacctaccttggggaggaatgatactttccaaaccacccctcctggggtccatgcttgccaacaactgcattgttgctggtggctgttcctag

SEQ ID NO: 371268 - DNA, 486 bp, Homo sapiens
cccaggtccccaaagctatgccccacagtactgggggcctcagagtccacaaggaacactagacagaatttttaaccatcacacatttttaaaacatgtaaggtggggaaaaggtgatgcccgtgtcctagtattgccttaacaaacggcgacaaactgggtgactaaaaacaaagaaatgccctccctcacagtcccagaggccagatgtccaaccccgctcccacaagaagctcttcaggagggtccttcctgccccttccagcatctggtgggcgccagcgcatcctggcttgtggccacaccactcccatctctgcctccatcttcacgtggccgcccctgtgtctgtgttttctcctcttctgtctctcataagggcccctgtcattgaatttcgggcccacttcttttttttttttagatggagttttgctcttgtgcaggctgcagtgcaatggcacgatctcggctcactgcaacctc

SEQ ID NO: 371269 - DNA, 200 bp, Homo sapiens
aatcactggtttttgcttaaggtatagtctgctattttatttttttgaaacaggttctcattttcattgcccagtctggagtgcagtggctcgatcgtgattcactgcattctcgacttctctgggctcaggtgattgtcccaccttggcctcttgcatacttggtaccacaggcattcaccagctaattttttgtattt

SEQ ID NO: 371270 - DNA, 415 bp, Homo sapiens
caggaatgcatttggcttgggtggcagggaggttttctctatgggatttggggcaagatcaatagtcctcaaatttcagcacctaaactattaatccctggtggatacaatcaatagttccctgcctcggccaggcgcggtggctcacgcctgtattcccagcactttgggaggccaaggcgggcggatcacgaggtcaggagatagagaccatccctggctaagatggtgaaaccccgtctctactaaaaatacaaaaaattagctgggtgtgatggcacgtgcctgtagtcccagctactcaggaggctgaggcaggagaatcggttgaagccaggtggcggaggttgcagtgggcggagattgcgccactgcactccagcctgggcaacagagcgagactccatctcaaaaa

SEQ ID NO: 371271 - DNA, 1370 bp, Homo sapiens
ggcagaagccctggattcaaatccgccacacattcagtttctttatctgtaaaatggagaccaccccccgccacgctgaacggtgattctgtgactggtaagagatgctacatttttggtgcttgttcaggtggaggaaagatgatagttaacactcaggtaataagtattttgaaggcagtataatataccttcttaaagagtatacctactcaaatgttggtaaatgttgacatgattgaatctaaatggcaaagagtattttagaaaaacattaagtccctgcagataaatgacagtgttgatttggatgcttaattacattcagacatgaactgttggatgtatccgaaatgttaaaagctttttctcaacatttccaaaagtctttccaagaaatcaatgttatgttttgttccagaagcaaatttgcatttgtgatctgtttctaaaaatggtacaagttagctctgtttagaaagtaaaaatatctgatgttagattggaagtatctcttcctggggaatccagaaagataagcatagcatattgtcttactgcaatagataagttgcttattgagaagtctggttgttattctatatggtaacaatacagttgatgtatattttatgatagatcctttatattttcctcatgactttagaagggggaagggggagaaaattatgatgaccagactagttaaagagcattgaaagtccacagtactgtagctaaagtagaagtttgggtttgttatagactttacattatatcaactaataagcagatactgtacagtattgctcaccattttatcatacttttgcatatgaactactccattgccttttatagatgttttatagctgatcttaccagttttcctggtaactttttttatttcttttttttttttttgagacggagtctcgccctaacacccaggttggagtgcagtgccgtgatctcggctcactgcaacctctgcctcccgggttcaagcaatcctcctgtctcagcctcccgagtacctgggactaccggttgcctgtctccacgcccggctaattttttgtatttgtagtagagacggggtttcaccgtgttaggccaggatggtctcgatctcctgacctcatgatctgcctgcctctgcctggacctcccaaagtgctgggattacaggcgtgagcccccgcgcccagccactttctttaatactataactaagaatttattaaaatgcacaaattgtctaagactgtaaagtttattggggagaggccatgactacctctgaatttagtaaatttaaaatatttctgattctcaataaagaactaatatccatataaaaaaaaatt

SEQ ID NO: 371272 - DNA, 632 bp, Homo sapiens
tctccctgcggtctcatatcgcacctgcactgctgcaacagcttactggtcccttgctcccagccttctcctcttcagtccatcgtccacacagcactggggaaggggagccacttgaaaccaaagtcaacaactggttgtagttcataaacacagagctgtttgtgtcccctgtatctggaatgccattatgacccactacattttttctttcctacccctctttataactcagttcaggtagcagctccactaggaagccttggctgaccataatcccattgtactccagcctgggtgaagaagtgagactctgtcttaaaaaaaaaaattggtgctgataaatattgatgaattctgctctctgctctctatggttgtcaacactgcagagttgaggcctcatatctcacctgcactgctgcaacagcttactggtcccttgctcccagccttctcctcttcagtccatcgtccacacagcactggggaaggggagccacttgaaacaaaagtcaacaactggttgtagttcataaacacagagctgtttgtgtcccctgtatctggaatgccattatgagaccccgccagggggatccttggagaatcaactaggccgggacctgcac

SEQ ID NO: 371273 - DNA, 547 bp, Homo sapiens
caaaaaaaactcataataatctgaatatcttgatcatttgtatttaaagaagcagtaattatatacttgaaagtacataatatagtattgcaaaaatgactttggtatattacaaattaaaagtatataagatgaaacttgatttgctatcaagccccaagcaatttttcaactgggcattgaattctaacttttctaagatagcaatttttgaagagacacgaacaaaaatctgaattagttcatgagccttaatgtaaatctcttgctgaaatagtttttaaaatcagaatttagttatctatcagactcaaaatcatttaaagactaacaaaacacaatcatgatattctaactgtggattacaggcgtgagcccccgcgcccagccactttctttaatactataactaagaatttattaaaatgcacaaattgtctaagactgtaaagtttattggggagaggccatgactacctctgaatttagtaaatttaaaatatttctgattctcaataaagaactaatatccatataaaaaaaaatt

SEQ ID NO: 371274 - DNA, 266 bp, Homo sapiens
tgagacaagagtctcgctctgtcacccaggctggagtgcaatggtgcgatcccagctcactgcaacctccgcttcctgagttcaagcgattctcctgcctcagcccccgagtagctgggattacaggggtgtgccaccatgcccagctaatttttttttttttaacctagaaagagtattttggagagagaaactaaggatcagaaggtttaagagtatcaaaaatctgaggccaggtgcctcacatctgtaatcccagcattttg

SEQ ID NO: 371275 - DNA, 4194 bp, Homo sapiens
ataacacccggccccgccgggcggccgcgggtgggtagaggtgcgcgcctgggacctgaacatggacttcccgtgcctctggctagggctgttgctgcctttggtagctgcgctggatttcaactaccaccgccaggaagggatggaagcgtttttgaagactgttgcccaaaactacagttctgtcactcacttacacagtattgggaaatctgtgaaaggtagaaacctgtgggttcttgttgtggggcggtttccaaaggaacacagaattgggattccagagttcaaatacgtggcaaatatgcatggagatgagactgttgggcgggagctgctgctccatctgattgactatctcgtaaccagtgatggcaaagaccctgaaatcacaaatctgatcaatagtacccggatacacatcatgccttccatgaacccagatggatttgaagccgtcaaaaagcctgactgttactacagcatcggaagggaaaattataaccagtatgacttgaatcgaaatttccccgatgcttttgaatataataatgtctcaaggcagcctgaaactgtggcagtcatgaagtggctgaaaacagagacgtttgtcctctctgcaaacctccatggtggtgccctcgtggccagttacccatttgataatggtgttcaagcaactggggcattatactcccgaagcttaacgcctgatgatgatgtttttcaatatcttgcacatacctatgcttcaagaaatcccaacatgaagaaaggagacgagtgtaaaaacaaaatgaactttcctaatggtgttacaaatggatactcttggtatccactccaaggtggaatgcaagattacaactacatctgggcccagtgttttgaaattacgttggagctgtcatgctgtaaatatcctcgtgaggagaagcttccatccttttggaataataacaaagcctcattaattgaatatataaagcaggtgcacctaggtgtaaagggtcaagtttttgatcagaatggaaatccattacccaatgtaattgtggaagtccaagacagaaaacatatctgcccctatagaaccaacaaatatggagagtattatctccttctcttgcctgggtcttatattataaatgttacagtccctggacatgatccacacatcacaaaggtgattattccggagaaatcccagaacttcagtgctcttaaaaaggatattctacttccattccaagggcaattggattctatcccagtatcaaatccttcatgcccaatgattcctctatacagaaatttgccagaccactcagctgcaacaaagcctagtttgttcttatttttagtgagtcttttgcacatattcttcaaataaagtaaaatgtgaaactcaacccacatcaccacctggaatcagggattgctcactccaggttactgcaaccctaactcactctagtgggaccttgactggagaaactccacgatcttcctgaagaagagaaatggatgtttccaaattccacaataagcaatatgtggtgataatgaaaagaatgattcagtcttgacggtgaatggaagacacttacctaacaagtactgctcatttacactcaaattaatcttgaagtagtcttaaaatgtgtaagaagttaaaacttgagaagcaaaaaaatgcctgcaaaaagaagatcattttgtatacagagaaccggatgaatataagcaatgaagatgaacatttattgatcttctacatacaagacttcaccataaggccaggagcagtggctcacaccttgtaatcccagcactttgggaggccaaggtgggcggatcaccttgaggtcaggagttcaagaccagcctgaccaacatggtgaaaccctgtctctactaaatattagcggggtgtggtggcgggcacctgtaatcgcagcctttcgggaggctgagacaggagaatcgcttgaaccctagaggcggagtttgcagtgagccgagatagtgccattgtactccagcttgggcaacagagtaagactctgtctcaaaaaaaaaaaaacaaaaacaaacaaacaaaaaaaacacctcaccatgagtgctacatgtgaatagatattaagtgccatatataattagttctcagaagaagggagaaatgatcataggactgggaattgttttgcaaacgttctaggagatgtgagagaaaatatgtaaccacatcttagtggcccaagaaaatacaggcctgaagggataagattgtgtctctatagagcttcaaagcatacaggtcaattaagaaagcccctctctctccagagccgtttccctagcttttggcacctggatgccacagtcctccattaggctgatgactccaaagatgtaactctagcctcttgcctgagcttcagactcgcgtcccactgcccacaggacacatccacctggatgtgactcacaggtacctccaacccatcatgtggagatactcatcctgttccccctagagctgctcttcctgctgcattctctctctcaattactgggaccaccaagctaggaacctgggagtcatccttgatactttctcttcctccttaatcctgtgtattcagcaagtaactaaaggttggtgttggccaggcatggtggctcatgcctgtaatcccagcattttgggaggccaaggcgggcggatcacttgaggtcaggagctcaagaccagcctggccaacatggtgaaaccccatctctactaaaaaaaaaaaaaaaattagtcgggcgtggtggtgcatgcctgtaatcccagctactggggaggctgaggcaggagaatcgcttgaacctgggaggcagaggttgcagtgagccgggattgcgccattgtactccagcctgggtgaagaagtgagactctgtcttaaaaaaaaaaattggtgctgataaatattgatgaattctgctctctgctctctatggttgtcaacactgcagagttgaggcctcatatctcacctgcactgctgcaacagcttactggtcccttgctcccagccttctcctcttcagtccatcgtccacacagcactggggaaggggagccacttgaaacaaaagtcaacaactggttgtagttcataaacacagagctgtttgtgtcccctgtatctggaatgccattatgacccactacattttttctttcctacccctcttaaaactcagttcaggtagcagctccactaggaagccttggctgaccataatcccattcaattccatttcacctcttcgcaggcagtctggggttagggaccctttctctttgctccccaaaataaactggttatctctactattggatttacaacattgtattataatcttctccatgtgtgccttctctagtagaatgtgagctctttgaggccaaggtctatttaatttgtttgaaaaattcattgttatatcctcaaagcctagcacatagtaggtactgaatgaatgaatgaacaaggggtgccaggagactgctactcccagtccttcccagaaactgcctagggctttgagtcattttatgaagctaggtcttaatgcgtaggcaacctcccagctcactatgaacgctgacagaagagtgttttcatgtctataatcaagaattccagatacattccttttactgaaccttgaattgatcctaagattggtagtaaaggtattatgttacctcctaacagcactacaaagtacctttttttatcagaaaaaaattttaccattaggactcaatttgaagtactaatgcttctcaagttctccactatgagagttaccctgtattagaccgttacctataagaattaaggggtaaagcactaaacagaaaagaaaaaaaaaatagcaactctggtgagcagatttctttcctttcttccttccttctcctcttcctaccttcctccctcctttccctctcctccccttctctccctttccctccccttcccttccttttcttctttcctccgctcccctccccttccctccccttcccatccttctttctcttttttttacttaatccccagtgtgacagtaatataggctgatttctagaagtgtggtgtattactcatggaaagtgagttgccttgg

SEQ ID NO: 371276 - DNA, 3327 bp, Homo sapiens
gcatttcttccttctgcgtatgggacaggaccctttctggaatgggggtcttatgacctacaatcaaacaagaacatggacttcccgtgcctctggctagggctgttgctgcctttggtagctgcgctggatttcaactaccaccgccaggaagggatggaagcgtttttgaagactgttgcccaaaactacagttctgtcactcacttacacagtattgggaaatctgtgaaaggtagaaacctgtgggttcttgttgtggggcggtttccaaaggaacacagaattgggattccagagttcaaatacgtggcaaatatgcatggagatgagactgttgggcgggagctgctgctccatctgattgactatctcgtaaccagtgatggcaaagaccctgaaatcacaaatctgatcaatagtacccggatacacatcatgccttccatgaacccagatggatttgaagccgtcaaaaagcctgactgttactacagcatcggaagggaaaattataaccagtatgacttgaatcgaaatttccccgatgcttttgaatataataatgtctcaaggcagcctgaaactgtggcagtcatgaagtggctgaaaacagagacgtttgtcctctctgcaaacctccatggtggtgccctcgtggccagttacccatttgataatggtgttcaagcaactggggcattatactcccgaagcttaacgcctgatgatgatgtttttcaatatcttgcacatacctatgcttcaagaaatcccaacatgaagaaaggagacgagtgtaaaaacaaaatgaactttcctaatggtgttacaaatggatactcttggtatccactccaaggtggaatgcaagattacaactacatctgggcccagtgttttgaaattacgttggagctgtcatgctgtaaatatcctcgtgaggagaagcttccatccttttggaataataacaaagcctcattaattgaatatataaagcaggtgcacctaggtgtaaagggtcaagtttttgatcagaatggaaatccattacccaatgtaattgtggaagtccaagacagaaaacatatctgcccctatagaaccaacaaatatggagagtattatctccttctcttgcctgggtcttatattataaatgttacagtccctggacatgatccacacatcacaaaggtgattattccggagaaatcccagaacttcagtgctcttaaaaaggatattctacttccattccaagggcaattggattctatcccagtatcaaatccttcatgcccaatgattcctctatacagaaatttgccagaccactcagctgcaacaaagcctagtttgttcttatttttagtgagtcttttgcacatattcttcaaataaagtaaaatgtgaaactcaacccacatcaccacctggaatcagggattgctcactccaggttactgcaaccctaactcactctagtgggaccttgactggagaaactccacgatcttcctgaagaagagaaatggatgtttccaaattccacaataagcaatatgtggtgataatgaaaagaatgattcagtcttgacggtgaatggaagacacttacctaacaagtactgctcatttacactcaaattaatcttgaagtagtcttaaaatgtgtaagaagttaaaacttgagaagcaaaaaaatgcctgcaaaaagaagatcattttgtatacagagaaccggatgaatataagcaatgaagatgaacatttattgatcttctacatacaagacttcaccataaggccaggagcagtggctcacaccttgtaatcccagcactttgggaggccaaggtgggcggatcaccttgaggtcaggagttcaagaccagcctgaccaacatggtgaaaccctgtctctactaaatattagcggggtgtggtggcgggcacctgtaatcgcagcctttcgggaggctgagacaggagaatcgcttgaaccctagaggcggagtttgcagtgagccgagatagtgccattgtactccagcttgggcaacagagtaagaactctgtcttaaaaaaaaaaattggtgctgataaatattgatgaattctgctctctgctctctatggttgtcaacactgcagagttgaggcctcatatctcacctgcactgctgcaacagcttactggtcccttgctcccagccttctcctcttcagtccatcgtccacacagcactggggaaggggagccacttgaaacaaaagtcaacaactggttgtagttcataaacacagagctgtttgtgtcccctgtatctggaatgccattatgacccactacattttttctttcctacccctcttaaaactcagttcaggtagcagctccactaggaagccttggctgaccataatcccattcaattccatttcacctcttcgcaggcagtctggggttagggaccctttctctttgctccccaaaataaactggttatctctactattggatttacaacattgtattataatcttctccatgtgtgccttctctagtagaatgtgagctctttgaggccaaggtctatttaatttgtttgaaaaattcattgttatatcctcaaagcctagcacatagtaggtactgaatgaatgaatgaacaaggggtgccaggagactgctactcccagtccttcccagaaactgcctagggctttgagtcattttatgaagctaggtcttaatgcgtaggcaacctcccagctcactatgaacgctgacagaagagtgttttcatgtctataatcaagaattccagatacattccttttactgaaccttgaattgatcctaagattggtagtaaaggtattatgttacctcctaacagcactacaaagtacctttttttatcagaaaaaaattttaccattaggactcaatttgaagtactaatgcttctcaagttctccactatgagagttaccctgtattagaccgttacctataagaattaaggggtaaagcactaaacagaaaagaaaaaaaaaatagcaactctggtgagcagatttctttcctttcttccttccttctcctcttcctaccttcctccctcctttccctctcctccccttctctccctttccctccccttcccttccttttcttctttcctccgctcccctccccttccctccccttcccatccttctttctcttttttttacttaatccccagtgtgacagtaatataggctgatttctagaagtgtggtgtattactcatggaaagtgagttgccttgg

SEQ ID NO: 371277 - DNA, 3272 bp, Homo sapiens
gcatttcttccttctgcgtatgggacaggaccctttctggaatgggggtcttatgacctacaatcaaacaagaacatggacttcccgtgcctctggctagggctgttgctgcctttggtagctgcgctggatttcaactaccaccgccaggaagggatggaagcgtttttgaagactgttgcccaaaactacagttctgtcactcacttacacagtattgggaaatctgtgaaaggtagaaacctgtgggttcttgttgtggggcggtttccaaaggaacacagaattgggattccagagttcaaatacgtggcaaatatgcatggagatgagactgttgggcgggagctgctgctccatctgattgactatctcgtaaccagtgatggcaaagaccctgaaatcacaaatctgatcaatagtacccggatacacatcatgccttccatgaacccagatggatttgaagccgtcaaaaagcctgactgttactacagcatcggaagggaaaattataaccagtatgacttgaatcgaaatttccccgatgcttttgaatataataatgtctcaaggcagcctgaaactgtggcagtcatgaagtggctgaaaacagagacgtttgtcctctctgcaaacctccatggtggtgccctcgtggccagttacccatttgataatggtgttcaagcaactggggcattatactcccgaagcttaacgcctgatgatgatgtttttcaatatcttgcacatacctatgcttcaagaaatcccaacatgaagaaaggagacgagtgtaaaaacaaaatgaactttcctaatggtgttacaaatggatactcttggtatccactccaaggtggaatgcaagattacaactacatctgggcccagtgttttgaaattacgttggagctgtcatgctgtaaatatcctcgtgaggagaagcttccatccttttggaataataacaaagcctcattaattgaatatataaagcaggtgcacctaggtgtaaagggtcaagtttttgatcagaatggaaatccattacccaatgtaattgtggaagtccaagacagaaaacatatctgcccctatagaaccaacaaatatggagagtattatctccttctcttgcctgggtcttatattataaatgttacagtccctggacatgatccacacatcacaaaggtgattattccggagaaatcccagaacttcagtgctcttaaaaaggatattctacttccattccaagggcaattggattctatcccagtatcaaatccttcatgcccaatgattcctctatacagaaatttgccagaccactcagctgcaacaaagcctagtttgttcttatttttagtgagtcttttgcacatattcttcaaataaagtaaaatgtgaaactcaacccacatcaccacctggaatcagggattgctcactccaggttactgcaaccctaactcactctagtgggaccttgactggagaaactccacgatcttcctgaagaagagaaatggatgtttccaaattccacaataagcaatatgtggtgataatgaaaagaatgattcagtcttgacggtgaatggaagacacttacctaacaagtactgctcatttacactcaaattaatcttgaagtagtcttaaaatgtgtaagaagttaaaacttgagaagcaaaaaaatgcctgcaaaaagaagatcattttgtatacagagaaccggatgaatataagcaatgaagatgaacatttattgatcttctacatacaagacttcaccataaggccaggagcagtggctcacaccttgtaatcccagcactttgggaggccaaggtgggcggatcaccttgaggtcaggagttcaagaccagcctgaccaacatggtgaaaccctgtctctactaaatattagcggggtgtggtggcgggcacctgtaatcgcagcctttcgggaggctgagacaggagaatcgcttgaaccctagaggcggagtttgcagtgagccgagatagtgccattgtactccagcttgggcaacagagtaagaactctgtcttaaaaaaaaaaattggtgctgataaatattgatgaattctgctctctgctctctatggttgtcaacactgcagagttgaggcctcatatctcacctgcactgctgcaacagcttactggtcccttgctcccagccttctcctcttcagtccatcgtccacacagcactggggaaggggagccacttgaaacaaaagtcaacaactggttgtagttcataaacacagagctgtttgtgtcccctgtatctggaatgccattatgacccactacattttttctttcctacccctccattcaattccatttcacctcttcgcaggcagtctggggttagggaccctttctctttgctccccaaaataaactggttatctctactattggatttacaacattgtattataatcttctccatgtgtgccttctctagtagaatgtgagctctttgaggccaaggtctatttaatttgtttgaaaaattcattgttatatcctcaaagcctagcacatagtaggtactgaatgaatgaatgaacaaggggtgccaggagactgctactcccagtccttcccagaaactgcctagggctttgagtcattttatgaagctaggtcttaatgcgtaggcaacctcccagctcactatgaacgctgacagaagagtgttttcatgtctataatcaagaattccagatacattccttttactgaaccttgaattgatcctaagattggtagtaaaggtattatgttacctcctaacagcactacaaagtacctttttttatcagaaaaaaattttaccattaggactcaatttgaagtactaatgcttctcaagttctccactatgagagttaccctgtattagaccgttacctataagaattaaggggtaaagcactaaacagaaaagaaaaaaaaaatagcaactctggtgagcagatttctttcctttcttccttccttctcctcttcctaccttcctccctcctttccctctcctccccttctctccctttccctccccttcccttccttttcttctttcctccgctcccctccccttccctccccttcccatccttctttctcttttttttacttaatccccagtgtgacagtaatataggctgatttctagaagtgtggtgtattactcatggaaagtgagttgccttgg

SEQ ID NO: 371278 - DNA, 4176 bp, Homo sapiens
ataacacccggccccgccgggcggccgcgggtgggtagagaacatggacttcccgtgcctctggctagggctgttgctgcctttggtagctgcgctggatttcaactaccaccgccaggaagggatggaagcgtttttgaagactgttgcccaaaactacagttctgtcactcacttacacagtattgggaaatctgtgaaaggtagaaacctgtgggttcttgttgtggggcggtttccaaaggaacacagaattgggattccagagttcaaatacgtggcaaatatgcatggagatgagactgttgggcgggagctgctgctccatctgattgactatctcgtaaccagtgatggcaaagaccctgaaatcacaaatctgatcaatagtacccggatacacatcatgccttccatgaacccagatggatttgaagccgtcaaaaagcctgactgttactacagcatcggaagggaaaattataaccagtatgacttgaatcgaaatttccccgatgcttttgaatataataatgtctcaaggcagcctgaaactgtggcagtcatgaagtggctgaaaacagagacgtttgtcctctctgcaaacctccatggtggtgccctcgtggccagttacccatttgataatggtgttcaagcaactggggcattatactcccgaagcttaacgcctgatgatgatgtttttcaatatcttgcacatacctatgcttcaagaaatcccaacatgaagaaaggagacgagtgtaaaaacaaaatgaactttcctaatggtgttacaaatggatactcttggtatccactccaaggtggaatgcaagattacaactacatctgggcccagtgttttgaaattacgttggagctgtcatgctgtaaatatcctcgtgaggagaagcttccatccttttggaataataacaaagcctcattaattgaatatataaagcaggtgcacctaggtgtaaagggtcaagtttttgatcagaatggaaatccattacccaatgtaattgtggaagtccaagacagaaaacatatctgcccctatagaaccaacaaatatggagagtattatctccttctcttgcctgggtcttatattataaatgttacagtccctggacatgatccacacatcacaaaggtgattattccggagaaatcccagaacttcagtgctcttaaaaaggatattctacttccattccaagggcaattggattctatcccagtatcaaatccttcatgcccaatgattcctctatacagaaatttgccagaccactcagctgcaacaaagcctagtttgttcttatttttagtgagtcttttgcacatattcttcaaataaagtaaaatgtgaaactcaacccacatcaccacctggaatcagggattgctcactccaggttactgcaaccctaactcactctagtgggaccttgactggagaaactccacgatcttcctgaagaagagaaatggatgtttccaaattccacaataagcaatatgtggtgataatgaaaagaatgattcagtcttgacggtgaatggaagacacttacctaacaagtactgctcatttacactcaaattaatcttgaagtagtcttaaaatgtgtaagaagttaaaacttgagaagcaaaaaaatgcctgcaaaaagaagatcattttgtatacagagaaccggatgaatataagcaatgaagatgaacatttattgatcttctacatacaagacttcaccataaggccaggagcagtggctcacaccttgtaatcccagcactttgggaggccaaggtgggcggatcaccttgaggtcaggagttcaagaccagcctgaccaacatggtgaaaccctgtctctactaaatattagcggggtgtggtggcgggcacctgtaatcgcagcctttcgggaggctgagacaggagaatcgcttgaaccctagaggcggagtttgcagtgagccgagatagtgccattgtactccagcttgggcaacagagtaagactctgtctcaaaaaaaaaaaaacaaaaacaaacaaacaaaaaaaacacctcaccatgagtgctacatgtgaatagatattaagtgccatatataattagttctcagaagaagggagaaatgatcataggactgggaattgttttgcaaacgttctaggagatgtgagagaaaatatgtaaccacatcttagtggcccaagaaaatacaggcctgaagggataagattgtgtctctatagagcttcaaagcatacaggtcaattaagaaagcccctctctctccagagccgtttccctagcttttggcacctggatgccacagtcctccattaggctgatgactccaaagatgtaactctagcctcttgcctgagcttcagactcgcgtcccactgcccacaggacacatccacctggatgtgactcacaggtacctccaacccatcatgtggagatactcatcctgttccccctagagctgctcttcctgctgcattctctctctcaattactgggaccaccaagctaggaacctgggagtcatccttgatactttctcttcctccttaatcctgtgtattcagcaagtaactaaaggttggtgttggccaggcatggtggctcatgcctgtaatcccagcattttgggaggccaaggcgggcggatcacttgaggtcaggagctcaagaccagcctggccaacatggtgaaaccccatctctactaaaaaaaaaaaaaaaattagtcgggcgtggtggtgcatgcctgtaatcccagctactggggaggctgaggcaggagaatcgcttgaacctgggaggcagaggttgcagtgagccgggattgcgccattgtactccagcctgggtgaagaagtgagactctgtcttaaaaaaaaaaattggtgctgataaatattgatgaattctgctctctgctctctatggttgtcaacactgcagagttgaggcctcatatctcacctgcactgctgcaacagcttactggtcccttgctcccagccttctcctcttcagtccatcgtccacacagcactggggaaggggagccacttgaaacaaaagtcaacaactggttgtagttcataaacacagagctgtttgtgtcccctgtatctggaatgccattatgacccactacattttttctttcctacccctcttaaaactcagttcaggtagcagctccactaggaagccttggctgaccataatcccattcaattccatttcacctcttcgcaggcagtctggggttagggaccctttctctttgctccccaaaataaactggttatctctactattggatttacaacattgtattataatcttctccatgtgtgccttctctagtagaatgtgagctctttgaggccaaggtctatttaatttgtttgaaaaattcattgttatatcctcaaagcctagcacatagtaggtactgaatgaatgaatgaacaaggggtgccaggagactgctactcccagtccttcccagaaactgcctagggctttgagtcattttatgaagctaggtcttaatgcgtaggcaacctcccagctcactatgaacgctgacagaagagtgttttcatgtctataatcaagaattccagatacattccttttactgaaccttgaattgatcctaagattggtagtaaaggtattatgttacctcctaacagcactacaaagtacctttttttatcagaaaaaaattttaccattaggactcaatttgaagtactaatgcttctcaagttctccactatgagagttaccctgtattagaccgttacctataagaattaaggggtaaagcactaaacagaaaagaaaaaaaaaatagcaactctggtgagcagatttctttcctttcttccttccttctcctcttcctaccttcctccctcctttccctctcctccccttctctccctttccctccccttcccttccttttcttctttcctccgctcccctccccttccctccccttcccatccttctttctcttttttttacttaatccccagtgtgacagtaatataggctgatttctagaagtgtggtgtattactcatggaaagtgagttgccttgg

SEQ ID NO: 371279 - DNA, 1981 bp, Homo sapiens
ataacacccggccccgccgggcggccgcgggtgggtagaggtgcgcgcctgggacctgaacatggacttcccgtgcctctggctagggctgttgctgcctttggtagctgcgctggatttcaactaccaccgccaggaagggatggaagcgtttttgaagactgttgcccaaaactacagttctgtcactcacttacacagtattgggaaatctgtgaaaggtagaaacctgtgggttcttgttgtggggcggtttccaaaggaacacagaattgggattccagagttcaaatacgtggcaaatatgcatggagatgagactgttgggcgggagctgctgctccatctgattgactatctcgtaaccagtgatggcaaagaccctgaaatcacaaatctgatcaatagtacccggatacacatcatgccttccatgaacccagatggatttgaagccgtcaaaaagcctgactgttactacagcatcggaagggaaaattataaccagtatgacttgaatcgaaatttccccgatgcttttgaatataataatgtctcaaggcagcctgaaactgtggcagtcatgaagtggctgaaaacagagacgtttgtcctctctgcaaacctccatggtggtgccctcgtggccagttacccatttgataatggtgttcaagcaactggggcattatactcccgaagcttaacgcctgatgatgatgtttttcaatatcttgcacatacctatgcttcaagaaatcccaacatgaagaaaggagacgagtgtaaaaacaaaatgaactttcctaatggtgttacaaatggatactcttggtatccactccaaggtggaatgcaagattacaactacatctgggcccagtgttttgaaattacgttggagctgtcatgctgtaaatatcctcgtgaggagaagcttccatccttttggaataataacaaagcctcattaattgaatatataaagcaggtgcacctaggtgtaaagggtcaagtttttgatcagaatggaaatccattacccaatgtaattgtggaagtccaagacagaaaacatatctgcccctatagaaccaacaaatatggagagtattatctccttctcttgcctgggtcttatattataaatgttacagtccctggacatgatccacacatcacaaaggtgattattccggagaaatcccagaacttcagtgctcttaaaaaggatattctacttccattccaagggcaattggattctatcccagtatcaaatccttcatgcccaatgattcctctatacagaaatttgccagaccactcagctgcaacaaagcctagtttgttcttatttttagtgagtcttttgcacatattcttcaaataaagtaaaatgtgaaactcaacccacatcaccacctggaatcagggattgctcactccaggttactgcaaccctaactcactctagtgggaccttgactggagaaactccacgatcttcctgaagaagagaaatggatgtttccaaattccacaataagcaatatgtggtgataatgaaaagaatgattcagtcttgacggtgaatggaagacacttacctaacaagtactgctcatttacactcaaattaatcttgaagtagtcttaaaatgtgtaagaagttaaaacttgagaagcaaaaaaatgcctgcaaaaagaagatcattttgtatacagagaaccggatgaatataagcaatgaagatgaacatttattgatcttctacatacaagacttcaccataaggccaggagcagtggctcacaccttgtaatcccagcactttgggaggccaagctgcgttcctttgcctgcaacaggggtcaagatgagttttgcctgacttctttgatgtcctgaactttccgtagtcctttttcttgaatttgttcattataaatatagcttggcatttgtttgatcttttca

SEQ ID NO: 371280 - DNA, 1559 bp, Homo sapiens
tctccctgcggtctcatatcgcacctgcactgctgcaacagcttactggtcccttgctcccagccttctcctcttcagtccatcgtccacacagcactggggaaggggagccacttgaaaccaaagtcaacaactggttgtagttcataaacacagagctgtttgtgtcccctgtatctggaatgccattatgacccactacattttttctttcctacccctctttataactcagttcaggtagcagctccactaggaagccttggctgaccataatcccattgtactccagcctgggtgaagaagtgagactctgtcttaaaaaaaaaaattggtgctgataaatattgatgaattctgctctctgctctctatggttgtcaacactgcagagttgaggcctcatatctcacctgcactgctgcaacagcttactggtcccttgctcccagccttctcctcttcagtccatcgtccacacagcactggggaaggggagccacttgaaacaaaagtcaacaactggttgtagttcataaacacagagctgtttgtgtcccctgtatctggaatgccattatgacccactacattttttctttcctacccctcttaaaactcagttcaggtagcagctccactaggaagccttggctgaccataatcccattcaattccatttcacctcttcgcaggcagtctggggttagggaccctttctctttgctccccaaaataaactggttatctctactattggatttacaacattgtattataatcttctccatgtgtgccttctctagtagaatgtgagctctttgaggccaaggtctatttaatttgtttgaaaaattcattgttatatcctcaaagcctagcacatagtaggtactgaatgaatgaatgaacaaggggtgccaggagactgctactcccagtccttcccagaaactgcctagggctttgagtcattttatgaagctaggtcttaatgcgtaggcaacctcccagctcactatgaacgctgacagaagagtgttttcatgtctataatcaagaattccagatacattccttttactgaaccttgaattgatcctaagattggtagtaaaggtattatgttacctcctaacagcactacaaagtacctttttttatcagaaaaaaattttaccattaggactcaatttgaagtactaatgcttctcaagttctccactatgagagttaccctgtattagaccgttacctataagaattaaggggtaaagcactaaacagaaaagaaaaaaaaaatagcaactctggtgagcagatttctttcctttcttccttccttctcctcttcctaccttcctccctcctttccctctcctccccttctctccctttccctccccttcccttccttttcttctttcctccgctcccctccccttccctccccttcccatccttctttctcttttttttacttaatccccagtgtgacagtaatataggctgatttctagaagtgtggtgtattactcatggaaagtgagttgccttgg

SEQ ID NO: 371281 - DNA, 395 bp, Homo sapiens
ttccatgaacccagatggatttgaagccgtcaaaaagcctgactgttactacagcatcggaaggtaaagaggggctggtctatctttacttgaaaacaacacaacacaaaggctcccgacaggcacctgttggccttggcaagaggagatgtgtcatggtgagagccctcagagccggtgtcatgtcgctgatgtgccaaagctcaaggcacatcagggctgcctccggcttgcaggaagaaatgcaaataaggctactttgccccggtgcccacctagcctctccatcttcatttgccactccttctctctcccctgcctcctcccctctaggcctccttcctggaagtaccaggtgctttcttacctcagcattttacacacaccgtttccct

SEQ ID NO: 371282 - DNA, 239 bp, Homo sapiens
  misc_feature (229)..(229): n is a, c, g, or t
tgggtgacttagaggatcccctctctccacactggctgtcacctgcattgtcactgtgtccaaaagcagcagccgggagcgcaccaggatgtcatgaccacccctgaaatcacaaatctgatcaatagtacccggatacacatcatgccttccatgaacccagatggatttgaagccgtcaaaaagcctgactgttactacagcatcggaagggaaaattataaccagngtggagagag

SEQ ID NO: 371283 - DNA, 3861 bp, Homo sapiens
  misc_feature (3395)..(3395): n is a, c, g, or t
  misc_feature (3399)..(3399): n is a, c, g, or t
  misc_feature (3402)..(3402): n is a, c, g, or t
  misc_feature (3406)..(3407): n is a, c, g, or t
  misc_feature (3416)..(3416): n is a, c, g, or t
  misc_feature (3424)..(3424): n is a, c, g, or t
  misc_feature (3426)..(3426): n is a, c, g, or t
  misc_feature (3430)..(3430): n is a, c, g, or t
ataacacccggccccgccgggcggccgcgggtgggtagaggtgcgcgcctgggacctgaacatggacttcccgtgcctctggctagggctgttgctgcctttggtagctgcgctggatttcaactaccaccgccaggaagggatggaagcgtttttgaagactgttgcccaaaactacagttctgtcactcacttacacagtattgggaaatctgtgaaaggtagaaacctgtgggttcttgttgtggggcggtttccaaaggaacacagaattgggattccagagttcaaatacgtggcaaatatgcatggagatgagactgttgggcgggagctgctgctccatctgattgactatctcgtaaccagtgatggcaaagaccctgaaatcacaaatctgatcaatagtacccggatacacatcatgccttccatgaacccagatggatttgaagccgtcaaaaagcctgactgttactacagcatcggaagggaaaattataaccagtatgacttgaatcgaaatttccccgatgcttttgaatataataatgtctcaaggcagcctgaaactgtggcagtcatgaagtggctgaaaacagagacgtttgtcctctctgcaaacctccatggtggtgccctcgtggccagttacccatttgataatggtgttcaagcaactggggcattatactcccgaagcttaacgcctgatgatgatgtttttcaatatcttgcacatacctatgcttcaagaaatcccaacatgaagaaaggagacgagtgtaaaaacaaaatgaactttcctaatggtgttacaaatggatactcttggtatccactccaaggtggaatgcaagattacaactacatctgggcccagtgttttgaaattacgttggagctgtcatgctgtaaatatcctcgtgaggagaagcttccatccttttggaataataacaaagcctcattaattgaatatataaagcaggtgcacctaggtgtaaagggtcaagtttttgatcagaatggaaatccattacccaatgtaattgtggaagtccaagacagaaaacatatctgcccctatagaaccaacaaatatggagagtattatctccttctcttgcctgggtcttatattataaatgttacagtccctggacatgatccacacatcacaaaggtgattattccggagaaatcccagaacttcagtgctcttaaaaaggatattctacttccattccaagggcaattggattctatcccagtatcaaatccttcatgcccaatgattcctctatacagaaatttgccagaccactcagctgcaacaaagcctagtttgttcttatttttagtgagtcttttgcacatattcttcaaataaagtaaaatgtgaaactcaacccacatcaccacctggaatcagggattgctcactccaggttactgcaaccctaactcactctagtgggaccttgactggagaaactccacgatcttcctgaagaagagaaatggatgtttccaaattccacaataagcaatatgtggtgataatgaaaagaatgattcagtcttgacggtgaatggaagacacttacctaacaagtactgctcatttacactcaaattaatcttgaagtagtcttaaaatgtgtaagaagttaaaacttgagaagcaaaaaaatgcctgcaaaaagaagatcattttgtatacagagaaccggatgaatataagcaatgaagatgaacatttattgatcttctacatacaagacttcaccataaggccaggagcagtggctcacaccttgtaatcccagcactttgggaggccaaggtgggcggatcaccttgaggtcaggagttcaagaccagcctgaccaacatggtgaaaccctgtctctactaaatattagcggggtgtggtggcgggcacctgtaatcgcagcctttcgggaggctgagacaggagaatcgcttgaaccctagaggcggagtttgcagtgagccgagatagtgccattgtactccagcttgggcaacagagtaagactctgtctcaaaaaaaaaaaaacaaaaacaaacaaacaaaaaaaacacctcaccatgagtgctacatgtgaatagatattaagtgccatatataattagttctcagaagaagggagaaatgatcataggactgggaattgttttgcaaacgttctaggagatgtgagagaaaatatgtaaccacatcttagtggcccaagaaaatacaggcctgaagggataagattgtgtctctatagagcttcaaagcatacaggtcaattaagaaagcccctctctctccagagccgtttccctagcttttggcacctggatgccacagtcctccattaggctgatgactccaaagatgtaactctagcctcttgcctgagcttcagactcgcgtcccactgcccacaggacacatccacctggatgtgactcacaggtacctccaacccatcatgtggagatactcatcctgttccccctagagctgctcttcctgctgcattctctctctcaattactgggaccaccaagctaggaacctgggagtcatccttgatactttctcttcctccttaatcctgtgtattcagcaagtaactaaaggttggtgttggccaggcatggtggctcatgcctgtaatcccagcattttgggaggccaaggcgggcggatcacttgaggtcaggagctcaagaccagcctggccaacatggtgaaaccccatctctactaaaaaaaaaaaaaaaattagtcgggcgtggtggtgcatgcctgtaatcccagctactggggaggctgaggcaggagaatcgcttgaacctgggaggcagaggttgcagtgagccgggattgcgccattgtactccagcctgggtgaagaagtgagactctgtcttaaaaaaaaaaattggtgctgataaatattgatgaattctgctctctgctctctatggttgtcaacactgcagagttgaggcctcatatctcacctgcactgctgcaacagcttactggtcccttgctcccagccttctcctcttcagtccatcgtccacacagcactggggaaggggagccacttgaaacaaaagtcaacaactggttgtagttcataaacacagagctgtttgtgtcccctgtatctggaatgccattatgacccactacattttttctttcctacccctcttaaaactcagttcaggtagcagctccactaggaagccttggctgaccataatcccattcaattccatttcacctcttcgcaggcagtctggggttagggaccctttctctttgctccccaaaataaactggttatctctaaaaaaanaaanaanaaannaaaaaaaanaaaaaaananaaanaaaaaaaaaaaaaaaaaaaaaaaaaaaaaaaaaaaaaaaaaaaaaaaaaaaaaaaaaaaaaaaaaacattggggcccccctggccccacccatttttaaattggggaaggtttttcctgggggccgaatttgggcccacttggccaattcccccttatgggggggggtttaaaaataaaggggcgggggtttaaaaccggggggcggggaaaaccccgggggtccccaaattaaatggcttggaagaaaacccccttttgccgggggggggaaaaacaaaaagggccccccccaccccccttccccacaagtggcccaccctaatgggaaagggaaaatttaagccttaaatttttggtaaaaatcgcggaaaattttggtaaaaaaaccaattttttaaccaaaagggccaaatggggaaaaaccctctt

SEQ ID NO: 371284 - DNA, 3286 bp, Homo sapiens
gcatttcttccttctgcgtatgggacaggaccctttctggaatgggggtcttatgacctacaatcaaacaagaacatggacttcccgtgcctctggctagggctgttgctgcctttggtagctgcgctggatttcaactaccaccgccaggaagggatggaagcgtttttgaagactgttgcccaaaactacagttctgtcactcacttacacagtattgggaaatctgtgaaaggtagaaacctgtgggttcttgttgtggggcggtttccaaaggaacacagaattgggattccagagttcaaatacgtggcaaatatgcatggagatgagactgttgggcgggagctgctgctccatctgattgactatctcgtaaccagtgatggcaaagaccctgaaatcacaaatctgatcaatagtacccggatacacatcatgccttccatgaacccagatggatttgaagccgtcaaaaagcctgactgttactacagcatcggaagggaaaattataaccagtatgacttgaatcgaaatttccccgatgcttttgaatataataatgtctcaaggcagcctgaaactgtggcagtcatgaagtggctgaaaacagagacgtttgtcctctctgcaaacctccatggtggtgccctcgtggccagttacccatttgataatggtgttcaagcaactggggcattatactcccgaagcttaacgcctgatgatgatgtttttcaatatcttgcacatacctatgcttcaagaaatcccaacatgaagaaaggagacgagtgtaaaaacaaaatgaactttcctaatggtgttacaaatggatactcttggtatccactccaaggtggaatgcaagattacaactacatctgggcccagtgttttgaaattacgttggagctgtcatgctgtaaatatcctcgtgaggagaagcttccatccttttggaataataacaaagcctcattaattgaatatataaagcaggtgcacctaggtgtaaagggtcaagtttttgatcagaatggaaatccattacccaatgtaattgtggaagtccaagacagaaaacatatctgcccctatagaaccaacaaatatggagagtattatctccttctcttgcctgggtcttatattataaatgttacagtccctggacatgatccacacatcacaaaggtgattattccggagaaatcccagaacttcagtgctcttaaaaaggatattctacttccattccaagggcaattggattctatcccagtatcaaatccttcatgcccaatgattcctctatacagaaatttgccagaccactcagctgcaacaaagcctagtttgttcttatttttagtgagtcttttgcacatattcttcaaataaagtaaaatgtgaaactcaacccacatcaccacctggaatcagggattgctcactccaggttactgcaaccctaactcactctagtgggaccttgactggagaaactccacgatcttcctgaagaagagaaatggatgtttccaaattccacaataagcaatatgtggtgataatgaaaagaatgattcagtcttgacggtgaatggaagacacttacctaacaagtactgctcatttacactcaaattaatcttgaagtagtcttaaaatgtgtaagaagttaaaacttgagaagcaaaaaaatgcctgcaaaaagaagatcattttgtatacagagaaccggatgaatataagcaatgaagatgaacatttattgatcttctacatacaagacttcaccataaggccaggagcagtggctcacaccttgtaatcccagcactttgggaggccaaggtgggcggatcaccttgaggtcaggagttcaagaccagcctgaccaacatggtgaaaccctgtctctactaaatattagcggggtgtggtggcgggcacctgtaatcgcagcctttcgggaggctgagacaggagaatcgcttgaaccctagaggcggagtttgcagtgagccgagatagtgccattgtactccagcttgggcaacagagtaagaactctgtcttaaaaaaaaaaattggtgctgataaatattgatgaattctgctctctgctctctatggttgtcaacactgcagagttgaggcctcatatctcacctgcactgctgcaacagcttactggtcccttgctcccagccttctcctcttcagtccatcgtccacacagcactggggaaggggagccacttgaaacaaaagtcaacaactggttgtagttcattatgacccactacattttttctttcctacccctcttaaaactcagttcaggtagcagctccactaggaagccttggctgaccataatcccattcaattccatttcacctcttcgcaggcagtctggggttagggaccctttctctttgctccccaaaataaactggttatctctactattggatttacaacattgtattataatcttctccatgtgtgccttctctagtagaatgtgagctctttgaggccaaggtctatttaatttgtttgaaaaattcattgttatatcctcaaagcctagcacatagtaggtactgaatgaatgaatgaacaaggggtgccaggagactgctactcccagtccttcccagaaactgcctagggctttgagtcattttatgaagctaggtcttaatgcgtaggcaacctcccagctcactatgaacgctgacagaagagtgttttcatgtctataatcaagaattccagatacattccttttactgaaccttgaattgatcctaagattggtagtaaaggtattatgttacctcctaacagcactacaaagtacctttttttatcagaaaaaaattttaccattaggactcaatttgaagtactaatgcttctcaagttctccactatgagagttaccctgtattagaccgttacctataagaattaaggggtaaagcactaaacagaaaagaaaaaaaaaatagcaactctggtgagcagatttctttcctttcttccttccttctcctcttcctaccttcctccctcctttccctctcctccccttctctccctttccctccccttcccttccttttcttctttcctccgctcccctccccttccctccccttcccatccttctttctcttttttttacttaatccccagtgtgacagtaatataggctgatttctagaagtgtggtgtattactcatggaaagtgagttgccttgg

SEQ ID NO: 371285 - DNA, 2996 bp, Homo sapiens
ataacacccggccccgccgggcggccgcgggtgggtagaggtgcgcgcctgggacctgaacatggacttcccgtgcctctggctagggctgttgctgcctttggtagctgcgctggatttcaactaccaccgccaggaagggatggaagcgtttttgaagactgttgcccaaaactacagttctgtcactcacttacacagtattgggaaatctgtgaaaggtagaaacctgtgggttcttgttgtggggcggtttccaaaggaacacagaattgggattccagagttcaaatacgtggcaaatatgcatggagatgagactgttgggcgggagctgctgctccatctgattgactatctcgtaaccagtgatggcaaagaccctgaaatcacaaatctgatcaatagtacccggatacacatcatgccttccatgaacccagatggatttgaagccgtcaaaaagcctgactgttactacagcatcggaagggaaaattataaccagtatgacttgaatcgaaatttccccgatgcttttgaatataataatgtctcaaggcagcctgaaactgtggcagtcatgaagtggctgaaaacagagacgtttgtcctctctgcaaacctccatggtggtgccctcgtggccagttacccatttgataatggtgttcaagcaactggggcattatactcccgaagcttaacgcctgatgatgatgtttttcaatatcttgcacatacctatgcttcaagaaatcccaacatgaagaaaggagacgagtgtaaaaacaaaatgaactttcctaatggtgttacaaatggatactcttggtatccactccaaggtggaatgcaagattacaactacatctgggcccagtgttttgaaattacgttggagctgtcatgctgtaaatatcctcgtgaggagaagcttccatccttttggaataataacaaagcctcattaattgaatatataaagcaggtgcacctaggtgtaaagggtcaagtttttgatcagaatggaaatccattacccaatgtaattgtggaagtccaagacagaaaacatatctgcccctatagaaccaacaaatatggagagtattatctccttctcttgcctgggtcttatattataaatgttacagtccctggacatgatccacacatcacaaaggtgattattccggagaaatcccagaacttcagtgctcttaaaaaggatattctacttccattccaagggcaattggattctatcccagtatcaaatccttcatgcccaatgattcctctatacagaaatttgccagaccactcagctgcaacaaagcctagtttgttcttatttttagtgagtcttttgcacatattcttcaaataaagtaaaatgtgaaactcaacccacatcaccacctggaatcagggattgctcactccaggttactgcaaccctaactcactctagtgggaccttgactggagaaactccacgatcttcctgaagaagagaaatggatgtttccaaattccacaataagcaatatgtggtgataatgaaaagaatgattcagtcttgacggtgaatggaagacacttacctaacaagtactgctcatttacactcaaattaatcttgaagtagtcttaaaatgtgtaagaagttaaaacttgagaagcaaaaaaatgcctgcaaaaagaagatcattttgtatacagagaaccggatgaatataagcaatgaagatgaacatttattgatcttctacatacaagacttcaccataaggccaggagcagtggctcacaccttgtaatcccagcactttgggaggccaaggtgggcggatcaccttgaggtcaggagttcaagaccagcctgaccaacatggtgaaaccctgtctctactaaatattagcggggtgtggtggcgggcacctgtaatcgcagcctttcgggaggctgagacaggagaatcgcttgaaccctagaggcggagtttgcagtgagccgagatagtgccattgtactccagcttgggcaacagagtaagactctgtctcaaaaaaaaaaaaacaaaaacaaacaaacaaaaaaaacacctcaccatgagtgctacatgtgaatagatattaagtgccatatataattagttctcagaagaagggagaaatgatcataggactgggaattgttttgcaaacgttctaggagatgtgagagaaaatatgtaaccacatcttagtggcccaagaaaatacaggcctgaagggataagattgtgtctctatagagcttcaaagcatacaggtcaattaagaaagcccctctctctccagagccgtttccctagcttttggcacctggatgccacagtcctccattaggctgatgactccaaagatgtaactctagcctcttgcctgagcttcagactcgcgtcccactgcccacaggacacatccacctggatgtgactcacaggtacctccaacccatcatgtggagatactcatcctgttccccctagagctgctcttcctgctgcattctctctctcaattactgggaccaccaagctaggaacctgggagtcatccttgatactttctcttcctccttaatcctgtgtattcagcaagtaactaaaggttggtgttggccaggcatggtggctcatgcctgtaatcccagcattttgggaggccaaggcgggcggatcacgtgttaggccaggatggtctcgatctcctgacctcatgatctgcctgcctctgcctggacctcccaaagtgctgggattacaggcgtgagcccccgcgcccagccactttctttaatactataactaagaatttattaaaatgcacaaattgtctaagactgtaaagtttattggggagaggccatgactacctctgaatttagtaaatttaaaatatttctgattctcaataaagaactaatatccatataaaaaaaaatt

SEQ ID NO: 371286 - DNA, 1072 bp, Homo sapiens
ataacacccggccccgccgggcggccgcgggtgggtagaggtgcgcgcctgggacctgaacatggacttcccgtgcctctggctagggctgttgctgcctttggtagctgcgctggatttcaactaccaccgccaggaagggatggaagcgtttttgaagactgttgcccaaaactacagttctgtcactcacttacacagtattgggaaatctgtgaaaggtagaaacctgtgggttcttgttgtggggcggtttccaaaggaacacagaattgggattccagagttcaaatacgtggcaaatatgcatggagatgagactgttgggcgggagctgctgctccatctgattgactatctcgtaaccagtgatggcaaagaccctgaaatcacaaatctgatcaatagtacccggatacacatcatgccttccatgaacccagatggatttgaagccgtcaaaaagcctgactgttactacagcatcggaagggaaaattataaccagtatgacttgaatcgaaatttccccgatgcttttgaatataataatgtctcaaggcagcctgaaactgtggcagtcatgaagtggctgaaaacagagacgtttgtcctctctgcaaacctccatggtggtgccctcgtggccagttacccatttgataatggtgttcaagcaactggggcattatactcccgaagcttaacgcctgatgatgatgtttttcaatatcttgcacatacctatgcttcaagaaatcccaacatgaagaaaggagacgagtgtaaaaacaaaatgaactttcctaatggtgttacaaatggatactcttggtatccactccaaggtggaatgcaagattacaactacatctgggcccagtgttttgaaattacgttggagctgtcatgctgtaaatatcctcgtgaggagaagcttccatccttttggaataataacaaagcctcattaattgaatatataaagcaggtgcacctaggtttgtaaaattttcttattaattccctattaatacaaaatagagcatctggcaagacctctgggttgact

SEQ ID NO: 371287 - DNA, 4777 bp, Homo sapiens
cggccgcatccttgccgcccgccccggcccagccgcgtcccggagccgtcgggcatggagccgtggaagcagtgcgcgcagtggctcatccattgcaaggtgctgcccaccaaccaccgggtgacctgggactcggctcaggtgttcgaccttgcgcagaccctccgcgatggagtcctgctctgccagctgcttaacaacctccgggcgcactccatcaacctgaaggagatcaacctgaggccgcagatgtcccagtttctctgtttgaagaacataaggacatttctcacggcctgttgtgagacgtttggaatgaggaaaagtgaacttttcgaggcatttgacttgtttgatgttcgtgactttggaaaggttatagaaacattatcacgactttctcgaacacctatagcattggccacaggaatcaggcccttcccaacagaagaaagcattaatgatgaagacatctacaaaggccttcctgatttaatagatgaaacccttgtggaagatgaagaagatctctatgactgtgtttatggggaagatgaaggtggagaagtctatgaggacttaatgaaggcagaggaagcacatcagcccaaatgtccagaaaatgatatacgaagttgttgtctagcagaaattaagcagacagaagaaaaatatacagaaactttggagtcaatagaaaagtatttcatggcaccactaaaaagatttctgacagcagcagaatttgattcagtattcatcaacattcctgaacttgtaaaacttcatcggaacctaatgcaagagattcatgattccattgtaaataaaaatgaccagaacttgtaccaagtttttattaactacaaggaaagattggttatttacgggcagtactgcagtggagtggagtcagccatctctagtttagactacatttctaagacaaaagaagatgtcaaactgaaattagaggaatgttccaaaagagcaaataatgggaaatttactcttcgagacttgcttgtggttcctatgcaacgtgttttaaagtaccaccttctcctccaggaactggtcaaacataccactgatccgactgagaaggcaaatctgaaactggctcttgatgccatgaaggacttggcacaatatgtgaatgaagtgaaaagagataatgagacccttcgtgaaattaaacagtttcagctatctatagagaatttgaaccaaccagttttgctttttggacgacctcagggagatggtgaaattcgaataaccactctagacaagcataccaaacaagaaaggcatatcttcttatttgatttggcagtgatcgtatgtaagagaaaaggtgataactatgaaatgaaggaaataatagatcttcagcagtacaagatagccaataatcctacaaccgataaagaaaacaaaaagtggtcttatggcttctacctcatccatacccaaggacaaaatgggttagaattttattgcaaaacaaaagatttaaagaagaaatggctagaacagtttgaaatggctttgtctaacataagaccagactatgcagactccaatttccacgacttcaagatgcataccttcactcgagtcacatcctgcaaagtctgccagatgctcctgaggggaacattttatcaaggctatttatgttttaagtgtggagcgagagcacacaaagaatgtttgggaagagtagacaattgtggcagagttaattctggtgaacaagggacactcaaactaccagagaaacggaccaatggactgcgaagaactcctaaacaggtggatccaggtttaccaaagatgcaggtcattaggaactattctggaacaccacccccagctctgcatgaaggaccccctttacagctccaggccggggataccgttgaacttctgaaaggagatgcacacagtctgttttggcagggcagaaatttagcatctggagaggttggattttttccaagtgatgcagtcaagccttgcccatgtgtgcccaaaccagtagattattcttgccaaccctggtatgctggagcaatggaaagattgcaagcagagaccgaacttattaatagggtaaatagtacttaccttgtgaggcacaggaccaaagagtcaggagaatatgcaattagcattaagtacaataatgaagcaaagcacatcaagattttaacaagagatggcttttttcacattgcagaaaatagaaaatttaaaagtttaatggaacttgtggagtactacaagcatcattctctcaaggaagggttcagaaccttagatacaactctgcagtttccatacaaggagccagaacattcagctggacagaggggtaatagagcaggcaacagcttgttaagtccaaaagtgctgggcattgccatcgctcggtatgacttctgtgcaagagatatgagagagttgtccttgttgaaaggagatgtggtgaagatttacacaaagatgagtgcaaatggctggtggagaggagaagtaaatggcagggtgggctggtttccatccacatatgtggaagaggatgaataaattcaaatcccgtgttgcaccctgcaccaaaaatttcagagaagggataaatagaagcctgcacagcatcgtgaattaactgaagtgtttaaaaagctgcatttctggctgttcaacatcctccctccttagcccctcctaagtcttaatgctgagatttctaaagatgctggtactgacagattaatggcttgcctagagctgtgcaagaaacagcctgccagtctgtcattgtcagggaccagggcaaaaccaagagctgttcttcccagaagagccctgcaaacacattggttcgtgcttccctttacttcttctggtcagataccatgaatgccagtcatcagtaaatcttaatacacttttgctttattctcacatgccattcaccagattatttgatggtacaaagaagcagaagtgtaattttccttttcccagcatgacgaaaaattggagttctgccatttgagcagcttactggaaagatccagccttacttgtcttaaattgtccaacaaggtgactcattgcccggcaaacacttttaccctcagatgttactcatgatattataaaatatgaggccagtgctcaggtttgcatcataagtgagctatccctgaagggttttaattacttatttggtgtcctgattatatttgcaaacttctttataaaaggtgaaaaaagcacacaaaagagagggtgtcttcatattaaaccttcacaaccttcatgatttcataggattattttggaaatatagcacttgactttatgaaaggatctgggctaggtatattaggggtagttgccaataacctgaagaagctggcattgtttacagaaacagatcaagggctataatttatgtcattttatagcagcagtatctattaatacatgccttttcctcccatccacctcccccgcacacacacaaagatgacctgggacatgatttttttattcccacattttcttggagcacaaacaactttgttgaggattttggaaggaaagcacaactgggtcctttattcatttctgggacagaaagagggtcagtggacttttgtgggcctccagcttctctcagagtctccccctctgcagcccatcctgggagtgtattaactggagggaagatgggtcttgcagtacatttgttttgcccagccatcactcttttttgtgaggagcctaaatacattcttcctggggtccagagtccccattcaaggcagtcaagttaagacactaacttggccctttcctgatggaaatatttcctccatagcagaagttgtgttctgacaagactgagagagttacatgttgggaaaaaaaagaagcattaacttagtagaactgaaccaggagcattaagttctgaaattttgaatcatctctgaaatgaagcaggtgtagcctgccctctcatcaatccgtctgggtgccagaactcaaggttcagtggacacatccccctgttagagaccctcatgggctaggacttttcatctaggatagattcaagacctttacctcagaattatgtaaactgtgattgtgttttagaaaaattattatttgctaaaaccatttaagtctttgtatatgtgtaaatgatcacaaaaatgtattttataaaatgttctgtacaataaagttacacctcaaagtgtactcttggaatggattctttcctgtaaagtcttatctgcgactctgtctcgggaatgttttgtctgttgccgtcagccgaactttgttatggagggagcagcctcacacaagcagaaacactcctgtggatggtattgtagcatgtattgtttattttagtcaatagaccctctccttataaatggtgtttagtcttcctgttgcatttcatgggcctgggggtttcctagcagaggatattggagcccctttttgtgacattaccaattacatctttgtccacgtttaatactttgttttggaaaatttaaatgctgcagatttgtgtagagttctaataccaaagacagaagtaaatgttttccatatactttgtcttgcctgtatgcagcccttgtgtaatatggtgaattagagtggtatttcactttgtattattttgtaaatatgtcaatataataaatagtgactaaattgaaaaaaaaaa

SEQ ID NO: 371288 - DNA, 241 bp, Homo sapiens
agcggggcccttctcaagatggcgctgcactcaatgcggaaagcgcgtgagcgctggagcttcatccgggcacttcataagggatccgcagctgctcccgctctccaggtaaccaaagacggcccttccctccgcggcttcccatcccgcgaggttcttctcatcccactgccctctatttatttctctcctcccgcttcttagggaaagtacatgccttccctcgcctaaggtctactcg

SEQ ID NO: 371289 - DNA, 2796 bp, Homo sapiens
agcggggcccttctcaagatggcgctgcactcaatgcggaaagcgcgtgagcgctggagcttcatccgggcacttcataagggatccgcagctgctcccgctctccagaaagacagcaagaagcgagtattttccggcattcaacctacaggaatcctccacctgggcaattacctgggagccattgagagctgggtgaggttacaggatgaatatgactctgtattatacagcattgttgacctccactccattactgtcccccaagacccagctgtccttcggcagagcatcctggacatgactgctgttcttcttgcctgtggcataaacccggaaaaaagcatccttttccaacaatctcaggtgtctgaacacacacaattaagttggatcctttcctgcatggtcagactacctcgattacaacatttacatcagtggaaggcaaagactaccaagcagaagcacgatggcacggtgggcctgctcacatacccagtactccaggcagccgacattctgttgtacaagtccacacacgttcctgttggggaggatcaagtccagcacatggaactagttcaggatctagcacaaggtttcaacaagaagtatggggagttctttccagtgcccgagtccattctcacatccatgaagaaggtaaaatccctacgtgatccttctgccaaaatgtcgaaatcagaccctgacaaactggccaccgtccgaataacagacagcccagaggagatagtgcagaaattccgcaaggctgtgacagacttcacctcggaggtcacctatgacccggctggccgcgctggcgtgtccaacatagtggcggtgcatgccgcggtgacggggctctccgtggaggaagtggtgcgccgcagcgcgggcatgaacactgctcgctacaagctggccgtggcagatgctgtgattgagaagtttgccccaattaagcgtgaaattgaaaaactgaagctggacaaggaccatttagagaaggttttacaaattggatcagcaaaagccaaagaattagcatacactgtgtgccaggaggtgaagaaattggtgggttttctataggaagtttcaacgaatcacagcaaggcttttgtgccttgcactccatgcattctgataacggcagctttcctaaaaagaaaaagttatagttttgggacatttaatttggtatagctgattattggctttatttgatgaatattgctttgtagctttgaaatacgacagtgttccaaatcccatcaacaaaatgctgtgaacaacaacaacaaaaaataaatcaagaaggcatagctgtctgaatccccaattattgaggcacactccttggcctgcagaaatgtgattgaagtaaggagtaatttgggaaatggagtatcatttgtgcttctctctggagtacttactgtaacagatgcacacgttatctacttcaacccttttataaagcaatatatagaggtcttagatgtataatccttgagatgccatttgatcagatgccaatttgtattcagagctcataaaaacaagtccattcttatagtttgtttgtcactgagacggtgcctgatttaatatatttaagctgcttaacttgttttccaagagataacaccaactgttccagcaataatttgttttttaattcagagatatgggatatgatcttctaaggaggttgcattattttgacctgatttatttattgtacaagagcccaagtccctgaattatattcttaataagtgctttcttgcattcatttcagtttagtctcaccaaccccctatgaattaggagaattattgtcattttacacatgaggaaagtgaggctgagagaatccaattagcttgtacgatatcactccataagagaagcaaatctgagagtaaaacccttaccccttattcttaagaatagtgcttgtttattcagtacaaaaaaaatgctgaaaggcagcgttttttagactctaaacattctgattttgaaggtgggtgttggaacgactgatgatgttttttatatcatcaattcagccaatggatgcgaacttaaaatctggattcacagaaccgtggtcacatttccccatcaaaatccccaaggcgggtcccaagttctctcctctacgctcattgcaggaaatacttggaaataggttctgccagtctacaatagcagtgaagactgacaaatcagatattcccaatgactgacagcttctcatcttgcctctacctcagttaagtaatgtcaccctgaaacctagcttttctgcacttccatttctgacacctgaaaatgaaaatgataatcctaacttatacaccaagacctgttagcaagatcgattttgtaacagaaattgcttataagttttttatcagtaaggaccatgatcaccatttgtacatacataactaggttgttgagcaaagcatttttgctcatgtttcttaaggaagtagagtagtccttgtgtcagaacacatgttaatccacaaaacgccgcatcccagattccaaattaaaacatcgtttttaggattcttggagctagcctggatcatgggtaaaggaaacattttgccttttgtatcttatactggaatgggatgtctgtaagtcctagaacctctttgagcatatttcttacaagcctctgttttttcccctttaaaggaaactttgaaaggattgtgaatactggaaaatgacaaaactaaaggtagatctatcaagcca

SEQ ID NO: 371290 - DNA, 3220 bp, Homo sapiens
agcggggcccttctcaagatggcgctgcactcaatgcggaaagcgcgtgagcgctggagcttcatccgggcacttcataagggatccgcagctgctcccgctctccagaaagacagcaagaagcgagtattttccggcattcaacctacaggaatcctccacctgggcaattacctgggagccattgagagctgggtgaggttacaggatgaatatgactctgtattatacagcattgttgacctccactccattactgtcccccaagacccagctgtccttcggcagagcatcctggacatgactgctgttcttcttgcctgtggcataaacccggaaaaaagcatccttttccaacaatctcaggtgtctgaacacacacaattaagttggatcctttcctgcatggtcagactacctcgattacaacatttacatcagtggaaggcaaagactaccaagcagaagcacgatggcacggtgggcctgctcacatacccagtactccaggcagccgacattctgttgtacaagtccacacacgttcctgttggggaggatcaagtccagcacatggaactagttcaggatctagcacaaggtttcaacaagaagtatggggagttctttccagtgcccgagtccattctcacatccatgaagaaggtaaaatccctacgtgatccttctgccaaaatgtcgaaatcagaccctgacaaactggccaccgtccgaataacagacagcccagaggagatagtgcagaaattccgcaaggctgtgacagacttcacctcggaggtcacctatgacccggctggccgcgctggcgtgtccaacatagtggcggtgcatgccgcggtgacggggctctccgtggaggaagtggtgcgccgcagcgcgggcatgaacactgctcgctacaagctggccgtggcagatgctgtgattgagaagtttgccccaattaagcgtgaaattgaaaaactgaagctggacaaggaccatttagagaaggttttacaaattggatcagcaaaagccaaagaattagcatacactgtgtgccaggaggtgaagaaattggtgggttttctataggaagtttcaacgaatcacagcaaggcttttgtgccttgcactccatgcattctgataacggcagctttcctaaaaagaaaaagttatagttttgggacatttaatttggtatagctgattattggctttatttgatgaatattgctttgtagctttgaaatacgacagtgttccaaatcccatcaacaaaatgctgtgaacaacaacaacaaaaaataaatcaagaaggcatagctgtctgaatccccaattattgaggcacactccttggcctgcagaaatgtgattgaagtaaggagtaatttgggaaatggagtatcatttgtgcttctctctggagtacttactgtaacagatgcacacgttatctacttcaacccttttataaagcaatatatagaggtcttagatgtataatccttgagatgccatttgatcagatgccaatttgtattcagagctcataaaaacaagtccattcttatagtttgtttgtcactgagacggtgcctgatttaatatatttaagctgcttaacttgttttccaagagataacaccaactgttccagcaataatttgttttttaattcagagatatgggatatgatcttctaaggaggttgcattattttgacctgatttatttattgtacaagagcccaagtccctgaattatattcttaataagtgctttcttgcattcatttcagtttagtctcaccaaccccctatgaattaggagaattattgtcattttacacatgaggaaagtgaggctgagagaatccaattagcttgtacgatatcactccataagagaagcaaatctgagagtaaaacccttaccccttattcttaagaatagtgcttgtttattcagtacaaaaaaaatgctgaaaggcagcgttttttagactctaaacattctgattttgaaggtgggtgttggaacgactgatgatgttttttatatcatcaattcagccaatggatgcgaacttaaaatctggattcacagaaccgtggtcacatttccccatcaaaatccccaaggcgggtcccaagttctctcctctacgctcattgcaggaaatacttggaaataggttctgccagtctacaatagcagtgaagactgacaaatcagatattcccaatgactgacagcttctcatcttgcctctacctcagttaagtaatgtcaccctgaaacctagcttttctgcacttccatttctgacacctgaaaatgaaaatgataatcctaacttatacaccaagacctgttagcaagatcgattttgtaacagaaattgcttataagttttttatcagtaaggaccatgatcaccatttgtacatacataactaggttgttgagcaaagcatttttgctcatgtttcttaaggaagtagagtagtccttgtgtcagaacacatgttaatccacaaaacgccgcatcccagattccaaattaaaacatcgtttttaggattcttggagctagcctggatcatgggtaaaggaaacattttgccttttgtatcttatactggaatgggatgtctgtaagtcctagaacctctttgagcatatttcttacaagcctctgttttttcccctttaaaggaaactttgaaaggattgtgaatactggaaaatgacaaaactaaaggtagatctatcaagccaattgtctgtttatctgtttgtgtggtttttacccccttgcaatacctttcctccaaaaaattaaggcactatggaaagaatctcagaggagaaaaacagataacttgtgataacttccagggaccgaagtctatgcattggtgagggtggacttgtttgcaacctgttgttattttttttaagtgacccaactgttcaagtccaaacttggcccataattattaagagaatcttatccggttaatcagtattaatcaggattcttcagagaaacaaaaccaataggatatatatctatatattagagaatttattatggggattagctcacccaattatgaaggctgagaagttccatgataggctatgtgcaagctggacccaagagagatgatggtgtgatacagtccaagtccttaggctg

SEQ ID NO: 371291 - DNA, 2633 bp, Homo sapiens
agcggggcccttctcaagatggcgctgcactcaatgcggaaagcgcgtgagcgctggagcttcatccgggcacttcataagggatccgcagctgctcccgctctccagaaagacagcaagaagcgagtattttccggcattcaacctacaggaatcctccacctgggcaattacctgggagccattgagagctgggtgaggttacaggatgaatatgactctgtattatacagcattgttgacctccactccattactgtcccccaagacccagctgtccttcggcagagcatcctggacatgactgctgttcttcttgcctgtggcataaacccggaaaaaagcatccttttccaacaatctcaggtgtctgaacacacacaattaagttggatcctttcctgcatggtcagactacctcgattacaacatttacatcagtggaaggcaaagactaccaagcagaagcacgatggcacggtgggcctgctcacatacccagtactccaggcagccgacattctgttgtacaagtccacacacgttcctgttggggaggatcaagtccagcacatggaactagttcaggatctagcacaaggtttcaacaagaagtatggggagttctttccagtgcccgagtccattctcacatccatgaagaaggtaaaatccctacgtgatccttctgccaaaatgtcgaaatcagaccctgacaaactggccaccgtccgaataacagacagcccagaggagatagtgcagaaattccgcaagatgctgtgattgagaagtttgccccaattaagcgtgaaattgaaaaactgaagctggacaaggaccatttagagaaggttttacaaattggatcagcaaaagccaaagaattagcatacactgtgtgccaggaggtgaagaaattggtgggttttctataggaagtttcaacgaatcacagcaaggcttttgtgccttgcactccatgcattctgataacggcagctttcctaaaaagaaaaagttatagttttgggacatttaatttggtatagctgattattggctttatttgatgaatattgctttgtagctttgaaatacgacagtgttccaaatcccatcaacaaaatgctgtgaacaacaacaacaaaaaataaatcaagaaggcatagctgtctgaatccccaattattgaggcacactccttggcctgcagaaatgtgattgaagtaaggagtaatttgggaaatggagtatcatttgtgcttctctctggagtacttactgtaacagatgcacacgttatctacttcaacccttttataaagcaatatatagaggtcttagatgtataatccttgagatgccatttgatcagatgccaatttgtattcagagctcataaaaacaagtccattcttatagtttgtttgtcactgagacggtgcctgatttaatatatttaagctgcttaacttgttttccaagagataacaccaactgttccagcaataatttgttttttaattcagagatatgggatatgatcttctaaggaggttgcattattttgacctgatttatttattgtacaagagcccaagtccctgaattatattcttaataagtgctttcttgcattcatttcagtttagtctcaccaaccccctatgaattaggagaattattgtcattttacacatgaggaaagtgaggctgagagaatccaattagcttgtacgatatcactccataagagaagcaaatctgagagtaaaacccttaccccttattcttaagaatagtgcttgtttattcagtacaaaaaaaatgctgaaaggcagcgttttttagactctaaacattctgattttgaaggtgggtgttggaacgactgatgatgttttttatatcatcaattcagccaatggatgcgaacttaaaatctggattcacagaaccgtggtcacatttccccatcaaaatccccaaggcgggtcccaagttctctcctctacgctcattgcaggaaatacttggaaataggttctgccagtctacaatagcagtgaagactgacaaatcagatattcccaatgactgacagcttctcatcttgcctctacctcagttaagtaatgtcaccctgaaacctagcttttctgcacttccatttctgacacctgaaaatgaaaatgataatcctaacttatacaccaagacctgttagcaagatcgattttgtaacagaaattgcttataagttttttatcagtaaggaccatgatcaccatttgtacatacataactaggttgttgagcaaagcatttttgctcatgtttcttaaggaagtagagtagtccttgtgtcagaacacatgttaatccacaaaacgccgcatcccagattccaaattaaaacatcgtttttaggattcttggagctagcctggatcatgggtaaaggaaacattttgccttttgtatcttatactggaatgggatgtctgtaagtcctagaacctctttgagcatatttcttacaagcctctgttttttcccctttaaaggaaactttgaaaggattgtgaatactggaaaatgacaaaactaaaggtagatctatcaagcca

SEQ ID NO: 371292 - DNA, 2825 bp, Homo sapiens
agcggggcccttctcaagatggcgctgcactcaatgcggaaagcgcgtgagcgctggagcttcatccgggcacttcataagggatccgcagctgctcccgctctccagaaagacagcaagaagcgagtattttccggcattcaacctacaggaatcctccacctgggcaattacctgggagccattgagagctgggtgaggttacaggatgaatatgactctgtattatacagcattgttgacctccactccattactgtcccccaagacccagctgtccttcggcagagcatcctggacatgactgctgttcttcttgcctgtggcataaacccggaaaaaagcatccttttccaacaatctcaggtgtctgaacacacacaattaagttggatcctttcctgcatggtcagactacctcgattacaacatttacatcagtggaaggcaaagactaccaagcagaagcacgatggcacggtgggcctgctcacatacccagtactccaggcagccgacattctgttgtacaagtccacacacgttcctgttggggaggatcaagtccagcacatggaactagttcaggatctagcacaaggtttcaacaagaagtatggggagttctttccagtgcccgagtccattctcagtatgtgtgtgttggtgtttttaacctagcatccatgaagaaggtaaaatccctacgtgatccttctgccaaaatgtcgaaatcagaccctgacaaactggccaccgtccgaataacagacagcccagaggagatagtgcagaaattccgcaaggctgtgacagacttcacctcggaggtcacctatgacccggctggccgcgctggcgtgtccaacatagtggcggtgcatgccgcggtgacggggctctccgtggaggaagtggtgcgccgcagcgcgggcatgaacactgctcgctacaagctggccgtggcagatgctgtgattgagaagtttgccccaattaagcgtgaaattgaaaaactgaagctggacaaggaccatttagagaaggttttacaaattggatcagcaaaagccaaagaattagcatacactgtgtgccaggaggtgaagaaattggtgggttttctataggaagtttcaacgaatcacagcaaggcttttgtgccttgcactccatgcattctgataacggcagctttcctaaaaagaaaaagttatagttttgggacatttaatttggtatagctgattattggctttatttgatgaatattgctttgtagctttgaaatacgacagtgttccaaatcccatcaacaaaatgctgtgaacaacaacaacaaaaaataaatcaagaaggcatagctgtctgaatccccaattattgaggcacactccttggcctgcagaaatgtgattgaagtaaggagtaatttgggaaatggagtatcatttgtgcttctctctggagtacttactgtaacagatgcacacgttatctacttcaacccttttataaagcaatatatagaggtcttagatgtataatccttgagatgccatttgatcagatgccaatttgtattcagagctcataaaaacaagtccattcttatagtttgtttgtcactgagacggtgcctgatttaatatatttaagctgcttaacttgttttccaagagataacaccaactgttccagcaataatttgttttttaattcagagatatgggatatgatcttctaaggaggttgcattattttgacctgatttatttattgtacaagagcccaagtccctgaattatattcttaataagtgctttcttgcattcatttcagtttagtctcaccaaccccctatgaattaggagaattattgtcattttacacatgaggaaagtgaggctgagagaatccaattagcttgtacgatatcactccataagagaagcaaatctgagagtaaaacccttaccccttattcttaagaatagtgcttgtttattcagtacaaaaaaaatgctgaaaggcagcgttttttagactctaaacattctgattttgaaggtgggtgttggaacgactgatgatgttttttatatcatcaattcagccaatggatgcgaacttaaaatctggattcacagaaccgtggtcacatttccccatcaaaatccccaaggcgggtcccaagttctctcctctacgctcattgcaggaaatacttggaaataggttctgccagtctacaatagcagtgaagactgacaaatcagatattcccaatgactgacagcttctcatcttgcctctacctcagttaagtaatgtcaccctgaaacctagcttttctgcacttccatttctgacacctgaaaatgaaaatgataatcctaacttatacaccaagacctgttagcaagatcgattttgtaacagaaattgcttataagttttttatcagtaaggaccatgatcaccatttgtacatacataactaggttgttgagcaaagcatttttgctcatgtttcttaaggaagtagagtagtccttgtgtcagaacacatgttaatccacaaaacgccgcatcccagattccaaattaaaacatcgtttttaggattcttggagctagcctggatcatgggtaaaggaaacattttgccttttgtatcttatactggaatgggatgtctgtaagtcctagaacctctttgagcatatttcttacaagcctctgttttttcccctttaaaggaaactttgaaaggattgtgaatactggaaaatgacaaaactaaaggtagatctatcaagcca

SEQ ID NO: 371293 - DNA, 2834 bp, Homo sapiens
cggccgcatccttgccgcccgccccggcccagccgcgtcccggagccgtcgggcatggagccgtggaagcagtgcgcgcagtggctcatccattgcaaggtgctgcccaccaaccaccgggtgacctgggactcggctcaggtgttcgaccttgcgcagaccctccgcgatggagtcctgctctgccagctgcttaacaacctccgggcgcactccatcaacctgaaggagatcaacctgaggccgcagatgtcccagtttctctgtttgaagaacataaggacatttctcacggcctgttgtgagacgtttggaatgaggaaaagtgaacttttcgaggcatttgacttgtttgatgttcgtgactttggaaaggtgtctgaacacacacaattaagttggatcctttcctgcatggtcagactacctcgattacaacatttacatcagtggaaggcaaagactaccaagcagaagcacgatggcacggtgggcctgctcacatacccagtactccaggcagccgacattctgttgtacaagtccacacacgttcctgttggggaggatcaagtccagcacatggaactagttcaggatctagcacaaggtttcaacaagaagtatggggagttctttccagtgcccgagtccattctcagtatgtgtgtgttggtgtttttaacctagcatccatgaagaaggtaaaatccctacgtgatccttctgccaaaatgtcgaaatcagaccctgacaaactggccaccgtccgaataacagacagcccagaggagatagtgcagaaattccgcaaggctgtgacagacttcacctcggaggtcacctatgacccggctggccgcgctggcgtgtccaacatagtggcggtgcatgccgcggtgacggggctctccgtggaggaagtggtgcgccgcagcgcgggcatgaacactgctcgctacaagctggccgtggcagatgctgtgattgagaagtttgccccaattaagcgtgaaattgaaaaactgaagctggacaaggaccatttagagaaggttttacaaattggatcagcaaaagccaaagaattagcatacactgtgtgccaggaggtgaagaaattggtgggttttctataggaagtttcaacgaatcacagcaaggcttttgtgccttgcactccatgcattctgataacggcagctttcctaaaaagaaaaagttatagttttgggacatttaatttggtatagctgattattggctttatttgatgaatattgctttgtagctttgaaatacgacagtgttccaaatcccatcaacaaaatgctgtgaacaacaacaacaaaaaataaatcaagaaggcatagctgtctgaatccccaattattgaggcacactccttggcctgcagaaatgtgattgaagtaaggagtaatttgggaaatggagtatcatttgtgcttctctctggagtacttactgtaacagatgcacacgttatctacttcaacccttttataaagcaatatatagaggtcttagatgtataatccttgagatgccatttgatcagatgccaatttgtattcagagctcataaaaacaagtccattcttatagtttgtttgtcactgagacggtgcctgatttaatatatttaagctgcttaacttgttttccaagagataacaccaactgttccagcaataatttgttttttaattcagagatatgggatatgatcttctaaggaggttgcattattttgacctgatttatttattgtacaagagcccaagtccctgaattatattcttaataagtgctttcttgcattcatttcagtttagtctcaccaaccccctatgaattaggagaattattgtcattttacacatgaggaaagtgaggctgagagaatccaattagcttgtacgatatcactccataagagaagcaaatctgagagtaaaacccttaccccttattcttaagaatagtgcttgtttattcagtacaaaaaaaatgctgaaaggcagcgttttttagactctaaacattctgattttgaaggtgggtgttggaacgactgatgatgttttttatatcatcaattcagccaatggatgcgaacttaaaatctggattcacagaaccgtggtcacatttccccatcaaaatccccaaggcgggtcccaagttctctcctctacgctcattgcaggaaatacttggaaataggttctgccagtctacaatagcagtgaagactgacaaatcagatattcccaatgactgacagcttctcatcttgcctctacctcagttaagtaatgtcaccctgaaacctagcttttctgcacttccatttctgacacctgaaaatgaaaatgataatcctaacttatacaccaagacctgttagcaagatcgattttgtaacagaaattgcttataagttttttatcagtaaggaccatgatcaccatttgtacatacataactaggttgttgagcaaagcatttttgctcatgtttcttaaggaagtagagtagtccttgtgtcagaacacatgttaatccacaaaacgccgcatcccagattccaaattaaaacatcgtttttaggattcttggagctagcctggatcatgggtaaaggaaacattttgccttttgtatcttatactggaatgggatgtctgtaagtcctagaacctctttgagcatatttcttacaagcctctgttttttcccctttaaaggaaactttgaaaggattgtgaatactggaaaatgacaaaactaaaggtagatctatcaagcca

SEQ ID NO: 371294 - DNA, 2539 bp, Homo sapiens
agcggggcccttctcaagatggcgctgcactcaatgcggaaagcgcgtgagcgctggagcttcatccgggcacttcataagggatccgcagctgctcccgctctccagaaagacagcaagaagcgagtattttccggcattcaacctacaggaatcctccacctgggcaattacctgggagccattgagagctgggtgtctgaacacacacaattaagttggatcctttcctgcatggtcagactacctcgattacaacatttacatcagtggaaggtccacacacgttcctgttggggaggatcaagtccagcacatggaactagttcaggatctagcacaaggtttcaacaagaagtatggggagttctttccagtgcccgagtccattctcacatccatgaagaaggtaaaatccctacgtgatccttctgccaaaatgtcgaaatcagaccctgacaaactggccaccgtccgaataacagacagcccagaggagatagtgcagaaattccgcaaggctgtgacagacttcacctcggaggtcacctatgacccggctggccgcgctggcgtgtccaacatagtggcggtgcatgccgcggtgacggggctctccgtggaggaagtggtgcgccgcagcgcgggcatgaacactgctcgctacaagctggccgtggcagatgctgtgattgagaagtttgccccaattaagcgtgaaattgaaaaactgaagctggacaaggaccatttagagaaggttttacaaattggatcagcaaaagccaaagaattagcatacactgtgtgccaggaggtgaagaaattggtgggttttctataggaagtttcaacgaatcacagcaaggcttttgtgccttgcactccatgcattctgataacggcagctttcctaaaaagaaaaagttatagttttgggacatttaatttggtatagctgattattggctttatttgatgaatattgctttgtagctttgaaatacgacagtgttccaaatcccatcaacaaaatgctgtgaacaacaacaacaaaaaataaatcaagaaggcatagctgtctgaatccccaattattgaggcacactccttggcctgcagaaatgtgattgaagtaaggagtaatttgggaaatggagtatcatttgtgcttctctctggagtacttactgtaacagatgcacacgttatctacttcaacccttttataaagcaatatatagaggtcttagatgtataatccttgagatgccatttgatcagatgccaatttgtattcagagctcataaaaacaagtccattcttatagtttgtttgtcactgagacggtgcctgatttaatatatttaagctgcttaacttgttttccaagagataacaccaactgttccagcaataatttgttttttaattcagagatatgggatatgatcttctaaggaggttgcattattttgacctgatttatttattgtacaagagcccaagtccctgaattatattcttaataagtgctttcttgcattcatttcagtttagtctcaccaaccccctatgaattaggagaattattgtcattttacacatgaggaaagtgaggctgagagaatccaattagcttgtacgatatcactccataagagaagcaaatctgagagtaaaacccttaccccttattcttaagaatagtgcttgtttattcagtacaaaaaaaatgctgaaaggcagcgttttttagactctaaacattctgattttgaaggtgggtgttggaacgactgatgatgttttttatatcatcaattcagccaatggatgcgaacttaaaatctggattcacagaaccgtggtcacatttccccatcaaaatccccaaggcgggtcccaagttctctcctctacgctcattgcaggaaatacttggaaataggttctgccagtctacaatagcagtgaagactgacaaatcagatattcccaatgactgacagcttctcatcttgcctctacctcagttaagtaatgtcaccctgaaacctagcttttctgcacttccatttctgacacctgaaaatgaaaatgataatcctaacttatacaccaagacctgttagcaagatcgattttgtaacagaaattgcttataagttttttatcagtaaggaccatgatcaccatttgtacatacataactaggttgttgagcaaagcatttttgctcatgtttcttaaggaagtagagtagtccttgtgtcagaacacatgttaatccacaaaacgccgcatcccagattccaaattaaaacatcgtttttaggattcttggagctagcctggatcatgggtaaaggaaacattttgccttttgtatcttatactggaatgggatgtctgtaagtcctagaacctctttgagcatatttcttacaagcctctgttttttcccctttaaaggaaactttgaaaggattgtgaatactggaaaatgacaaaactaaaggtagatctatcaagcca

SEQ ID NO: 371295 - DNA, 566 bp, Homo sapiens
gtctaacataagaccagactatgcagactccaatttccacgacttcaagatgcataccttcactcgagtcacatcctgcaaagtctgccagatgctcctgaggtaagcctgctcagtcctggttttcagtttaaaggaactgatataattgctaagtgtttcagacttttctaaccttctagccaataggttctaaagtggggaatttgccttagcagtctggatcccacaaacctttgccaggctttctgcctggacagtcctttcagaagctctggcaagctcgtctccctctaccaagggggtaccttgaagagcactgttgatactttttttcttcttcttgcagtaatttcatatgggcagaattttgcaccgtttaatataccactttcttatttcacctttcaggggaacattttatcaaggctatttatgttttaagtgtggagcgagagcacacaaagaatgtttgggaagagtagacaattgtggcagagttaattctggtggtaagtcatgtttattgttgcaattctgtttttaatgaggacataaaatttgct

SEQ ID NO: 371296 - DNA, 1336 bp, Homo sapiens
agcggggcccttctcaagatggcgctgcactcaatgcggaaagcgcgtgagcgctggagcttcatccgggcacttcataagggatccgcagctgctcccgctctccagaaagacagcaagaagcgagtattttccggcattcaacctacaggaatcctccacctgggcaattacctgggagccattgagagctgggtgaggttacaggatgaatatgactctgtattatacagcattgttgacctccactccattactgtcccccaagacccagctgtccttcggcagagcatcctggacatgactgctgttcttcttgcctgtggcataaacccggaaaaaagcatccttttccaacaatctcaggtgtctgaacacacacaattaagttggatcctttcctgcatggtcagactacctcgattacaacatttacatcagtggaaggcaaagactaccaagcagaagcacgatggcacggtgggcctgctcacatacccagtactccaggcagccgacattctgttgtacaagtccacacacgttcctgttggggaggatcaagtccagcacatggaactagttcaggatctagcacaaggtttcaacaagaagtatggggagttctttccagtgcccgagtccattctcacatccatgaagaaggtaaaatccctacgtgatccttctgccaaaatgtcgaaatcagaccctgacaaactggccaccgtccgaataacagacagcccagaggagatagtgcagaaattccgcaaggctgtgacagacttcacctcggaggtcacctatgacccggctggccgcgctggcgtgtccaacatagtggcggtgcatgccgcggtgacggggctctccgtggaggaagtggtgcgccgcagcgcgggcatgaacactgctcgctacaagctggccgtggcagatgctgtgattgagaagtttgccccaattaagcgtgaaattgaaaaactgaagctggacaaggaccatttagagaaggttttacaaattggatcagcaaaagccaaagaattagcatacactgtgtgccaggaggtgaagaaattggtgggttttctataggaagtttcaacgaatcacagcaaggcttttgtgccttgcactccatgcattctgataacggcagctttcctaaaaagaaaaagttatagttttgggacatttaatttggtatagctgattattggctttatttgatgaatattgctttgtagctttgaaatacgacagtgttccaaatcccatcaacaaaatgctgtgaacaacaacaacaaaaaataaatcaagaaggcatagc

SEQ ID NO: 371297 - DNA, 4581 bp, Homo sapiens
  misc_feature (4)..(4): n is a, c, g, or t
  misc_feature (6)..(6): n is a, c, g, or t
  misc_feature (8)..(12): n is a, c, g, or t
  misc_feature (42)..(42): n is a, c, g, or t
  misc_feature (116)..(116): n is a, c, g, or t
tgcncngnnnnntcagaaaccaggatgcaacatctgtgcctngagcctctgctgctagatagcaacctaatgttgtaggggtgtgatgccgtggaccccttcttgaacccccaagntcgtcttgcatttggggctctagcatgcagctgcctgattgcccttgcagagcccacctccctgttatagaaacattatcacgactttctcgaacacctatagcattggccacaggaatcaggcccttcccaacagaagaaagcattaatgatgaagacatctacaaaggccttcctgatttaatagatgaaacccttgtggaagatgaagaagatctctatgactgtgtttatggggaagatgaaggtggagaagtctatgaggacttaatgaaggcagaggaagcacatcagcccaaatgtccagaaaatgatatacgaagttgttgtctagcagaaattaagcagacagaagaaaaatatacagaaactttggagtcaatagaaaagtatttcatggcaccactaaaaagatttctgacagcagcagaatttgattcagtattcatcaacattcctgaacttgtaaaacttcatcggaacctaatgcaagagattcatgattccattgtaaataaaaatgaccagaacttgtaccaagtttttattaactacaaggaaagattggttatttacgggcagtactgcagtggagtggagtcagccatctctagtttagactacatttctaagacaaaagaagatgtcaaactgaaattagaggaatgttccaaaagagcaaataatgggaaatttactcttcgagacttgcttgtggttcctatgcaacgtgttttaaagtaccaccttctcctccaggaactggtcaaacataccactgatccgactgagaaggcaaatctgaaactggctcttgatgccatgaaggacttggcacaatatgtgaatgaagtgaaaagagataatgagacccttcgtgaaattaaacagtttcagctatctatagagaatttgaaccaaccagttttgctttttggacgacctcagggagatggtgaaattcgaataaccactctagacaagcataccaaacaagaaaggcatatcttcttatttgatttggcagtgatcgtatgtaagagaaaaggtgataactatgaaatgaaggaaataatagatcttcagcagtacaagatagccaataatcctacaaccgataaagaaaacaaaaagtggtcttatggcttctacctcatccatacccaaggacaaaatgggttagaattttattgcaaaacaaaagatttaaagaagaaatggctagaacagtttgaaatggctttgtctaacataagaccagactatgcagactccaatttccacgacttcaagatgcataccttcactcgagtcacatcctgcaaagtctgccagatgctcctgaggggaacattttatcaaggctatttatgttttaagtgtggagcgagagcacacaaagaatgtttgggaagagtagacaattgtggcagagttaattctggtgaacaagggacactcaaactaccagagaaacggaccaatggactgcgaagaactcctaaacaggtggatccaggtttaccaaagatgcaggtcattaggaactattctggaacaccacccccagctctgcatgaaggaccccctttacagctccaggccggggataccgttgaacttctgaaaggagatgcacacagtctgttttggcagggcagaaatttagcatctggagaggttggattttttccaagtgatgcagtcaagccttgcccatgtgtgcccaaaccagtagattattcttgccaaccctggtatgctggagcaatggaaagattgcaagcagagaccgaacttattaatagggtaaatagtacttaccttgtgaggcacaggaccaaagagtcaggagaatatgcaattagcattaagtacaataatgaagcaaagcacatcaagattttaacaagagatggcttttttcacattgcagaaaatagaaaatttaaaagtttaatggaacttgtggagtactacaagcatcattctctcaaggaagggttcagaaccttagatacaactctgcagtttccatacaaggagccagaacattcagctggacagaggggtaatagagcaggcaacagcttgttaagtccaaaagtgctgggcattgccatcgctcggtatgacttctgtgcaagagatatgagagagttgtccttgttgaaaggagatgtggtgaagatttacacaaagatgagtgcaaatggctggtggagaggagaagtaaatggcagggtgggctggtttccatccacatatgtggaagaggatgaataaattcaaatcccgtgttgcaccctgcaccaaaaatttcagagaagggataaatagaagcctgcacagcatcgtgaattaactgaagtgtttaaaaagctgcatttctggctgttcaacatcctccctccttagcccctcctaagtcttaatgctgagatttctaaagatgctggtactgacagattaatggcttgcctagagctgtgcaagaaacagcctgccagtctgtcattgtcagggaccagggcaaaaccaagagctgttcttcccagaagagccctgcaaacacattggttcgtgcttccctttacttcttctggtcagataccatgaatgccagtcatcagtaaatcttaatacacttttgctttattctcacatgccattcaccagattatttgatggtacaaagaagcagaagtgtaattttccttttcccagcatgacgaaaaattggagttctgccatttgagcagcttactggaaagatccagccttacttgtcttaaattgtccaacaaggtgactcattgcccggcaaacacttttaccctcagatgttactcatgatattataaaatatgaggccagtgctcaggtttgcatcataagtgagctatccctgaagggttttaattacttatttggtgtcctgattatatttgcaaacttctttataaaaggtgaaaaaagcacacaaaagagagggtgtcttcatattaaaccttcacaaccttcatgatttcataggattattttggaaatatagcacttgactttatgaaaggatctgggctaggtatattaggggtagttgccaataacctgaagaagctggcattgtttacagaaacagatcaagggctataatttatgtcattttatagcagcagtatctattaatacatgccttttcctcccatccacctcccccgcacacacacaaagatgacctgggacatgatttttttattcccacattttcttggagcacaaacaactttgttgaggattttggaaggaaagcacaactgggtcctttattcatttctgggacagaaagagggtcagtggacttttgtgggcctccagcttctctcagagtctccccctctgcagcccatcctgggagtgtattaactggagggaagatgggtcttgcagtacatttgttttgcccagccatcactcttttttgtgaggagcctaaatacattcttcctggggtccagagtccccattcaaggcagtcaagttaagacactaacttggccctttcctgatggaaatatttcctccatagcagaagttgtgttctgacaagactgagagagttacatgttgggaaaaaaaagaagcattaacttagtagaactgaaccaggagcattaagttctgaaattttgaatcatctctgaaatgaagcaggtgtagcctgccctctcatcaatccgtctgggtgccagaactcaaggttcagtggacacatccccctgttagagaccctcatgggctaggacttttcatctaggatagattcaagacctttacctcagaattatgtaaactgtgattgtgttttagaaaaattattatttgctaaaaccatttaagtctttgtatatgtgtaaatgatcacaaaaatgtattttataaaatgttctgtacaataaagttacacctcaaagtgtactcttggaatggattctttcctgtaaagtcttatctgcgactctgtctcgggaatgttttgtctgttgccgtcagccgaactttgttatggagggagcagcctcacacaagcagaaacactcctgtggatggtattgtagcatgtattgtttattttagtcaatagaccctctccttataaatggtgtttagtcttcctgttgcatttcatgggcctgggggtttcctagcagaggatattggagcccctttttgtgacattaccaattacatctttgtccacgtttaatactttgttttggaaaatttaaatgctgcagatttgtgtagagttctaataccaaagacagaagtaaatgttttccatatactttgtcttgcctgtatgcagcccttgtgtaatatggtgaattagagtggtatttcactttgtattattttgtaaatatgtcaatataataaatagtgactaaattgaaaaaaaaaa

SEQ ID NO: 371298 - DNA, 3117 bp, Homo sapiens
aaaagcagtggtgttttaccactctgcagagaaagctaaggttgctaaccaaacaaaataactttacactgacaatgccaatttttacatttctttcagaacaagggacactcaaactaccagagaaacggaccaatggactgcgaagaactcctaaacaggtggatccaggtttaccaaagatgcaggtcattaggaactattctggaacaccacccccagctctgcatgaaggaccccctttacagctccaggccggggataccgttgaacttctgaaaggagatgcacacagtctgttttggcagggcagaaatttagcatctggagaggttggattttttccaagtgatgcagtcaagccttgcccatgtgtgcccaaaccagtagattattcttgccaaccctggtatgctggagcaatggaaagattgcaagcagagaccgaacttattaatagggtaaatagtacttaccttgtgaggcacaggaccaaagagtcaggagaatatgcaattagcattaagtacaataatgaagcaaagcacatcaagattttaacaagagatggcttttttcacattgcagaaaatagaaaatttaaaagtttaatggaacttgtggagtactacaagcatcattctctcaaggaagggttcagaaccttagatacaactctgcagtttccatacaaggagccagaacattcagctggacagaggggtaatagagcaggcaacagcttgttaagtccaaaagtgctgggcattgccatcgctcggtatgacttctgtgcaagagatatgagagagttgtccttgttgaaaggagatgtggtgaagatttacacaaagatgagtgcaaatggctggtggagaggagaagtaaatggcagggtgggctggtttccatccacatatgtggaagaggatgaataaattcaaatcccgtgttgcaccctgcaccaaaaatttcagagaagggataaatagaagcctgcacagcatcgtgaattaactgaagtgtttaaaaagctgcatttctggctgttcaacatcctccctccttagcccctcctaagtcttaatgctgagatttctaaagatgctggtactgacagattaatggcttgcctagagctgtgcaagaaacagcctgccagtctgtcattgtcagggaccagggcaaaaccaagagctgttcttcccagaagagccctgcaaacacattggttcgtgcttccctttacttcttctggtcagataccatgaatgccagtcatcagtaaatcttaatacacttttgctttattctcacatgccattcaccagattatttgatggtacaaagaagcagaagtgtaattttccttttcccagcatgacgaaaaattggagttctgccatttgagcagcttactggaaagatccagccttacttgtcttaaattgtccaacaaggtgactcattgcccggcaaacacttttaccctcagatgttactcatgatattataaaatatgaggccagtgctcaggtttgcatcataagtgagctatccctgaagggttttaattacttatttggtgtcctgattatatttgcaaacttctttataaaaggtgaaaaaagcacacaaaagagagggtgtcttcatattaaaccttcacaaccttcatgatttcataggattattttggaaatatagcacttgactttatgaaaggatctgggctaggtatattaggggtagttgccaataacctgaagaagctggcattgtttacagaaacagatcaagggctataatttatgtcattttatagcagcagtatctattaatacatgccttttcctcccatccacctcccccgcacacacacaaagatgacctgggacatgatttttttattcccacattttcttggagcacaaacaactttgttgaggattttggaaggaaagcacaactgggtcctttattcatttctgggacagaaagagggtcagtggacttttgtgggcctccagcttctctcagagtctccccctctgcagcccatcctgggagtgtattaactggagggaagatgggtcttgcagtacatttgttttgcccagccatcactcttttttgtgaggagcctaaatacattcttcctggggtccagagtccccattcaaggcagtcaagttaagacactaacttggccctttcctgatggaaatatttcctccatagcagaagttgtgttctgacaagactgagagagttacatgttgggaaaaaaaagaagcattaacttagtagaactgaaccaggagcattaagttctgaaattttgaatcatctctgaaatgaagcaggtgtagcctgccctctcatcaatccgtctgggtgccagaactcaaggttcagtggacacatccccctgttagagaccctcatgggctaggacttttcatctaggatagattcaagacctttacctcagaattatgtaaactgtgattgtgttttagaaaaattattatttgctaaaaccatttaagtctttgtatatgtgtaaatgatcacaaaaatgtattttataaaatgttctgtacaataaagttacacctcaaagtgtactcttggaatggattctttcctgtaaagtcttatctgcgactctgtctcgggaatgttttgtctgttgccgtcagccgaactttgttatggagggagcagcctcacacaagcagaaacactcctgtggatggtattgtagcatgtattgtttattttagtcaatagaccctctccttataaatggtgtttagtcttcctgttgcatttcatgggcctgggggtttcctagcagaggatattggagcccctttttgtgacattaccaattacatctttgtccacgtttaatactttgttttggaaaatttaaatgctgcagatttgtgtagagttctaataccaaagacagaagtaaatgttttccatatactttgtcttgcctgtatgcagcccttgtgtaatatggtgaattagagtggtatttcactttgtattattttgtaaatatgtcaatataataaatagtgactaaattgaaaaaaaaaa

SEQ ID NO: 371299 - DNA, 2895 bp, Homo sapiens
agcggagatctgactcacctgcctgtgactttatgcaggttatttaacttagcagtgtccttccctagaaaatgatgcctatgattcctaccttcactacatgagatgaagtacatgaaagggccagggcatgtttctgatagctaaatttcatcacaagaaggaaaatacatctgcaaaagcattccatcacatgatagaaggatgaaagacagcaagaagcgagtattttccggcattcaacctacaggaatcctccacctgggcaattacctgggagccattgagagctgggtgaggttacaggatgaatatgactctgtattatacagcattgttgacctccactccattactgtcccccaagacccagctgtccttcggcagagcatcctggacatgactgctgttcttcttgcctgtggcataaacccggaaaaaagcatccttttccaacaatctcaggtgtctgaacacacacaattaagttggatcctttcctgcatggtcagactacctcgattacaacatttacatcagtggaaggcaaagactaccaagcagaagcacgatggcacggtgggcctgctcacatacccagtactccaggcagccgacattctgttgtacaagtccacacacgttcctgttggggaggatcaagtccagcacatggaactagttcaggatctagcacaaggtttcaacaagaagtatggggagttctttccagtgcccgagtccattctcacatccatgaagaaggtaaaatccctacgtgatccttctgccaaaatgtcgaaatcagaccctgacaaactggccaccgtccgaataacagacagcccagaggagatagtgcagaaattccgcaaggctgtgacagacttcacctcggaggtcacctatgacccggctggccgcgctggcgtgtccaacatagtggcggtgcatgccgcggtgacggggctctccgtggaggaagtggtgcgccgcagcgcgggcatgaacactgctcgctacaagctggccgtggcagatgctgtgattgagaagtttgccccaattaagcgtgaaattgaaaaactgaagctggacaaggaccatttagagaaggttttacaaattggatcagcaaaagccaaagaattagcatacactgtgtgccaggaggtgaagaaattggtgggttttctataggaagtttcaacgaatcacagcaaggcttttgtgccttgcactccatgcattctgataacggcagctttcctaaaaagaaaaagttatagttttgggacatttaatttggtatagctgattattggctttatttgatgaatattgctttgtagctttgaaatacgacagtgttccaaatcccatcaacaaaatgctgtgaacaacaacaacaaaaaataaatcaagaaggcatagctgtctgaatccccaattattgaggcacactccttggcctgcagaaatgtgattgaagtaaggagtaatttgggaaatggagtatcatttgtgcttctctctggagtacttactgtaacagatgcacacgttatctacttcaacccttttataaagcaatatatagaggtcttagatgtataatccttgagatgccatttgatcagatgccaatttgtattcagagctcataaaaacaagtccattcttatagtttgtttgtcactgagacggtgcctgatttaatatatttaagctgcttaacttgttttccaagagataacaccaactgttccagcaataatttgttttttaattcagagatatgggatatgatcttctaaggaggttgcattattttgacctgatttatttattgtacaagagcccaagtccctgaattatattcttaataagtgctttcttgcattcatttcagtttagtctcaccaaccccctatgaattaggagaattattgtcattttacacatgaggaaagtgaggctgagagaatccaattagcttgtacgatatcactccataagagaagcaaatctgagagtaaaacccttaccccttattcttaagaatagtgcttgtttattcagtacaaaaaaaatgctgaaaggcagcgttttttagactctaaacattctgattttgaaggtgggtgttggaacgactgatgatgttttttatatcatcaattcagccaatggatgcgaacttaaaatctggattcacagaaccgtggtcacatttccccatcaaaatccccaaggcgggtcccaagttctctcctctacgctcattgcaggaaatacttggaaataggttctgccagtctacaatagcagtgaagactgacaaatcagatattcccaatgactgacagcttctcatcttgcctctacctcagttaagtaatgtcaccctgaaacctagcttttctgcacttccatttctgacacctgaaaatgaaaatgataatcctaacttatacaccaagacctgttagcaagatcgattttgtaacagaaattgcttataagttttttatcagtaaggaccatgatcaccatttgtacatacataactaggttgttgagcaaagcatttttgctcatgtttcttaaggaagtagagtagtccttgtgtcagaacacatgttaatccacaaaacgccgcatcccagattccaaattaaaacatcgtttttaggattcttggagctagcctggatcatgggtaaaggaaacattttgccttttgtatcttatactggaatgggatgtctgtaagtcctagaacctctttgagcatatttcttacaagcctctgttttttcccctttaaaggaaactttgaaaggattgtgaatactggaaaatgacaaaactaaaggtagatctatcaagcca

SEQ ID NO: 371300 - DNA, 2654 bp, Homo sapiens
agcggggcccttctcaagatggcgctgcactcaatgcggaaagcgcgtgagcgctggagcttcatccgggcacttcataagggatccgcagctgctcccgctctccagaaagacagcaagaagcgagtattttccggcattcaacctacaggaatcctccacctgggcaattacctgggagccattgagagctgggtgtctgaacacacacaattaagttggatcctttcctgcatggtcagactacctcgattacaacatttacatcagtggaaggcaaagactaccaagcagaagcacgatggcacggtgggcctgctcacatacccagtactccaggcagccgacattctgttgtacaagtccacacacgttcctgttggggaggatcaagtccagcacatggaactagttcaggatctagcacaaggtttcaacaagaagtatggggagttctttccagtgcccgagtccattctcagtatgtgtgtgttggtgtttttaacctagcatccatgaagaaggtaaaatccctacgtgatccttctgccaaaatgtcgaaatcagaccctgacaaactggccaccgtccgaataacagacagcccagaggagatagtgcagaaattccgcaaggctgtgacagacttcacctcggaggtcacctatgacccggctggccgcgctggcgtgtccaacatagtggcggtgcatgccgcggtgacggggctctccgtggaggaagtggtgcgccgcagcgcgggcatgaacactgctcgctacaagctggccgtggcagatgctgtgattgagaagtttgccccaattaagcgtgaaattgaaaaactgaagctggacaaggaccatttagagaaggttttacaaattggatcagcaaaagccaaagaattagcatacactgtgtgccaggaggtgaagaaattggtgggttttctataggaagtttcaacgaatcacagcaaggcttttgtgccttgcactccatgcattctgataacggcagctttcctaaaaagaaaaagttatagttttgggacatttaatttggtatagctgattattggctttatttgatgaatattgctttgtagctttgaaatacgacagtgttccaaatcccatcaacaaaatgctgtgaacaacaacaacaaaaaataaatcaagaaggcatagctgtctgaatccccaattattgaggcacactccttggcctgcagaaatgtgattgaagtaaggagtaatttgggaaatggagtatcatttgtgcttctctctggagtacttactgtaacagatgcacacgttatctacttcaacccttttataaagcaatatatagaggtcttagatgtataatccttgagatgccatttgatcagatgccaatttgtattcagagctcataaaaacaagtccattcttatagtttgtttgtcactgagacggtgcctgatttaatatatttaagctgcttaacttgttttccaagagataacaccaactgttccagcaataatttgttttttaattcagagatatgggatatgatcttctaaggaggttgcattattttgacctgatttatttattgtacaagagcccaagtccctgaattatattcttaataagtgctttcttgcattcatttcagtttagtctcaccaaccccctatgaattaggagaattattgtcattttacacatgaggaaagtgaggctgagagaatccaattagcttgtacgatatcactccataagagaagcaaatctgagagtaaaacccttaccccttattcttaagaatagtgcttgtttattcagtacaaaaaaaatgctgaaaggcagcgttttttagactctaaacattctgattttgaaggtgggtgttggaacgactgatgatgttttttatatcatcaattcagccaatggatgcgaacttaaaatctggattcacagaaccgtggtcacatttccccatcaaaatccccaaggcgggtcccaagttctctcctctacgctcattgcaggaaatacttggaaataggttctgccagtctacaatagcagtgaagactgacaaatcagatattcccaatgactgacagcttctcatcttgcctctacctcagttaagtaatgtcaccctgaaacctagcttttctgcacttccatttctgacacctgaaaatgaaaatgataatcctaacttatacaccaagacctgttagcaagatcgattttgtaacagaaattgcttataagttttttatcagtaaggaccatgatcaccatttgtacatacataactaggttgttgagcaaagcatttttgctcatgtttcttaaggaagtagagtagtccttgtgtcagaacacatgttaatccacaaaacgccgcatcccagattccaaattaaaacatcgtttttaggattcttggagctagcctggatcatgggtaaaggaaacattttgccttttgtatcttatactggaatgggatgtctgtaagtcctagaacctctttgagcatatttcttacaagcctctgttttttcccctttaaaggaaactttgaaaggattgtgaatactggaaaatgacaaaactaaaggtagatctatcaagcca

SEQ ID NO: 371301 - DNA, 3039 bp, Homo sapiens
  misc_feature (4)..(4): n is a, c, g, or t
  misc_feature (6)..(6): n is a, c, g, or t
  misc_feature (8)..(12): n is a, c, g, or t
  misc_feature (42)..(42): n is a, c, g, or t
  misc_feature (116)..(116): n is a, c, g, or t
tgcncngnnnnntcagaaaccaggatgcaacatctgtgcctngagcctctgctgctagatagcaacctaatgttgtaggggtgtgatgccgtggaccccttcttgaacccccaagntcgtcttgcatttggggctctagcatgcagctgcctgattgcccttgcagagcccacctccctgttatagaaacattatcacgactttctcgaacacctatagcattggccacaggaatcaggcccttcccaacagaagaaagcattaatgatgaagacatctacaaaggccttcctgatttaatagatgaaacccttgtggaagatgaagaagatctctatgactgtgtttatggggaagatgaaggtggagaagtctatgaggacttaatgaaggcagaggaagcacatcagcccaaatgtccagaaaatgatatacgaagttgttgtctagcagaaattaagcagacagaagaaaaatatacagaaactttggagtcaatagaaaagtatttcatggcaccactaaaaagatttctgacagcagcagaatttgattcagtattcatcaacattcctgaacttgtaaaacttcatcggaacctaatgcaagagattcatgattccattgtaaataaaaatgaccagaacttgtaccaagtttttattaactacaaggaaagattggttatttacgggcagtactgcagtggagtggagtcagccatctctagtttagactacatttctaagacaaaagaagatgtcaaactgaaattagaggaatgttccaaaagagcaaataatgggaaatttactcttcgagacttgcttgtggttcctatgcaacgtgttttaaagtaccaccttctcctccaggaactggtcaaacataccactgatccgactgagaaggcaaatctgaaactggctcttgatgccatgaaggacttggcacaatatgtgaatgaagtgaaaagagataatgagacccttcgtgaaattaaacagtttcagctatctatagagaatttgaaccaaccagttttgctttttggacgacctcagggagatggtgaaattcgaataaccactctagacaagcataccaaacaagaaaggcatatcttcttatttgatttggcagtgatcgtatgtaagagaaaaggtgataactatgaaatgaaggaaataatagatcttcagcagtacaagatagccaataatcctacaaccgataaagaaaacaaaaagtggtcttatggcttctacctcatccatacccaaggacaaaatgggttagaattttattgcaaaacaaaagatttaaagaagaaatggctagaacagtttgaaatggctttgtctaacataagaccagactatgcagactccaatttccacgacttcaagatgcataccttcactcgagtcacatcctgcaaagtctgccagatgctcctgaggggaacattttatcaaggctatttatgttttaagtgtggagcgagagcacacaaagaatgtttgggaagagtagacaattgtggcagagttaattctggtgaacaagggacactcaaactaccagagaaacggaccaatggactgcgaagaactcctaaacaggtggatccaggtttaccaaagatgcaggtcattaggaactattctggaacaccacccccagctctgcatgaaggaccccctttacagctccaggccggggataccgttgaacttctgaaaggagatgcacacagtctgttttggcagggcagaaatttagcatctggagaggttggattttttccaagtgatgcagtcaagccttgcccatgtgtgcccaaaccagtagattattcttgccaaccctggtatgctggagcaatggaaagattgcaagcagagaccgaacttattaatagggtaaatagtacttaccttgtgaggcacaggaccaaagagtcaggagaatatgcaattagcattaagtacaataatgaagcaaagcacatcaagattttaacaagagatggcttttttcacattgcagaaaatagaaaatttaaaagtttaatggaacttgtggagtactacaagcatcattctctcaaggaagggttcagaaccttagatacaactctgcagtttccatacaaggagccagaacattcagctggacagaggggtaatagagcaggcaacagcttgttaagtccaaaagtgctgggcattgccatcgctcggtatgacttctgtgcaagagatatgagagagttgtccttgttgaaaggagatgtggtgaagatttacacaaagatgagtgcaaatggctggtggagaggagaagtaaatggcagggtgggctggtttccatccacatatgtggaagaggatgaataaattcaaatcccgtgttgcaccctgcaccaaaaatttcagagaagggataaatagaagcctgcacagcatcgtgaattaactgaagtgtttaaaaagctgcatttctggctgttcaacatcctccctccttagcccctcctaagtcttaatgctgagatttctaaagatgctggtactgacagattaatggcttgcctagagctgtgcaagaaacagcctgccagtctgtcattgtcagggaccagggcaaaaccaagagctgttcttcccagaagagccctgcaaacacattggttcgtgcttccctttacttcttctggtcagataccatgaatgccagtcatcagtaaatcttaatacacttttgctttattctcacatgccattcaccagattatttgatggtacaaagaagcagaagtgtaattttccttttcccagcatgacgaaaaattggagttctgccatttgagcagcttactggaaagatccagccttacttgtcttaaattgtccaacaaggtgactcattgcccggcaaacacttttaccctcagatgttactcatgatgcaaacgctgagcactggcctcatattttatctcagcagagcaccagcacgattcccggtatcctc

SEQ ID NO: 371302 - DNA, 520 bp, Homo sapiens
  misc_feature (27)..(27): n is a, c, g, or t
  misc_feature (45)..(45): n is a, c, g, or t
tgtttccctttgtctgggctgatctcnaattcctggtttcaagcnatcctctgcctcagccctctgagtatctgggactacaggcgcacactactgcacccagctaatgtttaaaatttttgcttttttaaaaagatatggtctcactttttgcccagcctggtttgaactcctgagttcaagcagtccttgagccttggcctctcaaaacttctgggattataggcatgagctgctgcacctagccaaataaaaaatctcatttcacagggtacattcattcaatctttttcttttcaaaatccaacacaactctgaaatagagatttcttctttttctttaatactctgtggatattttccaagtggaaaaagtggtgaatttgctttcccattacacatattttagatgaggcctcttgtacatattgagagtatatttgttctcaaatgactttaaatgttttgtcaacattttttttttattggtaaaccaaagagtttgctgggttttagacaa

SEQ ID NO: 371303 - DNA, 1255 bp, Homo sapiens
cgggccaagaaaaccagcgaaggcccggccccccagcagaggccggaccatggttgaccagttgcgggagcgcaccaccatggccgacccgctgcgggagcgcaccgagctgttgctggccgactacctggggtactgcgcccgggaacccggcacccccgagccggcgccatccacgcccgaggccgccgtgctgcgctccgcggccgccaggttacggcagattcaccggtcctttttctccgcctacctcggctaccccgggaaccgcttcgagctggtggcgctgatggcggattccgtgctctccgacagccccggccccacctggggcagagtggtgacgctcgtgaccttcgcagggacgctgctggagagagggccgctggtgaccgcccggtggaagaagtggggcttccagccgcggctaaaggagcaggagggcgacgtcgcccgggactgccagcgcctggtggccttgctgagctcgcggctcatggggcagcaccgcgcctggctgcaggctcagggcggctgggatggcttttgtcacttcttcaggaccccctttccactggctttttggagaaaacagctggtccaggcttttctgtcatgcttgttaacaacagccttcatttatctctggacacgattattatgagttttaaaacttttaacccgcttctacctgcccaactgtgaccaactaaatgacagatgtgtgagaacaagaactgagggaaagcaccttcccccaccccagacgtttttatctgaatgcatacaaggagtcctgaggtggtgatttggccagtgttttaacttgtgacaagtactcaggtgtgaggacaagaatgcaaatggctcttccttgagtgaaagaaatggggagtctagagcctctttatgccaaagaaccgcagaagaaactgcattccattaaatgggaaatacagtgctatttgcctaaaacttggataagagtgcgaacctctcatctctccacaacttcatgtgctgctgactaattttaaacatggccacagctggggcaaaataatccccaaagtagaaaaagtcccagtttaacaaagaatgtaatgttaaaatcacttataaggaattctttgaaaccaaatcctttgaaatctaattcctgggacttctaggtttttatagttaacatactaatttcttcaataattgttaactgcaaagttttaataaatttgtacctttaaaaaaaaattag

SEQ ID NO: 371304 - DNA, 1390 bp, Homo sapiens
ttttttaagactcatggacatagctttaattatctttgcctgacgcccaatacctgaaaattaagatgttcatgcaagataaagaggtaatttttctcctcctcccagtcatcacccgtagcatccggttaagaggctctccacctcgctcattttggtctaactggatttacacaaactcactgtgcacgtgcctggggcgggcaaacccggaaacgacgccgagtcccgcgggatccaggaggagccaactgcgccggaggaggggtttcggccgacacgtcgggattggcggctgcagccaggggtcctccgacgctgggcttccgtgagcggcgctctgccagatctctggaccggattcgtcccattctcgtcctcatggtggacaagaaactggtggtggttttcggaggcacaggtgcccagggtggctccgtggcccgcacactcctggaagatgggacattcaaggttcgagtggtgacccgaaaccctaggaagaaggcagcaaaggagctgaggctgcaaggtgcagaagtagtgcagggagaccaagatgaccaggtcatcatggagctggccctgaatggggcttacgccaccttcatcgtgaccaattactgggagagctgcagccaggagcaggaggtcaagcaggggaagctgctcgctgatctggccaggcgcctgggcctccactatgtggtctacagcggcctggagaacatcaagaagctgacggcagggagattggccgccgcgcactttgacggcaaaggggaggtggaggaatatttccgggacattggcgttcccatgaccagtgtgcggctgccctgctattttgagaacctcctctcccacttcttgccccagaaagccccagacggaaagagctacttgctgagcttgcccacaggtgacgttcccatggatggcatgtccgtgtctgacctgggtcctgtggtgctcagccttttgaagatgccagaaaaatacgtcggccagaacatcgggctgagcacttgcaggcacacggccgaggagtacgctgccctgctcaccaagcacacccgcaaggtcgtgcacgatgccaagatgactcctgaggactacgaaaagcttggctttcccggtgcccgggacctggccaacatgttccgtttctatgccctgagacccgaccgtgacatcgagctgaccctgagactcaaccccaaggccctgacgctggaccagtggctggaacagcacaaaggggacttcaacctgctgtgacctgcccgcctcgcggccccttgtggggatcgggggcaccagaggggcagaggcaccaacatctgaataaagccattgttctcccagatggcttccaggagaagaggac

SEQ ID NO: 371305 - DNA, 742 bp, Homo sapiens
cggacgcgtgggtcgacccacgcgtccgcggacgcgttgggtcgcggacgcgtgggtcagaacatcaagaagctgacggcagggagattggccgccgcgcactttgacggcaaaggggaggtggaggaatatttccgggacattggcgttcccatgaccagtgtgcggctgccctgctattttgagaacctcctctcccacttcttgccccagaaagccccagacggaaagagctacttgctgagcttgcccacaggtgacgttcccatggatggcatgtccgtgtctgacctgggtcctgtggtgctcagccttttgaagatgccagaaaaatacgtcggccagaacatcgggctgagcacttgcaggcacacggccgaggagtacgctgccctgctcaccaagcacacccgcaaggtcgtgcacgatgccaaggtgggcctcccgccccagatgactcctgaggactacgaaaagcttggctttcccggtgcccgggacctggccaacatgttccgtttctatgccctgagacccgaccgtgacatcgagctgaccctgagactcaaccccaaggccctgacgctggaccagtggctggaacagcacaaaggggacttcaacctgctgtgacctgcccgcctcgcggccccttgtggggatcgggggcaccagaggggcagaggcaccaacatctgaataaagccattgttctcccagatggcttccaggagaagaggac

SEQ ID NO: 371306 - DNA, 1156 bp, Homo sapiens
  misc_feature (22)..(22): n is a, c, g, or t
  misc_feature (24)..(24): n is a, c, g, or t
  misc_feature (27)..(27): n is a, c, g, or t
tgtgtcgtggtacggtcggaancnttngatggggtttcggccgacacgtcgggattggcggctgcagccaggggtcctccgacgctgggcttccgtgagcggcgctctgccagatctctggaccggattcgtcccattctcgtcctcatggtggacaagaaactggtggtggttttcggaggcacaggtgcccagggtggctccgtggcccgcacactcctggaagatgggacattcaaggttcgagtggtgacccgaaaccctaggaagaaggcagcaaaggagctgaggctgcaaggtgcagaagtagtgcagggagaccaagatgaccaggtcatcatggagctggccctgaatggggcttacgccaccttcatcgtgaccaattactgggagagctgcagccaggagcaggaggtcaagcaggggaagctgctcgctgatctggccaggcgcctgggcctccactatgtggtctacagcggcctggagaacatcaagaagctgacggcagggagattggccgccgcgcactttgacggcaaaggggaggtggaggaatatttccgggacattggcgttcccatgaccagtgtgcggctgccctgctattttgagaacctcctctcccacttcttgccccagaaagccccagacggaaagagctacttgctgagcttgcccacaggtgacgttcccatggatggcatgtccgtgtctgacctgggtcctgtggtgctcagccttttgaagatgccagaaaaatacgtcggccagaacatcgggctgagcacttgcaggcacacggccgaggagtacgctgccctgctcaccaagcacacccgcaaggtcgtgcacgatgccaagatgactcctgaggactacgaaaagcttggctttcccggtgcccgggacctggccaacatgttccgtttctatgccctgagacccgaccgtgacatcgagctgaccctgagactcaaccccaaggccctgacgctggaccagtggctggaacagcacaaaggggacttcaacctgctgtgacctgcccgcctcgcggccccttgtggggatcgggggcaccagaggggcagaggcaccaacatctgaataaagccattgttctcccagatggcttccaggagaagaggac

SEQ ID NO: 371307 - DNA, 1948 bp, Homo sapiens
ttttttaagactcatggacatagctttaattatctttgcctgacgcccaatacctgaaaattaagatgttcatgcaagataaagaggtaatttttctcctcctcccagtcatcacccgtagcatccggttaagaggctctccacctcgctcattttggtctaactggatttacacaaactcactgtgcacgtgcctggggcgggcaaacccggaaacgacgccgagtcccgcgggatccaggaggagccaactgcgccggaggaggggtttcggccgacacgtcgggattggcggctgcagccaggggtcctccgacgctgggcttccgtgagcggcgctctgccagccggagctgcggggagggagttggcgcctagcgcgcagctccatccccgcctctgcagtggactcggccgcagaatcggggtcccgggctcctggaacttgtcccgcccaggccgcggcgaggaggtcactccagccgcggtgggacccgggccggggggcgggtgactggaaccgggggaggcgggaaggaggaggggatcgggcccaagggacacgaggtgggtcgcgggaccccgatatctcgggacaggcgtcttgccgctccgggcccagccgcccccttcgacacatactcgatgcatagacaatgggggtgtcctttgtcgctcctggcgggaaccccggccccacccccaactccacgcctcccattacccccagatctctggaccggattcgtcccattctcgtcctcatggtggacaagaaactggtggtggttttcggaggcacagaggcggggtttcaccaagccaagatcgtgccactgcacttcagcctgggtgatagagtgagactccatctcaaaaaaataaaataaagtgtggtggagcactcccttcggggtttcgcccttcagtgggactttcaggtaggtctgacctgagaggtctttttgattctttgtaggtgcccagggtggctccgtggcccgcacactcctggaagatgggacattcaaggttcgagtggtgacccgaaaccctaggaagaaggcagcaaaggagctgaggctgcaaggtgcagaagtagtgcagggagaccaagatgaccaggtcatcatggagctggccctgaatggggcttacgccaccttcatcgtgaccaattactgggagagctgcagccaggagcaggaggtcaagcaggggaagctgctcgctgatctggccaggcgcctgggcctccactatgtggtctacagcggcctggagaacatcaagaagctgacggcagggagattggccgccgcgcactttgacggcaaaggggaggtggaggaatatttccgggacattggcgttcccatgaccagtgtgcggctgccctgctattttgagaacctcctctcccacttcttgccccagaaagccccagacggaaagagctacttgctgagcttgcccacaggtgacgttcccatggatggcatgtccgtgtctgacctgggtcctgtggtgctcagccttttgaagatgccagaaaaatacgtcggccagaacatcgggctgagcacttgcaggcacacggccgaggagtacgctgccctgctcaccaagcacacccgcaaggtcgtgcacgatgccaagatgactcctgaggactacgaaaagcttggctttcccggtgcccgggacctggccaacatgttccgtttctatgccctgagacccgaccgtgacatcgagctgaccctgagactcaaccccaaggccctgacgctggaccagtggctggaacagcacaaaggggacttcaacctgctgtgacctgcccgcctcgcggccccttgtggggatcgggggcaccagaggggcagaggcaccaacatctgaataaagccattgttctcccagatggcttccaggagaagaggac

SEQ ID NO: 371308 - DNA, 1621 bp, Homo sapiens
ttttttaagactcatggacatagctttaattatctttgcctgacgcccaatacctgaaaattaagatgttcatgcaagataaagaggtaatttttctcctcctcccagtcatcacccgtagcatccggttaagaggctctccacctcgctcattttggtctaactggatttacacaaactcactgtgcacgtgcctggggcgggcaaacccggaaacgacgccgagtcccgcgggatccaggaggagccaactgcgccggaggaggggtttcggccgacacgtcgggattggcggctgcagccaggggtcctccgacgctgggcttccgtgagcggcgctctgccagccggagctgcggggagggagttggcgcctagcgcgcagctccatccccgcctctgcagtggactcggccgcagaatcggggtcccgggctcctggaacttgtcccgcccaggccgcggcgaggaggtcactccagccgatctctggaccggattcgtcccattctcgtcctcatggtggacaagaaactggtggtggttttcggaggcacagagatatggtttcaccatgttgcccaggctggtctcaaactcctgagctcaagagatctgcgtgcctcagcctcccaaagtgtctggattacaggtgcccagggtggctccgtggcccgcacactcctggaagatgggacattcaaggttcgagtggtgacccgaaaccctaggaagaaggcagcaaaggagctgaggctgcaaggtgcagaagtagtgcagggagaccaagatgaccaggtcatcatggagctggccctgaatggggcttacgccaccttcatcgtgaccaattactgggagagctgcagccaggagcaggaggtcaagcaggggaagctgctcgctgatctggccaggcgcctgggcctccactatgtggtctacagcggcctggagaacatcaagaagctgacggcagggagattggccgccgcgcactttgacggcaaaggggaggtggaggaatatttccgggacattggcgttcccatgaccagtgtgcggctgccctgctattttgagaacctcctctcccacttcttgccccagaaagccccagacggaaagagctacttgctgagcttgcccacaggtgacgttcccatggatggcatgtccgtgtctgacctgggtcctgtggtgctcagccttttgaagatgccagaaaaatacgtcggccagaacatcgggctgagcacttgcaggcacacggccgaggagtacgctgccctgctcaccaagcacacccgcaaggtcgtgcacgatgccaagatgactcctgaggactacgaaaagcttggctttcccggtgcccgggacctggccaacatgttccgtttctatgccctgagacccgaccgtgacatcgagctgaccctgagactcaaccccaaggccctgacgctggaccagtggctggaacagcacaaaggggacttcaacctgctgtgacctgcccgcctcgcggccccttgtggggatcgggggcaccagaggggcagaggcaccaacatctgaataaagccattgttctcccagatggcttccaggagaagaggac

SEQ ID NO: 371309 - DNA, 1664 bp, Homo sapiens
ttttttaagactcatggacatagctttaattatctttgcctgacgcccaatacctgaaaattaagatgttcatgcaagataaagaggtaatttttctcctcctcccagtcatcacccgtagcatccggttaagaggctctccacctcgctcattttggtctaactggatttacacaaactcactgtgcacgtgcctggggcgggcaaacccggaaacgacgccgagtcccgcgggatccaggaggagccaactgcgccggaggaggggtttcggccgacacgtcgggattggcggctgcagccaggggtcctccgacgctgggcttccgtgagcggcgctctgccagccggagctgcggggagggagttggcgcctagcgcgcagctccatccccgcctctgcagtggactcggccgcagaatcggggtcccgggctcctggaacttgtcccgcccaggccgcggcgaggaggtcactccagccgatctctggaccggattcgtcccattctcgtcctcatggtggacaagaaactggtggtggttttcggaggcacagagatatggtttcaccatgttgcccaggctggtctcaaactcctgagctcaagagatctgcgtgcctcagcctcccaaagtgtctggattacaggcatgagcccctgggcccagctgcaacgcgcaaaatcttaagggtgcccagggtggctccgtggcccgcacactcctggaagatgggacattcaaggttcgagtggtgacccgaaaccctaggaagaaggcagcaaaggagctgaggctgcaaggtgcagaagtagtgcagggagaccaagatgaccaggtcatcatggagctggccctgaatggggcttacgccaccttcatcgtgaccaattactgggagagctgcagccaggagcaggaggtcaagcaggggaagctgctcgctgatctggccaggcgcctgggcctccactatgtggtctacagcggcctggagaacatcaagaagctgacggcagggagattggccgccgcgcactttgacggcaaaggggaggtggaggaatatttccgggacattggcgttcccatgaccagtgtgcggctgccctgctattttgagaacctcctctcccacttcttgccccagaaagccccagacggaaagagctacttgctgagcttgcccacaggtgacgttcccatggatggcatgtccgtgtctgacctgggtcctgtggtgctcagccttttgaagatgccagaaaaatacgtcggccagaacatcgggctgagcacttgcaggcacacggccgaggagtacgctgccctgctcaccaagcacacccgcaaggtcgtgcacgatgccaagatgactcctgaggactacgaaaagcttggctttcccggtgcccgggacctggccaacatgttccgtttctatgccctgagacccgaccgtgacatcgagctgaccctgagactcaaccccaaggccctgacgctggaccagtggctggaacagcacaaaggggacttcaacctgctgtgacctgcccgcctcgcggccccttgtggggatcgggggcaccagaggggcagaggcaccaacatctgaataaagccattgttctcccagatggcttccaggagaagaggac

SEQ ID NO: 371310 - DNA, 1503 bp, Homo sapiens
ttttttaagactcatggacatagctttaattatctttgcctgacgcccaatacctgaaaattaagatgttcatgcaagataaagaggtaatttttctcctcctcccagtcatcacccgtagcatccggttaagaggctctccacctcgctcattttggtctaactggatttacacaaactcactgtgcacgtgcctggggcgggcaaacccggaaacgacgccgagtcccgcgggatccaggaggagccaactgcgccggaggaggggtttcggccgacacgtcgggattggcggctgcagccaggggtcctccgacgctgggcttccgtgagcggcgctctgccagccggagctgcggggagggagttggcgcctagcgcgcagctccatccccgcctctgcagtggactcggccgcagaatcggggtcccgggctcctggaacttgtcccgcccaggccgcggcgaggaggtcactccagccgatctctggaccggattcgtcccattctcgtcctcatggtggacaagaaactggtggtggttttcggaggcacaggtgcccagggtggctccgtggcccgcacactcctggaagatgggacattcaaggttcgagtggtgacccgaaaccctaggaagaaggcagcaaaggagctgaggctgcaaggtgcagaagtagtgcagggagaccaagatgaccaggtcatcatggagctggccctgaatggggcttacgccaccttcatcgtgaccaattactgggagagctgcagccaggagcaggaggtcaagcaggggaagctgctcgctgatctggccaggcgcctgggcctccactatgtggtctacagcggcctggagaacatcaagaagctgacggcagggagattggccgccgcgcactttgacggcaaaggggaggtggaggaatatttccgggacattggcgttcccatgaccagtgtgcggctgccctgctattttgagaacctcctctcccacttcttgccccagaaagccccagacggaaagagctacttgctgagcttgcccacaggtgacgttcccatggatggcatgtccgtgtctgacctgggtcctgtggtgctcagccttttgaagatgccagaaaaatacgtcggccagaacatcgggctgagcacttgcaggcacacggccgaggagtacgctgccctgctcaccaagcacacccgcaaggtcgtgcacgatgccaagatgactcctgaggactacgaaaagcttggctttcccggtgcccgggacctggccaacatgttccgtttctatgccctgagacccgaccgtgacatcgagctgaccctgagactcaaccccggccgaggagtacgctgccctgctcaccaagcacacccgcaaggtcgcgcacgatgccaagatgactcctgaggactacgaaaagcttggctttcccggtgcccgggacctggccaacatgttccgtttctatgccctgagacc

SEQ ID NO: 371311 - DNA, 1621 bp, Homo sapiens
ttttttaagactcatggacatagctttaattatctttgcctgacgcccaatacctgaaaattaagatgttcatgcaagataaagaggtaatttttctcctcctcccagtcatcacccgtagcatccggttaagaggctctccacctcgctcattttggtctaactggatttacacaaactcactgtgcacgtgcctggggcgggcaaacccggaaacgacgccgagtcccgcgggatccaggaggagccaactgcgccggaggaggggtttcggccgacacgtcgggattggcggctgcagccaggggtcctccgacgctgggcttccgtgagcggcgctctgccagccggagctgcggggagggagttggcgcctagcgcgcagctccatccccgcctctgcagtggactcggccgcagaatcggggtcccgggctcctggaacttgtcccgcccaggccgcggcgaggaggtcactccagccgatctctggaccggattcgtcccattctcgtcctcatggtggacaagaaactggtggtggttttcggaggcacaggtgcccagggtggctccgtggcccgcacactcctggaagatgggacattcaaggttcgagtggtgacccgaaaccctaggaagaaggcagcaaaggagctgaggctgcaaggtgcagaagtagtgcagggagaccaagatgaccaggtcatcatggagctggccctgaatggggcttacgccaccttcatcgtgaccaattactgggagagctgcagccaggagcaggaggtcaagcaggggaagctgctcgctgatctggccaggcgcctgggcctccactatgtggtctacagcggcctggagaacatcaagaagctgacggcagggagattggccgccgcgcactttgacggcaaaggggaggtggaggaatatttccgggacattggcgttcccatgaccagtgtgcggctgccctgctattttgagaacctcctctcccacttcttgccccagaaagccccagacggaaagagctacttgctgagcttgcccacaggtgacgttcccatggatggcatgtccgtgtctgacctgggtcctgtggtgctcagccttttgaagatgccagaaaaatacgtcggccagaacatcgggctgagcacttgcaggcacacggccgaggagtacgctgccctgctcaccaagcacacccgcaaggtcgtgcacgatgccaaggagctaactggccacagagtgaaatttctggcttagatgttttgaccaaatagagagaaaagcttccaggaggagagggccataggagccaagatgactcctgaggactacgaaaagcttggctttcccggtgcccgggacctggccaacatgttccgtttctatgccctgagacccgaccgtgacatcgagctgaccctgagactcaaccccaaggccctgacgctggaccagtggctggaacagcacaaaggggacttcaacctgctgtgacctgcccgcctcgcggccccttgtggggatcgggggcaccagaggggcagaggcaccaacatctgaataaagccattgttctcccagatggcttccaggagaagaggac

SEQ ID NO: 371312 - DNA, 2034 bp, Homo sapiens
ttttttaagactcatggacatagctttaattatctttgcctgacgcccaatacctgaaaattaagatgttcatgcaagataaagaggtaatttttctcctcctcccagtcatcacccgtagcatccggttaagaggctctccacctcgctcattttggtctaactggatttacacaaactcactgtgcacgtgcctggggcgggcaaacccggaaacgacgccgagtcccgcgggatccaggaggagccaactgcgccggaggaggggtttcggccgacacgtcgggattggcggctgcagccaggggtcctccgacgctgggcttccgtgagcggcgctctgccagccggagctgcggggagggagttggcgcctagcgcgcagctccatccccgcctctgcagtggactcggccgcagaatcggggtcccgggctcctggaacttgtcccgcccaggccgcggcgaggaggtcactccagccgatctctggaccggattcgtcccattctcgtcctcatggtggacaagaaactggtggtggttttcggaggcacaggtgcccagggtggctccgtggcccgcacactcctggaagatgggacattcaaggttcgagtggtgacccgaaaccctaggaagaaggcagcaaaggagctgaggctgcaaggtgcagaagtagtgcagggagaccaagatgaccaggtcatcatggagctggccctgaatggggcttacgccaccttcatcgtgaccaattactgggagagctgcagccaggagcaggaggtcaagcaggggaagctgctcgctgatctggccaggcgcctgggcctccactatgtggtctacagcggcctggagaacatcaagaagctgacggcagggagattggccgccgcgcactttgacggcaaaggggaggtggaggaatatttccgggacattggcgttcccatgaccagtgtgcggctgccctgctattttgagaacctcctctcccacttcttgccccagaaagccccagacggaaagagctacttgctgagcttgcccacaggtgacgttcccatggatggcatgtccgtgtctgacctgggtcctgtggtgctcagccttttgaagatgccagaaaaatacgtcggccagaacatcgggctgagcacttgcaggcacacggccgaggagtacgctgccctgctcaccaagcacacccgcaaggtcgtgcacgatgccaaggtgggcctcccgccccaggtgactcaggcatccttgtcagggctttctagctcccgtagggagggtgtgtccagggctgcccacacctctgggcagtacatctaaattcattcgttcatcgtcaacgtttattttctgctgttccaggagctaactggccacagagtgaaatttctggcttagatgttttgaccaaatagagagaaaagcttccaggaggagagggccataggagccaaggcaaggaggggtgaaaatgcaggccctgccgggctcctctgtgggagggaatttgaagagaaaagagtctggaaagatagacccgacccctcccctgtgggaggggatttaaagggaaagaggctagaaagatagggccgacccctgcccccattggcctggctgggtgggcaggaggcctactggacagactcttgggtacctggtttctaatgtttgtcattaccattaggaaagtaagacatactcattaaagaatctgggaggctgggtgcagtagctcacgcctgtagtcccagcactttgggaggccgaggcaggtggatcacctgaggtcaggagtttgaggccagcctggccaacagggtgaaaccccatctctactaaaaataaacaaattagccgggtgtggtggcaggcgcctgtaatcccagctacttgggaggctgaggcaagagaatcgcttgaactcaggaggcagagtttgcagcgagccgagatgccactgcactccagactgggcgacagagcgagactccaactccaaaaaaaaaa

SEQ ID NO: 371313 - DNA, 346 bp, Homo sapiens
cggtaccggcagcgtactcctcggccgtgtgcccgcaaggtcgtgcacgatgccaagatgactcctgaggactacgaaaagcttggctttcccggtgcccgggacctggccaacatgttccgtttctatgccctgagacccgaccgtgacatcgagctgaccctgagactcaaccccaaggccctgacgctggaccagtggctggaacagcacaaaggggacttcaacctgctgtgacctgcccgcctcgcggccccttgtggggatcgggggcaccagaggggcagaggcaccaacatctgaataaagccattgttctcccagatggcttccaggagaagaggac

SEQ ID NO: 371314 - DNA, 676 bp, Homo sapiens
ttttttaagactcatggacatagctttaattatctttgcctgacgcccaatacctgaaaattaagatgttcatgcaagataaagaggtaatttttctcctcctcccagtcatcacccgtagcatccggttaagaggctctccacctcgctcattttggtctaactggatttacacaaactcactgtgcacgtgcctggggcgggcaaacccggaaacgacgccgagtcccgcgggatccaggaggagccaactgcgccggaggaggggtttcggccgacacgtcgggattggcggctgcagccaggggtcctccgacgctgggcttccgtgagcggcgctctgccagccggagctgcggggagggagttggcgcctagcgcgcagctccatccccgcctctgcagtggactcggccgcagaatcggggtcccgggctcctggaacttgtcccgcccaggccgcggcgaggaggtcactccagccgcggtgggacccgggccggggggcgggtgactggaaccgggggaggcgggaaggaggaggggatcgggcccaagggacacgaggtgggtcgcgggaccccgatatctcgggacaggcgtcttgccgctccgggcccagccgcccccttcgacacatactcgatgcatctgaataaagccattaaactcccaa

SEQ ID NO: 371315 - DNA, 564 bp, Homo sapiens
agtgcagggattacgggcatgagccacagcatctggccaagaacaatctttaaactgatctacaatgtcaggcagctcaggagagcagcagtttctgaactttcggctcttagaagttttcaaatgaccttgtacggaggacctgggtcagggaccgagacaatagtggctctgggtgtagcaggtcgggagaccccagcccatccggcctccctgccccgccacctcccggggcactggaggacgccggccacgacaggctcctctgcttccagatgactcctgaggactacgaaaagcttggctttcccggtgcccgggacctggccaacatgttccgtttctatgccctgagacccgaccgtgacatcgagctgaccctgagactcaaccccaaggccctgacgctggaccagtggctggaacagcacaaaggggacttcaacctgctgtgacctgcccgcctcgcggccccttgtggggatcgggggcaccagaggggcagaggcaccaacatctgaataaagccattgttctcccagatggcttccaggagaagaggac

SEQ ID NO: 371316 - DNA, 1528 bp, Homo sapiens
ttttttaagactcatggacatagctttaattatctttgcctgacgcccaatacctgaaaattaagatgttcatgcaagataaagaggtaatttttctcctcctcccagtcatcacccgtagcatccggttaagaggctctccacctcgctcattttggtctaactggatttacacaaactcactgtgcacgtgcctggggcgggcaaacccggaaacgacgccgagtcccgcgggatccaggaggagccaactgcgccggaggaggggtttcggccgacacgtcgggattggcggctgcagccaggggtcctccgacgctgggcttccgtgagcggcgctctgccagccggagctgcggggagggagttggcgcctagcgcgcagctccatccccgcctctgcagtggactcggccgcagaatcggggtcccgggctcctggaacttgtcccgcccaggccgcggcgaggaggtcactccagccgatctctggaccggattcgtcccattctcgtcctcatggtggacaagaaactggtggtggttttcggaggcacaggtgcccagggtggctccgtggcccgcacactcctggaagatgggacattcaaggttcgagtggtgacccgaaaccctaggaagaaggcagcaaaggagctgaggctgcaaggtgcagaagtagtgcagggagaccaagatgaccaggtcatcatggagctggccctgaatggggcttacgccaccttcatcgtgaccaattactgggagagctgcagccaggagcaggaggtcaagcaggggaagctgctcgctgatctggccaggcgcctgggcctccactatgtggtctacagcggcctggagaacatcaagaagctgacggcagggagattggccgccgcgcactttgacggcaaaggggaggtggaggaatatttccgggacattggcgttcccatgaccagtgtgcggctgccctgctattttgagaacctcctctcccacttcttgccccagaaagccccagacggaaagagctacttgctgagcttgcccacaggtgacgttcccatggatggcatgtccgtgtctgacctgggtcctgtggtgctcagccttttgaagatgccagaaaaatacgtcggccagaacatcgggctgagcacttgcaggcacacggccgaggagtacgctgccctgctcaccaagcacacccgcaaggtcgtgcacgatgccaagatgactcctgaggactacgaaaagcttggctttcccggtgcccgggacctggccaacatgttccgtttctatgccctgagacccgaccgtgacatcgagctgaccctgagactcaaccccaaggccctgacgctggaccagtggctggaacagcacaaaggggacttcaacctgctgtgacctgcccgcctcgcggccccttgtggggatcgggggcaccagaggggcagaggcaccaacatctgaataaagccattgttctcccagatggcttccaggagaagaggac

SEQ ID NO: 371317 - DNA, 1727 bp, Homo sapiens
agcggagtatgtggctttccccaggtctctggaggttgcaggctcaggctctgctcagcgggtcatcacccgtagcatccggttaagaggctctccacctcgctcattttggtctaactggatttacacaaactcactgtgcacgtgcctggggcgggcaaacccggaaacgacgccgagtcccgcgggatccaggaggagccaactgcgccggaggaggggtttcggccgacacgtcgggattggcggctgcagccaggggtcctccgacgctgggcttccgtgagcggcgctctgccagccggagctgcggggagggagttggcgcctagcgcgcagctccatccccgcctctgcagtggactcggccgcagaatcggggtcccgggctcctggaacttgtcccgcccaggccgcggcgaggaggtcactccagccgcggtgggacccgggccggggggcgggtgactggaaccgggggaggcgggaaggaggaggggatcgggcccaagggacacgaggtgggtcgcgggaccccgatatctcgggacaggcgtcttgccgctccgggcccagccgcccccttcgacacatactcgatgcatagacaatgggggtgtcctttgtcgctcctggcgggaaccccggccccacccccaactccacgcctcccattacccccagatctctggaccggattcgtcccattctcgtcctcatggtggacaagaaactggtggtggttttcggaggcacaggtgcccagggtggctccgtggcccgcacactcctggaagatgggacattcaaggttcgagtggtgacccgaaaccctaggaagaaggcagcaaaggagctgaggctgcaaggtgcagaagtagtgcagggagaccaagatgaccaggtcatcatggagctggccctgaatggggcttacgccaccttcatcgtgaccaattactgggagagctgcagccaggagcaggaggtcaagcaggggaagctgctcgctgatctggccaggcgcctgggcctccactatgtggtctacagcggcctggagaacatcaagaagctgacggcagggagattggccgccgcgcactttgacggcaaaggggaggtggaggaatatttccgggacattggcgttcccatgaccagtgtgcggctgccctgctattttgagaacctcctctcccacttcttgccccagaaagccccagacggaaagagctacttgctgagcttgcccacaggtgacgttcccatggatggcatgtccgtgtctgacctgggtcctgtggtgctcagccttttgaagatgccagaaaaatacgtcggccagaacatcgggctgagcacttgcaggcacacggccgaggagtacgctgccctgctcaccaagcacacccgcaaggtcgtgcacgatgccaagatgactcctgaggactacgaaaagcttggctttcccggtgcccgggacctggccaacatgttccgtttctatgccctgagacccgaccgtgacatcgagctgaccctgagactcaaccccaaggccctgacgctggaccagtggctggaacagcacaaaggggacttcaacctgctgtgacctgcccgcctcgcggccccttgtggggatcgggggcaccagaggggcagaggcaccaacatctgaataaagccattgttctcccagatggcttccaggagaagaggac

SEQ ID NO: 371318 - DNA, 2006 bp, Homo sapiens
ttttttaagactcatggacatagctttaattatctttgcctgacgcccaatacctgaaaattaagatgttcatgcaagataaagaggtaatttttctcctcctcccagtcatcacccgtagcatccggttaagaggctctccacctcgctcattttggtctaactggatttacacaaactcactgtgcacgtgcctggggcgggcaaacccggaaacgacgccgagtcccgcgggatccaggaggagccaactgcgccggaggaggggtttcggccgacacgtcgggattggcggctgcagccaggggtcctccgacgctgggcttccgtgagcggcgctctgccagccggagctgcggggagggagttggcgcctagcgcgcagctccatccccgcctctgcagtggactcggccgcagaatcggggtcccgggctcctggaacttgtcccgcccaggccgcggcgaggaggtcactccagccgcggtgggacccgggccggggggcgggtgactggaaccgggggaggcgggaaggaggaggggatcgggcccaagggacacgaggtgggtcgcgggaccccgatatctcgggacaggcgtcttgccgctccgggcccagccgcccccttcgacacatactcgatgcatagacaatgggggtgtcctttgtcgctcctggcgggaaccccggccccacccccaactccacgcctcccattacccccagatctctggaccggattcgtcccattctcgtcctcatggtggacaagaaactggtggtggttttcggaggcacagaggcggggtttcaccaagccaagatcgtgccactgcacttcagcctgggtgatagagtgagactccatctcaaaaaaataaaataaagaaaataaaaatacctgaatgagaatcgtcgttgagaaggtttcctggatgctccttgctgtggtggagcactcccttcggggtttcgcccttcagtgggactttcaggtaggtctgacctgagaggtctttttgattctttgtaggtgcccagggtggctccgtggcccgcacactcctggaagatgggacattcaaggttcgagtggtgacccgaaaccctaggaagaaggcagcaaaggagctgaggctgcaaggtgcagaagtagtgcagggagaccaagatgaccaggtcatcatggagctggccctgaatggggcttacgccaccttcatcgtgaccaattactgggagagctgcagccaggagcaggaggtcaagcaggggaagctgctcgctgatctggccaggcgcctgggcctccactatgtggtctacagcggcctggagaacatcaagaagctgacggcagggagattggccgccgcgcactttgacggcaaaggggaggtggaggaatatttccgggacattggcgttcccatgaccagtgtgcggctgccctgctattttgagaacctcctctcccacttcttgccccagaaagccccagacggaaagagctacttgctgagcttgcccacaggtgacgttcccatggatggcatgtccgtgtctgacctgggtcctgtggtgctcagccttttgaagatgccagaaaaatacgtcggccagaacatcgggctgagcacttgcaggcacacggccgaggagtacgctgccctgctcaccaagcacacccgcaaggtcgtgcacgatgccaagatgactcctgaggactacgaaaagcttggctttcccggtgcccgggacctggccaacatgttccgtttctatgccctgagacccgaccgtgacatcgagctgaccctgagactcaaccccaaggccctgacgctggaccagtggctggaacagcacaaaggggacttcaacctgctgtgacctgcccgcctcgcggccccttgtggggatcgggggcaccagaggggcagaggcaccaacatctgaataaagccattgttctcccagatggcttccaggagaagaggac

SEQ ID NO: 371319 - DNA, 1300 bp, Homo sapiens
agcggagtatgtggctttccccaggtctctggaggttgcaggctcaggctctgctcagcgggtcatcacccgtagcatccggttaagaggctctccacctcgctcattttggtctaactggatttacacaaactcactgtgcacgtgcctggggcgggcaaacccggaaacgacgccgagtcccgcgggatccaggaggagccaactgcgccggaggaggggtttcggccgacacgtcgggattggcggctgcagccaggggtcctccgacgctgggcttccgtgagcggcgctctgccagatctctggaccggattcgtcccattctcgtcctcatggtggacaagaaactggtggtggttttcggaggcacagaggcggggtttcaccaagccaagatcgtgccactgcacttcagcctgggtgatagagtgagactccatctcaaaaaaataaaataaagaaaataaaaatacctgaatgagaatcgtcgttgagaaggtttcctggatgctccttgctgtggtggagcactcccttcggggtttcgcccttcagtgggactttcaggggaagctgctcgctgatctggccaggcgcctgggcctccactatgtggtctacagcggcctggagaacatcaagaagctgacggcagggagattggccgccgcgcactttgacggcaaaggggaggtggaggaatatttccgggacattggcgttcccatgaccagtgtgcggctgccctgctattttgagaacctcctctcccacttcttgccccagaaagccccagacggaaagagctacttgctgagcttgcccacaggtgacgttcccatggatggcatgtccgtgtctgacctgggtcctgtggtgctcagccttttgaagatgccagaaaaatacgtcggccagaacatcgggctgagcacttgcaggcacacggccgaggagtacgctgccctgctcaccaagcacacccgcaaggtcgtgcacgatgccaagatgactcctgaggactacgaaaagcttggctttcccggtgcccgggacctggccaacatgttccgtttctatgccctgagacccgaccgtgacatcgagctgaccctgagactcaaccccaaggccctgacgctggaccagtggctggaacagcacaaaggggacttcaacctgctgtgacctgcccgcctcgcggccccttgtggggatcgggggcaccagaggggcagaggcaccaacatctgaataaagccattgttctcccagatggcttccaggagaagaggac

SEQ ID NO: 371320 - DNA, 1768 bp, Homo sapiens
ttttttaagactcatggacatagctttaattatctttgcctgacgcccaatacctgaaaattaagatgttcatgcaagataaagaggtaatttttctcctcctcccagtcatcacccgtagcatccggttaagaggctctccacctcgctcattttggtctaactggatttacacaaactcactgtgcacgtgcctggggcgggcaaacccggaaacgacgccgagtcccgcgggatccaggaggagccaactgcgccggaggaggggtttcggccgacacgtcgggattggcggctgcagccaggggtcctccgacgctgggcttccgtgagcggcgctctgccagccggagctgcggggagggagttggcgcctagcgcgcagctccatccccgcctctgcagtggactcggccgcagaatcggggtcccgggctcctggaacttgtcccgcccaggccgcggcgaggaggtcactccagccgatctctggaccggattcgtcccattctcgtcctcatggtggacaagaaactggtggtggttttcggaggcacaggtgcccagggtggctccgtggcccgcacactcctggaagatgggacattcaaggttcgagtggtgacccgaaaccctaggaagaaggcagcaaaggagctgaggctgcaaggtgcagaagtagtgcagggagaccaagatgaccaggtcatcatggagctggccctgaatggggcttacgccaccttcatcgtgaccaattactgggagagctgcagccaggagcaggaggtcaagcaggggaagctgctcgctgatctggccaggcgcctgggcctccactatgtggtctacagcggcctggagaacatcaagaagctgacggcagggagattggccgccgcgcactttgacggcaaaggggaggtggaggaatatttccgggacattggcgttcccatgaccagtgtgcggctgccctgctattttgagaacctcctctcccacttcttgccccagaaagccccagacggaaagagctacttgctgagcttgcccacaggtgacgttcccatggatggcatgtccgtgtctgacctgggtcctgtggtgctcagccttttgaagatgccagaaaaatacgtcggccagaacatcgggctgagcacttgcaggcacacggccgaggagtacgctgccctgctcaccaagcacacccgcaaggtcgtgcacgatgccaaggtgggcctcccgccccaggtgactcaggcatccttgtcagggctttctagctcccgtagggagggtgtgtccagggctgcccacacctctgggcagtacatctaaattcattcgttcatcgtcaacgtttattttctgctgttccaggagctaactggccacagagtgaaatttctggcttagatgttttgaccaaatagagagaaaagcttccaggaggagagggccataggagccaagatgactcctgaggactacgaaaagcttggctttcccggtgcccgggacctggccaacatgttccgtttctatgccctgagacccgaccgtgacatcgagctgaccctgagactcaaccccaaggccctgacgctggaccagtggctggaacagcacaaaggggacttcaacctgctgtgacctgcccgcctcgcggccccttgtggggatcgggggcaccagaggggcagaggcaccaacatctgaataaagccattgttctcccagatggcttccaggagaagaggac

SEQ ID NO: 371321 - DNA, 1326 bp, Homo sapiens
ttttttaagactcatggacatagctttaattatctttgcctgacgcccaatacctgaaaattaagatgttcatgcaagataaagaggtaatttttctcctcctcccagtcatcacccgtagcatccggttaagaggctctccacctcgctcattttggtctaactggatttacacaaactcactgtgcacgtgcctggggcgggcaaacccggaaacgacgccgagtcccgcgggatccaggaggagccaactgcgccggaggaggggtttcggccgacacgtcgggattggcggctgcagccaggggtcctccgacgctgggcttccgtgagcggcgctctgccagccggagctgcggggagggagttggcgcctagcgcgcagctccatccccgcctctgcagtggactcggccgcagaatcggggtcccgggctcctggaacttgtcccgcccaggccgcggcgaggaggtcactccagccgatctctggaccggattcgtcccattctcgtcctcatggtggacaagaaactggtggtggttttcggaggcacaggtgcccagggtggctccgtggcccgcacactcctggaagatgggacattcaaggttcgagtggtgacccgaaaccctaggaagaaggcagcaaaggagctgaggctgcaaggtgcagaagtagtgcagggagaccaagatgaccaggtcatcatggagctggccctgaatggggcttacgccaccttcatcgtgaccaattactgggagagctgcagccaggagcaggaggtcaagcaggggaagctgctcgctgatctggccaggcgcctgggcctccactatgtggcttgcccacaggtgacgttcccatggatggcatgtccgtgtctgacctgggtcctgtggtgctcagccttttgaagatgccagaaaaatacgtcggccagaacatcgggctgagcacttgcaggcacacggccgaggagtacgctgccctgctcaccaagcacacccgcaaggtcgtgcacgatgccaagatgactcctgaggactacgaaaagcttggctttcccggtgcccgggacctggccaacatgttccgtttctatgccctgagacccgaccgtgacatcgagctgaccctgagactcaaccccaaggccctgacgctggaccagtggctggaacagcacaaaggggacttcaacctgctgtgacctgcccgcctcgcggccccttgtggggatcgggggcaccagaggggcagaggcaccaacatctgaataaagccattgttctcccagatggcttccaggagaagaggac

SEQ ID NO: 371322 - DNA, 1010 bp, Homo sapiens
ggatttgaaatgagtgaatcgctgagtcccgcgatgagacagggtctgcattttgctcttaaaatctcgggggcgtcaggaccacatcccagctgagcaggctgagactgctgaggagtgcggacgggcgaggaggggacgcggaaaggagggagcggcgacaggcgacccgtccggcacgggtcccggcggtgcccggtccccccgggctccaggccgctcgccccccgcccctccccttcgctccccgcacagcctctcccgcccctccccacccggctccctcaagtctccacgaacggaaatgggagtcacagcgccggggaccagcggaaacaaaacacagaggcggccgcgggggggcccttgtgggggaaaaggccccggaacgaggccggcccgcgagggcccgcgctcccctcctccccggcggccgcactcacccactccggaatcggccctgtcgcccccgcccgcactccagagccggctgagaacggcagcggcgagggctccacgtgcagcgtctctccgggaatcagcatgattcttcagaggctcttcaggttctcctctgtcattcggtcagccgtctcagtccatttgcggaggaacattggtgttacagcagtggcatttaataaggaacttgatcctatacagaaactctttgtggacaagattagagaatacaaatctaagcgacagacatctggaggacctgttgatgctagttcagagtatcagcaagagctggagagggagctttttaagctcaagcaaatgtttggtaatgcagacatgaatacatttcccaccttcaaatttgaagatcccaaatttgaagtcatcgaaaaaccccaggcctgaagaaataaagtaaaattaatctggtaatttgtcacggattagttgtacaactagttagaagtttcagaataaacatgcatttcataactgtcaaatgttcttttaattctgagtccaaataaattatttggtgatgttga

SEQ ID NO: 371323 - DNA, 1184 bp, Homo sapiens
  misc_feature (1171)..(1171): n is a, c, g, or t
  misc_feature (1178)..(1178): n is a, c, g, or t
ggatttgaaatgagtgaatcgctgagtcccgcgatgagacagggtctgcattttgctcttaaaatctcgggggcgtcaggaccacatcccagctgagcaggctgagactgctgaggagtgcggacgggcgaggaggggacgcggaaaggagggagcggcgacaggcgacccgtccggcacgggtcccggcggtgcccggtccccccgggctccaggccgctcgccccccgcccctccccttcgctccccgcacagcctctcccgcccctccccacccggctccctcaagtctccacgaacggaaatgggagtcacagcgccggggaccagcggaaacaaaacacagaggcggccgcgggggggcccttgtgggggaaaaggccccggaacgaggccggcccgcgagggcccgcgctcccctcctccccggcggccgcactcacccactccggaatcggccctgtcgcccccgcccgcactccagagccggctgagaacggcagcggcgagggctccacgtgcagcgtctctccgggtaagacctgcagctcccgcgactagaagtgtgaggtcccagggcccttcccgcggaatcggcgctgagaagccccaacccccctcccgcctcccaggcaccttcgggtccaggactacaactcccggcagggtgcgcaaaacgaccgcccaaggcaacggaggctcacgaggaatcagcatgattcttcagaggctcttcaggttctcctctgtcattcggtcagccgtctcagtccatttgcggaggaacattggtgttacagcagtggcatttaataaggaacttgatcctatacagaaactctttgtggacaagattagagaatacaaatctaagcgacagacatctggaggacctgttgatgctagttcagagtatcagcaagagctggagagggagctttttaagctcaagcaaatgtttggtaatgcagacatgaatacatttcccaccttcaaatttgaagatcccaaatttgaagtcatcgaaaaaccccaggcctgaagaaataaagtaaaattaatctggtaatttgtcacggattagttgtacaactagttagaagtttcagaataaacatgcatttcataactgtcaaattgttctttttaattcctgaattccaaattaaanttatttnggtgaa

SEQ ID NO: 371324 - DNA, 622 bp, Homo sapiens
  misc_feature (18)..(18): n is a, c, g, or t
  misc_feature (41)..(41): n is a, c, g, or t
  misc_feature (50)..(50): n is a, c, g, or t
  misc_feature (480)..(480): n is a, c, g, or t
ggggagcggaggtttttncggcagtggggggcggagctctnaacttattncaagaatcagcatgattcttcagaggctcttcaggttctcctctgtcattcggtcagccgtctcagtccatttgcggaggaacattggtgttacagcagtggcatttaataaggaacttgatctttatacggggggggggggtactcaagattagggaatacaaaaataagccacgacatctggaggacctgttgatgctagttcagagtatcagcaagagctggagagggagcttttaaagctcaagtaaatgttcgattatgcaggcatcaacacattggccacctttaattttgaagatcccaactttgtagcactcggaataccccctcccccgcgtagtaaagcacctttaatatcggaattagcccggattcgctgtacaacatagttacaagcttagaataaacatacatggcgtacctctcnatctttatttgtcgatcacatcataaacacccggccctctctattcctcccgccttgtactaacgctgtttttcccccccccccgctcctggccccttcgcattggcgacctttttcctcccccatcccacacccttaccca

SEQ ID NO: 371325 - DNA, 1643 bp, Homo sapiens
ggatttgaaatgagtgaatcgctgagtcccgcgatgagacagggtctgcattttgctcttaaaatctcgggggcgtcaggaccacatcccagctgagcaggctgagactgctgaggagtgcggacgggcgaggaggggacgcggaaaggagggagcggcgacaggcgacccgtccggcacgggtcccggcggtgcccggtccccccgggctccaggccgctcgccccccgcccctccccttcgctccccgcacagcctctcccgcccctccccacccggctccctcaagtctccacgaacggaaatgggagtcacagcgccggggaccagcggaaacaaaacacagaggcggccgcgggggggcccttgtgggggaaaaggccccggaacgaggccggcccgcgagggcccgcgctcccctcctccccggcggccgcactcacccactccggaatcggccctgtcgcccccgcccgcactccagagccggctgagaacggcagcggcgagggctccacgtgcagcgtctctccgggtaagacctgcagctcccgcgactagaagtgtgaggtcccagggcccttcccgcggaatcggcgctgagaagccccaacccccctcccgcctcccaggcaccttcgggtccaggactacaactcccggcagggtgcgcaaaacgaccgcccaaggcaacggaggctcacgaggtacaaggaagcacaacgccccaatccgctttgttttacacagtctcactttccctgcacctttatacacttcgataaccctaacgaacaggacgctgactcggaggggagcttgaactaggggaaaggccactcaaagagcgcatgcgtacagagcaaggtttcaaggaggggaaaaagaacgggtcaaattaggcgaagaaaagatggcggaggctgtgccaggggacccggaagcacttaccctccacttcctcctcctgtttggcttctgtctcacctagacccgtccggtcgcagactgtctccgagacgcttcctgtccggtgagcgtcgaccgactgaaacggcggcccataatgcattgcgatggcgggtaggcgtgtgggggcggagccagggccggaagtagagcggaggtggtggcggcggaggctttggcagctcgggactgagtgcaagaatcagcatgattcttcagaggctcttcaggttctcctctgtcattcggtcagccgtctcagtccatttgcggaggaacattggtgttacagcagtggcatttaataaggaacttgatcctatacagaaactctttgtggacaagattagagaatacaaatctaagcgacagacatctggaggacctgttgatgctagttcagagtatcagcaagagctggagagggagctttttaagctcaagcaaatgtttggtaatgcagacatgaatacatttcccaccttcaaatttgaagatcccaaatttgaagtcatcgaaaaaccccaggcctgaagaaataaagtaaaattaatctggtaatttgtcacggattagttgtacaactagttagaagtttcagaataaacatgcatttcataactgtcaaatgttcttttaattctgagtccaaataaattatttggtgatgttga

SEQ ID NO: 371326 - DNA, 1557 bp, Homo sapiens
ggatttgaaatgagtgaatcgctgagtcccgcgatgagacagggtctgcattttgctcttaaaatctcgggggcgtcaggaccacatcccagctgagcaggctgagactgctgaggagtgcggacgggcgaggaggggacgcggaaaggagggagcggcgacaggcgacccgtccggcacgggtcccggcggtgcccggtccccccgggctccaggccgctcgccccccgcccctccccttcgctccccgcacagcctctcccgcccctccccacccggctccctcaagtctccacgaacggaaatgggagtcacagcgccggggaccagcggaaacaaaacacagaggcggccgcgggggggcccttgtgggggaaaaggccccggaacgaggccggcccgcgagggcccgcgctcccctcctccccggcggccgcactcacccactccggaatcggccctgtcgcccccgcccgcactccagagccggctgagaacggcagcggcgagggctccacgtgcagcgtctctccgggtaagacctgcagctcccgcgactagaagtgtgaggtcccagggcccttcccgcggaatcggcgctgagaagccccaacccccctcccgcctcccaggcaccttcgggtccaggactacaactcccggcagggtgcgcaaaacgaccgcccaaggcaacggaggctcacgaggtacaaggaagcacaacgccccaatccgctttgttttacacagtctcactttccctgcacctttatacacttcgataaccctaacgaacaggacgctgactcggaggggagcttgaactaggggaaaggccactcaaagagcgcatgcgtacagagcaaggtttcaaggaggggaaaaagaacgggtcaaattaggcgaagaaaagatggcggaggctgtgccaggggacccggaagcacttaccctccacttcctcctcctgtttggcttctgtctcacctagacccgtccggtcgcagactgtctccgagacgcttcctgtccggtgagcgtcgaccgactgaaacggcggcccataatgcattgcgatggcggaatcagcatgattcttcagaggctcttcaggttctcctctgtcattcggtcagccgtctcagtccatttgcggaggaacattggtgttacagcagtggcatttaataaggaacttgatcctatacagaaactctttgtggacaagattagagaatacaaatctaagcgacagacatctggaggacctgttgatgctagttcagagtatcagcaagagctggagagggagctttttaagctcaagcaaatgtttggtaatgcagacatgaatacatttcccaccttcaaatttgaagatcccaaatttgaagtcatcgaaaaaccccaggcctgaagaaataaagtaaaattaatctggtaatttgtcacggattagttgtacaactagttagaagtttcagaataaacatgcatttcataactgtcaaatgttcttttaattctgagtccaaataaattatttggtgatgttga

SEQ ID NO: 371327 - DNA, 1182 bp, Homo sapiens
ggatttgaaatgagtgaatcgctgagtcccgcgatgagacagggtctgcattttgctcttaaaatctcgggggcgtcaggaccacatcccagctgagcaggctgagactgctgaggagtgcggacgggcgaggaggggacgcggaaaggagggagcggcgacaggcgacccgtccggcacgggtcccggcggtgcccggtccccccgggctccaggccgctcgccccccgcccctccccttcgctccccgcacagcctctcccgcccctccccacccggctccctcaagtctccacgaacggaaatgggagtcacagcgccggggaccagcggaaacaaaacacagaggcggccgcgggggggcccttgtgggggaaaaggccccggaacgaggccggcccgcgagggcccgcgctcccctcctccccggcggccgcactcacccactccggaatcggccctgtcgcccccgcccgcactccagagccggctgagaacggcagcggcgagggctccacgtgcagcgtctctccgggtaagacctgcagctcccgcgactagaagtgtgaggtcccagggcccttcccgcggaatcggcgctgagaagccccaacccccctcccgcctcccaggcaccttcgggtccaggactacaactcccggcagggtgcgcaaaacgaccgcccaaggcaacggaggctcacgaggaatcagcatgattcttcagaggctcttcaggttctcctctgtcattcggtcagccgtctcagtccatttgcggaggaacattggtgttacagcagtggcatttaataaggaacttgatcctatacagaaactctttgtggacaagattagagaatacaaatctaagcgacagacatctggaggacctgttgatgctagttcagagtatcagcaagagctggagagggagctttttaagctcaagcaaatgtttggtaatgcagacatgaatacatttcccaccttcaaatttgaagatcccaaatttgaagtcatcgaaaaaccccaggcctgaagaaataaagtaaaattaatctggtaatttgtcacggattagttgtacaactagttagaagtttcagaataaacatgcatttcataactgtcaaatgttcttttaattctgagtccaaataaattatttggtgatgttga

SEQ ID NO: 371328 - DNA, 579 bp, Homo sapiens
gcggcccctctactactaaattcgcggccgcgtcgaccgagacgcttcctgtccggtgagcgtcgaccgactgaaacggcggcccataatgcattgcgatggcggaatcagcatgattcttcagaggctcttcaggttctcctctgtcattcggtcagccgtctcagtccatttgcggaggaacattggtgttacagcagtggcatttaataaggaacttgatcctatacagaaactctttgtggacaagattagagaatacaaatctaagcgacagacatctggaggacctgttgatgctagttcagagtatcagcaagagctggagagggagctttttaagctcaagcaaatgtttggtaatgcagacatgaatacatttcccaccttcaaatttgaagatcccaaatttgaagtcatcgaaaaaccccaggcctgaagaaataaagtaaaattaatctggtaatttgtcacggattagttgtacaactagttagaagtttcagaataaacatgcatttcataactgtcaaatgttcttttaattctgagtccaaataaattatttggtgatgttga

SEQ ID NO: 371329 - DNA, 1770 bp, Homo sapiens
ggatttgaaatgagtgaatcgctgagtcccgcgatgagacagggtctgcattttgctcttaaaatctcgggggcgtcaggaccacatcccagctgagcaggctgagactgctgaggagtgcggacgggcgaggaggggacgcggaaaggagggagcggcgacaggcgacccgtccggcacgggtcccggcggtgcccggtccccccgggctccaggccgctcgccccccgcccctccccttcgctccccgcacagcctctcccgcccctccccacccggctccctcaagtctccacgaacggaaatgggagtcacagcgccggggaccagcggaaacaaaacacagaggcggccgcgggggggcccttgtgggggaaaaggccccggaacgaggccggcccgcgagggcccgcgctcccctcctccccggcggccgcactcacccactccggaatcggccctgtcgcccccgcccgcactccagagccggctgagaacggcagcggcgagggctccacgtgcagcgtctctccgggtaagacctgcagctcccgcgactagaagtgtgaggtcccagggcccttcccgcggaatcggcgctgagaagccccaacccccctcccgcctcccaggcaccttcgggtccaggactacaactcccggcagggtgcgcaaaacgaccgcccaaggcaacggaggctcacgaggtacaaggaagcacaacgccccaatccgctttgttttacacagtctcactttccctgcacctttatacacttcgataaccctaacgaacaggacgctgactcggaggggagcttgaactaggggaaaggccactcaaagagcgcatgcgtacagagcaaggtttcaaggaggggaaaaagaacgggtcaaattaggcgaagaaaagatggcggaggctgtgccaggggacccggaagcacttaccctccacttcctcctcctgtttggcttctgtctcacctagacccgtccggtcgcagactgtctccgagacgcttcctgtccggtgagcgtcgaccgactgaaacggcggcccataatgcattgcgatggcgggtaggcgtgtgggggcggagccagggccggaagtagagcggaggtggtggcggcggaggctttggcagctcgggactgagtgcaagaatcagcatgattcttcagaggctcttcaggttctcctctgtcattcggtcagccgtctcagtccatttgcggaggaacattggtgttacagcagtggcatttaataaggaacttgatcctatacagaaactctttgtggacaagattagagaatacaaatctaagcgacagacatctggaggacctgttgatgctagttcagagtatcagcaagagctggagagggagctttttaagctcaagcaaatgtttggtaatgcagacatgaatacatttcccaccttcaaatttgaagatcccaaatttgaagtcatcgaaaaaccccaggcctgaagaaataaagtaaaattaatctggtaatttgtcacggattagttgtacaactagttagaagtttcagaataaacatgcatttcataactgtcaaatgttcttttaattctgagtccaaataaattatttggtgatgttgacaaaaaaaaaaaaaaacacaagcggccgcaattcgagctcaatttgcccaatccgcctatcgtgagccgattaccaatccattgcccgtggttttacaatgacacggctgggaaagccctggctttc

SEQ ID NO: 371330 - DNA, 1775 bp, Homo sapiens
ggatttgaaatgagtgaatcgctgagtcccgcgatgagacagggtctgcattttgctcttaaaatctcgggggcgtcaggaccacatcccagctgagcaggctgagactgctgaggagtgcggacgggcgaggaggggacgcggaaaggagggagcggcgacaggcgacccgtccggcacgggtcccggcggtgcccggtccccccgggctccaggccgctcgccccccgcccctccccttcgctccccgcacagcctctcccgcccctccccacccggctccctcaagtctccacgaacggaaatgggagtcacagcgccggggaccagcggaaacaaaacacagaggcggccgcgggggggcccttgtgggggaaaaggccccggaacgaggccggcccgcgagggcccgcgctcccctcctccccggcggccgcactcacccactccggaatcggccctgtcgcccccgcccgcactccagagccggctgagaacggcagcggcgagggctccacgtgcagcgtctctccgggtaagacctgcagctcccgcgactagaagtgtgaggtcccagggcccttcccgcggaatcggcgctgagaagccccaacccccctcccgcctcccaggcaccttcgggtccaggactacaactcccggcagggtgcgcaaaacgaccgcccaaggcaacggaggctcacgaggtacaaggaagcacaacgccccaatccgctttgttttacacagtctcactttccctgcacctttatacacttcgataaccctaacgaacaggacgctgactcggaggggagcttgaactaggggaaaggccactcaaagagcgcatgcgtacagagcaaggtttcaaggaggggaaaaagaacgggtcaaattaggcgaagaaaagatggcggaggctgtgccaggggacccggaagcacttaccctccacttcctcctcctgtttggcttctgtctcacctagacccgtccggtcgcagactgtctccgagacgcttcctgtccggtgagcgtcgaccgactgaaacggcggcccataatgcattgcgatggcgggtaggcgtgtgggggcggagccagggccggaagtagagcggaggtggtggcggcggaggctttggcagctcgggactgagtgcaagaatcagcatgattcttcagaggctcttcaggttctcctctgtcattcggtcagccgtctcagtccatttgcggaggaacattggtgttacagcagtggcatttaataaggaacttgatcctatacagaaactctttgtggacaagattagagaatacaaatctaagcgacagacatctggaggacctgttgatgctagttcagagtatcagcaagagctggagagggagctttttaagctcaagcaaatgtttggtaatgcagacatgaatacatttcccaccttcaaatttgaagatcccaaatttgaagtcatcgaaaaaccccaggcctgaagaaataaagtaaaattaatctggtaatttgtcacggattagttgtacaactagttagaagtttcagaataaacatgcatttcataactgtcaaatgttcttttaattctgagtccaaataaattatttggtgatgttgagtgtgttcttgatgaattgaaaaacataaattacttattctccttcaaataaaatccattggccgacgttatacaacgttgtgacttgtcctttgtcgtacccactttaatcgccttgaggcctctctcttg

SEQ ID NO: 371331 - DNA, 1750 bp, Homo sapiens
ggatttgaaatgagtgaatcgctgagtcccgcgatgagacagggtctgcattttgctcttaaaatctcgggggcgtcaggaccacatcccagctgagcaggctgagactgctgaggagtgcggacgggcgaggaggggacgcggaaaggagggagcggcgacaggcgacccgtccggcacgggtcccggcggtgcccggtccccccgggctccaggccgctcgccccccgcccctccccttcgctccccgcacagcctctcccgcccctccccacccggctccctcaagtctccacgaacggaaatgggagtcacagcgccggggaccagcggaaacaaaacacagaggcggccgcgggggggcccttgtgggggaaaaggccccggaacgaggccggcccgcgagggcccgcgctcccctcctccccggcggccgcactcacccactccggaatcggccctgtcgcccccgcccgcactccagagccggctgagaacggcagcggcgagggctccacgtgcagcgtctctccgggtaagacctgcagctcccgcgactagaagtgtgaggtcccagggcccttcccgcggaatcggcgctgagaagccccaacccccctcccgcctcccaggcaccttcgggtccaggactacaactcccggcagggtgcgcaaaacgaccgcccaaggcaacggaggctcacgaggtacaaggaagcacaacgccccaatccgctttgttttacacagtctcactttccctgcacctttatacacttcgataaccctaacgaacaggacgctgactcggaggggagcttgaactaggggaaaggccactcaaagagcgcatgcgtacagagcaaggtttcaaggaggggaaaaagaacgggtcaaattaggcgaagaaaagatggcggaggctgtgccaggggacccggaagcacttaccctccacttcctcctcctgtttggcttctgtctcacctagacccgtccggtcgcagactgtctccgagacgcttcctgtccggtgagcgtcgaccgactgaaacggcggcccataatgcattgcgatggcgggtaggcgtgtgggggcggagccagggccggaagtagagcggaggtggtggcggcggaggctttggcagctcgggactgagtgcaagaatcagcatgattcttcagaggctcttcaggttctcctctgtcattcggtcagccgtctcagtccatttgcggaggaacattggtgttacagcagtggcatttaataaggaacttgatcctatacagaaactctttgtggacaagattagagaatacaaatctaagcgacagacatctggaggacctgttgatgctagttcagagtatcagcaagagctggagagggagctttttaagctcaagcaaatgtttggtaatgcagacatgaatacatttcccaccttcaaatttgaagatcccaaatttgaagtcatcgaaaaaccccaggcctgaagaaataaagtaaaattaatctggtaatttgtcacggattagttgtacaactagttagaagtttcagaataaacatgcatttcataactgtcaaaaaactctcctctcttccctacactctcctccctcctcctttaccttccacctctcttctctcctaactccttcctcatctcttctcttaccctctctcccttctccacacactgtttccccttattttcctccactctctcttactcttgct

SEQ ID NO: 371332 - DNA, 3096 bp, Homo sapiens
ggatttgaaatgagtgaatcgctgagtcccgcgatgagacagggtctgcattttgctcttaaaatctcgggggcgtcaggaccacatcccagctgagcaggctgagactgctgaggagtgcggacgggcgaggaggggacgcggaaaggagggagcggcgacaggcgacccgtccggcacgggtcccggcggtgcccggtccccccgggctccaggccgctcgccccccgcccctccccttcgctccccgcacagcctctcccgcccctccccacccggctccctcaagtctccacgaacggaaatgggagtcacagcgccggggaccagcggaaacaaaacacagaggcggccgcgggggggcccttgtgggggaaaaggccccggaacgaggccggcccgcgagggcccgcgctcccctcctccccggcggccgcactcacccactccggaatcggccctgtcgcccccgcccgcactccagagccggctgagaacggcagcggcgagggctccacgtgcagcgtctctccgggtaagacctgcagctcccgcgactagaagtgtgaggtcccagggcccttcccgcggaatcggcgctgagaagccccaacccccctcccgcctcccaggcaccttcgggtccaggactacaactcccggcagggtgcgcaaaacgaccgcccaaggcaacggaggctcacgaggtacaaggaagcacaacgccccaatccgctttgttttacacagtctcactttccctgcacctttatacacttcgataaccctaacgaacaggacgctgactcggaggggagcttgaactaggggaaaggccactcaaagagcgcatgcgtacagagcaaggtttcaaggaggggaaaaagaacgggtcaaattaggcgaagaaaagatggcggaggctgtgccaggggacccggaagcacttaccctccacttcctcctcctgtttggcttctgtctcacctagacccgtccggtcgcagactgtctccgagacgcttcctgtccggtgagcgtcgaccgactgaaacggcggcccataatgcattgcgatggcgggtaggcgtgtgggggcggagccagggccggaagtagagcggaggtggtggcggcggaggctttggcagctcgggactgagtgcaagaatcagcatgattcttcagaggctcttcaggttctcctctgtcattcggtcagccgtctcagtccatttgcggaggaacattggtgttacagcagtggcatttaataaggaacttgatcctatacagaaactctttgtggacaagattagagaatacaaatctaagcgacagacatctggaggacctgttgatgctagttcagagtatcagcaagagctggagagggagctttttaagctcaagcaaatgtttggtaatgcagacatgaatacatttcccaccttcaaatttgaagagcatttttctcagcatttgagaagttggcagccatccagagatgatgacattctaatcttaagcagctaaccagcagctagccttgtagctacagaaggtaagagggtgtagtttcctgggttttatgaataacaataggtggatgactctttccctgcactgttatatggggctaaaaagtttaacaagttcagctatttttattagtgtagactttaatcgaacaaagccacctgtggaaaaaggaagttctttgcaaagttgtattgaaaagcaatcaattggtccagacttaggtcaaacctccaactaaaaataaattaaatctagttacaacagcaacaataattaaaacaaaacaaagcttgctaataagattttaaagccctaatctttacacaacacaattcactgcaggaaaataaagtcaaaatgctgtaagaattacaatgggattttaccagttgttagtgttcaagttcctcaagtaaacacaaatgcaaatacaagtctggacaccagtgacccacagatacatatatatacttttaataggaaattagtgctcaatactctgccctttgtgtgggggaaaacattcttttatacaaggatttttacctagctattacaatagtttaaggtaatgtacaatatatatttgacacagagagtgttattagatgttcgcactgcataaaatgaatcctctagcctttgatgtcttaaaaagaagttttacaactattagtgaagctaaggcactacatattttccttccacaatatgggatttgtgtcatttaaactgaagaagttgatcttgtgtgatgacaggtatgtctgaagaggcgtctttcagagtcatctatcctcttggcatgccaatgcaagagggaaagcattcctcaaaccaaagaaatcttccaaccaaaacataggtaacatttagcctgatttcttacaaaagcttgtagacaggtgtttttttctgtacttcaccaccatgagttgggaatctatgcctgtgggccaaatcttgtctgtgcctgctgtttttgtaaataaagtcttattggaacacagacatgactacttgcttgttttgtctgtggctgcctttgtgctacaatggcagagtcaagtagttgttaacagggaccttatgacttaaaatatctactttctggctctttaacagaaaatgtttgccgatccctgactcgcggtgaaaattttattttgggggcagagccatgttacagaagcccgacctcccaggaagggatctggtgagagacatagcatgtcatagacaagtcaaagggggagcatcttcccggtggcctggtgtcccaggcacatgctaggcactcagtgggtgcttaatccatttgttcggtgaatcctggggatttcttcgccaattgggtagaaagagcagactcttttgaaagaagattaacctgcccagtgcagtggctcatgcctataatcccagcactttgggaggctgatgggggtggatcatttgaggtcagaggtttgagaccagcctggccaacatggtgaaacccttctctactaaaatacaaaaattagccaggtgtggtggtacacgcctataatc

SEQ ID NO: 371333 - DNA, 1733 bp, Homo sapiens
ggatttgaaatgagtgaatcgctgagtcccgcgatgagacagggtctgcattttgctcttaaaatctcgggggcgtcaggaccacatcccagctgagcaggctgagactgctgaggagtgcggacgggcgaggaggggacgcggaaaggagggagcggcgacaggcgacccgtccggcacgggtcccggcggtgcccggtccccccgggctccaggccgctcgccccccgcccctccccttcgctccccgcacagcctctcccgcccctccccacccggctccctcaagtctccacgaacggaaatgggagtcacagcgccggggaccagcggaaacaaaacacagaggcggccgcgggggggcccttgtgggggaaaaggccccggaacgaggccggcccgcgagggcccgcgctcccctcctccccggcggccgcactcacccactccggaatcggccctgtcgcccccgcccgcactccagagccggctgagaacggcagcggcgagggctccacgtgcagcgtctctccgggtaagacctgcagctcccgcgactagaagtgtgaggtcccagggcccttcccgcggaatcggcgctgagaagccccaacccccctcccgcctcccaggcaccttcgggtccaggactacaactcccggcagggtgcgcaaaacgaccgcccaaggcaacggaggctcacgaggtacaaggaagcacaacgccccaatccgctttgttttacacagtctcactttccctgcacctttatacacttcgataaccctaacgaacaggacgctgactcggaggggagcttgaactaggggaaaggccactcaaagagcgcatgcgtacagagcaaggtttcaaggaggggaaaaagaacgggtcaaattaggcgaagaaaagatggcggaggctgtgccaggggacccggaagcacttaccctccacttcctcctcctgtttggcttctgtctcacctagacccgtccggtcgcagactgtctccgagacgcttcctgtccggtgagcgtcgaccgactgaaacggcggcccataatgcattgcgatggcgggtaggcgtgtgggggcggagccagggccggaagtagagcggaggtggtggcggcggaggctttggcagctcgggactgagtgcaagaatcagcatgattcttcagaggctcttcaggttctcctctgtcattcggtcagccgtctcagtccatttgcggaggaacattggtgttacagcagtggcatttaataaggaacttgatcctatacagaaactctttgtggacaagattagagaatacaaatctaagcgacagacatctggaggacctgttgatgctagttcagagtatcagcaagagctggagagggagctttttaagctcaagcaaatgtttggtaatgcagacatgaatacatttcccaccttcaaatttgaagatcccaaatttgaagtcatcgaaaaaccccaggcctgaagaaataaagtagaataaacatgcatttcataactgtcaaatgttcttttaattctgagtccaaataaattatttggtgatgttgaaataaacacccacctcacgtgcttctaacctcgcgcactccactatcttcgccgtgattcccctccacctcaccctcttcattatctttcgccctctctcactctctagctctctgcccttactcttcctttcacctcctctcc

SEQ ID NO: 371334 - DNA, 1589 bp, Homo sapiens
ggatttgaaatgagtgaatcgctgagtcccgcgatgagacagggtctgcattttgctcttaaaatctcgggggcgtcaggaccacatcccagctgagcaggctgagactgctgaggagtgcggacgggcgaggaggggacgcggaaaggagggagcggcgacaggcgacccgtccggcacgggtcccggcggtgcccggtccccccgggctccaggccgctcgccccccgcccctccccttcgctccccgcacagcctctcccgcccctccccacccggctccctcaagtctccacgaacggaaatgggagtcacagcgccggggaccagcggaaacaaaacacagaggcggccgcgggggggcccttgtgggggaaaaggccccggaacgaggccggcccgcgagggcccgcgctcccctcctccccggcggccgcactcacccactccggaatcggccctgtcgcccccgcccgcactccagagccggctgagaacggcagcggcgagggctccacgtgcagcgtctctccgggtaagacctgcagctcccgcgactagaagtgtgaggtcccagggcccttcccgcggaatcggcgctgagaagccccaacccccctcccgcctcccaggcaccttcgggtccaggactacaactcccggcagggtgcgcaaaacgaccgcccaaggcaacggaggctcacgaggtacaaggaagcacaacgccccaatccgctttgttttacacagtctcactttccctgcacctttatacacttcgataaccctaacgaacaggacgctgactcggaggggagcttgaactaggggaaaggccactcaaagagcgcatgcgtacagagcaaggtttcaaggaggggaaaaagaacgggtcaaattaggcgaagaaaagatggcggaggctgtgccaggggacccggaagcacttaccctccacttcctcctcctgtttggcttctgtctcacctagacccgtccggtcgcagactgtctccgagacgcttcctgtccggtgagcgtcgaccgactgaaacggcggcccataatgcattgcgatggcgggtaggcgtgtgggggcggagccagggccggaagtagagcggaggtggtggcggcggaggctttggcagctcgggactgagtgcaagaatcagcatgattcttcagaggctcttcaggttctcctctgtcattcggtcagccgtctcagtccatttgcggaggaacattggtgttacagcagtggcatttaataaggaacttgatcctatacagaaactctttgtggacaagattagagaatacaaatctaagcgacagacatctggaggacctgttgatgctagttcagagtatcagcaagagctggagagggagctttttaagctcaagcaaatgtttggtaatgcagacatgaatacatttcccaccttcaaatttgaagatcccaaatttgaagtcatcgaaaaaccccaggcctgaagaaataaagtagaataaacatgcatttcataactgtcaaatgttcttttaattctgagtccaaataaattatttggtgatgttga

SEQ ID NO: 371335 - DNA, 2192 bp, Homo sapiens
ggatttgaaatgagtgaatcgctgagtcccgcgatgagacagggtctgcattttgctcttaaaatctcgggggcgtcaggaccacatcccagctgagcaggctgagactgctgaggagtgcggacgggcgaggaggggacgcggaaaggagggagcggcgacaggcgacccgtccggcacgggtcccggcggtgcccggtccccccgggctccaggccgctcgccccccgcccctccccttcgctccccgcacagcctctcccgcccctccccacccggctccctcaagtctccacgaacggaaatgggagtcacagcgccggggaccagcggaaacaaaacacagaggcggccgcgggggggcccttgtgggggaaaaggccccggaacgaggccggcccgcgagggcccgcgctcccctcctccccggcggccgcactcacccactccggaatcggccctgtcgcccccgcccgcactccagagccggctgagaacggcagcggcgagggctccacgtgcagcgtctctccgggtaagacctgcagctcccgcgactagaagtgtgaggtcccagggcccttcccgcggaatcggcgctgagaagccccaacccccctcccgcctcccaggcaccttcgggtccaggactacaactcccggcagggtgcgcaaaacgaccgcccaaggcaacggaggctcacgaggtacaaggaagcacaacgccccaatccgctttgttttacacagtctcactttccctgcacctttatacacttcgataaccctaacgaacaggacgctgactcggaggggagcttgaactaggggaaaggccactcaaagagcgcatgcgtacagagcaaggtttcaaggaggggaaaaagaacgggtcaaattaggcgaagaaaagatggcggaggctgtgccaggggacccggaagcacttaccctccacttcctcctcctgtttggcttctgtctcacctagacccgtccggtcgcagactgtctccgagacgcttcctgtccggtgagcgtcgaccgactgaaacggcggcccataatgcattgcgatggcgggtaggcgtgtgggggcggagccagggccggaagtagagcggaggtggtggcggcggaggctttggcagctcgggactgagtgcaagaatcagcatgattcttcagaggctcttcaggttctcctctgtcattcggtcagccgtctcagtccatttgcggaggaacattggtgttacagcagtggcatttaataaggaacttgatcctatacagaaactctttgtggacaagattagagaatacaaatctaagcgacagacatctggaggacctgttgatgctagttcagagtatcagcaagagctggagagggagctttttaagctcaagcaaatgtttggtaatgcagacatgaatacatttcccaccttcaaatttgaaggtacgtcttataaatcacagattcattcttgtgggggataagtgaagaatatttacacttacctggatttttagagaactgaatgacagtgttgacatgtgaatttattaggaccatgacgtgtgcctgagaagctgccggctaaatgtttgctgttagaataagagcagtataggagatcacataacatagtgattaaatggtggggatctgaaatcgaactgcccaatcttgaatccttataatcactttcagctgtgtaatcttgagtaattaactggtgcatgtctcctcatctgacatttggggagaattatagtatcttctgcatatgtagttaaatgacataatatatgccaaagtccattaatggaatgcatggctcatagaaagtgttgcataaatgtttagctatatttctatgtaaatgtttacaaacagtgtttactaaaaaaatcagaaaattgatgagttaaatcttgagcattctacataatccattttattgcaatttggctaagcttgacccttttttccccctcttcttagatcccaaatttgaagtcatcgaaaaaccccaggcctgaagaaataaagtaaaattaatctggtaatttgtcacggattagttgtacaactagttagaagtttcagaataaacatgcatttcataactgtcaaatgttcttttaattctgagtccaaataaattatttggtgatgttga

SEQ ID NO: 371336 - DNA, 2714 bp, Homo sapiens
ggatttgaaatgagtgaatcgctgagtcccgcgatgagacagggtctgcattttgctcttaaaatctcgggggcgtcaggaccacatcccagctgagcaggctgagactgctgaggagtgcggacgggcgaggaggggacgcggaaaggagggagcggcgacaggcgacccgtccggcacgggtcccggcggtgcccggtccccccgggctccaggccgctcgccccccgcccctccccttcgctccccgcacagcctctcccgcccctccccacccggctccctcaagtctccacgaacggaaatgggagtcacagcgccggggaccagcggaaacaaaacacagaggcggccgcgggggggcccttgtgggggaaaaggccccggaacgaggccggcccgcgagggcccgcgctcccctcctccccggcggccgcactcacccactccggaatcggccctgtcgcccccgcccgcactccagagccggctgagaacggcagcggcgagggctccacgtgcagcgtctctccgggtaagacctgcagctcccgcgactagaagtgtgaggtcccagggcccttcccgcggaatcggcgctgagaagccccaacccccctcccgcctcccaggcaccttcgggtccaggactacaactcccggcagggtgcgcaaaacgaccgcccaaggcaacggaggctcacgaggtacaaggaagcacaacgccccaatccgctttgttttacacagtctcactttccctgcacctttatacacttcgataaccctaacgaacaggacgctgactcggaggggagcttgaactaggggaaaggccactcaaagagcgcatgcgtacagagcaaggtttcaaggaggggaaaaagaacgggtcaaattaggcgaagaaaagatggcggaggctgtgccaggggacccggaagcacttaccctccacttcctcctcctgtttggcttctgtctcacctagacccgtccggtcgcagactgtctccgagacgcttcctgtccggtgagcgtcgaccgactgaaacggcggcccataatgcattgcgatggcgggtaggcgtgtgggggcggagccagggccggaagtagagcggaggtggtggcggcggaggctttggcagctcgggactgagtgcaaaggtgactgggagggtagctagatcagcgtggccttttgggactccagttctgggttttttcacgaggcctgggctgcctctcacctttactaggaggagagagcagctctgtgtcctggggaccttcacggcctggcccggggtcacagctgacctctacgtttgtagaccttggagtttgccgtagacccagaaataagatcgataccctctctgagggcaaatcggggcggcgcggggggcagggaggcccgggggtctcgggcccgcagcctggctggggcaacccaaggtcaggcgcgcgggagagattttcggccaggcctacccgccccgggcgcacgggagcgtctaggctacttaggcagaacgtgtaccattaagagggaaaaaattagtcataatattgaaagtttgcatcccacctaaaaacgatggtgctaacacttcattaggcgactttatggattgttcataggaatatgcactgaagaggcagcgaacctactaacctttggccggaatcagcatgattcttcagaggctcttcaggttctcctctgtcattcggtcagccgtctcagtccatttgcggaggaacattggtgttacagcagtggcatttaataaggaacttgatcctatacagaaactctttgtggacaagattagagaatacaaatctaagcgacagacatctggaggacctgttgatgctagttcagagtatcagcaagagctggagagggagctttttaagctcaagcaaatgtttggtaatgcagacatgaatacatttcccaccttcaaatttgaaggtacgtcttataaatcacagattcattcttgtgggggataagtgaagaatatttacacttacctggatttttagagaactgaatgacagtgttgacatgtgaatttattaggaccatgacgtgtgcctgagaagctgccggctaaatgtttgctgttagaataagagcagtataggagatcacataacatagtgattaaatggtggggatctgaaatcgaactgcccaatcttgaatccttataatcactttcagctgtgtaatcttgagtaattaactggtgcatgtctcctcatctgacatttggggagaattatagtatcttctgcatatgtagttaaatgacataatatatgccaaagtccattaatggaatgcatggctcatagaaagtgttgcataaatgtttagctatatttctatgtaaatgtttacaaacagtgtttactaaaaaaatcagaaaattgatgagttaaatcttgagcattctacataatccattttattgcaatttggctaagcttgacccttttttccccctcttcttagatcccaaatttgaagtcatcgaaaaaccccaggcctgaagaaataaagtaaaattaatctggtaatttgtcacggattagttgtacaactagttagaagtttcagaataaacatgcatttcataactgtcaaatgttcttttaattctgagtccaaataaattatttggtgatgttga

SEQ ID NO: 371337 - DNA, 1466 bp, Homo sapiens
ggatttgaaatgagtgaatcgctgagtcccgcgatgagacagggtctgcattttgctcttaaaatctcgggggcgtcaggaccacatcccagctgagcaggctgagactgctgaggagtgcggacgggcgaggaggggacgcggaaaggagggagcggcgacaggcgacccgtccggcacgggtcccggcggtgcccggtccccccgggctccaggccgctcgccccccgcccctccccttcgctccccgcacagcctctcccgcccctccccacccggctccctcaagtctccacgaacggaaatgggagtcacagcgccggggaccagcggaaacaaaacacagaggcggccgcgggggggcccttgtgggggaaaaggccccggaacgaggccggcccgcgagggcccgcgctcccctcctccccggcggccgcactcacccactccggaatcggccctgtcgcccccgcccgcactccagagccggctgagaacggcagcggcgagggctccacgtgcagcgtctctccgggtaagacctgcagctcccgcgactagaagtgtgaggtcccagggcccttcccgcggaatcggcgctgagaagccccaacccccctcccgcctcccaggcaccttcgggtccaggactacaactcccggcagggtgcgcaaaacgaccgcccaaggcaacggaggctcacgaggtacaaggaagcacaacgccccaatccgctttgttttacacagtctcactttccctgcacctttatacacttcgataaccctaacgaacaggacgctgactcggaggggagcttgaactaggggaaaggccactcaaagagcgcatgcgtacagagcaaggtttcaaggaggggaaaaagaacgggtcaaattaggcgaagaaaagatggcggaggctgtgccaggggacccggaagcacttaccctccacttcctcctcctgtttggcttctgtctcacctagacccgtccggtcgcagactgtctccgagacgcttcctgtccggtgagcgtcgaccgactgaaacggcggcccataatgcattgcgatggcgggtaggcgtgtgggggcggagccagggccggaagtagagcggaggtggtggcggcggaggctttggcagctcgggactgagtgcaagaatcagcatgattcttcagaggctcttcaggttctcctctgtcattcggtcagccgtctcagtccatttgcggaggaacattggtgttacagcagtggcatttaataaggaacttgatcctatacagaaactctttgtggacaagattagagaatacaaatctaagcgacagacatctggaggacctgttgatgctagttcagagtatcagcaagagctggagagggagcttttaagtcaagcaatgtttgtaatcagcatgatcattcccacctcaatttgagtcccattgagtgt

SEQ ID NO: 371338 - DNA, 756 bp, Homo sapiens
gcggcccctctactactaaattcgcggccgcgtcgaccgagacgcttcctgtccggtgagcgtcgaccgactgaaacggcggcccataatgcattgcgatggcggaatcagcatgattcttcagaggctcttcaggttctcctctgtcattcggtcagccgtctcagtccatttgcggaggaacattggtgttacagcagtggcatttaataaggaacttgatcctatacagaaactctttgtggacaagattagagaatacaaatctaagcgacagacatctggaggacctgttgatgctagttcagagtatcagcaagagctggagagggagctttttaagctcaagcaaatgtttggtaatgcagacatgaatacatttcccaccttcaaatttgaagatcccaaatttgaagtcatcgaaaaaccccaggcctgaagaaataaagtaaaattaatctggtaatttgtcacggattagttgtacaactagttagaagtttcagaataaacatgcatttcataactgtcaaatgttcttttaattctgagtccaaataaattatttggtgatgttgacaaaaaaaaaaaaaaaaaaaattgtttggcggccggcccgaaaatttttacccctcggtgggcccggggccctggtttgtgccctggcacgtccagagacccggcgcctggtgtggtttcccaaaaaaccggggccggcgttgaccatccggcgtcgggcccggtctccggccggca

SEQ ID NO: 371339 - DNA, 1547 bp, Homo sapiens
ggatttgaaatgagtgaatcgctgagtcccgcgatgagacagggtctgcattttgctcttaaaatctcgggggcgtcaggaccacatcccagctgagcaggctgagactgctgaggagtgcggacgggcgaggaggggacgcggaaaggagggagcggcgacaggcgacccgtccggcacgggtcccggcggtgcccggtccccccgggctccaggccgctcgccccccgcccctccccttcgctccccgcacagcctctcccgcccctccccacccggctccctcaagtctccacgaacggaaatgggagtcacagcgccggggaccagcggaaacaaaacacagaggcggccgcgggggggcccttgtgggggaaaaggccccggaacgaggccggcccgcgagggcccgcgctcccctcctccccggcggccgcactcacccactccggaatcggccctgtcgcccccgcccgcactccagagccggctgagaacggcagcggcgagggctccacgtgcagcgtctctccggggcaccttcgggtccaggactacaactcccggcagggtgcgcaaaacgaccgcccaaggcaacggaggctcacgaggtacaaggaagcacaacgccccaatccgctttgttttacacagtctcactttccctgcacctttatacacttcgataaccctaacgaacaggacgctgactcggaggggagcttgaactaggggaaaggccactcaaagagcgcatgcgtacagagcaaggtttcaaggaggggaaaaagaacgggtcaaattaggcgaagaaaagatggcggaggctgtgccaggggacccggaagcacttaccctccacttcctcctcctgtttggcttctgtctcacctagacccgtccggtcgcagactgtctccgagacgcttcctgtccggtgagcgtcgaccgactgaaacggcggcccataatgcattgcgatggcgggtaggcgtgtgggggcggagccagggccggaagtagagcggaggtggtggcggcggaggctttggcagctcgggactgagtgcaagaatcagcatgattcttcagaggctcttcaggttctcctctgtcattcggtcagccgtctcagtccatttgcggaggaacattggtgttacagcagtggcatttaataaggaacttgatcctatacagaaactctttgtggacaagattagagaatacaaatctaagcgacagacatctggaggacctgttgatgctagttcagagtatcagcaagagctggagagggagctttttaagctcaagcaaatgtttggtaatgcagacatgaatacatttcccaccttcaaatttgaagatcccaaatttgaagtcatcgaaaaaccccaggcctgaagaaataaagtaaaattaatctggtaatttgtcacggattagttgtacaactagttagaagtttcagaataaacatgcatttcataactgtcaaatgttcttttaattctgagtccaaataaattatttggtgatgttga

SEQ ID NO: 371340 - DNA, 1507 bp, Homo sapiens
ggatttgaaatgagtgaatcgctgagtcccgcgatgagacagggtctgcattttgctcttaaaatctcgggggcgtcaggaccacatcccagctgagcaggctgagactgctgaggagtgcggacgggcgaggaggggacgcggaaaggagggagcggcgacaggcgacccgtccggcacgggtcccggcggtgcccggtccccccgggctccaggccgctcgccccccgcccctccccttcgctccccgcacagcctctcccgcccctccccacccggctccctcaagtctccacgaacggaaatgggagtcacagcgccggggaccagcggaaacaaaacacagaggcggccgcgggggggcccttgtgggggaaaaggccccggaacgaggccggcccgcgagggcccgcgctcccctcctccccggcggccgcactcacccactccggaatcggccctgtcgcccccgcccgcactccagagccggctgagaacggcagcggcgagggctccacgtgcagcgtctctccgggtaagacctgcagctcccgcgactagaagtgtgaggtcccagggcccttcccgcggaatcggcgctgagaagccccaacccccctcccgcctcccaggcaccttcgggtccaggactacaactcccggcagggtgcgcaaaacgaccgcccaaggcaacggaggctcacgaggtacaaggaagcacaacgccccaatccgctttgttttacacagtctcactttccctgcacctttatacacttcgataaccctaacgaacaggacgctgactcggaggggagcttgaactaggggaaaggccactcaaagagcgcatgcgtacagagcaaggtttcaaggaggggaaaaagaacgggtcaaattaggcgaagaaaagatggcggaggctgtgccaggggacccggaagcacttaccctccacttcctcctcctgtttggcttctgtctcacctagacccgtccggtcgcagactgtctccgagacgcttcctgtccgaatcagcatgattcttcagaggctcttcaggttctcctctgtcattcggtcagccgtctcagtccatttgcggaggaacattggtgttacagcagtggcatttaataaggaacttgatcctatacagaaactctttgtggacaagattagagaatacaaatctaagcgacagacatctggaggacctgttgatgctagttcagagtatcagcaagagctggagagggagctttttaagctcaagcaaatgtttggtaatgcagacatgaatacatttcccaccttcaaatttgaagatcccaaatttgaagtcatcgaaaaaccccaggcctgaagaaataaagtaaaattaatctggtaatttgtcacggattagttgtacaactagttagaagtttcagaataaacatgcatttcataactgtcaaatgttcttttaattctgagtccaaataaattatttggtgatgttga

SEQ ID NO: 371341 - DNA, 2165 bp, Homo sapiens
ggatttgaaatgagtgaatcgctgagtcccgcgatgagacagggtctgcattttgctcttaaaatctcgggggcgtcaggaccacatcccagctgagcaggctgagactgctgaggagtgcggacgggcgaggaggggacgcggaaaggagggagcggcgacaggcgacccgtccggcacgggtcccggcggtgcccggtccccccgggctccaggccgctcgccccccgcccctccccttcgctccccgcacagcctctcccgcccctccccacccggctccctcaagtctccacgaacggaaatgggagtcacagcgccggggaccagcggaaacaaaacacagaggcggccgcgggggggcccttgtgggggaaaaggccccggaacgaggccggcccgcgagggcccgcgctcccctcctccccggcggccgcactcacccactccggaatcggccctgtcgcccccgcccgcactccagagccggctgagaacggcagcggcgagggctccacgtgcagcgtctctccgggtaagacctgcagctcccgcgactagaagtgtgaggtcccagggcccttcccgcggaatcggcgctgagaagccccaacccccctcccgcctcccaggcaccttcgggtccaggactacaactcccggcagggtgcgcaaaacgaccgcccaaggcaacggaggctcacgaggtacaaggaagcacaacgccccaatccgctttgttttacacagtctcactttccctgcacctttatacacttcgataaccctaacgaacaggacgctgactcggaggggagcttgaactaggggaaaggccactcaaagagcgcatgcgtacagagcaaggtttcaaggaggggaaaaagaacgggtcaaattaggcgaagaaaagatggcggaggctgtgccaggggacccggaagcacttaccctccacttcctcctcctgtttggcttctgtctcacctagacccgtccggtcgcagactgtctccgagacgcttcctgtccggtgagcgtcgaccgactgaaacggcggcccataatgcattgcgatggcgggtaggcgtgtgggggcggagccagggccggaagtagagcggaggtggtggcggcggaggctttggcagctcgggactgagtgcaaaggtgactgggagggtagctagatcagcgtggccttttgggactccagttctgggttttttcacgaggcctgggctgcctctcacctttactaggaggagagagcagctctgtgtcctggggaccttcacggcctggcccggggtcacagctgacctctacgtttgtagaccttggagtttgccgtagacccagaaataagatcgataccctctctgagggcaaatcggggcggcgcggggggcagggaggcccgggggtctcgggcccgcagcctggctggggcaacccaaggtcaggcgcgcgggagagattttcggccaggcctacccgccccgggcgcacgggagcgtctaggctacttaggcagaacgtgtaccattaagagggaaaaaattagtcataatattgaaagtttgcatcccacctaaaaacgatggtgctaacacttcattaggcgactttatggattgttcataggaatatgcactgaagaggcagcgaacctactaacctttggccggaatcagcatgattcttcagaggctcttcaggttctcctctgtcattcggtcagccgtctcagtccatttgcggaggaacattggtgttacagcagtggcatttaataaggaacttgatcctatacagaaactctttgtggacaagattagagaatacaaatctaagcgacagacatctggaggacctgttgatgctagttcagagtatcagcaagagctggagagggagctttttaagctcaagcaaatgtttggtaatgcagacatgaatacatttcccaccttcaaatttgaagatcccaaatttgaagtcatcgaaaaaccccaggcctgaagaaataaagtaaaattaatctggtaatttgtcacggattagttgtacaactagttagaagtttcagaataaacatgcatttcataactgtcaaatgttcttttaattctgagtccaaataaattatttggtgatgttga

SEQ ID NO: 371342 - DNA, 1829 bp, Homo sapiens
  misc_feature (1658)..(1658): n is a, c, g, or t
  misc_feature (1672)..(1672): n is a, c, g, or t
ggatttgaaatgagtgaatcgctgagtcccgcgatgagacagggtctgcattttgctcttaaaatctcgggggcgtcaggaccacatcccagctgagcaggctgagactgctgaggagtgcggacgggcgaggaggggacgcggaaaggagggagcggcgacaggcgacccgtccggcacgggtcccggcggtgcccggtccccccgggctccaggccgctcgccccccgcccctccccttcgctccccgcacagcctctcccgcccctccccacccggctccctcaagtctccacgaacggaaatgggagtcacagcgccggggaccagcggaaacaaaacacagaggcggccgcgggggggcccttgtgggggaaaaggccccggaacgaggccggcccgcgagggcccgcgctcccctcctccccggcggccgcactcacccactccggaatcggccctgtcgcccccgcccgcactccagagccggctgagaacggcagcggcgagggctccacgtgcagcgtctctccgggtaagacctgcagctcccgcgactagaagtgtgaggtcccagggcccttcccgcggaatcggcgctgagaagccccaacccccctcccgcctcccaggcaccttcgggtccaggactacaactcccggcagggtgcgcaaaacgaccgcccaaggcaacggaggctcacgaggtacaaggaagcacaacgccccaatccgctttgttttacacagtctcactttccctgcacctttatacacttcgataaccctaacgaacaggacgctgactcggaggggagcttgaactaggggaaaggccactcaaagagcgcatgcgtacagagcaaggtttcaaggaggggaaaaagaacgggtcaaattaggcgaagaaaagatggcggaggctgtgccaggggacccggaagcacttaccctccacttcctcctcctgtttggcttctgtctcacctagacccgtccggtcgcagactgtctccgagacgcttcctgtccggtgagcgtcgaccgactgaaacggcggcccataatgcattgcgatggcgggtaggcgtgtgggggcggagccagggccggaagtagagcggaggtggtggcggcggaggctttggcagctcgggactgagtgcaagaatcagcatgattcttcagaggctcttcaggttctcctctgtcattcggtcagccgtctcagtccatttgcggaggaacattggtgttacagcagtggcatttaataaggaacttgatcctatacagaaactctttgtggacaagattagagaatacaaatctaagcgacagacatctggaggacctgttgatgctagttcagagtatcagcaagagctggagagggagctttttaagctcaagcaaatgtttggtaatgcagacatgaatacatttcccaccttcaaatttgaagatcccaaatttgaagtcatcgaaaaaccccaggcctgaagaaataaagtaaaattaatctggtaatttgtcacggattagttgtacaactagttagaagtttcagaataaacatgcatttcataactgtcaaaaaaaaaaaaaaaaaaaaaaaaaaaaaaaaaaaaaaaaaaaaaaaaaaaaaaaaaaaaaanaaaaaaaaaaaaancaagtttttgcttgcggccgaaattgggcgctattggcccaattccccctatggggagcggtttacatccacgggccggggttaacaggggggaatgggaaacccttggggttccaaattatgccttgggaaaaaccccttttcgcggggggggaac

SEQ ID NO: 371343 - DNA, 1550 bp, Homo sapiens
  misc_feature (1495)..(1495): n is a, c, g, or t
  misc_feature (1524)..(1524): n is a, c, g, or t
  misc_feature (1530)..(1530): n is a, c, g, or t
  misc_feature (1549)..(1550): n is a, c, g, or t
ggatttgaaatgagtgaatcgctgagtcccgcgatgagacagggtctgcattttgctcttaaaatctcgggggcgtcaggaccacatcccagctgagcaggctgagactgctgaggagtgcggacgggcgaggaggggacgcggaaaggagggagcggcgacaggcgacccgtccggcacgggtcccggcggtgcccggtccccccgggctccaggccgctcgccccccgcccctccccttcgctccccgcacagcctctcccgcccctccccacccggctccctcaagtctccacgaacggaaatgggagtcacagcgccggggaccagcggaaacaaaacacagaggcggccgcgggggggcccttgtgggggaaaaggccccggaacgaggccggcccgcgagggcccgcgctcccctcctccccggcggccgcactcacccactccggaatcggccctgtcgcccccgcccgcactccagagccggctgagaacggcagcggcgagggctccacgtgcagcgtctctccgggtaagacctgcagctcccgcgactagaagtgtgaggtcccagggcccttcccgcggaatcggcgctgagaagccccaacccccctcccgcctcccaggcaccttcgggtccaggactacaactcccggcagggtgcgcaaaacgaccgcccaaggcaacggaggctcacgaggtacaaggaagcacaacgccccaatccgctttgttttacacagtctcactttccctgcacctttatacacttcgataaccctaacgaacaggacgctgactcggaggggagcttgaactaggggaaaggccactcaaagagcgcatgcgtacagagcaaggtttcaaggaggggaaaaagaacgggtcaaattaggcgaagaaaagatggcggaggctgtgccaggggacccggaagcacttaccctccacttcctcctcctgtttggcttctgtctcacctagacccgtccggtcgcagactgtctccgagacgcttcctgtccggtgagcgtcgaccgactgaaacggcggcccataatgcattgcgatggcgggtaggcgtgtgggggcggagccagggccggaagtagagcggaggtggtggcggcggaggctttggcagctcgggactgagtgcaagaatcagcatgattcttcagaggctcttcaggttctcctctgtcattcggtcagccgtctcagtccatttgcggaggaacattggtgttacagcagtggcatttaataaggaacttgatcctatacagaaactctttgtggacaagattagagaatacaaatctaagcgacagacatctggaggacctgttgatgctagttcagagtatcagcaagagctggagagggagctttttaagctcaagcaaatgtttggtaatgcagacatgaatacatttcccaccttcaaatttgaagatcccaaatttgaagtcatcgattacccgncccaccagtcgaaccttcagaataccccncatttnacaccggcacaagctcccnn

SEQ ID NO: 371344 - DNA, 518 bp, Homo sapiens
gacttagtatgcggcacactgaagggcttgttctgattgcgaggggaggtgcttgccccgtcagcccctgattctttcccagacatgtcaggaataggagaatcctccataggggatataatattttcctccaccagggcctgcaggaggcgctgcgtcagggctatacagaaactctttgtggacaagattagagaatacaaatctaagcgacagacatctggaggacctgttgatgctagttcagagtatcagcaagagctggagagggagctttttaagctcaagcaaatgtttggtaatgcagacatgaatacatttcccaccttcaaatttgaagatcccaaatttgaagtcatcgaaaaaccccaggcctgaagaaataaagtaaaattaatctggtaatttgtcacggattagttgtacaactagttagaagtttcagaataaacatgcatttcataactgtcaaatgttcttttaattctgagtccaaataaattatttggtgatgttga

SEQ ID NO: 371345 - DNA, 2237 bp, Homo sapiens
ggatttgaaatgagtgaatcgctgagtcccgcgatgagacagggtctgcattttgctcttaaaatctcgggggcgtcaggaccacatcccagctgagcaggctgagactgctgaggagtgcggacgggcgaggaggggacgcggaaaggagggagcggcgacaggcgacccgtccggcacgggtcccggcggtgcccggtccccccgggctccaggccgctcgccccccgcccctccccttcgctccccgcacagcctctcccgcccctccccacccggctccctcaagtctccacgaacggaaatgggagtcacagcgccggggaccagcggaaacaaaacacagaggcggccgcgggggggcccttgtgggggaaaaggccccggaacgaggccggcccgcgagggcccgcgctcccctcctccccggcggccgcactcacccactccggaatcggccctgtcgcccccgcccgcactccagagccggctgagaacggcagcggcgagggctccacgtgcagcgtctctccgggtaagacctgcagctcccgcgactagaagtgtgaggtcccagggcccttcccgcggaatcggcgctgagaagccccaacccccctcccgcctcccaggcaccttcgggtccaggactacaactcccggcagggtgcgcaaaacgaccgcccaaggcaacggaggctcacgaggtacaaggaagcacaacgccccaatccgctttgttttacacagtctcactttccctgcacctttatacacttcgataaccctaacgaacaggacgctgactcggaggggagcttgaactaggggaaaggccactcaaagagcgcatgcgtacagagcaaggtttcaaggaggggaaaaagaacgggtcaaattaggcgaagaaaagatggcggaggctgtgccaggggacccggaagcacttaccctccacttcctcctcctgtttggcttctgtctcacctagacccgtccggtcgcagactgtctccgagacgcttcctgtccggtgagcgtcgaccgactgaaacggcggcccataatgcattgcgatggcgggtaggcgtgtgggggcggagccagggccggaagtagagcggaggtggtggcggcggaggctttggcagctcgggactgagtgcaaaggaatatgcactgaagaggcagcgaacctactaacctttggccggaatcagcatgattcttcagaggctcttcaggttctcctctgtcattcggtcagccgtctcagtccatttgcggaggaacattggtgttacagcagtggcatttaataaggaacttgatcctatacagaaactctttgtggacaagattagagaatacaaatctaagcgacagacatctggaggacctgttgatgctagttcagagtatcagcaagagctggagagggagctttttaagctcaagcaaatgtttggtaatgcagacatgaatacatttcccaccttcaaatttgaaggtacgtcttataaatcacagattcattcttgtgggggataagtgaagaatatttacacttacctggatttttagagaactgaatgacagtgttgacatgtgaatttattaggaccatgacgtgtgcctgagaagctgccggctaaatgtttgctgttagaataagagcagtataggagatcacataacatagtgattaaatggtggggatctgaaatcgaactgcccaatcttgaatccttataatcactttcagctgtgtaatcttgagtaattaactggtgcatgtctcctcatctgacatttggggagaattatagtatcttctgcatatgtagttaaatgacataatatatgccaaagtccattaatggaatgcatggctcatagaaagtgttgcataaatgtttagctatatttctatgtaaatgtttacaaacagtgtttactaaaaaaatcagaaaattgatgagttaaatcttgagcattctacataatccattttattgcaatttggctaagcttgacccttttttccccctcttcttagatcccaaatttgaagtcatcgaaaaaccccaggcctgaagaaataaagtaaaattaatctggtaatttgtcacggattagttgtacaactagttagaagtttcagaataaacatgcatttcataactgtcaaatgttcttttaattctgagtccaaataaattatttggtgatgttga

SEQ ID NO: 371346 - DNA, 1857 bp, Homo sapiens
ggatttgaaatgagtgaatcgctgagtcccgcgatgagacagggtctgcattttgctcttaaaatctcgggggcgtcaggaccacatcccagctgagcaggctgagactgctgaggagtgcggacgggcgaggaggggacgcggaaaggagggagcggcgacaggcgacccgtccggcacgggtcccggcggtgcccggtccccccgggctccaggccgctcgccccccgcccctccccttcgctccccgcacagcctctcccgcccctccccacccggctccctcaagtctccacgaacggaaatgggagtcacagcgccggggaccagcggaaacaaaacacagaggcggccgcgggggggcccttgtgggggaaaaggccccggaacgaggccggcccgcgagggcccgcgctcccctcctccccggcggccgcactcacccactccggaatcggccctgtcgcccccgcccgcactccagagccggctgagaacggcagcggcgagggctccacgtgcagcgtctctccgggtaagacctgcagctcccgcgactagaagtgtgaggtcccagggcccttcccgcggaatcggcgctgagaagccccaacccccctcccgcctcccaggcaccttcgggtccaggactacaactcccggcagggtgcgcaaaacgaccgcccaaggcaacggaggctcacgaggtacaaggaagcacaacgccccaatccgctttgttttacacagtctcactttccctgcacctttatacacttcgataaccctaacgaacaggacgctgactcggaggggagcttgaactaggggaaaggccactcaaagagcgcatgcgtacagagcaaggtttcaaggaggggaaaaagaacgggtcaaattaggcgaagaaaagatggcggaggctgtgccaggggacccggaagcacttaccctccacttcctcctcctgtttggcttctgtctcacctagacccgtccggtcgcagactgtctccgagacgcttcctgtccgaatcagcatgattcttcagaggctcttcaggttctcctctgtcattcggtcagccgtctcagtccatttgcggaggaacattggtgttacagcagtggcatttaataaggaacttgatcctatacagaaactctttgtggacaagattagagaatacaaatctaagcgacagacatctggaggacctgttgatgctagttcagagtatcagcaagagctggagagggagctttttaagctcaagcaaatgtttggtaatgcagacatgaatacatttcccaccttcaaatttgaagagcatttttctcagcatttgagaagttggcagccatccagagatgatgacattctaatcttaagcagctaaccagcagctagccttgtagctacagaagaaaatgtttgccgatccctgactcgcggtgaaaattttattttgggggcagagccatgttacagaagcccgacctcccaggaagggatctggtgagagacatagcatgtcatagacaagtcaaagggggagcatcttcccggtggcctggtgtcccaggcacatgctaggcactcagtgggtgcttaatccatttgttcggtgaatcctggggatttcttcgccaattgggtagaaagagcagactcttttgaaagaagattaacctgcccagtgcagtggctcatgcctataatcccagcactttgggaggctgatgggggtggatcatttgaggtcagaggtttgagaccagcctggccaacatggtgaaacccttctctactaaaatacaaaaattagccaggtgtggtggtacacgcctataatc

SEQ ID NO: 371347 - DNA, 1444 bp, Homo sapiens
ggatttgaaatgagtgaatcgctgagtcccgcgatgagacagggtctgcattttgctcttaaaatctcgggggcgtcaggaccacatcccagctgagcaggctgagactgctgaggagtgcggacgggcgaggaggggacgcggaaaggagggagcggcgacaggcgacccgtccggcacgggtcccggcggtgcccggtccccccgggctccaggccgctcgccccccgcccctccccttcgctccccgcacagcctctcccgcccctccccacccggctccctcaagtctccacgaacggaaatgggagtcacagcgccggggaccagcggaaacaaaacacagaggcggccgcgggggggcccttgtgggggaaaaggccccggaacgaggccggcccgcgagggcccgcgctcccctcctccccggcggccgcactcacccactccggaatcggccctgtcgcccccgcccgcactccagagccggctgagaacggcagcggcgagggctccacgtgcagcgtctctccgggtaagacctgcagctcccgcgactagaagtgtgaggtcccagggcccttcccgcggaatcggcgctgagaagccccaacccccctcccgcctcccaggcaccttcgggtccaggactacaactcccggcagggtgcgcaaaacgaccgcccaaggcaacggaggctcacgaggtacaaggaagcacaacgccccaatccgctttgttttacacagtctcactttccctgcacctttatacacttcgataaccctaacgaacaggacgctgactcggaggggagcttgaactaggggaaaggccactcaaagagcgcatgcgtacagagcaaggtttcaaggaggggaaaaagaacgggtcaaattaggcgaagaaaagatggcggaggctgtgccaggggacccggaagcacttaccctccacttcctcctcctgtttggcttctgtctcacctagacccgtccggtcgcagactgtctccgagacgcttcctgtccgaatcagcatgattcttcagaggctcttcaggttctcctctgtcattcggtcagccgtctcagtccatttgcggaggaacattggtgttacagcagtggcatttaataaggaacttgatcctatacagaaactctttgtggacaagattagagaatacaaatctaagcgacataagctcaagcaaatgtttggtaatgcagacatgaatacatttcccaccttcaaatttgaagatcccaaatttgaagtcatcgaaaaaccccaggcctgaagaaataaagtaaaattaatctggtaatttgtcacggattagttgtacaactagttagaagtttcagaataaacatgcatttcataactgtcaaatgttcttttaattctgagtccaaataaattatttggtgatgttga

SEQ ID NO: 371348 - DNA, 1452 bp, Homo sapiens
  misc_feature (1357)..(1357): n is a, c, g, or t
ggatttgaaatgagtgaatcgctgagtcccgcgatgagacagggtctgcattttgctcttaaaatctcgggggcgtcaggaccacatcccagctgagcaggctgagactgctgaggagtgcggacgggcgaggaggggacgcggaaaggagggagcggcgacaggcgacccgtccggcacgggtcccggcggtgcccggtccccccgggctccaggccgctcgccccccgcccctccccttcgctccccgcacagcctctcccgcccctccccacccggctccctcaagtctccacgaacggaaatgggagtcacagcgccggggaccagcggaaacaaaacacagaggcggccgcgggggggcccttgtgggggaaaaggccccggaacgaggccggcccgcgagggcccgcgctcccctcctccccggcggccgcactcacccactccggaatcggccctgtcgcccccgcccgcactccagagccggctgagaacggcagcggcgagggctccacgtgcagcgtctctccgggtaagacctgcagctcccgcgactagaagtgtgaggtcccagggcccttcccgcggaatcggcgctgagaagccccaacccccctcccgcctcccaggcaccttcgggtccaggactacaactcccggcagggtgcgcaaaacgaccgcccaaggcaacggaggctcacgaggtacaaggaagcacaacgccccaatccgctttgttttacacagtctcactttccctgcacctttatacacttcgataaccctaacgaacaggacgctgactcggaggggagcttgaactaggggaaaggccactcaaagagcgcatgcgtacagagcaaggtttcaaggaggggaaaaagaacgggtcaaattaggcgaagaaaagatggcggaggctgtgccaggggacccggaagcacttaccctccacttcctcctcctgtttggcttctgtctcacctagacccgtccggtcgcagactgtctccgagacgcttcctgtccgaatcagcatgattcttcagaggctcttcaggttctcctctgtcattcggtcagccgtctcagtccatttgcggaggaacattggtgttacagcagtggcatttaataaggaacttgatcctatacagaaactctttgtggacaagattagagaatacaaatctaagcgacacccttccgcagcccctgtggatgaaagtttttagtcatcaccgtatggggtgagagcaattgttttaggatcaagcaagtgtttggtgagtgtgacattaataagtttccctcatttttgtttcaaggtcgcttatttgtagtggtttttaanaccccaggcctgcaattgtaaagtacaattaatatggtcatgtggcacgccccacctgtgcttttaaaaaacagcatcaaaatttttttgcgttt

SEQ ID NO: 371349 - DNA, 1676 bp, Homo sapiens
ggatttgaaatgagtgaatcgctgagtcccgcgatgagacagggtctgcattttgctcttaaaatctcgggggcgtcaggaccacatcccagctgagcaggctgagactgctgaggagtgcggacgggcgaggaggggacgcggaaaggagggagcggcgacaggcgacccgtccggcacgggtcccggcggtgcccggtccccccgggctccaggccgctcgccccccgcccctccccttcgctccccgcacagcctctcccgcccctccccacccggctccctcaagtctccacgaacggaaatgggagtcacagcgccggggaccagcggaaacaaaacacagaggcggccgcgggggggcccttgtgggggaaaaggccccggaacgaggccggcccgcgagggcccgcgctcccctcctccccggcggccgcactcacccactccggaatcggccctgtcgcccccgcccgcactccagagccggctgagaacggcagcggcgagggctccacgtgcagcgtctctccgggtaagacctgcagctcccgcgactagaagtgtgaggtcccagggcccttcccgcggaatcggcgctgagaagccccaacccccctcccgcctcccaggcaccttcgggtccaggactacaactcccggcagggtgcgcggctcttcaggttctcctctgtcattcggtcagccgtctcagtccatttgcggaggaacattggtgttacagcagtggcatttaataaggaacttgatcctatacagaaactctttgtggacaagattagagaatacaaatctaagcgacagacatctggaggacctgttgatgctagttcagagtatcagcaagagctggagagggagctttttaagctcaagcaaatgtttggtaatgcagacatgaatacatttcccaccttcaaatttgaaggtacgtcttataaatcacagattcattcttgtgggggataagtgaagaatatttacacttacctggatttttagagaactgaatgacagtgttgacatgtgaatttattaggaccatgacgtgtgcctgagaagctgccggctaaatgtttgctgttagaataagagcagtataggagatcacataacatagtgattaaatggtggggatctgaaatcgaactgcccaatcttgaatccttataatcactttcagctgtgtaatcttgagtaattaactggtgcatgtctcctcatctgacatttggggagaattatagtatcttctgcatatgtagttaaatgacataatatatgccaaagtccattaatggaatgcatggctcatagaaagtgttgcataaatgtttagctatatttctatgtaaatgtttacaaacagtgtttactaaaaaaatcagaaaattgatgagttaaatcttgagcattctacataatccattttattgcaatttggctaagcttgacccttttttccccctcttcttagatcccaaatttgaagtcatcgaaaaaccccaggcctgaagaaataaagtaaaattaatctggtaatttgtcacggattagttgtacaactagttagaagtttcagaataaacatgcatttcataactgtcaaatgttcttttaattctgagtccaaataaattatttggtgatgttga

SEQ ID NO: 371350 - DNA, 3514 bp, Homo sapiens
cacagggagcctgggctggaagaggcagcaaaagggaaaatcagaagagtggacactggcaagaggagggcagcctttttcccagcttccttgcaccatggacagctcccattaagccacctctccatcctggggccaggactcttatgccccattcctgtcaaattgagatttcatccaccattctccaaggacagtgaagttataccctagttccagtgttgggatcagtggcccctctggacatgcctctcctggaaggttctgtgggggtggaggatcttgtcctcctggaacccttggtggaggagtcactgctcaagaatcttcagcttcgctatgaaaacaaggagatttatacctacattgggaatgtggtgatctcagtgaatccctatcaacagcttcccatctatgggccagagttcattgccaaatatcaagactatactttctatgagctgaagccccatatctacgcattggcaaatgtggcgtaccagtcactgagggacagggaccgagaccagtgtatcctcatcacaggcgagagtggatcagggaagactgaggccagcaagctggtgatgtcttatgtggctgccgtctgtgggaaaggagagcaggtgaactctgtgaaggagcagctgctacagtctaacccagtgctggaggcttttggcaatgccaagaccattcgcaacaacaattcctcccgatttggaaaatacatggatattgaatttgacttcaagggatcccccctcggtggtgtcatcacaaactatctgcttgagaaatcccgattagtgaagcagctcaaaggagaaaggaacttccacatcttctatcagctgctggctggagcagatgaacagctgctgaaggccctgaagcttgagcgggatacaactggctatgcctatctgaatcatgaagtatccagagtggatggcatggacgacgcctccagcttcagggctgtacagagtgcaatggcagtgattgggttctcggaggaggagattcgacaagtgctagaggtgacatccatggtgctaaagctggggaacgtgttggtggctgatgagttccaggccagtgggataccagcaagtggcatccgtgatgggagaggtgttcgggagattggggagatggtgggcttgaattcagaagaagtagagagagctttgtgctcgaggaccatggaaacagccaaggaaaaggtggtcactgcactgaatgttatgcaggctcagtatgctcgggacgccctggctaagaacatctacagccgcctctttgactggatagtgaatcgaatcaatgagagcatcaaggtgggcatcggggaaaagaagaaggtaatgggagtccttgatatctacggttttgagatattagaggataatagctttgagcaatttgtgatcaactactgcaatgagaagctgcagcaggtgttcatagagatgaccctgaaagaagagcaagaggaatataagagagaaggcataccgtggacaaaggtggactactttgataatggcatcatttgtaagctcattgagcataatcagcgaggtatcctggccatgttggatgaggagtgcctgcggcctggggtggtcagtgactccactttcctagcaaagctgaaccagctcttctccaagcatggccactacgagagcaaagtcacccagaatgcccagcgtcagtatgaccacaccatgggcctcagctgcttccgcatctgccactatgcgggcaaggtgacatacaacgtgaccagctttattgacaagaataatgacctactcttccgagacctgttgcaggccatgtggaaggcccagcaccccctccttcggtccttgtttcctgagggcaatcctaagcaggcatctctcaaacgccccccgactgctggggcccagttcaagagttctgtggccatcctcatgaagaatctgtattccaagagccccaactacatcaggtgcataaagcccaatgagcatcagcagcgaggtcagttctcttcagacctggtggcaacccaggctcggtacctgggactgctggagaacgtacgggtgcgacgggcaggctatgcccaccgccagggttatgggcccttcctggaaaggtaccgattgctgagccggagcacctggcctcactggaatgggggagaccgggaaggtgttgagaaggtcctgggggagctgagcatgtcctcgggggagctggcctttggcaagacaaagatcttcattagaagccccaagactcttttctacctcgaagaacagaggcgcctgagactccagcagctggccacactcatacagaagatttaccgaggctggcgctgccgcacccactaccaactgatgcgaaagagtcagatcctcatctcctcttggtttcggggaaacatgcaaaagaaatgctatgggaagataaaggcatccgtgttattgatccaggcttttgtgagagggtggaaggcccgaaagaattatcgcaaatatttccggtcagaggctgccctcaccttggcagatttcatctacaagagcatggtacagaaattcctactggggctgaagaacaatttgccatccacaaacgtcttagacaagacatggccagccgccccctacaagtgcctcagcacagcaaatcaggagctgcagcagctcttctaccagtggaagtgcaagaggttccgggatcagctgtccccgaagcaggtagagatcctgagggaaaagctctgtgccagtgaactgttcaagggcaagaaggcttcatatccccagagtgtccccattccattctgtggtgactacattgggctgcaagggaaccccaagctgcagaagctgaaaggcggggaggaggggcctgttctgatggcagaggccgtgaagaaggtcaatcgtggcaatggcaagacttcttctcggattctcctcctgaccaagggccatgtgattctcacagacaccaagaagtcccaggccaaaattgtcattgggctagacaatgtggctggggtgtcagtcaccagcctcaaggatgggctctttagcttgcatctgagtgagatgtcatcggtgggctccaagggggacttcctgctggtcagcgagcatgtgattgaactgctgaccaaaatgtaccgggctgtgctggatgccacgcagaggcagcttacagtcaccgtgactgagaagttctcagtgaggttcaaggagaacagtgtggctgtcaaggtcgtccagggccctgcaggtggtgacaacagcaagctacgctacaaaaaaaaggggagtcattgcttggaggtgactgtgcagtgaggagggggcaccatgcagagatggcagttgcttcctcctgaaccagcactaatccccctctgccctcctgtgtgggaggatctctaacccctctgatcgtggcgcatggcttggggattaaactacccttgaagagg

SEQ ID NO: 371351 - DNA, 3543 bp, Homo sapiens
cacagggagcctgggctggaagaggcagcaaaagggaaaatcagaagagtggacactggcaagaggagggcagcctttttcccagcttccttgcaccatggacagctcccattaagccacctctccatcctggggccaggactcttatgccccattcctgtcaaattgagatttcatccaccattctccaaggacagtgaagttataccctagttccagtgttgggatcagtggcccctctggacatgcctctcctggaaggttctgtgggggtggaggatcttgtcctcctggaacccttggtggaggagtcactgctcaagaatcttcagcttcgctatgaaaacaaggagatttatacctacattgggaatgtggtgatctcagtgaatccctatcaacagcttcccatctatgggccagagttcattgccaaatatcaagactatactttctatgagctgaagccccatatctacgcattggcaaatgtggcgtaccagtcactgagggacagggaccgagaccagtgtatcctcatcacaggcgagagtggatcagggaagactgaggccagcaagctggtgatgtcttatgtggctgccgtctgtgggaaaggagagcaggtgaactctgtgaaggagcagctgctacagtctaacccagtgctggaggcttttggcaatgccaagaccattcgcaacaacaattcctcccgatttggaaaatacatggatattgaatttgacttcaagggatcccccctcggtggtgtcatcacaaactatctgcttgagaaatcccgattagtgaagcagctcaaaggagaaaggaacttccacatcttctatcagctgctggctggagcagatgaacagctgctgaaggccctgaagcttgagcgggatacaactggctatgcctatctgaatcatgaagtatccagagtggatggcatggacgacgcctccagcttcagggctgtacagagtgcaatggcagtgattgggttctcggaggaggagattcgacaagtgctagaggtgacatccatggtgctaaagctggggaacgtgttggtggctgatgagttccaggccagtgggataccagcaagtggcatccgtgatgggagaggtgttcgggagattggggagatggtgggcttgaattcagaagaagtagagagagctttgtgctcgaggaccatggaaacagccaaggaaaaggtggtcactgcactgaatgttatgcaggctcagtatgctcgggacgccctggctaagaacatctacagccgcctctttgactggatagtgaatcgaatcaatgagagcatcaaggtgggcatcggggaaaagaagaaggtaatgggagtccttgatatctacggttttgagatattagaggataatagctttgagcaatttgtgatcaactactgcaatgagaagctgcagcaggtgttcatagagatgaccctgaaagaagagcaagaggaatataagagagaaggcataccgtggacaaaggtggactactttgataatggcatcatttgtaagctcattgagcataatcagcgaggtatcctggccatgttggatgaggagtgcctgcggcctggggtggtcagtgactccactttcctagcaaagctgaaccagctcttctccaagcatggccactacgagagcaaagtcacccagaatgcccagcgtcagtatgaccacaccatgggcctcagctgcttccgcatctgccactatgcgggcaaggtgacatacaacgtgaccagctttattgacaagaataatgacctactcttccgagacctgttgcaggccatgtggaaggcccagcaccccctccttcggtccttgtttcctgagggcaatcctaagcaggcatctctcaaacgccccccgactgctggggcccagttcaagagttctgtggccatcctcatgaagaatctgtattccaagagccccaactacatcaggtgcataaagcccaatgagcatcagcagcgaggtcagttctcttcagacctggtggcaacccaggctcggtacctgggactgctggagaacgtacgggtgcgacgggcaggctatgcccaccgccagggttatgggcccttcctggaaaggtaccgattgctgagccggagcacctggcctcactggaatgggggagaccgggaaggtgttgagaaggtcctgggggagctgagcatgtcctcgggggagctggcctttggcaagacaaagatcttcattagaagccccaagactcttttctacctcgaagaacagaggcgcctgagactccagcagctggccacactcatacagaagatttaccgaggctggcgctgccgcacccactaccaactgatgcgaaagagtcagatcctcatctcctcttggtttcggggaaacatggcccgaaagaattatcgcaaatatttccggtcagaggctgccctcaccttggcagatttcatctacaagagcatggtacagaaattcctactggggctgaagaacaatttgccatccacaaacgtcttagacaagacatggccagccgccccctacaagtgcctcagcacagcaaatcaggagctgcagcagctcttctaccagtggaagtgcaagaggttccgggatcagctgtccccgaagcaggtagagatcctgagggaaaagctctgtgccagtgaactgttcaagggcaagaaggcttcatatccccagagtgtccccattccattctgtggtgactacattgggctgcaagggaaccccaagctgcagaagctgaaaggcggggaggaggggcctgttctgatggcagaggccgtgaagaaggtcaatcgtggcaatggcaagacttcttctcggattctcctcctgaccaagggccatgtgattctcacagacaccaagaagtcccaggccaaaattgtcattgggctagacaatgtggctggggtgtcagtcaccagcctcaaggatgggctctttagcttgcatctgagtgagatgtcatcggtgggctccaagggggacttcctgctggtcagcgagcatgtgattgaactgctgaccaaaatgtaccgggctgtgctggatgccacgcagaggcagcttacagtcaccgtgactgagaagttctcagtgaggttcaaggagaacagtgtggctgtcaaggtcgtccagggccctgcaggtggtgacaacagcaagctacgctacaaaaaaaaggggagtcattgcttggaggtgactgtgcagtgaggagggggcaccatgcagagatggcagttgcttcctcctgaaccagcactaatccccctctgccctcctgtgtgggaggatctctaacccctctgatcgtggcgcatggcttggggattaaactacccttgaagaggacccttgtcccaaacccttcttgttctctcctccaaaagtagcttcctccaacccgcagcctctctgcacactaataaaacatgtggcttggaaaggt

SEQ ID NO: 371352 - DNA, 380 bp, Homo sapiens
atagtgaatcgaatcaatgagagcatcaaggcaagtggccgctctgctttctccatgctctcctgtctgcctcaccttcctgccctgtcaccagccctatatcttggtttctgagatgagcagagtagggaggatgatggggagggtacagttccttctaacagtgtgttgtcatggaaacatcactggcttttgagttagacaatctggatatatcatctacttacttaattcaaagtcatgtggactttcaattaagtaaaaagtcatgtggactttcaatttcacaaaggttctgggcctcagtgtcctgatttggaaatgcccactaagaaacactaatatgctgggtgtggtggtccatgcctgtaatcccagga

SEQ ID NO: 371353 - DNA, 275 bp, Homo sapiens
acaacaacaaaaattagtctatcatcacaggaattaatgatcccaaaacaaaggaggcaggggaagaacccaaaacaaaaatgactcctttggataagtgaatgaatccattagggcaagggctgtgaggtgtcaaggctggagggctccagagagcctgggtactaaccatcttccccaacactggccctcccagaggccctgaagcttgagcgggatacaactggctatgcctatctgaatcatgaagtatccagagtggatggcatggacga

SEQ ID NO: 371354 - DNA, 209 bp, Homo sapiens
gctgaactcctcccgcagctagtgcagagctgtgggctggcatctggagagcagatggcaggctgtgtttgcgccctgccaggtggagtgggggcaattaatcctgcctttcctcacccttgcctgttccgtccctagacttcttctcggattctcctcctgaccaagggccatgtgattctcacagacaccaagaagtcccaggccaa

SEQ ID NO: 371355 - DNA, 352 bp, Homo sapiens
atcagccggtccatgtgtgggtgggtgtctgggagtgagaggcctgtaggggagacctgtagaggtgtctgggtgggtagatgcctaacttggcagcagaactttgccttctgctctaagtgtcctcactgccaacttgtctgattttacttccaacttccagctacagtctcagctctttatcttactcaggtctttgcgtggttgaaaaatagtacaacctcttctagaatctgcctgtcttcactttggctcctttcttgtacttttctgccaggcccgaaagaattatcgcaaatatttccggtcagaggctgccctcaccttggcagatttcatctacaagagcatg

SEQ ID NO: 371356 - DNA, 3612 bp, Homo sapiens
cacagggagcctgggctggaagaggcagcaaaagggaaaatcagaagagtggacactggcaagaggagggcagcctttttcccagcttccttgcaccatggacagctcccattaagccacctctccatcctggggccaggactcttatgccccattcctgtcaaattgagatttcatccaccattctccaaggacagtgaagttataccctagttccagtgttgggatcagtggcccctctggacatgcctctcctggaaggttctgtgggggtggaggatcttgtcctcctggaacccttggtggaggagtcactgctcaagaatcttcagcttcgctatgaaaacaaggagatttatacctacattgggaatgtggtgatctcagtgaatccctatcaacagcttcccatctatgggccagagttcattgccaaatatcaagactatactttctatgagctgaagccccatatctacgcattggcaaatgtggcgtaccagtcactgagggacagggaccgagaccagtgtatcctcatcacaggcgagagtggatcagggaagactgaggccagcaagctggtgatgtcttatgtggctgccgtctgtgggaaaggagagcaggtgaactctgtgaaggagcagctgctacagtctaacccagtgctggaggcttttggcaatgccaagaccattcgcaacaacaattcctcccgatttggaaaatacatggatattgaatttgacttcaagggatcccccctcggtggtgtcatcacaaactatctgcttgagaaatcccgattagtgaagcagctcaaaggagaaaggaacttccacatcttctatcagctgctggctggagcagatgaacagctgctgaaggccctgaagcttgagcgggatacaactggctatgcctatctgaatcatgaagtatccagagtggatggcatggacgacgcctccagcttcagggctgtacagagtgcaatggcagtgattgggttctcggaggaggagattcgacaagtgctagaggtgacatccatggtgctaaagctggggaacgtgttggtggctgatgagttccaggccagtgggataccagcaagtggcatccgtgatgggagaggtgttcgggagattggggagatggtgggcttgaattcagaagaagtagagagagctttgtgctcgaggaccatggaaacagccaaggaaaaggtggtcactgcactgaatgttatgcaggctcagtatgctcgggacgccctggctaagaacatctacagccgcctctttgactggatagtgaatcgaatcaatgagagcatcaaggtgggcatcggggaaaagaagaaggtaatgggagtccttgatatctacggttttgagatattagaggataatagctttgagcaatttgtgatcaactactgcaatgagaagctgcagcaggtgttcatagagatgaccctgaaagaagagcaagaggaatataagagagaaggcataccgtggacaaaggtggactactttgataatggcatcatttgtaagctcattgagcataatcagcgaggtatcctggccatgttggatgaggagtgcctgcggcctggggtggtcagtgactccactttcctagcaaagctgaaccagctcttctccaagcatggccactacgagagcaaagtcacccagaatgcccagcgtcagtatgaccacaccatgggcctcagctgcttccgcatctgccactatgcgggcaaggtgacatacaacgtgaccagctttattgacaagaataatgacctactcttccgagacctgttgcaggccatgtggaaggcccagcaccccctccttcggtccttgtttcctgagggcaatcctaagcaggcatctctcaaacgccccccgactgctggggcccagttcaagagttctgtggccatcctcatgaagaatctgtattccaagagccccaactacatcaggtgcataaagcccaatgagcatcagcagcgaggtcagttctcttcagacctggtggcaacccaggctcggtacctgggactgctggagaacgtacgggtgcgacgggcaggctatgcccaccgccagggttatgggcccttcctggaaaggtaccgattgctgagccggagcacctggcctcactggaatgggggagaccgggaaggtgttgagaaggtcctgggggagctgagcatgtcctcgggggagctggcctttggcaagacaaagatcttcattagaagccccaagactcttttctacctcgaagaacagaggcgcctgagactccagcagctggccacactcatacagaagatttaccgaggctggcgctgccgcacccactaccaactgatgcgaaagagtcagatcctcatctcctcttggtttcggggaaacatgcaaaagaaatgctatgggaagataaaggcatccgtgttattgatccaggcttttgtgagagggtggaaggcccgaaagaattatcgcaaatatttccggtcagaggctgccctcaccttggcagatttcatctacaagagcatggtacagaaattcctactggggctgaagaacaatttgccatccacaaacgtcttagacaagacatggccagccgccccctacaagtgcctcagcacagcaaatcaggagctgcagcagctcttctaccagtggaagtgcaagaggttccgggatcagctgtccccgaagcaggtagagatcctgagggaaaagctctgtgccagtgaactgttcaagggcaagaaggcttcatatccccagagtgtccccattccattctgtggtgactacattgggctgcaagggaaccccaagctgcagaagctgaaaggcggggaggaggggcctgttctgatggcagaggccgtgaagaaggtcaatcgtggcaatggcaagacttcttctcggattctcctcctgaccaagggccatgtgattctcacagacaccaagaagtcccaggccaaaattgtcattgggctagacaatgtggctggggtgtcagtcaccagcctcaaggatgggctctttagcttgcatctgagtgagatgtcatcggtgggctccaagggggacttcctgctggtcagcgagcatgtgattgaactgctgaccaaaatgtaccgggctgtgctggatgccacgcagaggcagcttacagtcaccgtgactgagaagttctcagtgaggttcaaggagaacagtgtggctgtcaaggtcgtccagggccctgcaggtggtgacaacagcaagctacgctacaaaaaaaaggggagtcattgcttggaggtgactgtgcagtgaggagggggcaccatgcagagatggcagttgcttcctcctgaaccagcactaatccccctctgccctcctgtgtgggaggatctctaacccctctgatcgtggcgcatggcttggggattaaactacccttgaagaggacccttgtcccaaacccttcttgttctctcctccaaaagtagcttcctccaacccgcagcctctctgcacactaataaaacatgtggcttggaaaggt

SEQ ID NO: 371357 - DNA, 3019 bp, Homo sapiens
cacagggagcctgggctggaagaggcagcaaaagggaaaatcagaagagtggacactggcaagaggagggcagcctttttcccagcttccttgcaccatggacagctcccattaagccacctctccatcctggggccaggactcttatgccccattcctgtcaaattgagatttcatccaccattctccaaggacagtgaagttataccctagttccagtgttgggatcagtggcccctctggacatgcctctcctggaaggttctgtgggggtggaggatcttgtcctcctggaacccttggtggaggagtcactgctcaagaatcttcagcttcgctatgaaaacaaggagatttatacctacattgggaatgtggtgatctcagtgaatccctatcaacagcttcccatctatgggccagagttcattgccaaatatcaagactatactttctatgagctgaagccccatatctacgcattggcaaatgtggcgtaccagtcactgagggacagggaccgagaccagtgtatcctcatcacaggcgagagtggatcagggaagactgaggccagcaagctggtgatgtcttatgtggctgccgtctgtgggaaaggagagcaggtgaactctgtgaaggagcagctgctacagtctaacccagtgctggaggcttttggcaatgccaagaccattcgcaacaacaattcctcccgatttggaaaatacatggatattgaatttgacttcaagggatcccccctcggtggtgtcatcacaaactatctgcttgagaaatcccgattagtgaagcagctcaaaggagaaaggaacttccacatcttctatcagctgctggctggagcagatgaacagctgctgaaggccctgaagcttgagcgggatacaactggctatgcctatctgaatcatgaagtatccagagtggatggcatggacgacgcctccagcttcagggctgtacagagtgcaatggcagtgattgggttctcggaggaggagattcgacaagtgctagaggtgacatccatggtgctaaagctggggaacgtgttggtggctgatgagttccaggccagtgggataccagcaagtggcatccgtgatgggagaggtgttcgggagattggggagatggtgggcttgaattcagaagaagtagagagagctttgtgctcgaggaccatggaaacagccaaggaaaaggtggtcactgcactgaatgttatgcaggctcagtatgctcgggacgccctggctaagaacatctacagccgcctctttgactggatagtgaatcgaatcaatgagagcatcaaggtgggcatcggggaaaagaagaaggtaatgggagtccttgatatctacggttttgagatattagaggataatagctttgagcaatttgtgatcaactactgcaatgagaagctgcagcaggtgttcatagagatgaccctgaaagaagagcaagaggaatataagagagaaggcataccgtggacaaaggtggactactttgataatggcatcatttgtaagctcattgagcataatcagcgaggtatcctggccatgttggatgaggagtgcctgcggcctggggtggtcagtgactccactttcctagcaaagctgaaccagctcttctccaagcatggccactacgagagcaaagtcacccagaatgcccagcgtcagtatgaccacaccatgggcctcagctgcttccgcatctgccactatgcgggcaaggtgacatacaacgtgaccagctttattgacaagaataatgacctactcttccgagacctgttgcaggccatgtggaaggcccagcaccccctccttcggtccttgtttcctgagggcaatcctaagcaggcatctctcaaacgccccccgactgctggggcccagttcaagagttctgtggccatcctcatgaagaatctgtattccaagagccccaactacatcaggtgcataaagcccaatgagcatcagcagcgaggtcagttctcttcagacctggtggcaacccaggctcggtacctgggactgctggagaacgtacgggtgcgacgggcaggctatgcccaccgccagggttatgggcccttcctggaaaggtaccgattgctgagccggagcacctggcctcactggaatgggggagaccgggaaggtgttgagaaggtcctgggggagctgagcatgtcctcgggggagctggcctttggcaagacaaagatcttcattagaagccccaagactcttttctacctcgaagaacagaggcgcctgagactccagcagctggccacactcatacagaagatttaccgaggctggcgctgccgcacccactaccaactgatgcgaaagagtcagatcctcatctcctcttggtttcggggaaacatggcccgaaagaattatcgcaaatatttccggtcagaggctgccctcaccttggcagatttcatctacaagagcatggtacagaaattcctactggggctgaagaacaatttgccatccacaaacgtcttagacaagacatggccagccgccccctacaagtgcctcagcacagcaaatcaggagctgcagcagctcttctaccagtggaagtgcaagaggttccgggatcagctgtccccgaagcaggtagagatcctgagggaaaagctctgtgccagtgaactgttcaagggcaagaaggcttcatatccccagaggtgagggcctcccagaccctgcacagccagttccatcacgcagcagttctcaaacttgagcgtgccttagaatcacctggcaggattgtcacccccaggtgctgtgtccctcctcagagtctctgatccagcaggtcttggggtgaggaccaaaatttgcctttctaacaactccccaggtggtgctgatgtcttggtcctggactgtgctctgtggacactgacagaggatacgtggatgtgggggaaggg

SEQ ID NO: 371358 - DNA, 1449 bp, Homo sapiens
atgtgccctcctgcaaatgacttctgaaggccctattgtcaaaattattgataagttaaagtttttgtatgttactaggggaagaaaactagagtagatttagtgtaatttatcaagcatttatcgattgacactctggtaggcaacgtgtacggtcaactgacacgaagacaaataaaatgaagccatgccattaaggagcctgtccctgccacacccaccatgtgcccttctttttgagatgtcatactactaccttttttttctcattgtagttgtttttaaatttttcatcattgctacccagtagcacctttcccattttcgttgtccagtaagagacattgtaaatgatagtaaattaaagatagaaaacaaggaaaagctgggccatatcttttgtttgacccaggcaacatgtcacaaagttcagacaaacagtctcccatctgaagccagtattttcacaagcacctgctgtgtcatgaatttgacagaaatgcaaacccactttatcttcctgcttgcacatctaggccacagccttgcttccctatctggtgtcttgaactccatgctgaatattctgatgttcatgttttcctccttgactcttctatcctctctgtgactcagcaaccactgacatctgcatcctgtaggaaagagcccctgttcttaagcaatcccagtgccttcaaatatccctataaggccttacttctttcaggatcattttgattttccacataacttgttttgaccataccaaaaagattgaatggaaagtgaattcttaaacaatgtactgcttcacctcaagtatgtagccctagactataaacacatgaggttgcttcagtgtccatgcgtgaatatggatacgaagaaggaaagaacagtggacacattcactaactgtctatagttatacagaaaacagaggtgctgctagtttacctctgaatagagcctcactgtcagaggacctgtttgcttatctctctgccaatgttttctttttcaaaattttagttgactgatggtatctgctaacctagaatcaatccctgctatatgactatcatgccagacccttctctttatcttaactccccacatctcatccctaaatcattgtgctttacctcctcaatctgtttttcaaacttgtgttttgctctccatctgtatatttctagcatagtttattattcctcctgtggactattgcaattagggccacccctaacattttcagggcccaggcaagaatataaatggaggtcgctggcctaagacccaccttgtatcaaatagcccttcctcttcccacactgtatgggttctctggtgcacataagcggacaactcagcctacatacccaagacatgtccaccacatccaccataacttgtatccaccctccattgtctgttgggttagag

SEQ ID NO: 371359 - DNA, 518 bp, Homo sapiens
atccccagcagcagctcagacatctttcatatcaaaaaccctatctacaaagaccccttctgcagctcagaatcccatgatgacaaatgcttctgctacacaggccacactaacagcccaaaaattcaccacagcaaaagttgcatttacgcagagtccttcagcagcacgtaagtccactaatgtacattccccagtgactaatggtctcaagagtacacaaagattcccttctgctcatattacagcaacacggagtacacctgtttccaggacaaccaagcattttcatgaaacaaccccaaataaaggaagtggaaccacttcaggtactacccgtcttctatctgggcacacgtgtttcacgttgacaggtttgcttgggacgctagtaaccatgggcttgctgacttagccaaagaagagttaagaagaaaatacacacaagtatacagactgttcctagtttcttagacttatctgcatattggataaaataaatgcaattgtgctcttca

SEQ ID NO: 371360 - DNA, 2302 bp, Homo sapiens
tccccgagtctagggcccccaagggcgtatgacgccggagccctctgaccgcacctctgaccacaacaaacccctactccacccgtcttgtttgtcccacccttggtgacgcagagccccagcccagaccccgcccaaagcactcatttaactggtattgcggagccacgaggcttctgcttactgcaactcgctccggccgctgggcgtagctgcgactcggcggagtcccggcggcgcgtccttgttctaacccggcgcgccatgaccgtcgcgcggccgagcgtgcccgcggcgctgcccctcctcggggagctgccccggctgctgctgctggtgctgttgtgcctgccggccgtgtggggtgactgtggccttcccccagatgtacctaatgcccagccagctttggaaggccgtacaagttttcccgaggatactgtaataacgtacaaatgtgaagaaagctttgtgaaaattcctggcgagaaggactcagtgatctgccttaagggcagtcaatggtcagatattgaagagttctgcaatcgtagctgcgaggtgccaacaaggctaaattctgcatccctcaaacagccttatatcactcagaattattttccagtcggtactgttgtggaatatgagtgccgtccaggttacagaagagaaccttctctatcaccaaaactaacttgccttcagaatttaaaatggtccacagcagtcgaattttgtaaaaagaaatcatgccctaatccgggagaaatacgaaatggtcagattgatgtaccaggtggcatattatttggtgcaaccatctccttctcatgtaacacagggtacaaattatttggctcgacttctagtttttgtcttatttcaggcagctctgtccagtggagtgacccgttgccagagtgcagagaaatttattgtccagcaccaccacaaattgacaatggaataattcaaggggaacgtgaccattatggatatagacagtctgtaacgtatgcatgtaataaaggattcaccatgattggagagcactctatttattgtactgtgaataatgatgaaggagagtggagtggcccaccacctgaatgcagaggaaaatctctaacttccaaggtcccaccaacagttcagaaacctaccacagtaaatgttccaactacagaagtctcaccaacttctcagaaaaccaccacaaaaaccaccacaccaaatgctcaagcaacacggagtacacctgtttccaggacaaccaagcattttcatgaaacaaccccaaataaaggaagtggaaccacttcaggtactacccgtcttctatctgggcacacgtgtttcacgttgacaggtttgcttgggacgctagtaaccatgggcttgctgacttagccaaagaagagttaagaagaaaatacacacaagtatacagactgttcctagtttcttagacttatctgcatattggataaaataaatgcaattgtgctcttcatttaggatgctttcattgtctttaagatgtgttaggaatgtcaacagagcaaggagaaaaaaggcagtcctggaatcacattcttagcacacctacacctcttgaaaatagaacaacttgcagaattgagagtgattcctttcctaaaagtgtaagaaagcatagagatttgttcgtatttagaatgggatcacgaggaaaagagaaggaaagtgatttttttccacaagatctgtaatgttatttccacttataaaggaaataaaaaatgaaaaacattatttggatatcaaaagcaaataaaaacccaattcagtctcttctaagcaaaattgctaaagagagatgaaccacattataaagtaatctttggctgtaaggcattttcatctttccttcgggttggcaaaatattttaaaggtaaaacatgctggtgaaccaggggtgttgatggtgataagggaggaatatagaatgaaagactgaatcttcctttgttgcacaaatagagtttggaaaaagcctgtgaaaggtgtcttctttgacttaatgtctttaaaagtatccagagatactacaatattaacataagaaaagattatatattatttctgaatcgagatgtccatagtcaaatttgtaaatcttattcttttgtaatatttatttatatttatttatgacagtgaacattctgattttacatgtaaaacaagaaaagttgaagaagatatgtgaagaaaaatgtatttttcctaaatagaaataaatgatcccattttttggta

SEQ ID NO: 371361 - DNA, 2570 bp, Homo sapiens
tccccgagtctagggcccccaagggcgtatgacgccggagccctctgaccgcacctctgaccacaacaaacccctactccacccgtcttgtttgtcccacccttggtgacgcagagccccagcccagaccccgcccaaagcactcatttaactggtattgcggagccacgaggcttctgcttactgcaactcgctccggccgctgggcgtagctgcgactcggcggagtcccggcggcgcgtccttgttctaacccggcgcgccatgaccgtcgcgcggccgagcgtgcccgcggcgctgcccctcctcggggagctgccccggctgctgctgctggtgctgttgtgcctgccggccgtgtggggtgactgtggccttcccccagatgtacctaatgcccagccagctttggaaggccgtacaagttttcccgaggatactgtaataacgtacaaatgtgaagaaagctttgtgaaaattcctggcgagaaggactcagtgatctgccttaagggcagtcaatggtcagatattgaagagttctgcaatcgtagctgcgaggtgccaacaaggctaaattctgcatccctcaaacagccttatatcactcagaattattttccagtcggtactgttgtggaatatgagtgccgtccaggttacagaagagaaccttctctatcaccaaaactaacttgccttcagaatttaaaatggtccacagcagtcgaattttgtaaaaagaaatcatgccctaatccgggagaaatacgaaatggtcagattgatgtaccaggtggcatattatttggtgcaaccatctccttctcatgtaacacagggtacaaattatttggctcgacttctagtttttgtcttatttcaggcagctctgtccagtggagtgacccgttgccagagtgcagagaaatttattgtccagcaccaccacaaattgacaatggaataattcaaggggaacgtgaccattatggatatagacagtctgtaacgtatgcatgtaataaaggattcaccatgattggagagcactctatttattgtactgtgaataatgatgaaggagagtggagtggcccaccacctgaatgcagaggaaaatctctaacttccaaggtcccaccaacagttcagaaacctaccacagtaaatgttccaactacagaagtctcaccaacttctcagaaaaccaccacaaaaaccaccacaccaaatgctcaagcaacacggagtacacctgtttccaggacaaccaagcattttcatgaaacaaccccaaataaaggaagtggaaccacttcaggtactacccgtcttctatctgggcacacgtgtttcacgttgacaggtttgcttgggacgctagtaaccatgggcttgctgacttagccaaagaagagttaagaagaaaatacacacaagtatacagactgttcctagtttcttagacttatctgcatattggataaaataaatgcaattgtgctcttcatttaggatgctttcattgtctttaagatgtgttaggaatgtcaacagagcaaggagaaaaaaggcagtcctggaatcacattcttagcacacctacacctcttgaaaatagaacaacttgcagaattgagagtgattcctttcctaaaagtgtaagaaagcatagagatttgttcgtatttagaatgggatcacgaggaaaagagaaggaaagtgatttttttccacaagatctgtaatgttatttccacttataaaggaaataaaaaatgaaaaacattatttggatatcaaaagcaaataaaaacccaattcagtctcttctaagcaaaattgctaaagagagatgaaccacattataaagtaatctttggctgtaaggcattttcatctttccttcgggttggcaaaatattttaaaggtaaaacatgctggtgaaccaggggtgttgatggtgataagggaggaatatagaatgaaagactgaatcttcctttgttgcacaaatagagtttggaaaaagcctgtgaaaggtgtcttctttgacttaatgtctttaaaagtatccagagatactacaatattaacataagaaaagattatatattatttctgaatcgagatgtccatagtcaaatttgtaaatcttattcttttgtaatatttatttatatttatttatgacagtgaacattctgattttacatgtaaaacaagaaaagttgaagaagatatgtgaagaaaaatgtatttttcctaaatagaaataaatgatcccattttttggtaaaaaaaggaaaacgagagaaccaaacggtggtggggcgccctggcccccagagaagaggttgttaaacccatgcgcgtgtgggacaggggcccaactagtactgtgacagtggcctagacgtgctccagagaaaaaaccggggccaacgaacaaggcgcgtggttctcccacccaagaaaaacgcggcgggacaacgaacggtctgcaacaaacccagagggagctcggaaggcaacaggctatcacaggcgccaaaggagacggata

SEQ ID NO: 371362 - DNA, 2767 bp, Homo sapiens
tccccgagtctagggcccccaagggcgtatgacgccggagccctctgaccgcacctctgaccacaacaaacccctactccacccgtcttgtttgtcccacccttggtgacgcagagccccagcccagaccccgcccaaagcactcatttaactggtattgcggagccacgaggcttctgcttactgcaactcgctccggccgctgggcgtagctgcgactcggcggagtcccggcggcgcgtccttgttctaacccggcgcgccatgaccgtcgcgcggccgagcgtgcccgcggcgctgcccctcctcggggagctgccccggctgctgctgctggtgctgttgtgcctgccggccgtgtggggtgactgtggccttcccccagatgtacctaatgcccagccagctttggaaggccgtacaagttttcccgaggatactgtaataacgtacaaatgtgaagaaagctttgtgaaaattcctggcgagaaggactcagtgatctgccttaagggcagtcaatggtcagatattgaagagttctgcaatcgtagctgcgaggtgccaacaaggctaaattctgcatccctcaaacagccttatatcactcagaattattttccagtcggtactgttgtggaatatgagtgccgtccaggttacagaagagaaccttctctatcaccaaaactaacttgccttcagaatttaaaatggtccacagcagtcgaattttgtaaaaagaaatcatgccctaatccgggagaaatacgaaatggtcagattgatgtaccaggtggcatattatttggtgcaaccatctccttctcatgtaacacagggtacaaattatttggctcgacttctagtttttgtcttatttcaggcagctctgtccagtggagtgacccgttgccagagtgcagagaaatttattgtccagcaccaccacaaattgacaatggaataattcaaggggaacgtgaccattatggatatagacagtctgtaacgtatgcatgtaataaaggattcaccatgattggagagcactctatttattgtactgtgaataatgatgaaggagagtggagtggcccaccacctgaatgcagaggaaaatctctaacttccaaggtcccaccaacagttcagaaacctaccacagtaaatgttccaactacagaagtctcaccaacttctcagaaaaccaccacaaaaaccaccacaccaaatgctcaagcaacacggagtacacctgtttccaggacaaccaagcattttcatgaaacaaccccaaataaaggaagtggaaccacttcaggtactacccgtcttctatctgggcacacgtgtttcacgttgacaggtttgcttgggacgctagtaaccatgggcttgctgacttagccaaagaagagttaagaagaaaatacacacaagtatacagactgttcctagtttcttagacttatctgcatattggataaaataaatgcaattgtgctcttcatttaggatgctttcattgtctttaagatgtgttaggaatgtcaacagagcaaggagaaaaaaggcagtcctggaatcacattcttagcacacctacacctcttgaaaatagaacaacttgcagaattgagagtgattcctttcctaaaagtgtaagaaagcatagagatttgttcgtatttagaatgggatcacgaggaaaagagaaggaaagtgatttttttccacaagatctgtaatgttatttccacttataaaggaaataaaaaatgaaaaacattatttggatatcaaaagcaaataaaaacccaattcagtctcttctaagcaaaattgctaaagagagatgaaccacattataaagtaatctttggctgtaaggcattttcatctttccttcgggttggcaaaatattttaaaggtaaaacatgctggtgaaccaggggtgttgatggtgataagggaggaatatagaatgaaagactgaatcttcctttgttgcacaaatagagtttggaaaaagcctgtgaaaggtgtcttctttgacttaatgtctttaaaagtatccagagatactacaatattaacataagaaaagattatatattatttctgaatcgagatgtccatagtcaaatttgtaaatcttattcttttgtaatatttatttatatttatttatgacagtgaacattctgattttacatgtaaaacaagaaaagttgaagaagatatgtgaagaaaaatgtatttttcctaaatagaaataaatgatcccattttttggtatcatgtagtatgtgaaatttattcttaaacgtgactactttatttctaaataagaaattccctacctgcttcctacaagcagttcagaatgccatgccttggttgtcctagtgtgaataattttcagctactttaaaattatattgtactttctcaagcatgtcatatcctttcctattagagtatctatattacttgttactgatttacctgaaggcaatctgattaatttctaggtttttaccatattcttgtcatcttgccaattacattttaagtgttagactagactaagatgtactagttgtatagaatataactagatttattatggcaatgtttattttgtcattttgcttcatctgttttgttgttgaagtactttaaatttcatacgttcatggcatttcactgtaaagactttaatgtgtatttcttaaaataaaactttttttcctccttaac

SEQ ID NO: 371363 - DNA, 2300 bp, Homo sapiens
tccccgagtctagggcccccaagggcgtatgacgccggagccctctgaccgcacctctgaccacaacaaacccctactccacccgtcttgtttgtcccacccttggtgacgcagagccccagcccagaccccgcccaaagcactcatttaactggtattgcggagccacgaggcttctgcttactgcaactcgctccggccgctgggcgtagctgcgactcggcggagtcccggcggcgcgtccttgttctaacccggcgcgccatgaccgtcgcgcggccgagcgtgcccgcggcgctgcccctcctcggggagctgccccggctgctgctgctggtgctgttgtgcctgccggccgtgtggggtgactgtggccttcccccagatgtacctaatgcccagccagctttggaaggccgtacaagttttcccgaggatactgtaataacgtacaaatgtgaagaaagctttgtgaaaattcctggcgagaaggactcagtgatctgccttaagggcagtcaatggtcagatattgaagagttctgcaatcgtagctgcgaggtgccaacaaggctaaattctgcatccctcaaacagccttatatcactcagaattattttccagtcggtactgttgtggaatatgagtgccgtccaggttacagaagagaaccttctctatcaccaaaactaacttgccttcagaatttaaaatggtccacagcagtcgaattttgtaaaaagaaatcatgccctaatccgggagaaatacgaaatggtcagattgatgtaccaggtggcatattatttggtgcaaccatctccttctcatgtaacacagggtacaaattatttggctcgacttctagtttttgtcttatttcaggcagctctgtccagtggagtgacccgttgccagagtgcagagaaatttattgtccagcaccaccacaaattgacaatggaataattcaaggggaacgtgaccattatggatatagacagtctgtaacgtatgcatgtaataaaggattcaccatgattggagagcactctatttattgtactgtgaataatgatgaaggagagtggagtggcccaccacctgaatgcagaggaaaatctctaacttccaaggtcccaccaacagttcagaaacctaccacagtaaatgttccaactacagaagtctcaccaacttctcagaaaaccaccacaaaaaccaccacaccaaatgctcaagcaacacggagtacacctgtttccaggacaaccaagcattttcatgaaacaaccccaaataaaggaagtggaaccacttcaggtcagttgacactgttcagggcacacgtgtttcacgttgacaggtttgcttgggacgctagtaaccatgggcttgctgacttagccaaagaagagttaagaagaaaatacacacaagtatacagactgttcctagtttcttagacttatctgcatattggataaaataaatgcaattgtgctcttcatttaggatgctttcattgtctttaagatgtgttaggaatgtcaacagagcaaggagaaaaaaggcagtcctggaatcacattcttagcacacctacacctcttgaaaatagaacaacttgcagaattgagagtgattcctttcctaaaagtgtaagaaagcatagagatttgttcgtatttagaatgggatcacgaggaaaagagaaggaaagtgatttttttccacaagatctgtaatgttatttccacttataaaggaaataaaaaatgaaaaacattatttggatatcaaaagcaaataaaaacccaattcagtctcttctaagcaaaattgctaaagagagatgaaccacattataaagtaatctttggctgtaaggcattttcatctttccttcgggttggcaaaatattttaaaggtaaaacatgctggtgaaccaggggtgttgatggtgataagggaggaatatagaatgaaagactgaatcttcctttgttgcacaaatagagtttggaaaaagcctgtgaaaggtgtcttctttgacttaatgtctttaaaagtatccagagatactacaatattaacataagaaaagattatatattatttctgaatcgagatgtccatagtcaaatttgtaaatcttattcttttgtaatatttatttatatttatttatgacagtgaacattctgattttacatgtaaaacaagaaaagttgaagaagatatgtgaagaaaaatgtatttttcctaaatagaaataaatgatcccattttttggta

SEQ ID NO: 371364 - DNA, 2356 bp, Homo sapiens
tccccgagtctagggcccccaagggcgtatgacgccggagccctctgaccgcacctctgaccacaacaaacccctactccacccgtcttgtttgtcccacccttggtgacgcagagccccagcccagaccccgcccaaagcactcatttaactggtattgcggagccacgaggcttctgcttactgcaactcgctccggccgctgggcgtagctgcgactcggcggagtcccggcggcgcgtccttgttctaacccggcgcgccatgaccgtcgcgcggccgagcgtgcccgcggcgctgcccctcctcggggagctgccccggctgctgctgctggtgctgttgtgcctgccggccgtgtgggagtccagccgtgtggagcacacgatgctgcaaacttgcatgtcatctctttcaggtgactgtggccttcccccagatgtacctaatgcccagccagctttggaaggccgtacaagttttcccgaggatactgtaataacgtacaaatgtgaagaaagctttgtgaaaattcctggcgagaaggactcagtgatctgccttaagggcagtcaatggtcagatattgaagagttctgcaatcgtagctgcgaggtgccaacaaggctaaattctgcatccctcaaacagccttatatcactcagaattattttccagtcggtactgttgtggaatatgagtgccgtccaggttacagaagagaaccttctctatcaccaaaactaacttgccttcagaatttaaaatggtccacagcagtcgaattttgtaaaaagaaatcatgccctaatccgggagaaatacgaaatggtcagattgatgtaccaggtggcatattatttggtgcaaccatctccttctcatgtaacacagggtacaaattatttggctcgacttctagtttttgtcttatttcaggcagctctgtccagtggagtgacccgttgccagagtgcagagaaatttattgtccagcaccaccacaaattgacaatggaataattcaaggggaacgtgaccattatggatatagacagtctgtaacgtatgcatgtaataaaggattcaccatgattggagagcactctatttattgtactgtgaataatgatgaaggagagtggagtggcccaccacctgaatgcagaggaaaatctctaacttccaaggtcccaccaacagttcagaaacctaccacagtaaatgttccaactacagaagtctcaccaacttctcagaaaaccaccacaaaaaccaccacaccaaatgctcaagcaacacggagtacacctgtttccaggacaaccaagcattttcatgaaacaaccccaaataaaggaagtggaaccacttcaggtactacccgtcttctatctgggcacacgtgtttcacgttgacaggtttgcttgggacgctagtaaccatgggcttgctgacttagccaaagaagagttaagaagaaaatacacacaagtatacagactgttcctagtttcttagacttatctgcatattggataaaataaatgcaattgtgctcttcatttaggatgctttcattgtctttaagatgtgttaggaatgtcaacagagcaaggagaaaaaaggcagtcctggaatcacattcttagcacacctacacctcttgaaaatagaacaacttgcagaattgagagtgattcctttcctaaaagtgtaagaaagcatagagatttgttcgtatttagaatgggatcacgaggaaaagagaaggaaagtgatttttttccacaagatctgtaatgttatttccacttataaaggaaataaaaaatgaaaaacattatttggatatcaaaagcaaataaaaacccaattcagtctcttctaagcaaaattgctaaagagagatgaaccacattataaagtaatctttggctgtaaggcattttcatctttccttcgggttggcaaaatattttaaaggtaaaacatgctggtgaaccaggggtgttgatggtgataagggaggaatatagaatgaaagactgaatcttcctttgttgcacaaatagagtttggaaaaagcctgtgaaaggtgtcttctttgacttaatgtctttaaaagtatccagagatactacaatattaacataagaaaagattatatattatttctgaatcgagatgtccatagtcaaatttgtaaatcttattcttttgtaatatttatttatatttatttatgacagtgaacattctgattttacatgtaaaacaagaaaagttgaagaagatatgtgaagaaaaatgtatttttcctaaatagaaataaatgatcccattttttggta

SEQ ID NO: 371365 - DNA, 1513 bp, Homo sapiens
tccccgagtctagggcccccaagggcgtatgacgccggagccctctgaccgcacctctgaccacaacaaacccctactccacccgtcttgtttgtcccacccttggtgacgcagagccccagcccagaccccgcccaaagcactcatttaactggtattgcggagccacgaggcttctgcttactgcaactcgctccggccgctgggcgtagctgcgactcggcggagtcccggcggcgcgtccttgttctaacccggcgcgccatgaccgtcgcgcggccgagcgtgcccgcggcgctgcccctcctcggggagctgccccggctgctgctgctggtgctgttgtgcctgccggccgtgtggggtgactgtggccttcccccagatgtacctaatgcccagccagctttggaaggccgtacaagttttcccgaggatactgtaataacgtacaaatgtgaagaaagctttgtgaaaattcctggcgagaaggactcagtgatctgccttaagggcagtcaatggtcagatattgaagagttctgcaatcgtagctgcgaggtgccaacaaggctaaattctgcatccctcaaacagccttatatcactcagaattattttccagtcggtactgttgtggaatatgagtgccgtccaggttacagaagagaaccttctctatcaccaaaactaacttgccttcagaatttaaaatggtccacagcagtcgaattttgtaaaaagaaatcatgccctaatccgggagaaatacgaaatggtcagattgatgtaccaggtggcatattatttggtgcaaccatctccttctcatgtaacacagggtacaaattatttggctcgacttctagtttttgtcttatttcaggcagctctgtccagtggagtgacccgttgccagagtgcagagaaatttattgtccagcaccaccacaaattgacaatggaataattcaaggggaacgtgaccattatggatatagacagtctgtaacgtatgcatgtaataaaggattcaccatgattggagagcactctatttattgtactgtgaataatgatgaaggagagtggagtggcccaccacctgaatgcagaggaaaatctctaacttccaaggtcccaccaacagttcagaaacctaccacagtaaatgttccaactacagaagtctcaccaacttctcagaaaaccaccacaaaaaccaccacaccaaatgctcaagcaacacggagtacacctgtttccaggacaaccaagcattttcatgaaacaaccccaaataaaggaagtggaaccacttcaggtactacccgtcttctatctgggcacacgtgtttcacgttgacaggtttgcttgggacgctagtaaccatgggcttgctgacttagccaaagaagagttaagaagaaaatacacacaagtatacagactgttcctagtttcttagacttatctgcatattggataaaataaatgcaattgtgctcttca

SEQ ID NO: 371366 - DNA, 1679 bp, Homo sapiens
tccccgagtctagggcccccaagggcgtatgacgccggagccctctgaccgcacctctgaccacaacaaacccctactccacccgtcttgtttgtcccacccttggtgacgcagagccccagcccagaccccgcccaaagcactcatttaactggtattgcggagccacgaggcttctgcttactgcaactcgctccggccgctgggcgtagctgcgactcggcggagtcccggcggcgcgtccttgttctaacccggcgcgccatgaccgtcgcgcggccgagcgtgcccgcggcgctgcccctcctcggggagctgccccggctgctgctgctggtgctgttgtgcctgccggccgtgtggggtgactgtggccttcccccagatgtacctaatgcccagccagctttggaaggccgtacaagttttcccgaggatactgtaataacgtacaaatgtgaagaaagctttgtgaaaattcctggcgagaaggactcagtgatctgccttaagggcagtcaatggtcagatattgaagagttctgcaatcgtagctgcgaggtgccaacaaggctaaattctgcatccctcaaacagccttatatcactcagaattattttccagtcggtactgttgtggaatatgagtgccgtccaggttacagaagagaaccttctctatcaccaaaactaacttgccttcagaatttaaaatggtccacagcagtcgaattttgtaaaaagaaatcatgccctaatccgggagaaatacgaaatggtcagattgatgtaccaggtggcatattatttggtgcaaccatctccttctcatgtaacacagggtacaaattatttggctcgacttctagtttttgtcttatttcaggcagctctgtccagtggagtgacccgttgccagagtgcagagaaatttattgtccagcaccaccacaaattgacaatggaataattcaaggggaacgtgaccattatggatatagacagtctgtaacgtatgcatgtaataaaggattcaccatgattggagagcactctatttattgtactgtgaataatgatgaaggagagtggagtggcccaccacctgaatgcagaggaaaatctctaacttccaaggtcccaccaacagttcagaaacctaccacagtaaatgttccaactacagaagtctcaccaacttctcagaaaaccaccacaaaaaccaccacaccaaatgctcaagcaacacggagtacacctgtttccaggacaaccaagcattttcatgaaacaaccccaaataaaggaagtggaaccacttcaggtactacccgtcttctatctgggcacacgtgtttcacgttgacaggtttgcttgggacgctagtaaccatgggcttgctgacttagccaaagaagagttaagaagaaaatacacacaagtatacagactgttcctagtttcttagacttatctgcatattggataaaataaatgcaattgtgctcttcatttaggatgctttcattgtctttaagatgtgttaggaatgtcaacagagcaaggagaaaaaaggcagtcctgaagagttaagaagaaaatacacacaagtatacagactgttcctagtttcttagacttatctgcatattggataaaataaatgcaattgtgctct

SEQ ID NO: 371367 - DNA, 2248 bp, Homo sapiens
tccccgagtctagggcccccaagggcgtatgacgccggagccctctgaccgcacctctgaccacaacaaacccctactccacccgtcttgtttgtcccacccttggtgacgcagagccccagcccagaccccgcccaaagcactcatttaactggtattgcggagccacgaggcttctgcttactgcaactcgctccggccgctgggcgtagctgcgactcggcggagtcccggcggcgcgtccttgttctaacccggcgcgccatgaccgtcgcgcggccgagcgtgcccgcggcgctgcccctcctcggggagctgccccggctgctgctgctggtgctgttgtgcctgccggccgtgtggggtgactgtggccttcccccagatgtacctaatgcccagccagctttggaaggccgtacaagttttcccgaggatactgtaataacgtacaaatgtgaagaaagctttgtgaaaattcctggcgagaaggactcagtgatctgccttaagggcagtcaatggtcagatattgaagagttctgcaatcgtagctgcgaggtgccaacaaggctaaattctgcatccctcaaacagccttatatcactcagaattattttccagtcggtactgttgtggaatatgagtgccgtccaggttacagaagagaaccttctctatcaccaaaactaacttgccttcagaatttaaaatggtccacagcagtcgaattttgtaaaagtggcatattatttggtgcaaccatctccttctcatgtaacacagggtacaaattatttggctcgacttctagtttttgtcttatttcaggcagctctgtccagtggagtgacccgttgccagagtgcagagaaatttattgtccagcaccaccacaaattgacaatggaataattcaaggggaacgtgaccattatggatatagacagtctgtaacgtatgcatgtaataaaggattcaccatgattggagagcactctatttattgtactgtgaataatgatgaaggagagtggagtggcccaccacctgaatgcagaggaaaatctctaacttccaaggtcccaccaacagttcagaaacctaccacagtaaatgttccaactacagaagtctcaccaacttctcagaaaaccaccacaaaaaccaccacaccaaatgctcaagcaacacggagtacacctgtttccaggacaaccaagcattttcatgaaacaaccccaaataaaggaagtggaaccacttcaggtactacccgtcttctatctgggcacacgtgtttcacgttgacaggtttgcttgggacgctagtaaccatgggcttgctgacttagccaaagaagagttaagaagaaaatacacacaagtatacagactgttcctagtttcttagacttatctgcatattggataaaataaatgcaattgtgctcttcatttaggatgctttcattgtctttaagatgtgttaggaatgtcaacagagcaaggagaaaaaaggcagtcctggaatcacattcttagcacacctacacctcttgaaaatagaacaacttgcagaattgagagtgattcctttcctaaaagtgtaagaaagcatagagatttgttcgtatttagaatgggatcacgaggaaaagagaaggaaagtgatttttttccacaagatctgtaatgttatttccacttataaaggaaataaaaaatgaaaaacattatttggatatcaaaagcaaataaaaacccaattcagtctcttctaagcaaaattgctaaagagagatgaaccacattataaagtaatctttggctgtaaggcattttcatctttccttcgggttggcaaaatattttaaaggtaaaacatgctggtgaaccaggggtgttgatggtgataagggaggaatatagaatgaaagactgaatcttcctttgttgcacaaatagagtttggaaaaagcctgtgaaaggtgtcttctttgacttaatgtctttaaaagtatccagagatactacaatattaacataagaaaagattatatattatttctgaatcgagatgtccatagtcaaatttgtaaatcttattcttttgtaatatttatttatatttatttatgacagtgaacattctgattttacatgtaaaacaagaaaagttgaagaagatatgtgaagaaaaatgtatttttcctaaatagaaataaatgatcccattttttggta

SEQ ID NO: 371368 - DNA, 1578 bp, Homo sapiens
tccccgagtctagggcccccaagggcgtatgacgccggagccctctgaccgcacctctgaccacaacaaacccctactccacccgtcttgtttgtcccacccttggtgacgcagagccccagcccagaccccgcccaaagcactcatttaactggtattgcggagccacgaggcttctgcttactgcaactcgctccggccgctgggcgtagctgcgactcggcggagtcccggcggcgcgtccttgttctaacccggcgcgccatgaccgtcgcgcggccgagcgtgcccgcggcgctgcccctcctcggggagctgccccggctgctgctgctggtgctgttgtgcctgccggccgtgtggggtgactgtggccttcccccagatgtacctaatgcccagccagctttggaaggccgtacaagttttcccgaggatactgtaataacgtacaaatgtgaagaaagctttgtgaaaattcctggcgagaaggactcagtgatctgccttaagggcagtcaatggtcagatattgaagagttctgcaatcgtagctgcgaggtgccaacaaggctaaattctgcatccctcaaacagccttatatcactcagaattattttccagtcggtactgttgtggaatatgagtgccgtccaggttacagaagagaaccttctctatcaccaaaactaacttgccttcagaatttaaaatggtccacagcagtcgaattttgtaaaaagaaatcatgccctaatccgggagaaatacgaaatggtcagattgatgtaccaggtggcatattatttggtgcaaccatctccttctcatgtaacacagggtacaaattatttggctcgacttctagtttttgtcttatttcaggcagctctgtccagtggagtgacccgttgccagagtgcagagaaatttattgtccagcaccaccacaaattgacaatggaataattcaaggggaacgtgaccattatggatatagacagtctgtaacgtatgcatgtaataaaggattcaccatgattggagagcactctatttattgtactgtgaataatgatgaaggagagtggagtggcccaccacctgaatgcagaggaaaatctctaacttccaaggtcccaccaacagttcagaaacctaccacagtaaatgttccaactacagaagtctcaccaacttctcagaaaaccaccacaaaaaccaccacaccaaatgctcaagcaacacggagtacacctgtttccaggacaaccaagcattttcatgaaacaaccccaaataaaggaagtggaaccacttcaggtcagttgacactgttcaggtttactgagtatggatctaatgtgctatggtggaaatatgaacttgaccaagattgcaggattaaatggtctctaatttattgtagccagggtttttcatactaatactttttactttatttggaagcggacttggattgtactagggcaaatctttaaaaaaagaaacatttacaataatagagaaaaagactgtggccccattaaaaaaatgctaaattaagattggtaaaa

SEQ ID NO: 371369 - DNA, 1307 bp, Homo sapiens
atccccagcagcagctcagacatctttcatatcaaaaaccctatctacaaagaccccttctgcagctcagaatcccatgatgacaaatgcttctgctacacaggccacactaacagcccaaaaattcaccacagcaaaagttgcatttacgcagagtccttcagcagcacgtaagtccactaatgtacattccccagtgactaatggtctcaagagtacacaaagattcccttctgctcatattacagcaacacggagtacacctgtttccaggacaaccaagcattttcatgaaacaaccccaaataaaggaagtggaaccacttcaggtactacccgtcttctatctgggcacacgtgtttcacgttgacaggtttgcttgggacgctagtaaccatgggcttgctgacttagccaaagaagagttaagaagaaaatacacacaagtatacagactgttcctagtttcttagacttatctgcatattggataaaataaatgcaattgtgctcttcatttaggatgctttcattgtctttaagatgtgttaggaatgtcaacagagcaaggagaaaaaaggcagtcctggaatcacattcttagcacacctacacctcttgaaaatagaacaacttgcagaattgagagtgattcctttcctaaaagtgtaagaaagcatagagatttgttcgtatttagaatgggatcacgaggaaaagagaaggaaagtgatttttttccacaagatctgtaatgttatttccacttataaaggaaataaaaaatgaaaaacattatttggatatcaaaagcaaataaaaacccaattcagtctcttctaagcaaaattgctaaagagagatgaaccacattataaagtaatctttggctgtaaggcattttcatctttccttcgggttggcaaaatattttaaaggtaaaacatgctggtgaaccaggggtgttgatggtgataagggaggaatatagaatgaaagactgaatcttcctttgttgcacaaatagagtttggaaaaagcctgtgaaaggtgtcttctttgacttaatgtctttaaaagtatccagagatactacaatattaacataagaaaagattatatattatttctgaatcgagatgtccatagtcaaatttgtaaatcttattcttttgtaatatttatttatatttatttatgacagtgaacattctgattttacatgtaaaacaagaaaagttgaagaagatatgtgaagaaaaatgtatttttcctaaatagaaataaatgatcccattttttggta

SEQ ID NO: 371370 - DNA, 1055 bp, Homo sapiens
tagaggatccccggtcagtgatacccaacaagcatatcatgaaacaaccccaaataaaggaagtggaaccacttcaggtactacccgtcttctatctgggcacacgtgtttcacgttgacaggtttgcttgggacgctagtaaccatgggcttgctgacttagccaaagaagagttaagaagaaaatacacacaagtatacagactgttcctagtttcttagacttatctgcatattggataaaataaatgcaattgtgctcttcatttaggatgctttcattgtctttaagatgtgttaggaatgtcaacagagcaaggagaaaaaaggcagtcctggaatcacattcttagcacacctacacctcttgaaaatagaacaacttgcagaattgagagtgattcctttcctaaaagtgtaagaaagcatagagatttgttcgtatttagaatgggatcacgaggaaaagagaaggaaagtgatttttttccacaagatctgtaatgttatttccacttataaaggaaataaaaaatgaaaaacattatttggatatcaaaagcaaataaaaacccaattcagtctcttctaagcaaaattgctaaagagagatgaaccacattataaagtaatctttggctgtaaggcattttcatctttccttcgggttggcaaaatattttaaaggtaaaacatgctggtgaaccaggggtgttgatggtgataagggaggaatatagaatgaaagactgaatcttcctttgttgcacaaatagagtttggaaaaagcctgtgaaaggtgtcttctttgacttaatgtctttaaaagtatccagagatactacaatattaacataagaaaagattatatattatttctgaatcgagatgtccatagtcaaatttgtaaatcttattcttttgtaatatttatttatatttatttatgacagtgaacattctgattttacatgtaaaacaagaaaagttgaagaagatatgtgaagaaaaatgtatttttcctaaatagaaataaatgatcccattttttggta

SEQ ID NO: 371371 - DNA, 1116 bp, Homo sapiens
tccccgagtctagggcccccaagggcgtatgacgccggagccctctgaccgcacctctgaccacaacaaacccctactccacccgtcttgtttgtcccacccttggtgacgcagagccccagcccagaccccgcccaaagcactcatttaactggtattgcggagccacgaggcttctgcttactgcaactcgctccggccgctgggcgtagctgcgactcggcggagtcccggcggcgcgtccttgttctaacccggcgcgccatgaccgtcgcgcggccgagcgtgcccgcggcgctgcccctcctcggggagctgccccggctgctgctgctggtgctgttgtgcctgccggccgtgtggggtgactgtggccttcccccagatgtacctaatgcccagccagctttggaaggccgtacaagttttcccgaggatactgtaataacgtacaaatgtgaagaaagctttgtgaaaattcctggcgagaaggactcagtgatctgccttaagggcagtcaatggtcagatattgaagagttctgcaatcgtagctgcgaggtgccaacaaggctaaattctgcatccctcaaacagccttatatcactcagaattattttccagtcggtactgttgtggaatatgagtgccgtccaggttacagaagagaaccttctctatcaccaaaactaacttgccttcagaatttaaaatggtccacagcagtcgaattttgtaaaaagaaatcatgccctaatccgggagaaatacgaaatggtcagattgatgtaccaggtggcatattatttggtgcaaccatctccttctcatgtaacacagggtacaaattatttggctcgacttctagtttttgtcttatttcaggcagctctgtccagtggagtgacccgttgccagagtgcagagggcccaggcaagaatataaatggaggtcgctggcctaagacccaccttgtatcaaatagcccttcctcttcccacactgtatgggttctctggtgcacataagcggacaactcagcctacatacccaagacatgtccaccacatccaccataacttgtatccaccctccattgtctgttgggttagag

SEQ ID NO: 371372 - DNA, 383 bp, Homo sapiens
tgaaaacagcaactgtgaggacacttgatagtcatttccttcagttctgcttttgtctccctaggtgactgtggccttcccccagatgtacctaatgcccagccagctttggaaggccgtacaagttttcccgaggatactgtaataacgtacaaatgtgaagaaagctttgtgaaaattcctggcgagaaggactcagtgatctgccttaagggcagtcaatggtcagatattgaagagttctgcaatcgtaagttcttcatctttttagaaaagttctgggaatggaatgtatcttaaatttatttttatatacctttggagtgactagtaattgatagttctctagcgttactaaaccccagggtataccctgttggcac

SEQ ID NO: 371373 - DNA, 1720 bp, Homo sapiens
tccccgagtctagggcccccaagggcgtatgacgccggagccctctgaccgcacctctgaccacaacaaacccctactccacccgtcttgtttgtcccacccttggtgacgcagagccccagcccagaccccgcccaaagcactcatttaactggtattgcggagccacgaggcttctgcttactgcaactcgctccggccgctgggcgtagctgcgactcggcggagtcccggcggcgcgtccttgttctaacccggcgcgccatgaccgtcgcgcggccgagcgtgcccgcggcgctgcccctcctcggggagctgccccggctgctgctgctggtgctgttgtgcctgccggccgtgtggggtgactgtggccttcccccagatgtacctaatgcccagccagctttggaaggccgtacaagttttcccgaggatactgtaataacgtacaaatgtgaagaaagctttgtgaaaattcctggcgagaaggactcagtgatctgccttaagggcagtcaatggtcagatattgaagagttctgcaatcgtagctgcgaggtgccaacaaggctaaattctgcatccctcaaacagccttatatcactcagaattattttccagtcggtactgttgtggaatatgagtgccgtccaggttacagaagagaaccttctctatcaccaaaactaacttgccttcagaatttaaaatggtccacagcagtcgaattttgtaaaaagaaatcatgccctaatccgggagaaatacgaaatggtcagattgatgtaccaggtggcatattatttggtgcaaccatctccttctcatgtaacacagggtacaaattatttggctcgacttctagtttttgtcttatttcaggcagctctgtccagtggagtgacccgttgccagagtgcagagaaatttattgtccagcaccaccacaaattgacaatggaataattcaaggggaacgtgaccattatggatatagacagtctgtaacgtatgcatgtaataaaggattcaccatgattggagagcactctatttattgtactgtgaataatgatgaaggagagtggagtggcccaccacctgaatgcagaggaaaatctctaacttccaaggtcccaccaacagttcagaaacctaccacagtaaatgttccaactacagaagtctcaccaacttctcagaaaaccaccacaaaaaccaccacaccaaatgctcaagcaacacggagtacacctgtttccaggacaaccaagcattttcatgaaacaaccccaaataaaggaagtggaaccacttcaggtactacccgtcttctatctggttctcgtcctgtcacccaggctggtatgcggtggtgtgatcgtagctcactgcagtctcgaactcctgggttcaagcgatccttccacttcagcctcccaagtagctggtactacaggtgtgtgccacgacacccggctaagtttttgaaatttattttttgtagagacaggattttcctatgttgcccaggctggtttcaaactcctggccgtaagcgatttttccggcctcccaaaacgttgcgattataagtgtgagccactgcacctggccccacattttctttatccatttgtacattgatggacacttaagatgattccatatctttgctattgtgaatagtgcttcaataaatatgtgaatgcacat

SEQ ID NO: 371374 - DNA, 2184 bp, Homo sapiens
aaaaaaaaaaaaaaaaaaaaaaaaaaaaaaaaaaaaaaaaaaaaaaaaaaaaaaaaaaaaaattactgcaactcgctccggccgctgggcgtagctgcgactcggcggagtcccggcggcgcgtccttgttctaacccggcgcgccatgaccgtcgcgcggccgagcgtgcccgcggcgctgcccctcctcggggagctgccccggctgctgctgctggtgctgttgtgcctgccggccgtgtggggtgactgtggccttcccccagatgtacctaatgcccagccagctttggaaggccgtacaagttttcccgaggatactgtaataacgtacaaatgtgaagaaagctttgtgaaaattcctggcgagaaggactcagtgatctgccttaagggcagtcaatggtcagatattgaagagttctgcaatcgtagctgcgaggtgccaacaaggctaaattctgcatccctcaaacagccttatatcactcagaattattttccagtcggtactgttgtggaatatgagtgccgtccaggttacagaagagaaccttctctatcaccaaaactaacttgccttcagaatttaaaatggtccacagcagtcgaattttgtaaaaagaaatcatgccctaatccgggagaaatacgaaatggtcagattgatgtaccaggtggcatattatttggtgcaaccatctccttctcatgtaacacagggtacaaattatttggctcgacttctagtttttgtcttatttcaggcagctctgtccagtggagtgacccgttgccagagtgcagagaaatttattgtccagcaccaccacaaattgacaatggaataattcaaggggaacgtgaccattatggatatagacagtctgtaacgtatgcatgtaataaaggattcaccatgattggagagcactctatttattgtactgtgaataatgatgaaggagagtggagtggcccaccacctgaatgcagaggaaaatctctaacttccaaggtcccaccaacagttcagaaacctaccacagtaaatgttccaactacagaagtctcaccaacttctcagaaaaccaccacaaaaaccaccacaccaaatgctcaagcaacacggagtacacctgtttccaggacaaccaagcattttcatgaaacaaccccaaataaaggaagtggaaccacttcaggtactacccgtcttctatctgggcacacgtgtttcacgttgacaggtttgcttgggacgctagtaaccatgggcttgctgacttagccaaagaagagttaagaagaaaatacacacaagtatacagactgttcctagtttcttagacttatctgcatattggataaaataaatgcaattgtgctcttcatttaggatgctttcattgtctttaagatgtgttaggaatgtcaacagagcaaggagaaaaaaggcagtcctggaatcacattcttagcacacctacacctcttgaaaatagaacaacttgcagaattgagagtgattcctttcctaaaagtgtaagaaagcatagagatttgttcgtatttagaatgggatcacgaggaaaagagaaggaaagtgatttttttccacaagatctgtaatgttatttccacttataaaggaaataaaaaatgaaaaacattatttggatatcaaaagcaaataaaaacccaattcagtctcttctaagcaaaattgctaaagagagatgaaccacattataaagtaatctttggctgtaaggcattttcatctttccttcgggttggcaaaatattttaaaggtaaaacatgctggtgaaccaggggtgttgatggtgataagggaggaatatagaatgaaagactgaatcttcctttgttgcacaaatagagtttggaaaaagcctgtgaaaggtgtcttctttgacttaatgtctttaaaagtatccagagatactacaatattaacataagaaaagattatatattatttctgaatcgagatgtccatagtcaaatttgtaaatcttattcttttgtaatatttatttatatttatttatgacagtgaacattctgattttacatgtaaaacaagaaaagttgaagaagatatgtgaagaaaaatgtatttttcctaaatagaaataaatgatcccattttttggta

SEQ ID NO: 371375 - DNA, 2420 bp, Homo sapiens
tccccgagtctagggcccccaagggcgtatgacgccggagccctctgaccgcacctctgaccacaacaaacccctactccacccgtcttgtttgtcccacccttggtgacgcagagccccagcccagaccccgcccaaagcactcatttaactggtattgcggagccacgaggcttctgcttactgcaactcgctccggccgctgggcgtagctgcgactcggcggagtcccggcggcgcgtccttgttctaacccggcgcgccatgaccgtcgcgcggccgagcgtgcccgcggcgctgcccctcctcggggagctgccccggctgctgctgctggtgctgttgtgcctgccggccgtgtggggtgactgtggccttcccccagatgtacctaatgcccagccagctttggaaggccgtacaagttttcccgaggatactgtaataacgtacaaatgtgaagaaagctttgtgaaaattcctggcgagaaggactcagtgatctgccttaagggcagtcaatggtcagatattgaagagttctgcaatcgtagctgcgaggtgccaacaaggctaaattctgcatccctcaaacagccttatatcactcagaattattttccagtcggtactgttgtggaatatgagtgccgtccaggttacagaagagaaccttctctatcaccaaaactaacttgccttcagaatttaaaatggtccacagcagtcgaattttgtaaaaagaaatcatgccctaatccgggagaaatacgaaatggtcagattgatgtaccaggtggcatattatttggtgcaaccatctccttctcatgtaacacagggtacaaattatttggctcgacttctagtttttgtcttatttcaggcagctctgtccagtggagtgacccgttgccagagtgcagagaaatttattgtccagcaccaccacaaattgacaatggaataattcaaggggaacgtgaccattatggatatagacagtctgtaacgtatgcatgtaataaaggattcaccatgattggagagcactctatttattgtactgtgaataatgatgaaggagagtggagtggcccaccacctgaatgcagaggaaaatctctaacttccaaggtcccaccaacagttcagaaacctaccacagtaaatgttccaactacagaagtctcaccaacttctcagaaaaccaccacaaaaaccaccacaccaaatgctcaagcaacacggagtacacctgtttccaggacaaccaagcattttcatgaaacaaccccaaataaaggaagtggaaccacttcaggtactacccgtcttctatctggttctcgtcctgtcacccaggctggtatgcggtggtgtgatcgtagctcactgcagtctcgaactcctgggttcaagcgatccttccacttcagcctcccaagtagctggtactacagggcacacgtgtttcacgttgacaggtttgcttgggacgctagtaaccatgggcttgctgacttagccaaagaagagttaagaagaaaatacacacaagtatacagactgttcctagtttcttagacttatctgcatattggataaaataaatgcaattgtgctcttcatttaggatgctttcattgtctttaagatgtgttaggaatgtcaacagagcaaggagaaaaaaggcagtcctggaatcacattcttagcacacctacacctcttgaaaatagaacaacttgcagaattgagagtgattcctttcctaaaagtgtaagaaagcatagagatttgttcgtatttagaatgggatcacgaggaaaagagaaggaaagtgatttttttccacaagatctgtaatgttatttccacttataaaggaaataaaaaatgaaaaacattatttggatatcaaaagcaaataaaaacccaattcagtctcttctaagcaaaattgctaaagagagatgaaccacattataaagtaatctttggctgtaaggcattttcatctttccttcgggttggcaaaatattttaaaggtaaaacatgctggtgaaccaggggtgttgatggtgataagggaggaatatagaatgaaagactgaatcttcctttgttgcacaaatagagtttggaaaaagcctgtgaaaggtgtcttctttgacttaatgtctttaaaagtatccagagatactacaatattaacataagaaaagattatatattatttctgaatcgagatgtccatagtcaaatttgtaaatcttattcttttgtaatatttatttatatttatttatgacagtgaacattctgattttacatgtaaaacaagaaaagttgaagaagatatgtgaagaaaaatgtatttttcctaaatagaaataaatgatcccattttttggta

SEQ ID NO: 371376 - DNA, 2545 bp, Homo sapiens
tccccgagtctagggcccccaagggcgtatgacgccggagccctctgaccgcacctctgaccacaacaaacccctactccacccgtcttgtttgtcccacccttggtgacgcagagccccagcccagaccccgcccaaagcactcatttaactggtattgcggagccacgaggcttctgcttactgcaactcgctccggccgctgggcgtagctgcgactcggcggagtcccggcggcgcgtccttgttctaacccggcgcgccatgaccgtcgcgcggccgagcgtgcccgcggcgctgcccctcctcggggagctgccccggctgctgctgctggtgctgttgtgcctgccggccgtgtggggtgactgtggccttcccccagatgtacctaatgcccagccagctttggaaggccgtacaagttttcccgaggatactgtaataacgtacaaatgtgaagaaagctttgtgaaaattcctggcgagaaggactcagtgatctgccttaagggcagtcaatggtcagatattgaagagttctgcaatcgtagctgcgaggtgccaacaaggctaaattctgcatccctcaaacagccttatatcactcagaattattttccagtcggtactgttgtggaatatgagtgccgtccaggttacagaagagaaccttctctatcaccaaaactaacttgccttcagaatttaaaatggtccacagcagtcgaattttgtaaaaagaaatcatgccctaatccgggagaaatacgaaatggtcagattgatgtaccaggtggcatattatttggtgcaaccatctccttctcatgtaacacagggtacaaattatttggctcgacttctagtttttgtcttatttcaggcagctctgtccagtggagtgacccgttgccagagtgcagagaaatttattgtccagcaccaccacaaattgacaatggaataattcaaggggaacgtgaccattatggatatagacagtctgtaacgtatgcatgtaataaaggattcaccatgattggagagcactctatttattgtactgtgaataatgatgaaggagagtggagtggcccaccacctgaatgcagaggaaaatctctaacttccaaggtcccaccaacagttcagaaacctaccacagtaaatgttccaactacagaagtctcaccaacttctcagaaaaccaccacaaaaaccaccacaccaaatgctcaagcaacacggagtacacctgtttccaggacaaccaagcattttcatgaaacaaccccaaataaaggaagtggaaccacttcaggtactacccgtcttctatctggtttctctccatggaagaggagaagaccagaggcatctagtcagacatcttgaagccactccccatgatactgtcttaggaaaacaatcaacatgtagcattcatggataccaaagggaaaatggtagagacggtgtttcaccgtgttatccaggatggtcttgatctcctggcctcgagatctgcctgcctcggcctcccaaagtgctgggattacaggcgtgagccaccgcacctggccagggcacacgtgtttcacgttgacaggtttgcttgggacgctagtaaccatgggcttgctgacttagccaaagaagagttaagaagaaaatacacacaagtatacagactgttcctagtttcttagacttatctgcatattggataaaataaatgcaattgtgctcttcatttaggatgctttcattgtctttaagatgtgttaggaatgtcaacagagcaaggagaaaaaaggcagtcctggaatcacattcttagcacacctacacctcttgaaaatagaacaacttgcagaattgagagtgattcctttcctaaaagtgtaagaaagcatagagatttgttcgtatttagaatgggatcacgaggaaaagagaaggaaagtgatttttttccacaagatctgtaatgttatttccacttataaaggaaataaaaaatgaaaaacattatttggatatcaaaagcaaataaaaacccaattcagtctcttctaagcaaaattgctaaagagagatgaaccacattataaagtaatctttggctgtaaggcattttcatctttccttcgggttggcaaaatattttaaaggtaaaacatgctggtgaaccaggggtgttgatggtgataagggaggaatatagaatgaaagactgaatcttcctttgttgcacaaatagagtttggaaaaagcctgtgaaaggtgtcttctttgacttaatgtctttaaaagtatccagagatactacaatattaacataagaaaagattatatattatttctgaatcgagatgtccatagtcaaatttgtaaatcttattcttttgtaatatttatttatatttatttatgacagtgaacattctgattttacatgtaaaacaagaaaagttgaagaagatatgtgaagaaaaatgtatttttcctaaatagaaataaatgatcccattttttggta

SEQ ID NO: 371377 - DNA, 2818 bp, Homo sapiens
tccccgagtctagggcccccaagggcgtatgacgccggagccctctgaccgcacctctgaccacaacaaacccctactccacccgtcttgtttgtcccacccttggtgacgcagagccccagcccagaccccgcccaaagcactcatttaactggtattgcggagccacgaggcttctgcttactgcaactcgctccggccgctgggcgtagctgcgactcggcggagtcccggcggcgcgtccttgttctaacccggcgcgccatgaccgtcgcgcggccgagcgtgcccgcggcgctgcccctcctcggggagctgccccggctgctgctgctggtgctgttgtgcctgccggccgtgtggggtgagtaggggcccggcggccggggaagcccctgggctgggtgggaggtccaagtcggtctctgagacacgcacaggggccggcgacttggcaggtggggagcttggcccgcggtcgtggttcccgccgtcctgtgcctttaaggctctcgccgctcaccagcatttggggctcctgctgtgtcggcccccagctgacttggctttaggggtcggcttggagggttaaagaggccccggctgggtttgcggagcagccaagcctggcaaaatcgaaagggagggctcaaagagactgtatccttaacccccaaaaagctggtctaaaaggatgggaggccagaccgctgaccgttccccactctcgacagagtccagccgtgtggagcacacgatgctgcaaacttgcatgtcatctctttcaggtgtggcatttcaagggggcttgtgtcttgaaaacagcaactgtgaggacacttgatagtcatttccttcagttctgcttttgtctccctaggtgactgtggccttcccccagatgtacctaatgcccagccagctttggaaggccgtacaagttttcccgaggatactgtaataacgtacaaatgtgaagaaagctttgtgaaaattcctggcgagaaggactcagtgatctgccttaagggcagtcaatggtcagatattgaagagttctgcaatcgtagctgcgaggtgccaacaaggctaaattctgcatccctcaaacagccttatatcactcagaattattttccagtcggtactgttgtggaatatgagtgccgtccaggttacagaagagaaccttctctatcaccaaaactaacttgccttcagaatttaaaatggtccacagcagtcgaattttgtaaaaagaaatcatgccctaatccgggagaaatacgaaatggtcagattgatgtaccaggtggcatattatttggtgcaaccatctccttctcatgtaacacagggtacaaattatttggctcgacttctagtttttgtcttatttcaggcagctctgtccagtggagtgacccgttgccagagtgcagagaaatttattgtccagcaccaccacaaattgacaatggaataattcaaggggaacgtgaccattatggatatagacagtctgtaacgtatgcatgtaataaaggattcaccatgattggagagcactctatttattgtactgtgaataatgatgaaggagagtggagtggcccaccacctgaatgcagaggaaaatctctaacttccaaggtcccaccaacagttcagaaacctaccacagtaaatgttccaactacagaagtctcaccaacttctcagaaaaccaccacaaaaaccaccacaccaaatgctcaagcaacacggagtacacctgtttccaggacaaccaagcattttcatgaaacaaccccaaataaaggaagtggaaccacttcaggtactacccgtcttctatctgggcacacgtgtttcacgttgacaggtttgcttgggacgctagtaaccatgggcttgctgacttagccaaagaagagttaagaagaaaatacacacaagtatacagactgttcctagtttcttagacttatctgcatattggataaaataaatgcaattgtgctcttcatttaggatgctttcattgtctttaagatgtgttaggaatgtcaacagagcaaggagaaaaaaggcagtcctggaatcacattcttagcacacctacacctcttgaaaatagaacaacttgcagaattgagagtgattcctttcctaaaagtgtaagaaagcatagagatttgttcgtatttagaatgggatcacgaggaaaagagaaggaaagtgatttttttccacaagatctgtaatgttatttccacttataaaggaaataaaaaatgaaaaacattatttggatatcaaaagcaaataaaaacccaattcagtctcttctaagcaaaattgctaaagagagatgaaccacattataaagtaatctttggctgtaaggcattttcatctttccttcgggttggcaaaatattttaaaggtaaaacatgctggtgaaccaggggtgttgatggtgataagggaggaatatagaatgaaagactgaatcttcctttgttgcacaaatagagtttggaaaaagcctgtgaaaggtgtcttctttgacttaatgtctttaaaagtatccagagatactacaatattaacataagaaaagattatatattatttctgaatcgagatgtccatagtcaaatttgtaaatcttattcttttgtaatatttatttatatttatttatgacagtgaacattctgattttacatgtaaaacaagaaaagttgaagaagatatgtgaagaaaaatgtatttttcctaaatagaaataaatgatcccattttttggta

SEQ ID NO: 371378 - DNA, 2113 bp, Homo sapiens
tccccgagtctagggcccccaagggcgtatgacgccggagccctctgaccgcacctctgaccacaacaaacccctactccacccgtcttgtttgtcccacccttggtgacgcagagccccagcccagaccccgcccaaagcactcatttaactggtattgcggagccacgaggcttctgcttactgcaactcgctccggccgctgggcgtagctgcgactcggcggagtcccggcggcgcgtccttgttctaacccggcgcgccatgaccgtcgcgcggccgagcgtgcccgcggcgctgcccctcctcggggagctgccccggctgctgctgctggtgctgttgtgcctgccggccgtgtggggtgactgtggccttcccccagatgtacctaatgcccagccagctttggaaggccgtacaagttttcccgaggatactgtaataacgtacaaatgtgaagaaagctttgtgaaaattcctggcgagaaggactcagtgatctgccttaagggcagtcaatggtcagatattgaagagttctgcaatcgtagctgcgaggtgccaacaaggctaaattctgcatccctcaaacagccttatatcactcagaattattttccagtcggtactgttgtggaatatgagtgccgtccaggttacagaagagaaccttctctatcaccaaaactaacttgccttcagaatttaaaatggtccacagcagtcgaattttgtaaaaagaaatcatgccctaatccgggagaaatacgaaatggtcagattgatgtaccaggtggcatattatttggtgcaaccatctccttctcatgtaacacagggtacaaattatttggctcgacttctagtttttgtcttatttcaggcagctctgtccagtggagtgacccgttgccagagtgcagaggaaaatctctaacttccaaggtcccaccaacagttcagaaacctaccacagtaaatgttccaactacagaagtctcaccaacttctcagaaaaccaccacaaaaaccaccacaccaaatgctcaagcaacacggagtacacctgtttccaggacaaccaagcattttcatgaaacaaccccaaataaaggaagtggaaccacttcaggtactacccgtcttctatctgggcacacgtgtttcacgttgacaggtttgcttgggacgctagtaaccatgggcttgctgacttagccaaagaagagttaagaagaaaatacacacaagtatacagactgttcctagtttcttagacttatctgcatattggataaaataaatgcaattgtgctcttcatttaggatgctttcattgtctttaagatgtgttaggaatgtcaacagagcaaggagaaaaaaggcagtcctggaatcacattcttagcacacctacacctcttgaaaatagaacaacttgcagaattgagagtgattcctttcctaaaagtgtaagaaagcatagagatttgttcgtatttagaatgggatcacgaggaaaagagaaggaaagtgatttttttccacaagatctgtaatgttatttccacttataaaggaaataaaaaatgaaaaacattatttggatatcaaaagcaaataaaaacccaattcagtctcttctaagcaaaattgctaaagagagatgaaccacattataaagtaatctttggctgtaaggcattttcatctttccttcgggttggcaaaatattttaaaggtaaaacatgctggtgaaccaggggtgttgatggtgataagggaggaatatagaatgaaagactgaatcttcctttgttgcacaaatagagtttggaaaaagcctgtgaaaggtgtcttctttgacttaatgtctttaaaagtatccagagatactacaatattaacataagaaaagattatatattatttctgaatcgagatgtccatagtcaaatttgtaaatcttattcttttgtaatatttatttatatttatttatgacagtgaacattctgattttacatgtaaaacaagaaaagttgaagaagatatgtgaagaaaaatgtatttttcctaaatagaaataaatgatcccattttttggta

SEQ ID NO: 371379 - DNA, 1398 bp, Homo sapiens
tccccgagtctagggcccccaagggcgtatgacgccggagccctctgaccgcacctctgaccacaacaaacccctactccacccgtcttgtttgtcccacccttggtgacgcagagccccagcccagaccccgcccaaagcactcatttaactggtattgcggagccacgaggcttctgcttactgcaactcgctccggccgctgggcgtagctgcgactcggcggagtcccggcggcgcgtccttgttctaacccggcgcgccatgaccgtcgcgcggccgagcgtgcccgcggcgctgcccctcctcggggagctgccccggctgctgctgctggtgctgttgtgcctgccggccgtgtggggtgactgtggccttcccccagatgtacctaatgcccagccagctttggaaggccgtacaagttttcccgaggatactgtaataacgtacaaatgtgaagaaagctttgtgaaaattcctggcgagaaggactcagtgatctgccttaagggcagtcaatggtcagatattgaagagttctgcaatcgtagctgcgaggtgccaacaaggctaaattctgcatccctcaaacagccttatatcactcagaattattttccagtcggtactgttgtggaatatgagtgccgtccaggttacagaagagaaccttctctatcaccaaaactaacttgccttcagaatttaaaatggtccacagcagtcgaattttgtaaaaagaaatcatgccctaatccgggagaaatacgaaatggtcagattgatgtaccaggtggcatattatttggtgcaaccatctccttctcatgtaacacagggtacaaattatttggctcgacttctagtttttgtcttatttcaggcagctctgtccagtggagtgacccgttgccagagtgcagagaaatttattgtccagcaccaccacaaattgacaatggaataattcaaggggaacgtgaccattatggatatagacagtctgtaacgtatgcatgtaataaaggattcaccatgattggagagcactctatttattgtactgtgaataatgatgaaggagagtggagtggcccaccacctgaatgcagaggaaaatctctaacttccaaggtcccaccaacagttcagaaacctaccacagtaaatgttccaactacagaagtctcaccaacttctcagaaaaccaccacaaaaaccaccacaccaaatgctcaagcaacacggggtggctgataccgaattgtgactcggctaggtggggcaaggctgggcagtgtccgagagagcacccctctctgcatctgaccacgtgctacccccatgctggaggtgacatctcttacgcccaacccttccccactgcacacacct

SEQ ID NO: 371380 - DNA, 1091 bp, Homo sapiens
tccccgagtctagggcccccaagggcgtatgacgccggagccctctgaccgcacctctgaccacaacaaacccctactccacccgtcttgtttgtcccacccttggtgacgcagagccccagcccagaccccgcccaaagcactcatttaactggtattgcggagccacgaggcttctgcttactgcaactcgctccggccgctgggcgtagctgcgactcggcggagtcccggcggcgcgtccttgttctaacccggcgcgccatgaccgtcgcgcggccgagcgtgcccgcggcgctgcccctcctcggggagctgccccggctgctgctgctggtgctgttgtgcctgccggccgtgtggggtgactgtggccttcccccagatgtacctaatgcccagccagctttggaaggccgtacaagttttcccgaggatactgtaataacgtacaaatgtgaagaaagctttgtgaaaattcctggcgagaaggactcagtgatctgccttaagggcagtcaatggtcagatattgaagagttctgcaatcgtagctgcgaggtgccaacaaggctaaattctgcatccctcaaacagccttatatcactcagaattattttccagtcggtactgttgtggaatatgagtgccgtccaggttacagaagagaaccttctctatcaccaaaactaacttgccttcagaatttaaaatggtccacagcagtcgaattttgtaaaaagaaatcatgccctaatccgggagaaatacgaaatggtcagattgatgtaccaggtggcatattatttggtgcaaccatctccttctcatgtaacacagggtacaaattatttggctcgacttctagtttttgtcttatttcaggcagctctgtccagtggagtgacccgttgccagagtgcagagaaatttattgtccagcaccaccacaaattgacaatggaataattcccactgcgtgcagcgcagaccgagccctcacactacactgtgtctgttacttacgcgaccttcataatgtcacctccccttcactcggagagcaactggaagccctctactgtcaata

SEQ ID NO: 371381 - DNA, 555 bp, Homo sapiens
ggtttcttcagtcctataaaatagagattagttccttccagttctagtactctatgtttctttctatgatcatcacttagacctccaatgaataaatcactcactccaatggaatagaaacattaagtagcaatctttctttttttttgaataaatcctgggcaaaaggtatttatgggagcaaagaaatggatgaattattttcaaaacatatatgttcccttagatggaagagttcctgggatgaaatttttgttttataggagactggcttaggaaacccaagacagaatgtatatctattcatttctaggtcatagtgtgaaaacttccatttggaaatctgggagcagttcttaagtcaaaaaacagacctggaatcacagtatccatacataccagttggaggacaaaagacattgccccagagaccagaggcaccaaaatacactacacctagctacctgagaatgcctctagctggcaactccagcaaaggcccttttccccatccttgaccatcttgagtggaatgctaagaactgctgggaggaa

SEQ ID NO: 371382 - DNA, 482 bp, Homo sapiens
tctgtgagaaaaaacacttttaatagaccaacctcattacgcaaaagtcagagccaataaagcaacctataaaaatgtaaaccatttgatgcactcctaagaatcatatttccttttcatatttttgaataaccaaaggattaattttatgggattaataaatattaagactatagaagtcaggctgatggctgggcgtggtggctcacgcctgtaatcccagcactttgggaggctgaggtgggtggaccatgaggtcaggagttcgagaccatcctgaccaatatggtgaaaccccatctctactaaaaaatacaaaaattagccgggtgtggtggcatgcgcctgtggtcccagctactcgggaggctgaggcagcagaattgtttgaactggggatgtggaggttgctgtgagccaagatctcaccactgcactccagcctgggcgacaaagcgagacgccatctcaaaaaaaaaaaa

SEQ ID NO: 371383 - DNA, 379 bp, Homo sapiens
tattttacacaggcttggtatcatatatacaatccacagtcaacccatgtataaactcacacttgaatcaccagttgatgaaaaatattatctattcttggtatagtatgataatataatatatgtaataggatattataatatcatttatataacataagaatacctgtagcagaactgatctctacaagtctcatacattattagtcatattacaagaatttcctgtacattttagcattttattgtcctttatactttctatttcacattaagaaggttttttttttccgtcactttcctctatagccatcactcaatcttaaattgacaaagcaaatcctccagtggcatcaaatgcacaccatgtgttagccaa

SEQ ID NO: 371384 - DNA, 370 bp, Homo sapiens
ttttgagacagggtcttactctgtcgcccaggtggcaatgtagtgattgtggctcactgtggtctggacctcctagactcaagcaattctcccacctcagcctcctgagtagctgggactacagtgtgcaccaccatgcccagctaatttttgtaatttttttgtagaggtggggttttgccatgttgcccaggctgatctttaaactcctgggctcaagtgatctgcccaccttggcctcccaaagtgctgggattgcaggtgtgagccactttgcccagcccagtgtgcttttgaaaaaagccctttgcattccctagaatggctgggcacagtggctcatgccagtaatccctgcactttgggaggc

SEQ ID NO: 371385 - DNA, 484 bp, Homo sapiens
tcgtctcaaactcctgagctcaagcaatccacccgcctcagcctccgaaagtgctgggattgcaggtgtgagccactgcgcccagccaaaattttctgattttttgacataaggtttttcatagtaaattctcatcttattttggtagaagcttttttttcacataaccatacagttcacccatttgaagtgtaaaagtcaatgctttcagcacattcacagagttgtacagtcacaatcaaatttagaacaaatataaatgccagcccattatcagccacccttcattcttccctccctcaaccgtatgcagccaccactctgctttctgaccctgtagatttgcctgctctgggcatttcatatgagtagatcataccatatgtggccctttgtgactggctttcacaaagcataattttcacttagcataattttccttttatttttcttaagatggagccttgctctgtcacccaggcta

SEQ ID NO: 371386 - DNA, 456 bp, Homo sapiens
  misc_feature (376)..(376): n is a, c, g, or t
ggtcttaagaggttgctgccacttaggaaggttgcgttgtgctttgcttccctgagtgctagaaaagctcgcctttctgtcatgctgaactgtaacgccaatgaaaacctcagagtgctctgccaatgtttaaatgaccaaattgaaggcatcagggccactttcaggggttcctatgtttcctcctcctaattaggatttgccaggctcccctcctccttcatcctattacttaatacatctgcgccctgctactgtcttgttctgttctaaaggtaaaccctcagtagggcttactcagaggaggcgccgagagcgagcgagggctgtgaggactgccagcacgctgtcacctctcacaaccactctttccctnactcacctcaaccagaagttgcagtgagccaagatcacgtcactgcactccagcctgggtgacagagtgaccctgtctca

SEQ ID NO: 371387 - DNA, 635 bp, Homo sapiens
aaatggattttatgatttgtgaattatatattaaaaaataaagaaaaagtaggctagggctcaggccccttcctctggatggcagtggtggcaggggggtggtttggaaagactcccccccacacacacaccaggcctcaccccactccttccatctgggggacagaggcttcggctcaccgagagtgacaagctgcaggtgcagatccaggcgtacctggacaatatttttgatgtgggggcgctgctggaggacacagagaccaagaacgctgtgctggagcacatggaggaactgcaggagcaagtggcgctggtgagagtgggtcctgaccccagcccagcacatcataggcccacagggcacacgggccacagggccacgcaagcatgggcactgggcagcagacagtgttataattgtgcattggaggtgctgcctgcctggccccagagcctggcctgaatccaaagcctgaatctgttgggtgtctttctcaatgagtgtgggtgagcaccctcactgacaggcccctcctctacccaggctcagaccccaggtgaactgaaatgggtgcctggggcccctcccagctcagtctcctcctctccctccacctcccgcatcactggta

SEQ ID NO: 371388 - DNA, 499 bp, Homo sapiens
accggcggtgccagtgccgggctgcgggtcggggctcaccatgtgctggtgctacagctgacagagcggcttcgggacgcggagaacgaatccatggccaagattgcagaactggaaaaacagctaagccaggcgcgcaaggagttggagaccctgcgggagcgcttcagcgaatcgaccgccatgggcgcctccaggcgtcccccagagcctgagaaagcgcctcccgctgccccgacgcggccctcggccctggagctgaaggtggaggagctggaggagaaggggttaatccgtattctgcgggggccgggggatgctgtctccatcgagatcctccccgtcgctgtggcaactccgagcggcggtgatgctccgactccgggggtgccgaccggctcccccagcccagatctcgcacctgcagcagagccggctcccggagcagcgccaccgccgccgcccccactgcccggcctcccctccccgcaggaagccc

SEQ ID NO: 371389 - DNA, 1828 bp, Homo sapiens
ctccagtagtacccccagtgctcaccactgcccccaaacccccgtcccaggagtgaaggccaagaagcccatccagactaagttccgaatgccactcttgaactgggtggcactgaaacccagccagatcaccggcactgtcttcacagagctcaatgatgagaaggtgctgcaggagctagacatgagtgattttgaggaacagttcaagaccaagtcccaaggccccagcctggacctcagcgctctcaagagtaaggcagcccagaaggcccccagcaaggcgacactcattgaggccaaccgggccaagaacttggccatcaccctgcggaagggcaacctgggggccgagcgcatctgccaagccattgaggcgtacgacctgcaggctctgggcctggacttcctggagctgctgatgcgcttcctgcccacagagtatgagcgcagcctcatcacccgctttgagcgggagcagcggccaatggaggagctgtcagaggaggaccgcttcatgctatgcttcagccgcatcccgcgcctgccggagcgcatgaccacactcaccttcctgggcaacttcccggacacagcccagctgctcatgccgcaactgaatgccatcattgcagcctcaatgtccatcaagtcctctgacaaactccgccagatcctggagattgtcctggcctttggcaactacatgaacagtagcaagcgtggggcagcctatggcttccggctccagagcctggatgcgctgttggagatgaagtcgactgatcgcaagcagacgctgctgcactacctggtgaaggtcattgctgagaagtacccgcaactcacaggcttccacagcgacctgcacttcctggacaaggcgggctcagtgtccctggacagtgtcctggcggacgtgcgctccctgcagcgaggcctagagttgacacagagagagtttgtgcggcaggatgactgcatggtgctcaaggagttcctgagggccaactcgcccaccatggacaagctgctggcagacagcaagacggctcaggaggcctttgagtctgtggtggagtacttcggagagaaccccaagaccacatccccaggcctgttcttctccctctttagccgcttcattaaggcctacaagaaagctgagcaggaggtggaacagtggaaaaaagaagccgctgcccaggaggcaggcgctgataccccgggcaaaggggagcccccagcacccaagtcaccgccaaaggcccggcggccacagatggacctcatctctgagctgaaacggaggcagcagaaggagccactcatttatgagagcgaccgtgatggggccattgaagacatcatcacagatctgcggaaccagccctacatccgcgcagacacaggccgccgcagtgcccgtcggcgtcccccgggccccccactgcaggtcacctccgacctctcgctgtagccgctatttctgcaggtggattctgcaggggtgtggggccgtggacaggctgaggctcaaggaaggtggtcctcagctcggctggccgggcagcccctcctccgctgtggcccgcctcaaacgggctggtgcatcctcctcttggccacagagggcagcatcgcccgccccttcccccaaatgctgcttgcagcacccaccctaaagccccctccaaatagccatacttagcctcagcaggagcctggcctgtaacttataaagtgcacctcgcccccgcaagccccagccccgaggaccgtccatggaccttatttttatatgagattaataaagatgtttgcaaaa

SEQ ID NO: 371390 - DNA, 2120 bp, Homo sapiens
cgccaccacctccgggcactgacgggccggtgcctccgccgccgccgccgccgcgccgcctcccggaggtcctcctgatgccctaggaagacgcgactcagaattgggcccaggagtgaaggccaagaagcccatccagactaagttccgaatgccactcttgaactgggtggcactgaaacccagccagatcaccggcactgtcttcacagagctcaatgatgagaaggtgctgcaggagctagacatgagtgattttgaggaacagttcaagaccaagtcccaaggccccagcctggacctcagcgctctcaagagtaaggcagcccagaaggcccccagcaaggcgacactcattgaggccaaccgggccaagaacttggccatcaccctgcggaagggcaacctgggggccgagcgcatctgccaagccattgaggcgtacgacctgcaggctctgggcctggacttcctggagctgctgatgcgcttcctgcccacagagtatgagcgcagcctcatcacccgctttgagcgggagcagcggccaatggaggagctgtcagaggaggaccgcttcatgctatgcttcagccgcatcccgcgcctgccggagcgcatgaccacactcaccttcctgggcaacttcccggacacagcccagctgctcatgccggtgtgggcggagcgggcagggcggtgtgacttgggaggggatgggcaggaggcaactcccagcctgggctgcggcagggaacctgggagtacttgagcctccagatggaggaggctccaacttatcttacctcccccatcccacccccagcaactgaatgccatcattgcagcctcaatgtccatcaagtcctctgacaaactccgccagatcctggagattgtcctggcctttggcaactacatgaacagtagcaagcgtggggcagcctatggcttccggctccagagcctggatgcggtgaggaggggcccctggcttggggactggggctggggactggctggtggcctgtggcttacaatgggtccttgtgcagctgttggagatgaagtcgactgatcgcaagcagacgctgctgcactacctggtgaaggtcattgctgagaagtacccgcaactcacaggcttccacagcgacctgcacttcctggacaaggcgggctcagtgtccctggacagtgtcctggcggacgtgcgctccctgcagcgaggcctagagttgacacagagagagtttgtgcggcaggatgactgcatggtgctcaaggagttcctgagggccaactcgcccaccatggacaagctgctggcagacagcaagacggctcaggaggcctttgagtctgtggtggagtacttcggagagaaccccaagaccacatccccaggcctgttcttctccctctttagccgcttcattaaggcctacaagaaagctgagcaggaggtggaacagtggaaaaaagaagccgctgcccaggaggcaggcgctgataccccgggcaaaggggagcccccagcacccaagtcaccgccaaaggcccggcggccacagatggacctcatctctgagctgaaacggaggcagcagaaggagccactcatttatgagagcgaccgtgatggggccattgaagacatcatcacagatctgcggaaccagccctacatccgcgcagacacaggccgccgcagtgcccgtcggcgtcccccgggccccccactgcaggtcacctccgacctctcgctgtagccgctatttctgcaggtggattctgcaggggtgtggggccgtggacaggctgaggctcaaggaaggtggtcctcagctcggctggccgggcagcccctcctccgctgtggcccgcctcaaacgggctggtgcatcctcctcttggccacagagggcagcatcgcccgccccttcccccaaatgctgcttgcagcacccaccctaaagccccctccaaatagccatacttagcctcagcaggagcctggcctgtaacttataaagtgcacctcgcccccgcaagccccagccccgaggaccgtccatggaccttatttttatatgagattaataaagatgtttgcaaaa

SEQ ID NO: 371391 - DNA, 2298 bp, Homo sapiens
ctccagtagtacccccagtgctcaccactgcccccaaacccccgtcccaggagtgaaggccaagaagcccatccagactaagttccgaatgccactcttgaactgggtggcactgaaacccagccagatcaccggcactgtcttcacagagctcaatgatgagaaggtgctgcaggagctagacatgagtgattttgaggaacagttcaagaccaagtcccaaggccccagcctggacctcagcgctctcaagagtaaggcagcccagaaggcccccagcaaggcgacactcattgaggccaaccgggccaagaacttggccatcaccctgcggaagggcaacctgggggccgagcgcatctgccaagccattgaggcgtgagtgtccctgtcctgggtttgtgggcagtccggcccctttgctaggctggggttgtcaggcagatcctagtaaaagagcctcaatggtgagctctttcatcaggcttcataccaaccctggtccaggaaacttgtccccattttaaggtggagaaaactcagtccatgcctaaattaggatgtcccacttcctccctgcctctttgcctagctgtgagcacccaggctgtgggatttacagccgggcgtccgccgctgacgtacgatggggaccctggctgcccagttcccagtttctctggattcccagttcccagtttctctggattcctacctcttgctctctgaagctgttggcaaatagaaaatactgaaattcatttattcaatcaaggcaggggtagccctgctcccagggactggtgggtatggatgatgcccaatctcccctctcctccctctcacaggtacgacctgcaggctctgggcctggacttcctggagctgctgatgcgcttcctgcccacagagtatgagcgcagcctcatcacccgctttgagcgggagcagcggccaatggaggagctgtcagaggaggaccgcttcatgctatgcttcagccgcatcccgcgcctgccggagcgcatgaccacactcaccttcctgggcaacttcccggacacagcccagctgctcatgccgcaactgaatgccatcattgcagcctcaatgtccatcaagtcctctgacaaactccgccagatcctggagattgtcctggcctttggcaactacatgaacagtagcaagcgtggggcagcctatggcttccggctccagagcctggatgcgctgttggagatgaagtcgactgatcgcaagcagacgctgctgcactacctggtgaaggtcattgctgagaagtacccgcaactcacaggcttccacagcgacctgcacttcctggacaaggcgggctcagtgtccctggacagtgtcctggcggacgtgcgctccctgcagcgaggcctagagttgacacagagagagtttgtgcggcaggatgactgcatggtgctcaaggagttcctgagggccaactcgcccaccatggacaagctgctggcagacagcaagacggctcaggaggcctttgagtctgtggtggagtacttcggagagaaccccaagaccacatccccaggcctgttcttctccctctttagccgcttcattaaggcctacaagaaagctgagcaggaggtggaacagtggaaaaaagaagccgctgcccaggaggcaggcgctgataccccgggcaaaggggagcccccagcacccaagtcaccgccaaaggcccggcggccacagatggacctcatctctgagctgaaacggaggcagcagaaggagccactcatttatgagagcgaccgtgatggggccattgaagacatcatcacagatctgcggaaccagccctacatccgcgcagacacaggccgccgcagtgcccgtcggcgtcccccgggccccccactgcaggtcacctccgacctctcgctgtagccgctatttctgcaggtggattctgcaggggtgtggggccgtggacaggctgaggctcaaggaaggtggtcctcagctcggctggccgggcagcccctcctccgctgtggcccgcctcaaacgggctggtgcatcctcctcttggccacagagggcagcatcgcccgccccttcccccaaatgctgcttgcagcacccaccctaaagccccctccaaatagccatacttagcctcagcaggagcctggcctgtaacttataaagtgcacctcgcccccgcaagccccagccccgaggaccgtccatggaccttatttttatatgagattaataaagatgtttgcaaaa

SEQ ID NO: 371392 - DNA, 1275 bp, Homo sapiens
ggtgtcctcagctctggcattctgctgagcctttctcctgcctctcccagattgtcctggcctttggcaactacatgaacagtagcaagcgtggggcagcctatggcttccggctccagagcctggatgcggtgaggaggggcccctggcttggggactggggctggggactggctggtggcctgtggcttacaatgggtccttgtgcagctgttggagatgaagtcgactgatcgcaagcagacgctgctgcactacctggtgaaggtcattgctgagaagtacccgcaactcacaggcttccacagcgacctgcacttcctggacaaggcgggctcagtgtccctggacagtgtcctggcggacgtgcgctccctgcagcgaggcctagagttgacacagagagagtttgtgcggcaggatgactgcatggtgctcaaggagttcctgagggccaactcgcccaccatggacaagctgctggcagacagcaagacggctcaggaggcctttgagtctgtggtggagtacttcggagagaaccccaagaccacatccccaggcctgttcttctccctctttagccgcttcattaaggcctacaagaaagctgagcaggaggtggaacagtggaaaaaagaagccgctgcccaggaggcaggcgctgataccccgggcaaaggggagcccccagcacccaagtcaccgccaaaggcccggcggccacagatggacctcatctctgagctgaaacggaggcagcagaaggagccactcatttatgagagcgaccgtgatggggccattgaagacatcatcacagatctgcggaaccagccctacatccgcgcagacacaggccgccgcagtgcccgtcggcgtcccccgggccccccactgcaggtcacctccgacctctcgctgtagccgctatttctgcaggtggattctgcaggggtgtggggccgtggacaggctgaggctcaaggaaggtggtcctcagctcggctggccgggcagcccctcctccgctgtggcccgcctcaaacgggctggtgcatcctcctcttggccacagagggcagcatcgcccgccccttcccccaaatgctgcttgcagcacccaccctaaagccccctccaaatagccatacttagcctcagcaggagcctggcctgtaacttataaagtgcacctcgcccccgcaagccccagccccgaggaccgtccatggaccttatttttatatgagattaataaagatgtttgcaaaa

SEQ ID NO: 371393 - DNA, 1789 bp, Homo sapiens
cgccaccacctccgggcactgacgggccggtgcctccgccgccgccgccgccgcgccgcctcccggaggtcctcctgatgccctaggaagacgcgactcagaattgggcccaggagtgaaggccaagaagcccatccagactaagttccgaatgccactcttgaactgggtggcactgaaacccagccagatcaccggcactgtcttcacagagctcaatgatgagaaggtgctgcaggagctagacatgagtgattttgaggaacagttcaagaccaagtcccaaggccccagcctggacctcagcgctctcaagagtaaggcagcccagaaggcccccagcaaggcgacactcattgaggccaaccgggccaagaacttggccatcaccctgcggaagggcaacctgggggccgagcgcatctgccaagccattgaggcgtacgacctgcaggctctgggcctggacttcctggagctgctgatgcgcttcctgcccacagagtatgagcgcagcctcatcacccgctttgagcgggagcagcggccaatggaggagctgtcagaggaggaccgcttcatgctatgcttcagccgcatcccgcgcctgccggagcgcatgaccacactcaccttcctgggcaacttcccggacacagcccagctgctcatgccgcaactgaatgccatcattgcagcctcaatgtccatcaagtcctctgacaaactccgccagatcctggagattgtcctggcctttggcaactacatgaacagtagcaagcgtggggcagcctatggcttccggctccagagcctggatgcgctgttggagatgaagtcgactgatcgcaagcagacgctgctgcactacctggtgaaggtcattgctgagaagtacccgcaactcacaggcttccacagcgacctgcacttcctggacaaggcgggctcagtgtccctggacagtgtcctggcggacgtgcgctccctgcagcgaggcctagagttgacacagagagagtttgtgcggcaggatgactgcatggtgctcaaggagttcctgagggccaactcgcccaccatggacaagctgctggcagacagcaagacggctcagaaagctgagcaggaggtggaacagtggaaaaaagaagccgctgcccaggaggcaggcgctgataccccgggcaaaggggagcccccagcacccaagtcaccgccaaaggcccggcggccacagatggacctcatctctgagctgaaacggaggcagcagaaggagccactcatttatgagagcgaccgtgatggggccattgaagacatcatcacagatctgcggaaccagccctacatccgcgcagacacaggccgccgcagtgcccgtcggcgtcccccgggccccccactgcaggtcacctccgacctctcgctgtagccgctatttctgcaggtggattctgcaggggtgtggggccgtggacaggctgaggctcaaggaaggtggtcctcagctcggctggccgggcagcccctcctccgctgtggcccgcctcaaacgggctggtgcatcctcctcttggccacagagggcagcatcgcccgccccttcccccaaatgctgcttgcagcacccaccctaaagccccctccaaatagccatacttagcctcagcaggagcctggcctgtaacttataaagtgcacctcgcccccgcaagccccagccccgaggaccgtccatggaccttatttttatatgagattaataaagatgtttgcaaaa

SEQ ID NO: 371394 - DNA, 2325 bp, Homo sapiens
cgccaccacctccgggcactgacgggccggtgcctccgccgccgccgccgccgcgccgcctcccggaggtcctcctgatgccctaggaagacgcgactcagaattgggcccaggagtgaaggccaagaagcccatccagactaagttccgaatgccactcttgaactgggtggcactgaaacccagccagatcaccggcactgtcttcacagagctcaatgatgagaaggtgctgcaggagctagacatgagtgattttgaggaacagttcaagaccaagtcccaaggccccagcctggacctcagcgctctcaagagtaaggcagcccagaaggcccccagcaaggcgacactcattgaggccaaccgggccaagaacttggccatcaccctgcggaagggcaacctgggggccgagcgcatctgccaagccattgaggcgtacgacctgcaggctctgggcctggacttcctggagctgctgatgcgcttcctgcccacagagtatgagcgcagcctcatcacccgctttgagcgggagcagcggccaatggaggagctgtcagaggaggaccgcttcatgctatgcttcagccgcatcccgcgcctgccggagcgcatgaccacactcaccttcctgggcaacttcccggacacagcccagctgctcatgccgcaactgaatgccatcattgcagcctcaatgtccatcaagtcctctgacaaactccgccagatcctggagattgtcctggcctttggcaactacatgaacagtagcaagcgtggggcagcctatggcttccggctccagagcctggatgcgctgttggagatgaagtcgactgatcgcaagcagacgctgctgcactacctggtgaaggtcattgctgagaagtacccgcaactcacaggcttccacagcgacctgcacttcctggacaaggcgggctcagtgtccctggacagtgtcctggcggacgtgcgctccctgcagcgaggcctagagttgacacagagagagtttgtgcggcaggatgactgcatggtgctcaaggagttcctgagggccaactcgcccaccatggacaagctgctggcagacagcaagacggctcagaaagctgagcaggaggtggaacagtggaaaaaagaagccgctgcccaggaggcaggcgctgataccccgggcaaaggggagcccccagcacccaagtcaccgccaaaggcccggcggccacagatggacctcatctctgagctgaaacggaggcagcagaaggagccactcatttatgagagcgaccgtgatggggccattgaagacatcatcacaggtaagggcttggccaggccttggtcttatcctcagtctgtccttctatgctttcttctgacccaatgcgctatcctctgggggactggctgccacactgcttcttgctaccttttctgtttttctttcctttttcctttctctactccccttcacctgccccacccccactcagtgatcaagacggtgcccttcacggcccgcaccggcaagcggacatcccggctcctctgtgaggccagcctgggagaagagatgcccctctagcccctcaggtacccagatgacctggcctctgataccacgctgcccacagcccctgggacccttgggagaactgaggcatgctgccttctcctgggccagtggatggctgggatgtgatttgtggggtggaggggtctggcaaacataaacggtacccctgccatgtgcacacaatctgagtccttaggaggctaagctttgtgccctggagccatgctcccagctctgggcggactcctgaatggtaaatgtgtctccttcggctgccagatctgcggaaccagccctacatccgcgcagacacaggccgccgcagtgcccgtcggcgtcccccgggccccccactgcaggtcacctccgacctctcgctgtagccgctatttctgcaggtggattctgcaggggtgtggggccgtggacaggctgaggctcaaggaaggtggtcctcagctcggctggccgggcagcccctcctccgctgtggcccgcctcaaacgggctggtgcatcctcctcttggccacagagggcagcatcgcccgccccttcccccaaatgctgcttgcagcacccaccctaaagccccctccaaatagccatacttagcctcagcaggagcctggcctgtaacttataaagtgcacctcgcccccgcaagccccagccccgaggaccgtccatggaccttatttttatatgagattaataaagatgtttgcaaaa

SEQ ID NO: 371395 - DNA, 1368 bp, Homo sapiens
cgccaccacctccgggcactgacgggccggtgcctccgccgccgccgccgccgcgccgcctcccggaggtcctcctgatgccctaggaagacgcgactcagaattgggcccaggagtgaaggccaagaagcccatccagactaagttccgaatgccactcttgaactgggtggcactgaaacccagccagatcaccggcactgtcttcacagagctcaatgatgagaaggtgctgcaggagctagacatgagtgattttgaggaacagttcaagaccaagtcccaaggccccagcctggacctcagcgctctcaagagtaaggcagcccagaaggcccccagcaaggcgacactcattgaggccaaccgggccaagaacttggccatcaccctgcggaagggcaacctgggggccgagcgcatctgccaagccattgaggcgtacgacctgcaggctctgggcctggacttcctggagctgctgatgcgcttcctgcccacagagtatgagcgcagcctcatcacccgctttgagcgggagcagcggccaatggaggagctgtcagaggaggaccgcttcatgctatgcttcagccgcatcccgcgcctgccggagcgcatgaccacactcaccttcctgggcaacttcccggacacagcccagctgctcatgccgcaactgaatgccatcattgcagcctcaatgtccatcaagtcctctgacaaactccgccagatcctggagattgtcctggcctttggcaactacatgaacagtagcaagcgtggggcagcctatggcttccggctccagagcctggatgcgctgttggagatgaagtcgactgatcgcaagcagacgctgctgcactacctggtgaaggtcattgctgagaagtacccgcaactcacaggcttccacagcgacctgcacttcctggacaaggcgggctcagtgtccctggacagtgtcctggcggacgtgcgctccctgcagcgaggcctagagttgacacagagagagtttgtgcggcaggatgactgcatggtgctcaaggagttcctgagggccaactcgcccaccatggacaagctgctggcagacagcaagacggctcaggaggcctttgagtctgtggtggagtacttcggagagaaccccaagaccacatccccaggcctgttcttctccctctttagccgcttcattaaggcctacaagaaagctgagcaggaggtggaacagtggaaaaaagaagccgctgcccaggaggcaggcgctgataccccgggcaaaggggagcccccagcacccaaggtaggcaactgctcctgggcttggtactgggctgcagggatgcatggcat

SEQ ID NO: 371396 - DNA, 1272 bp, Homo sapiens
cgccaccacctccgggcactgacgggccggtgcctccgccgccgccgccgccgcgccgcctcccggaggtcctcctgatgccctaggaagacgcgactcagaattgggcccaggagtgaaggccaagaagcccatccagactaagttccgaatgccactcttgaactgggtggcactgaaacccagccagatcaccggcactgtcttcacagagctcaatgatgagaaggtgctgcaggagctagacatgagtgattttgaggaacagttcaagaccaagtcccaaggccccagcctggacctcagcgctctcaagagtaaggcagcccagaaggcccccagcaaggcgacactcattgaggccaaccgggccaagaacttggccatcaccctgcggaagggcaacctgggggccgagcgcatctgccaagccattgaggcgtacgacctgcaggctctgggcctggacttcctggagctgctgatgcgcttcctgcccacagagtatgagcgcagcctcatcacccgctttgagcgggagcagcggccaatggaggagctgtcagaggaggaccgcttcatgctatgcttcagccgcatcccgcgcctgccggagcgcatgaccacactcaccttcctgggcaacttcccggacacagcccagctgctcatgccgcaactgaatgccatcattgcagcctcaatgtccatcaagtcctctgacaaactccgccagatcctggagattgtcctggcctttggcaactacatgaacagtagcaagcgtggggcagcctatggcttccggctccagagcctggatgcgctgttggagatgaagtcgactgatcgcaagcagacgctgctgcactacctggtgaaggtcattgctgagaagtacccgcaactcacaggcttccacagcgacctgcacttcctggacaaggcgggctcagtgtccctggacagtgtcctggcggacgtgcgctccctgcagcgaggcctagagttgacacagagagagtttgtgcggcaggatgactgcatggtgctcaaggagttcctgagggccaactcgcccaccatggacaagctgctggcagacagcaagacggctcaggaggcctttgagtctgtggtggagtacttcggagagaaccccaagaccacatccccaggcctgttcttctccctctttagccgcttcattaaggcctacaaggtattcgggtctggggcaggctgggagccctgtagggcactgaagccttt

SEQ ID NO: 371397 - DNA, 1169 bp, Homo sapiens
  misc_feature (1166)..(1166): n is a, c, g, or t
cgccaccacctccgggcactgacgggccggtgcctccgccgccgccgccgccgcgccgcctcccggaggtcctcctgatgccctaggaagacgcgactcagaattgggcccaggagtgaaggccaagaagcccatccagactaagttccgaatgccactcttgaactgggtggcactgaaacccagccagatcaccggcactgtcttcacagagctcaatgatgagaaggtgctgcaggagctagacatgagtgattttgaggaacagttcaagaccaagtcccaaggccccagcctggacctcagcgctctcaagagtaaggcagcccagaaggcccccagcaaggcgacactcattgaggccaaccgggccaagaacttggccatcaccctgcggaagggcaacctgggggccgagcgcatctgccaagccattgaggcgtacgacctgcaggctctgggcctggacttcctggagctgctgatgcgcttcctgcccacagagtatgagcgcagcctcatcacccgctttgagcgggagcagcggccaatggaggagctgtcagaggaggaccgcttcatgctatgcttcagccgcatcccgcgcctgccggagcgcatgaccacactcaccttcctgggcaacttcccggacacagcccagctgctcatgccgcaactgaatgccatcattgcagcctcaatgtccatcaagtcctctgacaaactccgccagatcctggagattgtcctggcctttggcaactacatgaacagtagcaagcgtggggcagcctatggcttccggctccagagcctggatgcgctgttggagatgaagtcgactgatcgcaagcagacgctgctgcactacctggtgaaggtcattgctgagaagtacccgcaactcacaggcttccacagcgacctgcacttcctggacaaggcgggctcagtgtccctggacagtgtcctggcggacgtgcgctccctgcagcgaggcctagagttgacacagagagagtttgtgcggcaggatgactgcatggtgctcaaggagttcctgagggccaactcgcccaccatggacaagctgctggcagacagcaagacggctcaggtgcgccagggctggcctcacctggaggtggggcatgtaggagcantag

SEQ ID NO: 371398 - DNA, 623 bp, Homo sapiens
  misc_feature (47)..(47): n is a, c, g, or t
ttttggtgatggggaggcatcctggagctggagctataaattccccntagtcaccgccaaaggcccggcggccacagatggacctcatctctgagctgaaacggaggcagcagaaggagccactcatttatgagagcgaccgtgatggggccattgaagacatcatcacagatctgcggaaccagccctacatccgcgcagacacaggccgccgcagtgcccgtcggcgtcccccgggccccccactgcaggtcacctccgacctctcgctgtagccgctatttctgcaggtggattctgcaggggtgtggggccgtggacaggctgaggctcaaggaaggtggtcctcagctcggctggccgggcagcccctcctccgctgtggcccgcctcaaacgggctggtgcatcctcctcttggccacagagggcagcatcgcccgccccttcccccaaatgctgcttgcagcacccaccctaaagccccctccaaatagccatacttagcctcagcaggagcctggcctgtaacttataaagtgcacctcgcccccgcaagccccagccccgaggaccgtccatggaccttatttttatatgagattaataaagatgtttgcaaaa

SEQ ID NO: 371399 - DNA, 1351 bp, Homo sapiens
cgccaccacctccgggcactgacgggccggtgcctccgccgccgccgccgccgcgccgcctcccggaggtcctcctgatgccctaggaagacgcgactcagaattgggcccaggagtgaaggccaagaagcccatccagactaagttccgaatgccactcttgaactgggtggcactgaaacccagccagatcaccggcactgtcttcacagagctcaatgatgagaaggtgctgcaggagctagacatgagtgattttgaggaacagttcaagaccaagtcccaaggccccagcctggacctcagcgctctcaagagtaaggcagcccagaaggcccccagcaaggcgacactcattgaggccaaccgggccaagaacttggccatcaccctgcggaagggcaacctgggggccgagcgcatctgccaagccattgaggcgtacgacctgcaggctctgggcctggacttcctggagctgctgatgcgcttcctgcccacagagtatgagcgcagcctcatcacccgctttgagcgggagcagcggccaatggaggagctgtcagaggaggaccgcttcatgctatgcttcagccgcatcccgcgcctgccggagcgcatgaccacactcaccttcctgggcaacttcccggacacagcccagctgctcatgccggtgtgggcggagcgggcagggcggtgtgacttgggaggggatgggcaggaggcaactcccagcctgggctgcggcagggaacctgggagtacttgagcctccagatggaggaggctccaacttatcttacctcccccatcccacccccagcaactgaatgccatcattgcagcctcaatgtccatcaagtcctctgacaaactccgccagatcctggagattgtcctggcctttggcaactacatgaacagtagcaagcgtggggcagcctatggcttccggctccagagcctggatgcgctgttggagatgaagtcgactgatcgcaagcagacgctgctgcactacctggtgaaggtcattgctgagaagtacccgcaactcacaggcttccacagcgacctgcacttcctggacaaggcgggctcagtgtccctggacagtgtcctggcggacgtgcgctccctgcagcgaggcctagagttgacacagagagagtttgtgcggcaggatgactgcatggtgctcaaggagttcctgagggccaactcgcccaccatggacaagctgctggcagacagcaagacggctcaggaggcctttgagtctgtggtggagtacttcggagagaaccccaagggctcattcgaaacaattgccgggggtccgagccaa

SEQ ID NO: 371400 - DNA, 1013 bp, Homo sapiens
gctgaccccagcccacagcaggaaggccctgcggaattcccgcatcgtcagccagaaggacgacgtccacgtctgtattatgtgcctacgcgccatcatgaactaccagtctggcttcagccttgtcatgaaccacccagcctgtgtcaatgagattgctctgagcctcaacaacaagaaccccagaaccaaggctctggtgctggagctgctggcggccgtgtgcttggtgcggggaggacatgacatcatccttgcagcctttgacaacttcaaggaggtgtgtggggagcagcaccgctttgaaaagctgatggaatatttccggaatgaggacagcaacatcgacttcatggtggcctgcatgcagttcatcaacattgtggtacattcggtggagaacatgaacttccgtgtcttcctgcaatatgagttcacccacttgggcctggacctgtacttggagaggcttcggctcaccgagagtgacaagctgcaggtgcagatccaggcgtacctggacaatatttttgatgtgggggcgctgctggaggacacagagaccaagaacgctgtgctggagcacatggaggaactgcaggagcaagtggcgctgctgacagagcggcttcgggacgcggagaacgaatccatggccaagattgcagaactggaaaaacagctaagccaggcgcgcaaggagttggagaccctgcgggagcgcttcagcgaatcgaccgccatgggcgcctccaggcgtcccccagagcctgagaaagcgcctcccgctgccccgacgcggccctcggccctggagctgaaggtggaggagctggaggagaaggggttaatccgtattctgcgggggccgggggatgctgtctccatcgagatcctccccgtcgctgtggcaactccgagcggcggtgatgctccgactccgggggtgccgaccggctcccccagcccagatctcgcacctacagaccccatgcctacgggatcctctagac

SEQ ID NO: 371401 - DNA, 1058 bp, Homo sapiens
gctgaccccagcccacagcaggaaggccctgcggaattcccgcatcgtcagccagaaggacgacgtccacgtctgtattatgtgcctacgcgccatcatgaactaccagtctggcttcagccttgtcatgaaccacccagcctgtgtcaatgagattgctctgagcctcaacaacaagaaccccagaaccaaggctctggtgctggagctgctggcggccgtgtgcttggtgcggggaggacatgacatcatccttgcagcctttgacaacttcaaggaggtgtgtggggagcagcaccgctttgaaaagctgatggaatatttccggaatgaggacagcaacatcgacttcatggtggcctgcatgcagttcatcaacattgtggtacattcggtggagaacatgaacttccgtgtcttcctgcaatatgagttcacccacttgggcctggacctgtacttggagaggcttcggctcaccgagagtgacaagctgcaggtgcagatccaggcgtacctggacaatatttttgatgtgggggcgctgctggaggacacagagaccaagaacgctgtgctggagcacatggaggaactgcaggagcaagtggcgctgctgacagagcggcttcgggacgcggagaacgaatccatggccaagattgcagaactggaaaaacagctaagccaggcgcgcaaggagttggagaccctgcgggagcgcttcagcgaatcgaccgccatgggcgcctccaggcgtcccccagagcctgagaaagcgcctcccgctgccccgacgcggccctcggccctggagctgaaggtggaggagctggaggagaaggggttaatccgtattctgcgggggccgggggatgctgtctccatcgagatcctccccgtcgctgtggcaactccgagcggcggtgatgctccgactccgggggtgccgaccggctcccccagcccagatctcgcacctgcagcagagccggctcccggagcagcgccaccgccgccgcccccactgcccggcctcccctccccgcaggaagccc

SEQ ID NO: 371402 - DNA, 713 bp, Homo sapiens
aaatggattttatgatttgtgaattatatattaaaaaataaagaaaaagtaggctagggctcaggccccttcctctggatggcagtggtggcaggggggtggtttggaaagactcccccccacacacacaccaggcctcaccccactccttccatctgggggacagaggcttcggctcaccgagagtgacaagctgcaggtgcagatccaggcgtacctggacaatatttttgatgtgggggcgctgctggaggacacagagaccaagaacgctgtgctggagcacatggaggaactgcaggagcaagtggcgctgctgacagagcggcttcgggacgcggagaacgaatccatggccaagattgcagaactggaaaaacagctaagccaggcgcgcaaggagttggagaccctgcgggagcgcttcagcgaatcgaccgccatgggcgcctccaggcgtcccccagagcctgagaaagcgcctcccgctgccccgacgcggccctcggccctggagctgaaggtggaggagctggaggagaaggggttaatccgtattctgcgggggccgggggatgctgtctccatcgagatcctccccgtcgctgtggcaactccgagcggcggtgatgctccgactccgggggtgccgaccggctcccccagcccagatctcgcacctacagaccccatgcctacgggatcctctagac

SEQ ID NO: 371403 - DNA, 1891 bp, Homo sapiens
cgccaccacctccgggcactgacgggccggtgcctccgccgccgccgccgccgcgccgcctcccggaggtcctcctgatgccctaggaagacgcgactcagaattgggcccaggagtgaaggccaagaagcccatccagactaagttccgaatgccactcttgaactgggtggcactgaaacccagccagatcaccggcactgtcttcacagagctcaatgatgagaaggtgctgcaggagctagacatgagtgattttgaggaacagttcaagaccaagtcccaaggccccagcctggacctcagcgctctcaagagtaaggcagcccagaaggcccccagcaaggcgacactcattgaggccaaccgggccaagaacttggccatcaccctgcggaagggcaacctgggggccgagcgcatctgccaagccattgaggcgtacgacctgcaggctctgggcctggacttcctggagctgctgatgcgcttcctgcccacagagtatgagcgcagcctcatcacccgctttgagcgggagcagcggccaatggaggagctgtcagaggaggaccgcttcatgctatgcttcagccgcatcccgcgcctgccggagcgcatgaccacactcaccttcctgggcaacttcccggacacagcccagctgctcatgccgcaactgaatgccatcattgcagcctcaatgtccatcaagtcctctgacaaactccgccagatcctggagattgtcctggcctttggcaactacatgaacagtagcaagcgtggggcagcctatggcttccggctccagagcctggatgcgctgttggagatgaagtcgactgatcgcaagcagacgctgctgcactacctggtgaaggtcattgctgagaagtacccgcaactcacaggcttccacagcgacctgcacttcctggacaaggcgggctcagtgtccctggacagtgtcctggcggacgtgcgctccctgcagcgaggcctagagttgacacagagagagtttgtgcggcaggatgactgcatggtgctcaaggagttcctgagggccaactcgcccaccatggacaagctgctggcagacagcaagacggctcaggaggcctttgagtctgtggtggagtacttcggagagaaccccaagaccacatccccaggcctgttcttctccctctttagccgcttcattaaggcctacaagaaagctgagcaggaggtggaacagtggaaaaaagaagccgctgcccaggaggcaggcgctgataccccgggcaaaggggagcccccagcacccaagtcaccgccaaaggcccggcggccacagatggacctcatctctgagctgaaacggaggcagcagaaggagccactcatttatgagagcgaccgtgatggggccattgaagacatcatcacagatctgcggaaccagccctacatccgcgcagacacaggccgccgcagtgcccgtcggcgtcccccgggccccccactgcaggtcacctccgacctctcgctgtagccgctatttctgcaggtggattctgcaggggtgtggggccgtggacaggctgaggctcaaggaaggtggtcctcagctcggctggccgggcagcccctcctccgctgtggcccgcctcaaacgggctggtgcatcctcctcttggccacagagggcagcatcgcccgccccttcccccaaatgctgcttgcagcacccaccctaaagccccctccaaatagccatacttagcctcagcaggagcctggcctgtaacttataaagtgcacctcgcccccgcaagccccagccccgaggaccgtccatggaccttatttttatatgagattaataaagatgtttgcaaaa

SEQ ID NO: 371404 - DNA, 1703 bp, Homo sapiens
tgccagaccccagccccacccagctccgcctcctcaccctgtaccttcaggagctagacatgagtgattttgaggaacagttcaagaccaagtcccaaggccccagcctggacctcagcgctctcaagagtaaggcagcccagaaggcccccagcaaggcgacactcattgaggccaaccgggccaagaacttggccatcaccctgcggaagggcaacctgggggccgagcgcatctgccaagccattgaggcgtacgacctgcaggctctgggcctggacttcctggagctgctgatgcgcttcctgcccacagagtatgagcgcagcctcatcacccgctttgagcgggagcagcggccaatggaggagctgtcagaggaggaccgcttcatgctatgcttcagccgcatcccgcgcctgccggagcgcatgaccacactcaccttcctgggcaacttcccggacacagcccagctgctcatgccgcaactgaatgccatcattgcagcctcaatgtccatcaagtcctctgacaaactccgccagatcctggagattgtcctggcctttggcaactacatgaacagtagcaagcgtggggcagcctatggcttccggctccagagcctggatgcgctgttggagatgaagtcgactgatcgcaagcagacgctgctgcactacctggtgaaggtcattgctgagaagtacccgcaactcacaggcttccacagcgacctgcacttcctggacaaggcgggctcagtgtccctggacagtgtcctggcggacgtgcgctccctgcagcgaggcctagagttgacacagagagagtttgtgcggcaggatgactgcatggtgctcaaggagttcctgagggccaactcgcccaccatggacaagctgctggcagacagcaagacggctcaggaggcctttgagtctgtggtggagtacttcggagagaaccccaagaccacatccccaggcctgttcttctccctctttagccgcttcattaaggcctacaagaaagctgagcaggaggtggaacagtggaaaaaagaagccgctgcccaggaggcaggcgctgataccccgggcaaaggggagcccccagcacccaagtcaccgccaaaggcccggcggccacagatggacctcatctctgagctgaaacggaggcagcagaaggagccactcatttatgagagcgaccgtgatggggccattgaagacatcatcacagatctgcggaaccagccctacatccgcgcagacacaggccgccgcagtgcccgtcggcgtcccccgggccccccactgcaggtcacctccgacctctcgctgtagccgctatttctgcaggtggattctgcaggggtgtggggccgtggacaggctgaggctcaaggaaggtggtcctcagctcggctggccgggcagcccctcctccgctgtggcccgcctcaaacgggctggtgcatcctcctcttggccacagagggcagcatcgcccgccccttcccccaaatgctgcttgcagcacccaccctaaagccccctccaaatagccatacttagcctcagcaggagcctggcctgtaacttataaagtgcacctcgcccccgcaagccccagccccgaggaccgtccatggaccttatttttatatgagattaataaagatgtttgcaaaa

SEQ ID NO: 371405 - DNA, 1970 bp, Homo sapiens
cgccaccacctccgggcactgacgggccggtgcctccgccgccgccgccgccgcgccgcctcccggaggtcctcctgatgccctaggaagacgcgactcagaattgggcccaggagtgaaggccaagaagcccatccagactaagttccgaatgccactcttgaactgggtggcactgaaacccagccagatcaccggcactgtcttcacagagctcaatgatgagaaggtgctgcaggagctagacatgagtgattttgaggaacagttcaagaccaagtcccaaggccccagcctggacctcagcgctctcaagagtaaggcagcccagaaggcccccagcaaggcgacactcattgaggccaaccgggccaagaacttggccatcaccctgcggaagggcaacctgggggccgagcgcatctgccaagccattgaggcgtacgacctgcaggctctgggcctggacttcctggagctgctgatgcgcttcctgcccacagagtatgagcgcagcctcatcacccgctttgagcgggagcagcggccaatggaggagctgtcagaggaggaccgcttcatgctatgcttcagccgcatcccgcgcctgccggagcgcatgaccacactcaccttcctgggcaacttcccggacacagcccagctgctcatgccgcaactgaatgccatcattgcagcctcaatgtccatcaagtcctctgacaaactccgccagatcctggagattgtcctggcctttggcaactacatgaacagtagcaagcgtggggcagcctatggcttccggctccagagcctggatgcggtgaggaggggcccctggcttggggactggggctggggactggctggtggcctgtggcttacaatgggtccttgtgcagctgttggagatgaagtcgactgatcgcaagcagacgctgctgcactacctggtgaaggtcattgctgagaagtacccgcaactcacaggcttccacagcgacctgcacttcctggacaaggcgggctcagtgtccctggacagtgtcctggcggacgtgcgctccctgcagcgaggcctagagttgacacagagagagtttgtgcggcaggatgactgcatggtgctcaaggagttcctgagggccaactcgcccaccatggacaagctgctggcagacagcaagacggctcaggaggcctttgagtctgtggtggagtacttcggagagaaccccaagaccacatccccaggcctgttcttctccctctttagccgcttcattaaggcctacaagaaagctgagcaggaggtggaacagtggaaaaaagaagccgctgcccaggaggcaggcgctgataccccgggcaaaggggagcccccagcacccaagtcaccgccaaaggcccggcggccacagatggacctcatctctgagctgaaacggaggcagcagaaggagccactcatttatgagagcgaccgtgatggggccattgaagacatcatcacagatctgcggaaccagccctacatccgcgcagacacaggccgccgcagtgcccgtcggcgtcccccgggccccccactgcaggtcacctccgacctctcgctgtagccgctatttctgcaggtggattctgcaggggtgtggggccgtggacaggctgaggctcaaggaaggtggtcctcagctcggctggccgggcagcccctcctccgctgtggcccgcctcaaacgggctggtgcatcctcctcttggccacagagggcagcatcgcccgccccttcccccaaatgctgcttgcagcacccaccctaaagccccctccaaatagccatacttagcctcagcaggagcctggcctgtaacttataaagtgcacctcgcccccgcaagccccagccccgaggaccgtccatggaccttatttttatatgagattaataaagatgtttgcaaaa

SEQ ID NO: 371406 - DNA, 1177 bp, Homo sapiens
cgtctacgactccgacctcagtctcatgatcgtcgtgtgtttccggctgatgtacatgaacagtagcaagcgtggggcagcctatggcttccggctccagagcctggatgcgctgttggagatgaagtcgactgatcgcaagcagacgctgctgcactacctggtgaaggtcattgctgagaagtacccgcaactcacaggcttccacagcgacctgcacttcctggacaaggcgggctcagtgtccctggacagtgtcctggcggacgtgcgctccctgcagcgaggcctagagttgacacagagagagtttgtgcggcaggatgactgcatggtgctcaaggagttcctgagggccaactcgcccaccatggacaagctgctggcagacagcaagacggctcaggaggcctttgagtctgtggtggagtacttcggagagaaccccaagaccacatccccaggcctgttcttctccctctttagccgcttcattaaggcctacaagaaagctgagcaggaggtggaacagtggaaaaaagaagccgctgcccaggaggcaggcgctgataccccgggcaaaggggagcccccagcacccaagtcaccgccaaaggcccggcggccacagatggacctcatctctgagctgaaacggaggcagcagaaggagccactcatttatgagagcgaccgtgatggggccattgaagacatcatcacagatctgcggaaccagccctacatccgcgcagacacaggccgccgcagtgcccgtcggcgtcccccgggccccccactgcaggtcacctccgacctctcgctgtagccgctatttctgcaggtggattctgcaggggtgtggggccgtggacaggctgaggctcaaggaaggtggtcctcagctcggctggccgggcagcccctcctccgctgtggcccgcctcaaacgggctggtgcatcctcctcttggccacagagggcagcatcgcccgccccttcccccaaatgctgcttgcagcacccaccctaaagccccctccaaatagccatacttagcctcagcaggagcctggcctgtaacttataaagtgcacctcgcccccgcaagccccagccccgaggaccgtccatggaccttatttttatatgagattaataaagatgtttgcaaaa

SEQ ID NO: 371407 - DNA, 2427 bp, Homo sapiens
cgccaccacctccgggcactgacgggccggtgcctccgccgccgccgccgccgcgccgcctcccggaggtcctcctgatgccctaggaagacgcgactcagaattgggcccaggagtgaaggccaagaagcccatccagactaagttccgaatgccactcttgaactgggtggcactgaaacccagccagatcaccggcactgtcttcacagagctcaatgatgagaaggtgctgcaggagctagacatgagtgattttgaggaacagttcaagaccaagtcccaaggccccagcctggacctcagcgctctcaagagtaaggcagcccagaaggcccccagcaaggcgacactcattgaggccaaccgggccaagaacttggccatcaccctgcggaagggcaacctgggggccgagcgcatctgccaagccattgaggcgtacgacctgcaggctctgggcctggacttcctggagctgctgatgcgcttcctgcccacagagtatgagcgcagcctcatcacccgctttgagcgggagcagcggccaatggaggagctgtcagaggaggaccgcttcatgctatgcttcagccgcatcccgcgcctgccggagcgcatgaccacactcaccttcctgggcaacttcccggacacagcccagctgctcatgccgcaactgaatgccatcattgcagcctcaatgtccatcaagtcctctgacaaactccgccagatcctggagattgtcctggcctttggcaactacatgaacagtagcaagcgtggggcagcctatggcttccggctccagagcctggatgcgctgttggagatgaagtcgactgatcgcaagcagacgctgctgcactacctggtgaaggtcattgctgagaagtacccgcaactcacaggcttccacagcgacctgcacttcctggacaaggcgggctcagtgtccctggacagtgtcctggcggacgtgcgctccctgcagcgaggcctagagttgacacagagagagtttgtgcggcaggatgactgcatggtgctcaaggagttcctgagggccaactcgcccaccatggacaagctgctggcagacagcaagacggctcaggaggcctttgagtctgtggtggagtacttcggagagaaccccaagaccacatccccaggcctgttcttctccctctttagccgcttcattaaggcctacaagaaagctgagcaggaggtggaacagtggaaaaaagaagccgctgcccaggaggcaggcgctgataccccgggcaaaggggagcccccagcacccaagtcaccgccaaaggcccggcggccacagatggacctcatctctgagctgaaacggaggcagcagaaggagccactcatttatgagagcgaccgtgatggggccattgaagacatcatcacaggtaagggcttggccaggccttggtcttatcctcagtctgtccttctatgctttcttctgacccaatgcgctatcctctgggggactggctgccacactgcttcttgctaccttttctgtttttctttcctttttcctttctctactccccttcacctgccccacccccactcagtgatcaagacggtgcccttcacggcccgcaccggcaagcggacatcccggctcctctgtgaggccagcctgggagaagagatgcccctctagcccctcaggtacccagatgacctggcctctgataccacgctgcccacagcccctgggacccttgggagaactgaggcatgctgccttctcctgggccagtggatggctgggatgtgatttgtggggtggaggggtctggcaaacataaacggtacccctgccatgtgcacacaatctgagtccttaggaggctaagctttgtgccctggagccatgctcccagctctgggcggactcctgaatggtaaatgtgtctccttcggctgccagatctgcggaaccagccctacatccgcgcagacacaggccgccgcagtgcccgtcggcgtcccccgggccccccactgcaggtcacctccgacctctcgctgtagccgctatttctgcaggtggattctgcaggggtgtggggccgtggacaggctgaggctcaaggaaggtggtcctcagctcggctggccgggcagcccctcctccgctgtggcccgcctcaaacgggctggtgcatcctcctcttggccacagagggcagcatcgcccgccccttcccccaaatgctgcttgcagcacccaccctaaagccccctccaaatagccatacttagcctcagcaggagcctggcctgtaacttataaagtgcacctcgcccccgcaagccccagccccgaggaccgtccatggaccttatttttatatgagattaataaagatgtttgcaaaa

SEQ ID NO: 371408 - DNA, 1991 bp, Homo sapiens
cgccaccacctccgggcactgacgggccggtgcctccgccgccgccgccgccgcgccgcctcccggaggtcctcctgatgccctaggaagacgcgactcagaattgggcccaggagtgaaggccaagaagcccatccagactaagttccgaatgccactcttgaactgggtggcactgaaacccagccagatcaccggcactgtcttcacagagctcaatgatgagaaggtgctgcaggagctagacatgagtgattttgaggaacagttcaagaccaagtcccaaggccccagcctggacctcagcgctctcaagagtaaggcagcccagaaggcccccagcaaggcgacactcattgaggccaaccgggccaagaacttggccatcaccctgcggaagggcaacctgggggccgagcgcatctgccaagccattgaggcgtacgacctgcaggctctgggcctggacttcctggagctgctgatgcgcttcctgcccacagagtatgagcgcagcctcatcacccgctttgagcgggagcagcggccaatggaggagctgtcagaggaggaccgcttcatgctatgcttcagccgcatcccgcgcctgccggagcgcatgaccacactcaccttcctgggcaacttcccggacacagcccagctgctcatgccgcaactgaatgccatcattgcagcctcaatgtccatcaagtcctctgacaaactccgccagatcctggagattgtcctggcctttggcaactacatgaacagtagcaagcgtggggcagcctatggcttccggctccagagcctggatgcgctgttggagatgaagtcgactgatcgcaagcagacgctgctgcactacctggtgaaggtcattgctgagaagtacccgcaactcacaggcttccacagcgacctgcacttcctggacaaggcgggctcagtgtccctggacagtgtcctggcggacgtgcgctccctgcagcgaggcctagagttgacacagagagagtttgtgcggcaggatgactgcatggtgctcaaggagttcctgagggccaactcgcccaccatggacaagctgctggcagacagcaagacggctcaggaggcctttgagtctgtggtggagtacttcggagagaaccccaagaccacatccccaggcctgttcttctccctctttagccgcttcattaaggcctacaagaaagctgagcaggaggtggaacagtggaaaaaagaagccgctgcccaggaggcaggcgctgataccccgggcaaaggggagcccccagcacccaagtcaccgccaaaggcccggcggccacagatggacctcatctctgagctgaaacggaggcagcagaaggagccactcatttatgagagcgaccgtgatggggccattgaagacatcatcacagtgatcaagacggtgcccttcacggcccgcaccggcaagcggacatcccggctcctctgtgaggccagcctgggagaagagatgcccctctagcccctcagatctgcggaaccagccctacatccgcgcagacacaggccgccgcagtgcccgtcggcgtcccccgggccccccactgcaggtcacctccgacctctcgctgtagccgctatttctgcaggtggattctgcaggggtgtggggccgtggacaggctgaggctcaaggaaggtggtcctcagctcggctggccgggcagcccctcctccgctgtggcccgcctcaaacgggctggtgcatcctcctcttggccacagagggcagcatcgcccgccccttcccccaaatgctgcttgcagcacccaccctaaagccccctccaaatagccatacttagcctcagcaggagcctggcctgtaacttataaagtgcacctcgcccccgcaagccccagccccgaggaccgtccatggaccttatttttatatgagattaataaagatgtttgcaaaa

SEQ ID NO: 371409 - DNA, 985 bp, Homo sapiens
gggctgcctctccgattcactgacctgatactgccccatccctggcccagtgtccctggacagtgtcctggcggacgtgcgctccctgcagcgaggcctagagttgacacagagagagtttgtgcggcaggatgactgcatggtgctcaaggagttcctgagggccaactcgcccaccatggacaagctgctggcagacagcaagacggctcaggaggcctttgagtctgtggtggagtacttcggagagaaccccaagaccacatccccaggcctgttcttctccctctttagccgcttcattaaggcctacaagaaagctgagcaggaggtggaacagtggaaaaaagaagccgctgcccaggaggcaggcgctgataccccgggcaaaggggagcccccagcacccaagtcaccgccaaaggcccggcggccacagatggacctcatctctgagctgaaacggaggcagcagaaggagccactcatttatgagagcgaccgtgatggggccattgaagacatcatcacagatctgcggaaccagccctacatccgcgcagacacaggccgccgcagtgcccgtcggcgtcccccgggccccccactgcaggtcacctccgacctctcgctgtagccgctatttctgcaggtggattctgcaggggtgtggggccgtggacaggctgaggctcaaggaaggtggtcctcagctcggctggccgggcagcccctcctccgctgtggcccgcctcaaacgggctggtgcatcctcctcttggccacagagggcagcatcgcccgccccttcccccaaatgctgcttgcagcacccaccctaaagccccctccaaatagccatacttagcctcagcaggagcctggcctgtaacttataaagtgcacctcgcccccgcaagccccagccccgaggaccgtccatggaccttatttttatatgagattaataaagatgtttgcaaaa

SEQ ID NO: 371410 - DNA, 821 bp, Homo sapiens
tacaggctgtgagaggtctaagctggggggctgacaggctgtgcccacaggaggcctttgagtctgtggtggagtacttcggagagaaccccaagaccacatccccaggcctgttcttctccctctttagccgcttcattaaggcctacaagaaagctgagcaggaggtggaacagtggaaaaaagaagccgctgcccaggaggcaggcgctgataccccgggcaaaggggagcccccagcacccaagtcaccgccaaaggcccggcggccacagatggacctcatctctgagctgaaacggaggcagcagaaggagccactcatttatgagagcgaccgtgatggggccattgaagacatcatcacagatctgcggaaccagccctacatccgcgcagacacaggccgccgcagtgcccgtcggcgtcccccgggccccccactgcaggtcacctccgacctctcgctgtagccgctatttctgcaggtggattctgcaggggtgtggggccgtggacaggctgaggctcaaggaaggtggtcctcagctcggctggccgggcagcccctcctccgctgtggcccgcctcaaacgggctggtgcatcctcctcttggccacagagggcagcatcgcccgccccttcccccaaatgctgcttgcagcacccaccctaaagccccctccaaatagccatacttagcctcagcaggagcctggcctgtaacttataaagtgcacctcgcccccgcaagccccagccccgaggaccgtccatggaccttatttttatatgagattaataaagatgtttgcaaaa

SEQ ID NO: 371411 - DNA, 719 bp, Homo sapiens
ggtagggcagtagggagggccaccctcatggagactgccttggcccacagaaagctgagcaggaggtggaacagtggaaaaaagaagccgctgcccaggaggcaggcgctgataccccgggcaaaggggagcccccagcacccaagtcaccgccaaaggcccggcggccacagatggacctcatctctgagctgaaacggaggcagcagaaggagccactcatttatgagagcgaccgtgatggggccattgaagacatcatcacagatctgcggaaccagccctacatccgcgcagacacaggccgccgcagtgcccgtcggcgtcccccgggccccccactgcaggtcacctccgacctctcgctgtagccgctatttctgcaggtggattctgcaggggtgtggggccgtggacaggctgaggctcaaggaaggtggtcctcagctcggctggccgggcagcccctcctccgctgtggcccgcctcaaacgggctggtgcatcctcctcttggccacagagggcagcatcgcccgccccttcccccaaatgctgcttgcagcacccaccctaaagccccctccaaatagccatacttagcctcagcaggagcctggcctgtaacttataaagtgcacctcgcccccgcaagccccagccccgaggaccgtccatggaccttatttttatatgagattaataaagatgtttgcaaaa

SEQ ID NO: 371412 - DNA, 1006 bp, Homo sapiens
cgccaccacctccgggcactgacgggccggtgcctccgccgccgccgccgccgcgccgcctcccggaggtcctcctgatgccctaggaagacgcgactcagaattgggcccaggagtgaaggccaagaagcccatccagactaagttccgaatgccactcttgaactgggtggcactgaaacccagccagatcaccggcactgtcttcacagagctcaatgatgagaaggtgctgcaggagctagacatgagtgattttgaggaacagttcaagaccaagtcccaaggccccagcctggacctcagcgctctcaagagtaaggcagcccagaaggcccccagcaaggcgacactcattgaggccaaccgggccaagaacttggccatcaccctgcggaagggcaacctgggggccgagcgcatctgccaagccattgaggcgtacgacctgcaggctctgggcctggacttcctggagctgctgatgcgcttcctgcccacagagtatgagcgcagcctcatcacccgctttgagcgggagcagcggccaatggaggagctgtcagaggaggaccgcttcatgctatgcttcagccgcatcccgcgcctgccggagcgcatgaccacactcaccttcctgggcaacttcccggacacagcccagctgctcatgccgcaactgaatgccatcattgcagcctcaatgtccatcaagtcctctgacaaactccgccagatcctggagattgtcctggcctttggcaactacatgaacagtagcaagcgtggggcagcctatggcttccggctccagagcctggatgcgctgttggagatgaagtcgactgatcgcaagcagacgctgctgcactacctggtgaaggtcattgctgagaagtacccgcaactcacaggcttccacagcgacctgcacttcctggacaaggcgggctcaggtaggagacacacagatccttgggtgtggggaggggccgtgggctggggt

SEQ ID NO: 371413 - DNA, 795 bp, Homo sapiens
cgccaccacctccgggcactgacgggccggtgcctccgccgccgccgccgccgcgccgcctcccggaggtcctcctgatgccctaggaagacgcgactcagaattgggcccaggagtgaaggccaagaagcccatccagactaagttccgaatgccactcttgaactgggtggcactgaaacccagccagatcaccggcactgtcttcacagagctcaatgatgagaaggtgctgcaggagctagacatgagtgattttgaggaacagttcaagaccaagtcccaaggccccagcctggacctcagcgctctcaagagtaaggcagcccagaaggcccccagcaaggcgacactcattgaggccaaccgggccaagaacttggccatcaccctgcggaagggcaacctgggggccgagcgcatctgccaagccattgaggcgtacgacctgcaggctctgggcctggacttcctggagctgctgatgcgcttcctgcccacagagtatgagcgcagcctcatcacccgctttgagcgggagcagcggccaatggaggagctgtcagaggaggaccgcttcatgctatgcttcagccgcatcccgcgcctgccggagcgcatgaccacactcaccttcctgggcaacttcccggacacagcccagctgctcatgccgcaactgaatgccatcattgcagcctcaatgtccatcaagtcctctgacaaactccgccagatcctggaggtgaggggccaggaggtggggcccacccttgcctgttctggatagtgtga

SEQ ID NO: 371414 - DNA, 1120 bp, Homo sapiens
gctgaccccagcccacagcaggaaggccctgcggaattcccgcatcgtcagccagaaggacgacgtccacgtctgtattatgtgcctacgcgccatcatgaactaccagtctggcttcagccttgtcatgaaccacccagcctgtgtcaatgagattgctctgagcctcaacaacaagaaccccagaaccaaggctctggtgctggagctgctggcggccgtgtgcttggtgcggggaggacatgacatcatccttgcagcctttgacaacttcaaggaggtgtgtggggagcagcaccgctttgaaaagctgatggaatatttccggaatgaggacagcaacatcgacttcatggtggcctgcatgcagttcatcaacattgtggtacattcggtggagaacatgaacttccgtgtcttcctgcaatatgagttcacccacttgggcctggacctgtacttggagaggcttcggctcaccgagagtgacaagctgcaggtgcagatccaggcgtacctggacaatatttttgatgtgggggcgctgctggaggacacagagaccaagaacgctgtgctggagcacatggaggaactgcaggagcaagtggcgctgctgacagagcggcttcgggacgcggagaacgaatccatggccaagattgcagaactggaaaaacagctaagccaggcgcgcaaggagttggagaccctgcgggagcgcttcagcgaatcgaccgccatgggcgcctccaggcgtcccccagagcctgagaaagcgcctcccgctgccccgacgcggccctcggccctggagctgaaggtggaggagctggaggagaaggggttaatccgtattctgcgggggccgggggatgctgtctccatcgagatcctccccgtcgctgtggcaactccgagcggcggtgatgctccgactccgggggtgccgaccggctcccccagcccaggtgcgcaggagcttcaggctggcggggatgcggggcagggtctggaggggagcccaggggcatctgtggcgggcagagttgggcgagggaggtttggattgtaggctcggctcaggtaggagcgcatgcgtagagcggagaggcggaga

SEQ ID NO: 371415 - DNA, 610 bp, Homo sapiens
ctccagtagtacccccagtgctcaccactgcccccaaacccccgtcccaggagtgaaggccaagaagcccatccagactaagttccgaatgccactcttgaactgggtggcactgaaacccagccagatcaccggcactgtcttcacagagctcaatgatgagaaggtgctgcaggagctagacatgagtgattttgaggaacagttcaagaccaagtcccaaggccccagcctggacctcagcgctctcaagagtaaggcagcccagaaggcccccagcaaggcgacactcattgaggccaaccgggccaagaacttggccatcaccctgcggaagggcaacctgggggccgagcgcatctgccaagccattgaggcgtacgacctgcaggctctgggcctggacttcctggagctgctgatgcgcttcctgcccacagagtatgagcgcagcctcatcaccctaaagccccctccaaatagccatacttagcctcagcaggagcctggcctgtaacttataaagtgcacctcgcccccgcaagccccagccccgaggaccgtccatggaccttatttttatatgagattaataaagatgtttgcaaaa

SEQ ID NO: 371416 - DNA, 924 bp, Homo sapiens
gctgaccccagcccacagcaggaaggccctgcggaattcccgcatcgtcagccagaaggacgacgtccacgtctgtattatgtgcctacgcgccatcatgaactaccagtctggcttcagccttgtcatgaaccacccagcctgtgtcaatgagattgctctgagcctcaacaacaagaaccccagaaccaaggctctggtgctggagctgctggcggccgtgtgcttggtgcggggaggacatgacatcatccttgcagcctttgacaacttcaaggaggtgtgtggggagcagcaccgctttgaaaagctgatggaatatttccggaatgaggacagcaacatcgacttcatggtggcctgcatgcagttcatcaacattgtggtacattcggtggagaacatgaacttccgtgtcttcctgcaatatgagttcacccacttgggcctggacctgtacttggagaggcttcggctcaccgagagtgacaagctgcaggtgcagatccaggcgtacctggacaatatttttgatgtgggggcgctgctggaggacacagagaccaagaacgctgtgctggagcacatggaggaactgcaggagcaagtggcgctgctgacagagcggcttcgggacgcggagaacgaatccatggccaagattgcagaactggaaaaacagctaagccaggcgcgcaaggagttggagaccctgcgggagcgcttcagcgaatcgaccgccatgggcgcctccaggcgtcccccagagcctgagaaagcgcctcccgctgccccgacgcggccctcggccctggagctgaaggtggaggagctggaggagaaggggttaatccgcaagccccagccccgaggaccgtccatggaccttatttttatatgagattaataaagatgtttgcaaaa

SEQ ID NO: 371417 - DNA, 225 bp, Homo sapiens
ctccagtagtacccccagtgctcaccactgcccccaaacccccgtcccaggagtgaaggccaagaagcccatccagactaagttccgaatgccactcttgaactgggtggcactgaaacccagccagatcaccggcactgtcttcacagagctcaatgatgagaaggtgctgcaggtgagtggccctgcctggctccccatgtgggcaccggaggaagaggggag

SEQ ID NO: 371418 - DNA, 579 bp, Homo sapiens
  misc_feature (568)..(568): n is a, c, g, or t
tctcaggactgagtctcctgcagatgtgaagggctgggaaaagctgcacagagaggacgttgaggggtgcagtggggggcctcttttggggcttgtgtgtgtgttaaaccgtgacatgaggggctaaaggactggaagctgttgcctggagaaccggagtgcccataggggctccaaggctgatccaagcagcgcctggcctccccagtcctgctcctggccgcgggtggccgccagccagccctgtgtccatgccagctccaccacctccctctggacacagtgttctctcttgggatacggggcaaacgtgagcatcccagccccgtgggaaccagggcatcctgccaaccctttcattcattcacttatccatccagtcatttattcattcattcaggaactgtttgctgactgcctacaacatgccaggcaccacatgccagcagaggccatcgagacactctgcctctgtccccagtgccccacatatttccagctcacagatacgttttgtttggccttgcgacaattttaaagcttgtaaaataataaagtaatataaaantaaacatatta

SEQ ID NO: 371419 - DNA, 574 bp, Homo sapiens
tttttaagagacagggtttcactatgtagcccaggctggtctcgaactcctgggctcaagtgatccacccgccttgtccccccgcgcaatgcgctgggattgtaggtgtgagccactgcactcagcctgaaatagcttaaataaataaaatatcttaaaaaattttttaaagcacgttacatatgttttcaaacagttcttatacatttccatctttttgatagttttacaggacccagctattccttcaagcaaataccagagttccaactacaggacaggtgttgttctaggcaattgagatacagcagtaaataaaatagacaaagttcctgtccttaaggatctcgtattctaaagggaaagggagtaataatttcttcctgtattcccttttcctcacctactctacttcaaggaaagaagggaaaatgacagaatgaaaaacgtgtaggccattaaagatttttctataaatagtaataaattagaaaaaaaaaattgtgtagtatgtagttggctatgatcaaattcatttctctacaccagttgacactttttgttttttttgttt

SEQ ID NO: 371420 - DNA, 736 bp, Homo sapiens
  misc_feature (48)..(48): n is a, c, g, or t
ggacgcgtgggtcgacccacgcgtcgcgaccacgcgtcggtggtcgcnccagctctctgctctcccagcgcagcgccgccgcccggcccctccagcttcccggaccatggccaacctggagcgcaccttcatcgccatcaagccggacggcgtgcagcgcggcctggtgggcgagatcatcaagcgcttcgagcagaagggattccgcctcgtggccatgaagttcctccgggcctctgaagaacacctgaagcagcactacattgacctgaaagaccgaccattcttccctgggctggtgaagtacatgaactcagggccggttgtggccatggtctgggaggggctgaacgtggtgaagacaggccgagtgatgcttggggagaccaatccagcagattcaaagccaggcaccattcgtggggacttctgcattcaggttggcaggaacatcattcatggcagtgattcagtaaaaagtgctgaaaaagaaatcagcctatggtttaagcctgaagaactggttgactacaagtcttgtgctcatgactgggtctatgaataagaggtggacacaacagcagtctccttcagcacggcgtggtgtgtccctggacacagctcttcattccattgacttagaggcaacaggattgatcattcttttatagagcatatttgccaataaagctttggaagcggaaaaaagacagaaacacggcgaatcaaccaaggg

SEQ ID NO: 371421 - DNA, 439 bp, Homo sapiens
  misc_feature (51)..(51): n is a, c, g, or t
catacgatcagtaatgtacttatcaattttatacccaacaccccacaaaangcctagggtctgggaggggctgaacgtggtgaagacaggccgagtgatgcttggggagaccaatccagcagattcaaagccaggcaccattcgtggggacttctgcattcaggttggcaggaacatcattcatggcagtgattcagtaaaaagtgctgaaaaagaaatcagcctatggtttaagcctgaagaactggttgactacaagtcttgtgctcatgactgggtctatgaataagaggtggacacaacagcagtctccttcagcacggcgtggtgtgtccctggacacagctcttcattccattgacttagaggcaacaggattgatcattcttttatagagcatatttgccaataaagctctggcctcgttggcctcaagcgg

SEQ ID NO: 371422 - DNA, 1052 bp, Homo sapiens
  misc_feature (1049)..(1049): n is a, c, g, or t
tgtgtgtgtgtgtgtgtgtgtgtgtaggagcttttggggtcacgggaagtactgagaggtgaggagtgggatttgggacgtgcgtagttgaactcataggacgtccaggtggagaaggaatcacttcctgtctctggatccgtctcgatctctgcctggcgagggcgcgccccggctgggcgtggacactgttctccggccgcgtcgggccgggcgggtggggcgttcctgcgggttgggcggctgggccctccggggtgtggccaccccgcgctccgccctgcgcccctcctccgccgccggctcccgggtgtggtggtcgcaccagctctctgctctcccagcgcagcgccgccgcccggcccctccagcttcccggaccatggccaacctggagcgcaccttcatcgccatcaagccggacggcgtgcagcgcggcctggtgggcgagatcatcaagcgcttcgagcagaagggattccgcctcgtggccatgaagttcctccgggcctctgaagaacacctgaagcagcactacattgacctgaaagaccgaccattcttccctgggctggtgaagtacatgaactcagggccggttgtggccatggtctgggaggggctgaacgtggtgaagacaggccgagtgatgcttggggagaccaatccagcagattcaaagccaggcaccattcgtggggacttctgcattcaggttggcaggaacatcattcatggcagtgattcagtaaaaagtgctgaaaaagaaatcagcctatggtttaagcctgaagaactggttgactacaagtcttgtgctcatgactgggtctatgaataagaggtggacacaacagcagtctccttcagcacggcgtggtgtgtccctggacacagctcttcattccattgacttagaggcaacaggattgatcattcttttatagagcatatttgccaataaagcttttggaagccggaaaaaaaaaaaaaaaaaaaaaaaaaaaaaaaaaaaaacaaaaaaaaaaaacaaacagacaaaaaaaaanaac

SEQ ID NO: 371423 - DNA, 1170 bp, Homo sapiens
  misc_feature (1000)..(1000): n is a, c, g, or t
  misc_feature (1007)..(1007): n is a, c, g, or t
tgtgtgtgtgtgtgtgtgtgtgtgtaggagcttttggggtcacgggaagtactgagaggtgaggagtgggatttgggacgtgcgtagttgaactcataggacgtccaggtggagaaggaatcacttcctgtctctggatccgtctcgatctctgcctggcgagggcgcgccccggctgggcgtggacactgttctccggccgcgtcgggccgggcgggtggggcgttcctgcgggttgggcggctgggccctccggggtgtggccaccccgcgctccgccctgcgcccctcctccgccgccggctcccgggtgtggtggtcgcaccagctctctgctctcccagcgcagcgccgccgcccggcccctccagcttcccggaccatggccaacctggagcgcaccttcatcgccatcaagccggacggcgtgcagcgcggcctggtgggcgagatcatcaagcgcttcgagcagaagggattccgcctcgtggccatgaagttcctccgggcctctgaagaacacctgaagcagcactacattgacctgaaagaccgaccattcttccctgggctggtgaagtacatgaactcagggccggttgtggccatggtctgggaggggctgaacgtggtgaagacaggccgagtgatgcttggggagaccaatccagcagattcaaagccaggcaccattcgtggggacttctgcattcaggttggcaggaacatcattcatggcagtgattcagtaaaaagtgctgaaaaagaaatcagcctatggtttaagcctgaagaactggttgactacaagtcttgtgctcatgactgggtctatgaataagaggtggacacaacagcagtctccttcagcacggcgtggtgtgtccctggacacagctcttcattccattgacttagaggcaacaggattgatcattcttttatagagcatatttgccaataaagcttttggaagccggaaaaaaaaaaaaaaaaaaanacacacncacaccccccccccccccacccaaacacacaccgcgggcggcatctagcggcggggcggggaacacagcgctacaagcggcccgcggcacacgggcccaccccctttttcacaggggaaccgcggcccaagggggccaaacacgcaccgggccgtccccccaa

SEQ ID NO: 371424 - DNA, 1053 bp, Homo sapiens
tgtgtgtgtgtgtgtgtgtgtgtgtaggagcttttggggtcacgggaagtactgagaggtgaggagtgggatttgggacgtgcgtagttgaactcataggacgtccaggtggagaaggaatcacttcctgtctctggatccgtctcgatctctgcctggcgagggcgcgccccggctgggcgtggacactgttctccggccgcgtcgggccgggcgggtggggcgttcctgcgggttgggcggctgggccctccggggtgtggccaccccgcgctccgccctgcgcccctcctccgccgccggctcccgggtgtggtggtcgcaccagctctctgctctcccagcgcagcgccgccgcccggcccctccagcttcccggaccatggccaacctggagcgcaccttcatcgccatcaagccggacggcgtgcagcgcggcctggtgggcgagatcatcaagcgcttcgagcagaagggattccgcctcgtggccatgaagttcctccgggcctctgaagaacacctgaagcagcactacattgacctgaaagaccgaccattcttccctgggctggtgaagtacatgaactcagggccggttgtggccatggtctgggaggggctgaacgtggtgaagacaggccgagtgatgcttggggagaccaatccagcagattcaaagccaggcaccattcgtggggacttctgcattcaggttggcaggaacatcattcatggcagtgattcagtaaaaagtgctgaaaaagaaatcagcctatggtttaagcctgaagaactggttgactacaagtcttgtgctcatgactgggtctatgaataagaggtggacacaacagcagtctccttcagcacggcgtggtgtgtccctggacacagctcttcattccattgacttagaggcaacaggattgatcattcttttatagagcatatttgccaataaagcttttggaagccggaaaaaaaaaaaaaaaaaaagccactcgcgattagatcgacgcgtggtacaatcggaatccgagcgtaccagcc

SEQ ID NO: 371425 - DNA, 792 bp, Homo sapiens
  misc_feature (789)..(789): n is a, c, g, or t
tgtattctggaacccaaagatgagatactgcccaccacccccatctcagaacagaagggtgggaagcgctctctgctctcccagcgcagcgccgccgcccggcccctccagcttcccggaccatggccaacctggagcgcaccttcatcgccatcaagccggacggcgtgcagcgcggcctggtgggcgagatcatcaagcgcttcgagcagaagggattccgcctcgtggccatgaagttcctccgggcctctgaagaacacctgaagcagcactacattgacctgaaagaccgaccattcttccctgggctggtgaagtacatgaactcagggccggttgtggccatggtctgggaggggctgaacgtggtgaagacaggccgagtgatgcttggggagaccaatccagcagattcaaagccaggcaccattcgtggggacttctgcattcaggttggcaggaacatcattcatggcagtgattcagtaaaaagtgctgaaaaagaaatcagcctatggtttaagcctgaagaactggttgactacaagtcttgtgctcatgactgggtctatgaataagaggtggacacaacagcagtctccttcagcacggcgtggtgtgtccctggacacagctcttcattccattgacttagaggcaacaggattgatcattcttttatagagcatatttgccaataaagcttttggaagccggaaaaaaaaaaaaaaaaaaaaaaaaaaaaaaaaaaaaacaaaaaaaaaaaacaaacagacaaaaaaaaanaac

SEQ ID NO: 371426 - DNA, 1120 bp, Homo sapiens
  misc_feature (1117)..(1117): n is a, c, g, or t
tgtgtgtgtgtgtgtgtgtgtgtgtaggagcttttggggtcacgggaagtactgagaggtgaggagtgggatttgggacgtgcgtagttgaactcataggacgtccaggtggagaaggaatcacttcctgtctctggatccgtctcgatctctgcctggcgagggcgcgccccggctgggcgtggacactgttctccggccgcgtcgggccgggcgggtggggcgttcctgcgggttgggcggctgggccctccggggtgtggccaccccgcgctccgccctgcgcccctcctccgccgccggctcccgggtgtggtggtcgcaccagctctctgctctcccagcgcagcgccgccgcccggcccctccagcttcccggtaaggcggtgggggcgcatcccctggcgactcctcccgttccctcttccgcttgcgctgccgcaggggaccatggccaacctggagcgcaccttcatcgccatcaagccggacggcgtgcagcgcggcctggtgggcgagatcatcaagcgcttcgagcagaagggattccgcctcgtggccatgaagttcctccgggcctctgaagaacacctgaagcagcactacattgacctgaaagaccgaccattcttccctgggctggtgaagtacatgaactcagggccggttgtggccatggtctgggaggggctgaacgtggtgaagacaggccgagtgatgcttggggagaccaatccagcagattcaaagccaggcaccattcgtggggacttctgcattcaggttggcaggaacatcattcatggcagtgattcagtaaaaagtgctgaaaaagaaatcagcctatggtttaagcctgaagaactggttgactacaagtcttgtgctcatgactgggtctatgaataagaggtggacacaacagcagtctccttcagcacggcgtggtgtgtccctggacacagctcttcattccattgacttagaggcaacaggattgatcattcttttatagagcatatttgccaataaagcttttggaagccggaaaaaaaaaaaaaaaaaaaaaaaaaaaaaaaaaaaaacaaaaaaaaaaaacaaacagacaaaaaaaaanaac

SEQ ID NO: 371427 - DNA, 1499 bp, Homo sapiens
  misc_feature (1329)..(1329): n is a, c, g, or t
  misc_feature (1336)..(1336): n is a, c, g, or t
tgtgtgtgtgtgtgtgtgtgtgtgtaggagcttttggggtcacgggaagtactgagaggtgaggagtgggatttgggacgtgcgtagttgaactcataggacgtccaggtggagaaggaatcacttcctgtctctggatccgtctcgatctctgcctggcgagggcgcgccccggctgggcgtggacactgttctccggccgcgtcgggccgggcgggtggggcgttcctgcgggttgggcggctgggccctccggggtgtggccaccccgcgctccgccctgcgcccctcctccgccgccggctcccgggtgtggtggtcgcaccagctctctgctctcccagcgcagcgccgccgcccggcccctccagcttcccggtaaggcggtgggggcgcatcccctggcgactcctcccgttccctcttccgcttgcgctgccgcaggtgggcccggtctgtgggcgccccccgatttcccgcaggtcccgcgcggcgtcggagcgggagattcccttgcagcttgcgccccgcgggccttcgggctccgcagagggacgccggccctgcgcggggcggaagcggccgggaagccacgtgtccccgcggccgcgcgtggtgggggaggagggaccggcggcgcccacgtggcctccgcgggccccgccagagcctgcgcccgggccctgaccgcacctctcgccccgcaggaccatggccaacctggagcgcaccttcatcgccatcaagccggacggcgtgcagcgcggcctggtgggcgagatcatcaagcgcttcgagcagaagggattccgcctcgtggccatgaagttcctccgggcctctgaagaacacctgaagcagcactacattgacctgaaagaccgaccattcttccctgggctggtgaagtacatgaactcagggccggttgtggccatggtctgggaggggctgaacgtggtgaagacaggccgagtgatgcttggggagaccaatccagcagattcaaagccaggcaccattcgtggggacttctgcattcaggttggcaggaacatcattcatggcagtgattcagtaaaaagtgctgaaaaagaaatcagcctatggtttaagcctgaagaactggttgactacaagtcttgtgctcatgactgggtctatgaataagaggtggacacaacagcagtctccttcagcacggcgtggtgtgtccctggacacagctcttcattccattgacttagaggcaacaggattgatcattcttttatagagcatatttgccaataaagcttttggaagccggaaaaaaaaaaaaaaaaaaanacacacncacaccccccccccccccacccaaacacacaccgcgggcggcatctagcggcggggcggggaacacagcgctacaagcggcccgcggcacacgggcccaccccctttttcacaggggaaccgcggcccaagggggccaaacacgcaccgggccgtccccccaa

SEQ ID NO: 371428 - DNA, 821 bp, Homo sapiens
  misc_feature (818)..(818): n is a, c, g, or t
aaaatgggctctccggcagcggatctgcgcagaagcgttccgtgcgtgcaagtgctgcgaaccacgtgggtcccgggcgcgtttcgggtgctggcggctgcagccggagttcaaacctaagcagctggaaggaaccatggccaactgtgagcgtaccttcattgcgatcaaaccagatggggtccagcggggtcttgtgggagagattatcaagcgttttgagcagaaaggattccgccttgttggtctgaaattcatgcaaatgaagttcctccgggcctctgaagaacacctgaagcagcactacattgacctgaaagaccgaccattcttccctgggctggtgaagtacatgaactcagggccggttgtggccatggtctgggaggggctgaacgtggtgaagacaggccgagtgatgcttggggagaccaatccagcagattcaaagccaggcaccattcgtggggacttctgcattcaggttggcaggaacatcattcatggcagtgattcagtaaaaagtgctgaaaaagaaatcagcctatggtttaagcctgaagaactggttgactacaagtcttgtgctcatgactgggtctatgaataagaggtggacacaacagcagtctccttcagcacggcgtggtgtgtccctggacacagctcttcattccattgacttagaggcaacaggattgatcattcttttatagagcatatttgccaataaagcttttggaagccggaaaaaaaaaaaaaaaaaaaaaaaaaaaaaaaaaaaaacaaaaaaaaaaaacaaacagacaaaaaaaaanaac

SEQ ID NO: 371429 - DNA, 1062 bp, Homo sapiens
  misc_feature (998)..(998): n is a, c, g, or t
  misc_feature (1000)..(1001): n is a, c, g, or t
  misc_feature (1003)..(1004): n is a, c, g, or t
  misc_feature (1007)..(1007): n is a, c, g, or t
  misc_feature (1011)..(1011): n is a, c, g, or t
  misc_feature (1028)..(1028): n is a, c, g, or t
  misc_feature (1041)..(1042): n is a, c, g, or t
  misc_feature (1046)..(1046): n is a, c, g, or t
  misc_feature (1052)..(1052): n is a, c, g, or t
  misc_feature (1059)..(1059): n is a, c, g, or t
tgtgtgtgtgtgtgtgtgtgtgtgtaggagcttttggggtcacgggaagtactgagaggtgaggagtgggatttgggacgtgcgtagttgaactcataggacgtccaggtggagaaggaatcacttcctgtctctggatccgtctcgatctctgcctggcgagggcgcgccccggctgggcgtggacactgttctccggccgcgtcgggccgggcgggtggggcgttcctgcgggttgggcggctgggccctccggggtgtggccaccccgcgctccgccctgcgcccctcctccgccgccggctcccgggtgtggtggtcgcaccagctctctgctctcccagcgcagcgccgccgcccggcccctccagcttcccggaccatggccaacctggagcgcaccttcatcgccatcaagccggacggcgtgcagcgcggcctggtgggcgagatcatcaagcgcttcgagcagaagggattccgcctcgtggccatgaagttcctccgggcctctgaagaacacctgaagcagcactacattgacctgaaagaccgaccattcttccctgggctggtgaagtacatgaactcagggccggttgtggccatggtctgggaggggctgaacgtggtgaagacaggccgagtgatgcttggggagaccaatccagcagattcaaagccaggcaccattcgtggggacttctgcattcaggttggcaggaacatcattcatggcagtgattcagtaaaaagtgctgaaaaagaaatcagcctatggtttaagcctgaagaactggttgactacaagtcttgtgctcatgactgggtctatgaataagaggtggacacaacagcagtctccttcagcacggcgtggtgtgtccctggacacagctcttcattccattgacttagaggcaacaggattgatcattcttttatagagcatatttgccaataaagcttttggaagccggacacaacacaacaaacancnnannacnacancaccaccacacccaacnccacacaccaccnncacncacacnacccaancac

SEQ ID NO: 371430 - DNA, 1021 bp, Homo sapiens
tgtgtgtgtgtgtgtgtgtgtgtgtaggagcttttggggtcacgggaagtactgagaggtgaggagtgggatttgggacgtgcgtagttgaactcataggacgtccaggtggagaaggaatcacttcctgtctctggatccgtctcgatctctgcctggcgagggcgcgccccggctgggcgtggacactgttctccggccgcgtcgggccgggcgggtggggcgttcctgcgggttgggcggctgggccctccggggtgtggccaccccgcgctccgccctgcgcccctcctccgccgccggctcccgggtgtggtggtcgcaccagctctctgctctcccagcgcagcgccgccgcccggcccctccagcttcccggaccatggccaacctggagcgcaccttcatcgccatcaagccggacggcgtgcagcgcggcctggtgggcgagatcatcaagcgcttcgagcagaagggattccgcctcgtggccatgaagttcctccgggcctctgaagaacacctgaagcagcactacattgacctgaaagaccgaccattcttccctgggctggtgaagtacatgaactcagggccggttgtggccatggtctgggaggggctgaacgtggtgaagacaggccgagtgatgcttggggagaccaatccagcagattcaaagccaggcaccattcgtggggacttctgcattcaggttggcaggaacatcattcatggcagtgattcagtaaaaagtgctgaaaaagaaatcagcctatggtttaagcctgaagaactggttgactacaagtcttgtgctcatgactgggtctatgaataagaggtggacacaacagcagtctccttcagcacggcgtggtgtgtccctggacacagctcttcattccattgacttagaggcaacaggattgatcattcttttatagagcatatttgccaataaagctttggaagccggaaaacataattattctttcctatctttttaaacacataaaaa

SEQ ID NO: 371431 - DNA, 1023 bp, Homo sapiens
tgtgtgtgtgtgtgtgtgtgtgtgtaggagcttttggggtcacgggaagtactgagaggtgaggagtgggatttgggacgtgcgtagttgaactcataggacgtccaggtggagaaggaatcacttcctgtctctggatccgtctcgatctctgcctggcgagggcgcgccccggctgggcgtggacactgttctccggccgcgtcgggccgggcgggtggggcgttcctgcgggttgggcggctgggccctccggggtgtggccaccccgcgctccgccctgcgcccctcctccgccgccggctcccgggtgtggtggtcgcaccagctctctgctctcccagcgcagcgccgccgcccggcccctccagcttcccggaccatggccaacctggagcgcaccttcatcgccatcaagccggacggcgtgcagcgcggcctggtgggcgagatcatcaagcgcttcgagcagaagggattccgcctcgtggccatgaagttcctccgggcctctgaagaacacctgaagcagcactacattgacctgaaagaccgaccattcttccctgggctggtgaagtacatgaactcagggccggttgtggccatggtctgggaggggctgaacgtggtgaagacaggccgagtgatgcttggggagaccaatccagcagattcaaagccaggcaccattcgtggggacttctgcattcaggttggcaggaacatcattcatggcagtgattcagtaaaaagtgctgaaaaagaaatcagcctatggtttaagcctgaagaactggttgactacaagtcttgtgctcatgactgggtctatgaataagaggtggacacaacagcagtctccttcagcacggcgtggtgtgtccctggacacagctcttcattccattgacttagaggcaacaggattgatcattcttttatagagcatatttgccaataaagctcgatgcggccgtaataattccatacaaacaatgatagtagaacaccgcgtgacgc

SEQ ID NO: 371432 - DNA, 1086 bp, Homo sapiens
  misc_feature (1083)..(1083): n is a, c, g, or t
aaaatgggctctccggcagcggatctgcgcagaagcgttccgtgcgtgcaagtgctgcgaaccacgtgggtcccgggcgcgtttcgggtgctggcggctgcagccggagttcaaacctaagcagctggaaggaaccatggccaactgtgagcgtaccttcattgcgatcaaaccagatggggtccagcggggtcttgtgggagagattatcaagcgttttgagcagaaaggattccgccttgttggtctgaaattcatgcaagcttccgaagatcttctcaaggaacactacgttgacctgaaggaccgtccattctttgccggcctggtgaaatacatgcactcagggccggtagttgccatggtctgggaggggctgaatgtggtgaagacgggccgagtcatgctcggggagaccaaccctgcagactccaagcctgggaccatccgtggagacttctgcatacaagttggcaggaccatggccaacctggagcgcaccttcatcgccatcaagccggacggcgtgcagcgcggcctggtgggcgagatcatcaagcgcttcgagcagaagggattccgcctcgtggccatgaagttcctccgggcctctgaagaacacctgaagcagcactacattgacggtctgggaggggctgaacgtggtgaagacaggccgagtgatgcttggggagaccaatccagcagattcaaagccaggcaccattcgtggggacttctgcattcaggttggcaggaacatcattcatggcagtgattcagtaaaaagtgctgaaaaagaaatcagcctatggtttaagcctgaagaactggttgactacaagtcttgtgctcatgactgggtctatgaataagaggtggacacaacagcagtctccttcagcacggcgtggtgtgtccctggacacagctcttcattccattgacttagaggcaacaggattgatcattcttttatagagcatatttgccaataaagcttttggaagccggaaaaaaaaaaaaaaaaaaaaaaaaaaaaaaaaaaaaacaaaaaaaaaaaacaaacagacaaaaaaaaanaac

SEQ ID NO: 371433 - DNA, 497 bp, Homo sapiens
  misc_feature (494)..(494): n is a, c, g, or t
gcggccgcctactactactactactactactattaaattcgcggccgcgtcgacggtctgggaggggctgaacgtggtgaagacaggccgagtgatgcttggggagaccaatccagcagattcaaagccaggcaccattcgtggggacttctgcattcaggttggcaggaacatcattcatggcagtgattcagtaaaaagtgctgaaaaagaaatcagcctatggtttaagcctgaagaactggttgactacaagtcttgtgctcatgactgggtctatgaataagaggtggacacaacagcagtctccttcagcacggcgtggtgtgtccctggacacagctcttcattccattgacttagaggcaacaggattgatcattcttttatagagcatatttgccaataaagcttttggaagccggaaaaaaaaaaaaaaaaaaaaaaaaaaaaaaaaaaaaacaaaaaaaaaaaacaaacagacaaaaaaaaanaac

SEQ ID NO: 371434 - DNA, 1053 bp, Homo sapiens
  misc_feature (1050)..(1050): n is a, c, g, or t
aaaatgggctctccggcagcggatctgcgcagaagcgttccgtgcgtgcaagtgctgcgaaccacgtgggtcccgggcgcgtttcgggtgctggcggctgcagccggagttcaaacctaagcagctggaaggaaccatggccaactgtgagcgtaccttcattgcgatcaaaccagatggggtccagcggggtcttgtgggagagattatcaagcgttttgagcagaaaggattccgccttgttggtctgaaattcatgcaagtctgggaggggctgaatgtggtgaagacgggccgagtcatgctcggggagaccaaccctgcagactccaagcctgggaccatccgtggagacttctgcatacaagttggcaggaccatggccaacctggagcgcaccttcatcgccatcaagccggacggcgtgcagcgcggcctggtgggcgagatcatcaagcgcttcgagcagaagggattccgcctcgtggccatgaagttcctccgggcctctgaagaacacctgaagcagcactacattgacctgaaagaccgaccattcttccctgggctggtgaagtacatgaactcagggccggttgtggccatggtctgggaagggggctgaacgtgggtgaaagacaggccgagtgatgcttggggagaccaatccagcagattcaaagccaggcaccattcgtggggacttctgcattcaggttggcaggaacatcattcatggcagtgattcagtaaaaagtgctgaaaaagaaatcagcctatggtttaagcctgaagaactggttgactacaagtcttgtgctcatgactgggtctatgaataagaggtggacacaacagcagtctccttcagcacggcgtggtgtgtccctggacacagctcttcattccattgacttagaggcaacaggattgatcattcttttatagagcatatttgccaataaagcttttggaagccggaaaaaaaaaaaaaaaaaaaaaaaaaaaaaaaaaaaaacaaaaaaaaaaaacaaacagacaaaaaaaaanaac

SEQ ID NO: 371435 - DNA, 1714 bp, Homo sapiens
  misc_feature (1056)..(1056): n is a, c, g, or t
  misc_feature (1085)..(1085): n is a, c, g, or t
  misc_feature (1561)..(1561): n is a, c, g, or t
  misc_feature (1595)..(1595): n is a, c, g, or t
  misc_feature (1631)..(1631): n is a, c, g, or t
aaaatgggctctccggcagcggatctgcgcagaagcgttccgtgcgtgcaagtgctgcgaaccacgtgggtcccgggcgcgtttcgggtgctggcggctgcagccggagttcaaacctaagcagctggaaggaaccatggccaactgtgagcgtaccttcattgcgatcaaaccagatggggtccagcggggtcttgtgggagagattatcaagcgttttgagcagaaaggattccgccttgttggtctgaaattcatgcaagcttccgaagatcttctcaaggaacactacgttgacctgaaggaccgtccattctttgccggcctggtgaaatacatgcactcagggccggtagttgccatggtctgggaggggctgaatgtggtgaagacgggccgagtcatgctcggggagaccaaccctgcagactccaagcctgggaccatccgtggagacttctgcatacaagttggcaggaccatggccaacctggagcgcaccttcatcgccatcaagccggacggcgtgcagcgcggcctggtgggcgagatcatcaagcgcttcgagcagaagggattccgcctcgtggccatgaagttcctccgggcctctgaagaacacctgaagcagcactacattgacctgaaagaccgaccattcttccctgggctggtgaagtacatgaactcagggccggttgtggccatggaacatcattcatggcagtgattcagtaaaaagtgctgaaaaagaaatcagcctatggtttaagcctgaagaactggttgactacaagtcttgtgctcatgactgggtctatgaataagaggtggacacaacagcagtctccttcagcacggcgtggtgtgtccctggacacagctcttcattccattgacttagaggcaacaggattgatcattcttttatagagcatatttgccaataaagcttttggaagccggaaaaaaaaaaaaaaaaaaagggcggccgcccttttttttttttttgggggcattttcatggatttttcttttcattttggtaccaccagnctgtgtttagtttgttggttaaaaaaaancaaaaacaaaaaaaaaatcaaaacaatacaaaaaaaaaaaaacaaaacgggggcgcgcgcgccgacaaaaatactctcccgaggggcgcccaattatcgcaccccccctttttttgtaaaaaaggagggcgccataagaggaggaggcgttaataatcaaccacggacgcgggggcgcggtaacaaaccagctcgtgtggagggacacacgctagcttgtggggtcaactctgtcgggagaggagaaaccccaccatcgcgcgggcggggggcacatcaagtggcgggaacaccaccccaccccaagaaggagagcaatatatagagagcgaaccgcggaggcgacacaattaacaaaaaatgtgggagcccgctgttatagcgtgcgtgtctcacacaacacccgaggccctttaatattagtctcgtcgcgttcccgtagccagaacaaacttgtgctccaccagccagagaanatgcgtaattacggaacacaatctttttttcccncgccgtgcgctgctcggttagttaacgtcgcgggcnatccttccactaagtcccagaaccaggactcactgccagacaacagctacggcaaggagtgacgaaaatgaaccccagtataa

SEQ ID NO: 371436 - DNA, 1140 bp, Homo sapiens
  misc_feature (482)..(482): n is a, c, g, or t
  misc_feature (511)..(511): n is a, c, g, or t
  misc_feature (987)..(987): n is a, c, g, or t
  misc_feature (1021)..(1021): n is a, c, g, or t
  misc_feature (1057)..(1057): n is a, c, g, or t
agtaatgctagggtgagtggtaggaagttttttcataggaggtgtatgagttggtcgtagcggaatcgggggtatgctgttcgaattcataagaacagggaggtcagaagtagacttctgcattcaggttggcaggaacatcattcatggcagtgattcagtaaaaagtgctgaaaaagaaatcagcctatggtttaagcctgaagaactggttgactacaagtcttgtgctcatgactgggtctatgaataagaggtggacacaacagcagtctccttcagcacggcgtggtgtgtccctggacacagctcttcattccattgacttagaggcaacaggattgatcattcttttatagagcatatttgccaataaagcttttggaagccggaaaaaaaaaaaaaaaaaaagggcggccgcccttttttttttttttgggggcattttcatggatttttcttttcattttggtaccaccagnctgtgtttagtttgttggttaaaaaaaancaaaaacaaaaaaaaaatcaaaacaatacaaaaaaaaaaaaacaaaacgggggcgcgcgcgccgacaaaaatactctcccgaggggcgcccaattatcgcaccccccctttttttgtaaaaaaggagggcgccataagaggaggaggcgttaataatcaaccacggacgcgggggcgcggtaacaaaccagctcgtgtggagggacacacgctagcttgtggggtcaactctgtcgggagaggagaaaccccaccatcgcgcgggcggggggcacatcaagtggcgggaacaccaccccaccccaagaaggagagcaatatatagagagcgaaccgcggaggcgacacaattaacaaaaaatgtgggagcccgctgttatagcgtgcgtgtctcacacaacacccgaggccctttaatattagtctcgtcgcgttcccgtagccagaacaaacttgtgctccaccagccagagaanatgcgtaattacggaacacaatctttttttcccncgccgtgcgctgctcggttagttaacgtcgcgggcnatccttccactaagtcccagaaccaggactcactgccagacaacagctacggcaaggagtgacgaaaatgaaccccagtataa

SEQ ID NO: 371437 - DNA, 1212 bp, Homo sapiens
  misc_feature (554)..(554): n is a, c, g, or t
  misc_feature (583)..(583): n is a, c, g, or t
  misc_feature (1059)..(1059): n is a, c, g, or t
  misc_feature (1093)..(1093): n is a, c, g, or t
  misc_feature (1129)..(1129): n is a, c, g, or t
tacagttgaaacaaggaatgttttaaatcaagcacttttacagttgtatagctgcttttaaaaggaaatgctttgggggtataaattggtctgttgcttcaagtggcaatttggctgaaagagtctggagtgctgtccattgcggtacccattaaacagacttttgcactttaaaacatggcaacttgtaattgttttctttcttaggaacatcattcatggcagtgattcagtaaaaagtgctgaaaaagaaatcagcctatggtttaagcctgaagaactggttgactacaagtcttgtgctcatgactgggtctatgaataagaggtggacacaacagcagtctccttcagcacggcgtggtgtgtccctggacacagctcttcattccattgacttagaggcaacaggattgatcattcttttatagagcatatttgccaataaagcttttggaagccggaaaaaaaaaaaaaaaaaaagggcggccgcccttttttttttttttgggggcattttcatggatttttcttttcattttggtaccaccagnctgtgtttagtttgttggttaaaaaaaancaaaaacaaaaaaaaaatcaaaacaatacaaaaaaaaaaaaacaaaacgggggcgcgcgcgccgacaaaaatactctcccgaggggcgcccaattatcgcaccccccctttttttgtaaaaaaggagggcgccataagaggaggaggcgttaataatcaaccacggacgcgggggcgcggtaacaaaccagctcgtgtggagggacacacgctagcttgtggggtcaactctgtcgggagaggagaaaccccaccatcgcgcgggcggggggcacatcaagtggcgggaacaccaccccaccccaagaaggagagcaatatatagagagcgaaccgcggaggcgacacaattaacaaaaaatgtgggagcccgctgttatagcgtgcgtgtctcacacaacacccgaggccctttaatattagtctcgtcgcgttcccgtagccagaacaaacttgtgctccaccagccagagaanatgcgtaattacggaacacaatctttttttcccncgccgtgcgctgctcggttagttaacgtcgcgggcnatccttccactaagtcccagaaccaggactcactgccagacaacagctacggcaaggagtgacgaaaatgaaccccagtataa

SEQ ID NO: 371438 - DNA, 790 bp, Homo sapiens
aaaatgggctctccggcagcggatctgcgcagaagcgttccgtgcgtgcaagtgctgcgaaccacgtgggtcccgggcgcgtttcgggtgctggcggctgcagccggagttcaaacctaagcagctggaaggaaccatggccaactgtgagcgtaccttcattgcgatcaaaccagatggggtccagcggggtcttgtgggagagattatcaagcgttttgagcagaaaggattccgccttgttggtctgaaattcatgcaagcttccgaagatcttctcaaggaacactacgttgacctgaaggaccgtccattctttgccggcctggtgaaatacatgcactcagggccggtagttgccatggtctgggaggggctgaatgtggtgaagacgggccgagtcatgctcggggagaccaaccctgcagactccaagcctgggaccatccgtggagacttctgcatacaagttggcaggaccatggccaacctggagcgcaccttcatcgccatcaagccggacggcgtgcagcgcggcctggtgggcgagatcatcaagcgcttcgagcagaagggattccgcctcgtggccatgaagttcctccgggcctctgaagaacacctgaagcagcactacattgacctaacatacaattctaaagtaaaatgtttcactcttcggtgaggtctttgattatcactagcgaaatctctacaaatacagaaacatgaactgctgcggtctggttaggcctgtcttgcaggggttgaaaagttccgttgaagccgt

SEQ ID NO: 371439 - DNA, 765 bp, Homo sapiens
ggaatgagagaaaatgaggaaaaagtgctcagtgttctttgttagacatctccctcagctaatctaaattttattttatgaatggaacctgctgaagttacttaactgagcaactaggagcttgggaggagaaagcaaatcagaccttagaaatgggaaggatgttagctgggtgtggtggtgcacggctgtaatctcagctacttgggaggctgaggtaggagaattgcttgaacctgggaggcggaggttgcagtgagccgagatcgtgccactgcactccagcctgggcaacagagcgagactctgtctcgacaaagaaaaaagatatgggaaggactttttcaggtacatgtctctatggttaaatagaatctcactgcctgcaagagtggtaaattttcgggccaggcttggtggctcatgcctgtaatcccagcgctttggaaggctgaggcgggtggatcacctgaggccaggagttaatcccagttactcagggggctgaagcacgagaatcgcttgaacttgggaggcggaggttgcagtgagccgagatcatgccactgcactccagcctgggcgacagcaagactccatctcaaaaaaaaataatactcaatttcttctgtttgacaagtgttttagaccttaatgtttcctagattaaaaaactttatcctattttctcatgaaaaattcaaaggtaaggatgtaagaagttctcaatcctatactagaagcagtttcttctggatggtgcta

SEQ ID NO: 371440 - DNA, 1113 bp, Homo sapiens
tgtgtgtgtgtgtgtgtgtgtgtgtaggagcttttggggtcacgggaagtactgagaggtgaggagtgggatttgggacgtgcgtagttgaactcataggacgtccaggtggagaaggaatcacttcctgtctctggatccgtctcgatctctgcctggcgagggcgcgccccggctgggcgtggacactgttctccggccgcgtcgggccgggcgggtggggcgttcctgcgggttgggcggctgggccctccggggtgtggccaccccgcgctccgccctgcgcccctcctccgccgccggctcccgggtgtggtggtcgcaccagctctctgctctcccagcgcagcgccgccgcccggcccctccagcttcccggaccatggccaacctggagcgcaccttcatcgccatcaagccggacggcgtgcagcgcggcctggtgggcgagatcatcaagcgcttcgagcagaagggattccgcctcgtggccatgaagttcctccgggcctctgaagaacacctgaagcagcactacattgacctgaaagaccgaccattcttccctgggctggtgaagtacatgaactcagggccggttgtggccatggtctgggaggggctgaacgtggtgaagacaggccgagtgatgcttggggagaccaatccagcagattcaaagccaggcaccattcgtggggacttctgcattcaggttggcaggaacatcattcatggcagtgattcagtaaaaagtgctgaaaaagaaatcagcctatggtttaagcctgaagaactggttgactacaagtcttgtgctcatgactgggtctatgaataagaggtggacacaacagcagtctccttcagcacggcgtggtgtgtccctggacacagctcttcattccattgacttagaggcaacaggattgatcattcttttatagagcatatttgccaataaagcttttggaagccggaaaaaaaaaaaaaaaaaaacaacaaaaaaaagagggggtttttggggggggaaaaaggtacaaaggcgctggttcaatttcgcacccctttttgaaaagggaaagggggccaaggaggggaaatgaaccgacg

SEQ ID NO: 371441 - DNA, 693 bp, Homo sapiens
caaagggagcttgtttgccagggacactgcaagtaggaagtgtctacaggtcgatgacaggcctaatctctatgacagggtctagactttcctcagggtccaggggcgcacctcagggtgaactggaaaactcgaccgcactttagtgccaggggaccatggccaacctggagcgcaccttcatcgccatcaagccggacggcgtgcagcgcggcctggtgggcgagatcatcaagcgcttcgagcagaagggattccgcctcgtggccatgaagttcctccgggcctctgaagaacacctgaagcagcactacattgacctgaaagaccgaccattcttccctgggctggtgaagtacatgaactcagggccggttgtggccatggtctgggaggggctgaacgtggtgaagacaggccgagtgatgcttggggagaccaatccagcagattcaaagccaggcaccattcgtggggacttctgcattcaggttggcaggaacatcattcatggcagtgattcagtaaaaagtgctgaaaaagaaatcagcctatggtttaagcctgaagaactggttgactacaagtcttgtgctcatactgggctatgatagcagtgacacacagagttcttagacgcgtgggtgcctgaccagtctcatcatgcttaagacagatgactcttatgcttgc

SEQ ID NO: 371442 - DNA, 1386 bp, Homo sapiens
tgtgtgtgtgtgtgtgtgtgtgtgtaggagcttttggggtcacgggaagtactgagaggtgaggagtgggatttgggacgtgcgtagttgaactcataggacgtccaggtggagaaggaatcacttcctgtctctggatccgtctcgatctctgcctggcgagggcgcgccccggctgggcgtggacactgttctccggccgcgtcgggccgggcgggtggggcgttcctgcgggttgggcggctgggccctccggggtgtggccaccccgcgctccgccctgcgcccctcctccgccgccggctcccgggtgtggtggtcgcaccagctctctgctctcccagcgcagcgccgccgcccggcccctccagcttcccggaccatggccaacctggagcgcaccttcatcgccatcaagccggacggcgtgcagcgcggcctggtgggcgagatcatcaagcgcttcgagcagaagggattccgcctcgtggccatgaagttcctccgggcctctgaagaacacctgaagcagcactacattgacctgaaagaccgaccattcttccctgggctggtgaagtacatgaactcagggccggttgtggccatggtctgggaggggctgaacgtggtgaagacaggccgagtgatgcttggggagaccaatccagcagattcaaagccaggcaccattcgtggggacttctgcattcaggttggcaggaacatcattcatggcagtgattcagtaaaaagtgctgaaaaagaaatcagcctatggtttaagcctgaagaactggttgactacaagtcttgtgctcatgactgggtctatgaataagaggtggacacaacagcagtctccttcagcacggcgtggtgtgtccctggacacagctcttcattccattgacttagaggcaacaggattgatcattcttttatagagcatatttgccaataaagcttttggaagccggaaaaaaaaaaaaaaaaaaaaaaaaaaaaaaaaaaaaacaaaaaaaaaaggggggggggcaaaaaatatcccgcggagggggacccgatatagtgccggaccccgcttttttcgtgtaacagggggcccccaaaaggaggcagcgataaaagaaggacgcgggggccgcgttaaacaggtctggggggggaaacggtgcgctgccggctcttggggaaggacccctctcctgtcgcgtgccatctttggaccccccccagggagattaagagcccggggaaaataaactcgggttttggtgtcacccggctttgctgtcggggattgtcctggttttgctacgcgtccgcattcacatagccctaaacgccagcaagaggggttatgtgagtgagagatgtcgctgc

SEQ ID NO: 371443 - DNA, 1728 bp, Homo sapiens
  misc_feature (1070)..(1070): n is a, c, g, or t
  misc_feature (1099)..(1099): n is a, c, g, or t
  misc_feature (1575)..(1575): n is a, c, g, or t
  misc_feature (1609)..(1609): n is a, c, g, or t
  misc_feature (1645)..(1645): n is a, c, g, or t
tgtgtgtgtgtgtgtgtgtgtgtgtaggagcttttggggtcacgggaagtactgagaggtgaggagtgggatttgggacgtgcgtagttgaactcataggacgtccaggtggagaaggaatcacttcctgtctctggatccgtctcgatctctgcctggcgagggcgcgccccggctgggcgtggacactgttctccggccgcgtcgggccgggcgggtggggcgttcctgcgggttgggcggctgggccctccggggtgtggccaccccgcgctccgccctgcgcccctcctccgccgccggctcccgggtgtggtggtcgcaccagctctctgctctcccagcgcagcgccgccgcccggcccctccagcttcccggaccatggccaacctggagcgcaccttcatcgccatcaagccggacggcgtgcagcgcggcctggtgggcgagatcatcaagcgcttcgagcagaagggattccgcctcgtggccatgaagttcctccgggcctctgaagaacacctgaagcagcactacattgacctgaaagaccgaccattcttccctgggctggtgaagtacatgaactcagggccggttgtggccatggtctgggaggggctgaacgtggtgaagacaggccgagtgatgcttggggagaccaatccagcagattcaaagccaggcaccattcgtggggacttctgcattcaggttggcaggaacatcattcatggcagtgattcagtaaaaagtgctgaaaaagaaatcagcctatggtttaagcctgaagaactggttgactacaagtcttgtgctcatgactgggtctatgaataagaggtggacacaacagcagtctccttcagcacggcgtggtgtgtccctggacacagctcttcattccattgacttagaggcaacaggattgatcattcttttatagagcatatttgccaataaagcttttggaagccggaaaaaaaaaaaaaaaaaaagggcggccgcccttttttttttttttgggggcattttcatggatttttcttttcattttggtaccaccagnctgtgtttagtttgttggttaaaaaaaancaaaaacaaaaaaaaaatcaaaacaatacaaaaaaaaaaaaacaaaacgggggcgcgcgcgccgacaaaaatactctcccgaggggcgcccaattatcgcaccccccctttttttgtaaaaaaggagggcgccataagaggaggaggcgttaataatcaaccacggacgcgggggcgcggtaacaaaccagctcgtgtggagggacacacgctagcttgtggggtcaactctgtcgggagaggagaaaccccaccatcgcgcgggcggggggcacatcaagtggcgggaacaccaccccaccccaagaaggagagcaatatatagagagcgaaccgcggaggcgacacaattaacaaaaaatgtgggagcccgctgttatagcgtgcgtgtctcacacaacacccgaggccctttaatattagtctcgtcgcgttcccgtagccagaacaaacttgtgctccaccagccagagaanatgcgtaattacggaacacaatctttttttcccncgccgtgcgctgctcggttagttaacgtcgcgggcnatccttccactaagtcccagaaccaggactcactgccagacaacagctacggcaaggagtgacgaaaatgaaccccagtataa

SEQ ID NO: 371444 - DNA, 1151 bp, Homo sapiens
  misc_feature (1148)..(1148): n is a, c, g, or t
aaaatgggctctccggcagcggatctgcgcagaagcgttccgtgcgtgcaagtgctgcgaaccacgtgggtcccgggcgcgtttcgggtgctggcggctgcagccggagttcaaacctaagcagctggaaggaaccatggccaactgtgagcgtaccttcattgcgatcaaaccagatggggtccagcggggtcttgtgggagagattatcaagcgttttgagcagaaaggattccgccttgttggtctgaaattcatgcaagcttccgaagatcttctcaaggaacactacgttgacctgaaggaccgtccattctttgccggcctggtgaaatacatgcactcagggccggtagttgccatggtctgggaggggctgaatgtggtgaagacgggccgagtcatgctcggggagaccaaccctgcagactccaagcctgggaccatccgtggagacttctgcatacaagttggcaggaccatggccaacctggagcgcaccttcatcgccatcaagccggacggcgtgcagcgcggcctggtgggcgagatcatcaagcgcttcgagcagaagggattccgcctcgtggccatgaagttcctccgggcctctgaagaacacctgaagcagcactacattgacctgaaagaccgaccattcttccctgggctggtgaagtacatgaactcagggccggttgtggccatggtctgggaggggctgaacgtggtgaagacaggccgagtgatgcttggggagaccaatccagcagattcaaagccaggcaccattcgtggggacttctgcattcaggttggcaggaacatcattcatggcagtgattcagtaaaaagtgctgaaaaagaaatcagcctatggtttaagcctgaagaactggttgactacaagtcttgtgctcatgactgggtctatgaataagaggtggacacaacagcagtctccttcagcacggcgtggtgtgtccctggacacagctcttcattccattgacttagaggcaacaggattgatcattcttttatagagcatatttgccaataaagcttttggaagccggaaaaaaaaaaaaaaaaaaaaaaaaaaaaaaaaaaaaacaaaaaaaaaaaacaaacagacaaaaaaaaanaac

SEQ ID NO: 371445 - DNA, 1381 bp, Homo sapiens
  misc_feature (1378)..(1378): n is a, c, g, or t
tgtgtgtgtgtgtgtgtgtgtgtgtaggagcttttggggtcacgggaagtactgagaggtgaggagtgggatttgggacgtgcgtagttgaactcataggacgtccaggtggagaaggaatcacttcctgtctctggatccgtctcgatctctgcctggcgagggcgcgccccggctgggcgtggacactgttctccggccgcgtcgggccgggcgggtggggcgttcctgcgggttgggcggctgggccctccggggtgtggccaccccgcgctccgccctgcgcccctcctccgccgccggctcccgggtgtggtggtcgcaccagctctctgctctcccagcgcagcgccgccgcccggcccctccagcttcccggtaaggcggtgggggcgcatcccctggcgactcctcccgttccctcttccgcttgcgctgccgcaggtgggcccggtctgtgggcgccccccgatttcccgcaggtcccgcgcggcgtcggagcgggagattcccttgcagcttgcgccccgcgggccttcgggctccgcagagggacgccggccctgcgcggggcggaagcggccgggaagccacgtgtccccgcggccgcgcgtggtgggggaggagggaccggcggcgcccacgtggcctccgcgggccccgccagagcctgcgcccgggccctgaccgcacctctcgccccgcaggaccatggccaacctggagcgcaccttcatcgccatcaagccggacggcgtgcagcgcggcctggtgggcgagatcatcaagcgcttcgagcagaagggattccgcctcgtggccatgaagttcctccgggcctctgaagaacacctgaagcagcactacattgacctgaaagaccgaccattcttccctgggctggtgaagtacatgaactcagggccggttgtggccatggtctgggaggggctgaacgtggtgaagacaggccgagtgatgcttggggagaccaatccagcagattcaaagccaggcaccattcgtggggacttctgcattcaggttggcaggaacatcattcatggcagtgattcagtaaaaagtgctgaaaaagaaatcagcctatggtttaagcctgaagaactggttgactacaagtcttgtgctcatgactgggtctatgaataagaggtggacacaacagcagtctccttcagcacggcgtggtgtgtccctggacacagctcttcattccattgacttagaggcaacaggattgatcattcttttatagagcatatttgccaataaagcttttggaagccggaaaaaaaaaaaaaaaaaaaaaaaaaaaaaaaaaaaaacaaaaaaaaaaaacaaacagacaaaaaaaaanaac

SEQ ID NO: 371446 - DNA, 1178 bp, Homo sapiens
  misc_feature (996)..(997): n is a, c, g, or t
tgtgtgtgtgtgtgtgtgtgtgtgtaggagcttttggggtcacgggaagtactgagaggtgaggagtgggatttgggacgtgcgtagttgaactcataggacgtccaggtggagaaggaatcacttcctgtctctggatccgtctcgatctctgcctggcgagggcgcgccccggctgggcgtggacactgttctccggccgcgtcgggccgggcgggtggggcgttcctgcgggttgggcggctgggccctccggggtgtggccaccccgcgctccgccctgcgcccctcctccgccgccggctcccgggtgtggtggtcgcaccagctctctgctctcccagcgcagcgccgccgcccggcccctccagcttcccggaccatggccaacctggagcgcaccttcatcgccatcaagccggacggcgtgcagcgcggcctggtgggcgagatcatcaagcgcttcgagcagaagggattccgcctcgtggccatgaagttcctccgggcctctgaagaacacctgaagcagcactacattgacctgaaagaccgaccattcttccctgggctggtgaagtacatgaactcagggccggttgtggccatggtctgggaggggctgaacgtggtgaagacaggccgagtgatgcttggggagaccaatccagcagattcaaagccaggcaccattcgtggggacttctgcattcaggttggcaggaacatcattcatggcagtgattcagtaaaaagtgctgaaaaagaaatcagcctatggtttaagcctgaagaactggttgactacaagtcttgtgctcatgactgggtctatgaataagaggtggacacaacagcagtctccttcagcacggcgtggtgtgtccctggacacagctcttcattccattgacttagaggcaacaggattgatcattcttttatagagcatatttgccaataaagcttttggaagccggaaacaaaagaccaaannacaaacccaaacctaagcccggcaagagcaacgaagacacaacaacacaaagacaaaaagaggcgggcacaaaaacacccgcgaggacccaaaaaagcacacaggagctcacaggggccccaaggagcaaaaaagaggcgggcgaaacaaaaggggggaaacggcgagaccgaggacccag

SEQ ID NO: 371447 - DNA, 991 bp, Homo sapiens
tgtgtgtgtgtgtgtgtgtgtgtgtaggagcttttggggtcacgggaagtactgagaggtgaggagtgggatttgggacgtgcgtagttgaactcataggacgtccaggtggagaaggaatcacttcctgtctctggatccgtctcgatctctgcctggcgagggcgcgccccggctgggcgtggacactgttctccggccgcgtcgggccgggcgggtggggcgttcctgcgggttgggcggctgggccctccggggtgtggccaccccgcgctccgccctgcgcccctcctccgccgccggctcccgggtgtggtggtcgcaccagctctctgctctcccagcgcagcgccgccgcccggcccctccagcttcccggaccatggccaacctggagcgcaccttcatcgccatcaagccggacggcgtgcagcgcggcctggtgggcgagatcatcaagcgcttcgagcagaagggattccgcctcgtggccatgaagttcctccgggcctctgaagaacacctgaagcagcactacattgacctgaaagaccgaccattcttccctgggctggtgaagtacatgaactcagggccggttgtggccatggtctgggaggggctgaacgtggtgaagacaggccgagtgatgcttggggagaccaatccagcagattcaaagccaggcaccattcgtggggacttctgcattcaggttggcaggaacatcattcatggcagtgattcagtaaaaagtgctgaaaaagaaatcagcctatggtttaagcctgaagaactggttgactacaagtcttgtgctcatgactgggtctatgaataagaggtggacacaacagcagtctccttcagcacggcgtggtgtgtccctggacacagctcttcattccattgacttagaggcaacaggattgatcattcttttatagagcatatttgccaataaagctctggcctcgttggcctcaagcgg

SEQ ID NO: 371448 - DNA, 1012 bp, Homo sapiens
tgtgtgtgtgtgtgtgtgtgtgtgtaggagcttttggggtcacgggaagtactgagaggtgaggagtgggatttgggacgtgcgtagttgaactcataggacgtccaggtggagaaggaatcacttcctgtctctggatccgtctcgatctctgcctggcgagggcgcgccccggctgggcgtggacactgttctccggccgcgtcgggccgggcgggtggggcgttcctgcgggttgggcggctgggccctccggggtgtggccaccccgcgctccgccctgcgcccctcctccgccgccggctcccgggtgtggtggtcgcaccagctctctgctctcccagcgcagcgccgccgcccggcccctccagcttcccggaccatggccaacctggagcgcaccttcatcgccatcaagccggacggcgtgcagcgcggcctggtgggcgagatcatcaagcgcttcgagcagaagggattccgcctcgtggccatgaagttcctccgggcctctgaagaacacctgaagcagcactacattgacctgaaagaccgaccattcttccctgggctggtgaagtacatgaactcagggccggttgtggccatggtctgggaggggctgaacgtggtgaagacaggccgagtgatgcttggggagaccaatccagcagattcaaagccaggcaccattcgtggggacttctgcattcaggttggcaggaacatcattcatggcagtgattcagtaaaaagtgctgaaaaagaaatcagcctatggtttaagcctgaagaactggttgactacaagtcttgtgctcatgactgggtctatgaataagaggtggacacaacagcagtctccttcagcacggcgtggtgtgtccctggacacagctcttcattccattgacttagaggcaacaggattgatcattcttttatagagcatatttgccaataaagctttggaagcggaaaaaagacagaaacacggcgaatcaaccaaggg

SEQ ID NO: 371449 - DNA, 1112 bp, Homo sapiens
  misc_feature (1109)..(1109): n is a, c, g, or t
aaaatgggctctccggcagcggatctgcgcagaagcgttccgtgcgtgcaagtgctgcgaaccacgtgggtcccgggcgcgtttcgggtgctggcggctgcagccggagttcaaacctaagcagctggaaggaaccatggccaactgtgagcgtaccttcattgcgatcaaaccagatggggtccagcggggtcttgtgggagagattatcaagcgttttgagcagaaaggattccgccttgttggtctgaaattcatgcaagcttccgaagatcttctcaaggaacactacgttgacctgaaggaccgtccattctttgccggcctggtgaaatacatgcactcagggccggtagttgccatggtctgggaggggctgaatgtggtgaagacgggccgagtcatgctcggggagaccaaccctgcagactccaagcctgggaccatccgtggagacttctgcatacaagttggcaggaccatggccaacctggagcgcaccttcatcgccatcaagccggacggcgtgcagcgcggcctggtgggcgagatcatcaagcgcttcgagcagaagggattccgcctcgtggccatgaagttcctccgggcctctgaagaacacctgaagcagcactacattgacctgaaagaccgaccattcttccctggggtctgggaggggctgaacgtggtgaagacaggccgagtgatgcttggggagaccaatccagcagattcaaagccaggcaccattcgtggggacttctgcattcaggttggcaggaacatcattcatggcagtgattcagtaaaaagtgctgaaaaagaaatcagcctatggtttaagcctgaagaactggttgactacaagtcttgtgctcatgactgggtctatgaataagaggtggacacaacagcagtctccttcagcacggcgtggtgtgtccctggacacagctcttcattccattgacttagaggcaacaggattgatcattcttttatagagcatatttgccaataaagcttttggaagccggaaaaaaaaaaaaaaaaaaaaaaaaaaaaaaaaaaaaacaaaaaaaaaaaacaaacagacaaaaaaaaanaac

SEQ ID NO: 371450 - DNA, 1149 bp, Homo sapiens
tgtgtgtgtgtgtgtgtgtgtgtgtaggagcttttggggtcacgggaagtactgagaggtgaggagtgggatttgggacgtgcgtagttgaactcataggacgtccaggtggagaaggaatcacttcctgtctctggatccgtctcgatctctgcctggcgagggcgcgccccggctgggcgtggacactgttctccggccgcgtcgggccgggcgggtggggcgttcctgcgggttgggcggctgggccctccggggtgtggccaccccgcgctccgccctgcgcccctcctccgccgccggctcccgggtgtggtggtcgcaccagctctctgctctcccagcgcagcgccgccgcccggcccctccagcttcccggaccatggccaacctggagcgcaccttcatcgccatcaagccggacggcgtgcagcgcggcctggtgggcgagatcatcaagcgcttcgagcagaagggattccgcctcgtggccatgaagttcctccgggcctctgaagaacacctgaagcagcactacattgacctgaaagaccgaccattcttccctgggctggtgaagtacatgaactcagggccggttgtggccatggtctgggaggggctgaacgtggtgaagacaggccgagtgatgcttggggagaccaatccagcagattcaaagccaggcaccattcgtggggacttctgcattcaggttggcaggaacatcattcatggcagtgattcagtaaaaagtgctgaaaaagaaatcagcctatggtttaagcctgaagaactggttgactacaagtcttgtgctcatgactgggtctatgaataagaggtggacacaacagcagtctccttcagcacggcgtggtgtgtccctggacacgaatgcttcatgaacattcgtgtccatgtatatggcttgcatgtgtgtgcttgtgcacacgcaggagtgtatgtgtgtgccatgtgagtgcctgtgtacatgtgcaagagtgggctcaggtgtatccacatgttgcatggtatacctcggccggtcctagaccctagtcatcagactctgctgctcctcactggcatgaaggcagacctgaagctgggcatgggacacgaatgtaacaggtggcgagctcgatt

SEQ ID NO: 371451 - DNA, 471 bp, Homo sapiens
  misc_feature (468)..(468): n is a, c, g, or t
caattaagtagacaaaaaccccccccttcagtctgcggagggctgacttggtgaagacaggccgagtgatgcttggggagaccaatccagcagattcaaagccaggcaccattcgtggggacttctgcattcaggttggcaggaacatcattcatggcagtgattcagtaaaaagtgctgaaaaagaaatcagcctatggtttaagcctgaagaactggttgactacaagtcttgtgctcatgactgggtctatgaataagaggtggacacaacagcagtctccttcagcacggcgtggtgtgtccctggacacagctcttcattccattgacttagaggcaacaggattgatcattcttttatagagcatatttgccaataaagcttttggaagccggaaaaaaaaaaaaaaaaaaaaaaaaaaaaaaaaaaaaacaaaaaaaaaaaacaaacagacaaaaaaaaanaac

SEQ ID NO: 371452 - DNA, 1615 bp, Homo sapiens
  misc_feature (957)..(957): n is a, c, g, or t
  misc_feature (986)..(986): n is a, c, g, or t
  misc_feature (1462)..(1462): n is a, c, g, or t
  misc_feature (1496)..(1496): n is a, c, g, or t
  misc_feature (1532)..(1532): n is a, c, g, or t
tgtgtgtgtgtgtgtgtgtgtgtgtaggagcttttggggtcacgggaagtactgagaggtgaggagtgggatttgggacgtgcgtagttgaactcataggacgtccaggtggagaaggaatcacttcctgtctctggatccgtctcgatctctgcctggcgagggcgcgccccggctgggcgtggacactgttctccggccgcgtcgggccgggcgggtggggcgttcctgcgggttgggcggctgggccctccggggtgtggccaccccgcgctccgccctgcgcccctcctccgccgccggctcccgggtgtggtggtcgcaccagctctctgctctcccagcgcagcgccgccgcccggcccctccagcttcccggaccatggccaacctggagcgcaccttcatcgccatcaagccggacggcgtgcagcgcggcctggtgggcgagatcatcaagcgcttcgagcagaagggattccgcctcgtggccatgaagttcctccgggcctctgaagaacacctgaagcagcactacattgacctgaaagaccgaccattcttccctgggctggtgaagtacatgaactcagggccggttgtggccatggaacatcattcatggcagtgattcagtaaaaagtgctgaaaaagaaatcagcctatggtttaagcctgaagaactggttgactacaagtcttgtgctcatgactgggtctatgaataagaggtggacacaacagcagtctccttcagcacggcgtggtgtgtccctggacacagctcttcattccattgacttagaggcaacaggattgatcattcttttatagagcatatttgccaataaagcttttggaagccggaaaaaaaaaaaaaaaaaaagggcggccgcccttttttttttttttgggggcattttcatggatttttcttttcattttggtaccaccagnctgtgtttagtttgttggttaaaaaaaancaaaaacaaaaaaaaaatcaaaacaatacaaaaaaaaaaaaacaaaacgggggcgcgcgcgccgacaaaaatactctcccgaggggcgcccaattatcgcaccccccctttttttgtaaaaaaggagggcgccataagaggaggaggcgttaataatcaaccacggacgcgggggcgcggtaacaaaccagctcgtgtggagggacacacgctagcttgtggggtcaactctgtcgggagaggagaaaccccaccatcgcgcgggcggggggcacatcaagtggcgggaacaccaccccaccccaagaaggagagcaatatatagagagcgaaccgcggaggcgacacaattaacaaaaaatgtgggagcccgctgttatagcgtgcgtgtctcacacaacacccgaggccctttaatattagtctcgtcgcgttcccgtagccagaacaaacttgtgctccaccagccagagaanatgcgtaattacggaacacaatctttttttcccncgccgtgcgctgctcggttagttaacgtcgcgggcnatccttccactaagtcccagaaccaggactcactgccagacaacagctacggcaaggagtgacgaaaatgaaccccagtataa

SEQ ID NO: 371453 - DNA, 1885 bp, Homo sapiens
aaaatgggctctccggcagcggatctgcgcagaagcgttccgtgcgtgcaagtgctgcgaaccacgtgggtcccgggcgcgtttcgggtgctggcggctgcagccggagttcaaacctaagcagctggaaggaaccatggccaactgtgagcgtaccttcattgcgatcaaaccagatggggtccagcggggtcttgtgggagagattatcaagcgttttgagcagaaaggattccgccttgttggtctgaaattcatgcaagcttccgaagatcttctcaaggaacactacgttgacctgaaggaccgtccattctttgccggcctggtgaaatacatgcactcagggccggtagttgccatggtctgggaggggctgaatgtggtgaagacgggccgagtcatgctcggggagaccaaccctgcagactccaagcctgggaccatccgtggagacttctgcatacaagttggcaggaccatggccaacctggagcgcaccttcatcgccatcaagccggacggcgtgcagcgcggcctggtgggcgagatcatcaagcgcttcgagcagaagggattccgcctcgtggccatgaagttcctccgggcctctgaagaacacctgaagcagcactacattgacctgaaagaccgaccattcttccctgggctggtgaagtacatgaactcagggccggttgtggccatggaatgagagaaaatgaggaaaaagtgctcagtgttctttgttagacatctccctcagctaatctaaattttattttatgaatggaacctgctgaagttacttaactgagcaactaggagcttgggaggagaaagcaaatcagaccttagaaatgggaaggatgttagctgggtgtggtggtgcacggctgtaatctcagctacttgggaggctgaggtaggagaattgcttgaacctgggaggcggaggttgcagtgagccgagatcgtgccactgcactccagcctgggcaacagagcgagactctgtctcgacaaagaaaaaagatatgggaaggactttttcaggtacatgtctctatggttaaatagaatctcactgcctgcaagagtggtaaattttcgggccaggcttggtggctcatgcctgtaatcccagctactcagggggctgaagcacgagaatcgcttgaacttgggaggcggaggttgcagtgagccgagatcatgccactgcactccagcctgggcgacagcaagactccatctcaaaaaaaaataatactcaatttcttctgtttgacaagtgttttagaccttaatgtttcctagattaaaaaactttatcctattttctcatgaaaaattcaaaggtaaggatgtaagaagttctcaatcctatactagaagcagtttcttctggatggtgctaatgtccatttgggagtggagagaatatgaggagagagtggctgggattacaggcgtgagtcactgcacctggccgaacttttctttttaaattaatattttcttcattaagttagtgctgtaaactgtgtatcacatggctgttgtggggctttaaagaatacagtatctaaaatggcctaatatgatgtatgtactcattaagtatttgatgtctgaataaatgatgcccaccatatgaattattatgcatacctatttaatcatgatttaccacactctctaatagaactatagtagtgttagttaggattattgatggtttactgcatgccaagtttcttgctaaattttttatataaattaatttaatcttttccagaaaacgtatgccatgggaactatgataattccttttacaaattgtccacatggaggttccagaatttccacagcacttcagtcc

SEQ ID NO: 371454 - DNA, 963 bp, Homo sapiens
  misc_feature (305)..(305): n is a, c, g, or t
  misc_feature (334)..(334): n is a, c, g, or t
  misc_feature (810)..(810): n is a, c, g, or t
  misc_feature (844)..(844): n is a, c, g, or t
  misc_feature (880)..(880): n is a, c, g, or t
gcggccgcctactactactactgctcgaattcaagcttctaacgatgtacggggacatgactgggtctatgaataagaggtggacacaacagcagtctccttcagcacggcgtggtgtgtccctggacacagctcttcattccattgacttagaggcaacaggattgatcattcttttatagagcatatttgccaataaagcttttggaagccggaaaaaaaaaaaaaaaaaaagggcggccgcccttttttttttttttgggggcattttcatggatttttcttttcattttggtaccaccagnctgtgtttagtttgttggttaaaaaaaancaaaaacaaaaaaaaaatcaaaacaatacaaaaaaaaaaaaacaaaacgggggcgcgcgcgccgacaaaaatactctcccgaggggcgcccaattatcgcaccccccctttttttgtaaaaaaggagggcgccataagaggaggaggcgttaataatcaaccacggacgcgggggcgcggtaacaaaccagctcgtgtggagggacacacgctagcttgtggggtcaactctgtcgggagaggagaaaccccaccatcgcgcgggcggggggcacatcaagtggcgggaacaccaccccaccccaagaaggagagcaatatatagagagcgaaccgcggaggcgacacaattaacaaaaaatgtgggagcccgctgttatagcgtgcgtgtctcacacaacacccgaggccctttaatattagtctcgtcgcgttcccgtagccagaacaaacttgtgctccaccagccagagaanatgcgtaattacggaacacaatctttttttcccncgccgtgcgctgctcggttagttaacgtcgcgggcnatccttccactaagtcccagaaccaggactcactgccagacaacagctacggcaaggagtgacgaaaatgaaccccagtataa

SEQ ID NO: 371455 - DNA, 169 bp, Homo sapiens
ccagggctccatcttctaactctgtgtgggaaggtgaaagcacaccctcgttccgtaaacgcttcccaggggtgctgtggggttgtcacagggactgaaggaccagctttggactggatcaggcttggaaagctttagagagaagatacccggaaaaagaagtattttg

SEQ ID NO: 371456 - DNA, 1090 bp, Homo sapiens
tgcgtgcagtgttgcctcgcccaaagaagactacaatctccagggaaacctggggcgtctcgcgcaaacgtccataactgaaagtagctaaggcaccccagccggaggaagtgagctctcctggggcgtggttgttcgtgatccttgcatctgttacttagggtcaaggcttgggtcttgccccgcagacccttgggacgacccggccccagcgcagctatgaacctggagcgagtgtccaatgaggagaaattgaacctgtgccggaagtactacctgggggggtttgctttcctgccttttctctggttggtcaacatcttctggttcttccgagaggccttccttgtcccagcctacacagaacagagccaaatcaaaggctatgtctggcgctcagctgtgggcttcctcttctgggtgatagtgctcacctcctggatcaccatcttccagatctaccggccccgctggggtgcccttggggactacctctccttcaccatacccctgggcaccccctgacaacttctgcacatactggggccctgcttattctcccaggacaggctccttaaagcagaggagcctgtcctgggagccccttctcaaactcctaagacttgttttcatgtcccacgttctctgctgacatcccccaataaaggaccctaactttcgatactgacttcctgggatcttttagaggttgaggcataaatgattattaatatttaaaaacatctgttgagagctttgtacgaggcttagtatttagacatgatgtacattttttacagtgcatactactcataatcttctgaactaggaactttcctgctcaggaaactattagatgagaaactaagaaaggaatagtgcttccatttctttttcttttttcttttttttttttttttttgagacagagtcttgctctgtcagccaggctggagtgcagtggtaggatcggcctagtgcttccatttctaggggctgttatcctgtactggtagtcgtgaattcaaaaatataactttcctactgtgggctgcagtattctcatcagaagtgtagatcacgatgctac

SEQ ID NO: 371457 - DNA, 713 bp, Homo sapiens
tgcgtgcagtgttgcctcgcccaaagaagactacaatctccagggaaacctggggcgtctcgcgcaaacgtccataactgaaagtagctaaggcaccccagccggaggaagtgagctctcctggggcgtggttgttcgtgatccttgcatctgttacttagggtcaaggcttgggtcttgccccgcagacccttgggacgacccggccccagcgcagctatgaacctggagcgagtgtccaatgaggagaaattgaacctgtgccggaagtactacctgggggggtttgctttcctgccttttctctggttggtcaacatcttctggttcttccgagaggccttccttgtcccagcctacacagaacagagccaaatcaaaggctatgtctggcgctcagctgtgggcttcctcttctgggtgatagtgctcacctcctggatcaccatcttccagatctaccggccccgctggggtgcccttggggactacctctccttcaccatacccctgggcaccccctgacaacttctgcacatactggggccctgcttattctcccaggacaggctccttaaagcagaggagcctgtcctgggagccccttctcaaactcctaagacttgttttcatgtcccacgttctctgctgacatccccataaggacctatggaagaaaaacaaaaaaaaaatttggggcggcagaaaattaa

SEQ ID NO: 371458 - DNA, 416 bp, Homo sapiens
gctggacacaaccaaaggcggaggacccgtggcccacgaagctcatctttgaactgtccccgccttctcccgccttgacttgtgaccctaggccctttggggcgcctctgacccagctagccagatcccggacccaaaccatgttccctgtgaaggtgaaagtggagaaatcagagctggagatggccaaagcccggaaccaactggatgctgtcttgcagtgtctgctggagaagagtcacatggacagggagcgtctggatgaggaagctgggaaaacaccctcagacacccacaataagtgagtttttctgattggatttggagttgagagttcgtggttggtaacttctttccttatccaagccctgaccgctcagcccagcgctacctccatcgtggcccggaccactcca

SEQ ID NO: 371459 - DNA, 1135 bp, Homo sapiens
tgcgtgcagtgttgcctcgcccaaagaagactacaatctccagggaaacctggggcgtctcgcgcaaacgtccataactgaaagtagctaaggcaccccagccggaggaagtgagctctcctggggcgtggttgttcgtgatccttgcatctgttacttagggtcaaggcttgggtcttgccccgcagacccttgggacgacccggccccagcgcagctatgaacctggagcgagtgtccaatgaggagaaattgaacctgtgccggaagtactacctgggggggtttgctttcctgccttttctctggttggtcaacatcttctggttcttccgagaggccttccttgtcccagcctacacagaacagagccaaatcaaaggctagctggagatggccaaagcccggaaccaactggatgctgtcttgcagtgtctgctggagaagagtcacatggacagggagcgtctggatgaggaagctgggaaaacaccctcagacacccacaataaggactgctccatcgcagccactggcaaaaggccatctgcccgcttcccccaccagcggaggaagaagaggagggagatggatgatgggctggctgagggagggccgcagcgatccaacacatatgtgatcaagctgttcgaccggagcgtggacttggcccagttcagcgagaacacgccactgtacccaatctgccgcgcctggatgcgcaacagcccctctgtgcgcgagcgtgaatgctctcccagctcacccctgcccccgctgcctgaggatgaggagggctcagaggtaaccaacagcaagagtcgtgatgtgtacaagctgccgccacccacacccccggggccacccggagatgcctgcagatcccgcatcccatctccactgcagcctgagatgcagggcacccctgacgatgagccctctgagcccgagccctcaccctccacactcatctatcgcaacatgcagcgctggaaacgcatccgccagaggtggaaggaggcctctcatcggaaccagcttcgttactcagaaagcatgaagatcctacgagagatgtacgaacgacagtgatgttcccaggtccccccacaccagtaaacatcccccagctcca

SEQ ID NO: 371460 - DNA, 1129 bp, Homo sapiens
tgcgtgcagtgttgcctcgcccaaagaagactacaatctccagggaaacctggggcgtctcgcgcaaacgtccataactgaaagtagctaaggcaccccagccggaggaagtgagctctcctggggcgtggttgttcgtgatccttgcatctgttacttagggtcaaggcttgggtcttgccccgcagacccttgggacgacccggccccagcgcagctatgaacctggagcgagtgtccaatgaggagaaattgaacctgtgccggaagtactacctgggggggtttgctttcctgccttttctctggttggtcaacatcttctggttcttccgagaggccttccttgtcccagcctacacagaacagagccaaatcaaaggctagctggagatggccaaagcccggaaccaactggatgctgtcttgcagtgtctgctggagaagagtcacatggacagggagcgtctggatgaggaagctgggaaaacaccctcagacacccacaataactgacactccctctccctacgcaggccatctgcccgcttcccccaccagcggaggaagaagaggagggagatggatgatgggctggctgagggagggccgcagcgatccaacacatatgtgatcaagctgttcgaccggagcgtggacttggcccagttcagcgagaacacgccactgtacccaatctgccgcgcctggatgcgcaacagcccctctgtgcgcgagcgtgaatgctctcccagctcacccctgcccccgctgcctgaggatgaggagggctcagaggtaaccaacagcaagagtcgtgatgtgtacaagctgccgccacccacacccccggggccacccggagatgcctgcagatcccgcatcccatctccactgcagcctgagatgcagggcacccctgacgatgagccctctgagcccgagccctcaccctccacactcatctatcgcaacatgcagcgctggaaacgcatccgccagaggtggaaggaggcctctcatcggaaccagcttcgttactcagaaagcatgaagatcctacgagagatgtacgaacgacagtgatgttcccaggtccccccacaccagtaaacatcccccagctcca

SEQ ID NO: 371461 - DNA, 970 bp, Homo sapiens
tcgggaccatcgggttgacagggtgtggagtcccggtggaagggagtatcgcggaaaggggactgcacgacttttccctgaagcccacctgacaatcgctgtatcaggcagcgagcgttgcctgccaccttcacaccctcccggtgtgcgcttgaagtcgctttgagattgaatggggtggctcgggcaatgacgtgcgtggtaggacatggggaatcctgagccgagctggagatggccaaagcccggaaccaactggatgctgtcttgcagtgtctgctggagaagagtcacatggacagggagcgtctggatgaggaagctgggaaaacaccctcagacacccacaataactgacactccctctccctacgcaggccatctgcccgcttcccccaccagcggaggaagaagaggagggagatggatgatgggctggctgagggagggccgcagcgatccaacacatatgtgatcaagctgttcgaccggagcgtggacttggcccagttcagcgagaacacgccactgtacccaatctgccgcgcctggatgcgcaacagcccctctgtgcgcgagcgtgaatgctctcccagctcacccctgcccccgctgcctgaggatgaggagggctcagaggtaaccaacagcaagagtcgtgatgtgtacaagctgccgccacccacacccccggggccacccggagatgcctgcagatcccgcatcccatctccactgcagcctgagatgcagggcacccctgacgatgagccctctgagcccgagccctcaccctccacactcatctatcgcaacatgcagcgctggaaacgcatccgccagaggtggaaggaggcctctcatcggaaccagcttcgttactcagaaagcatgaagatcctacgagagatgtacgaacgacagtgatgttcccaggtccccccacaccagtaaacatcccccagctcca

SEQ ID NO: 371462 - DNA, 773 bp, Homo sapiens
atccccagggtgccctctgcagggttttgcacaggcgtttgtctgagggtcaactgtctttccccacagggactgctccatcgcagccactggcaaaagggtaaggtggcagggtcccagccagctgactagaggctcccagctcctaccccagtcctgacactccctctccctacgcaggccatctgcccgcttcccccaccagcggaggaagaagaggagggagatggatgatgggctggctgagggagggccgcagcgatccaacacatatgtgatcaagctgttcgaccggagcgtggacttggcccagttcagcgagaacacgccactgtacccaatctgccgcgcctggatgcgcaacagcccctctgtgcgcgagcgtgaatgctctcccagctcacccctgcccccgctgcctgaggatgaggagggctcagaggtaaccaacagcaagagtcgtgatgtgtacaagctgccgccacccacacccccggggccacccggagatgcctgcagatcccgcatcccatctccactgcagcctgagatgcagggcacccctgacgatgagccctctgagcccgagccctcaccctccacactcatctatcgcaacatgcagcgctggaaacgcatccgccagaggtggaaggaggcctctcatcggaaccagcttcgttactcagaaagcatgaagatcctacgagagatgtacgaacgacagtgatgttcccaggtccccccacaccagtaaacatcccccagctcca

SEQ ID NO: 371463 - DNA, 738 bp, Homo sapiens
tgaacgaggcagtgaatcgagctcgtgtacctgttggagtgttgttggagaagagccatgtacaggagcgtctggatgaggaagctgggaaaacaccctcagacacccacaataaggactgctccatcgcagccactggcaaaaggccatctgcccgcttcccccaccagcggaggaagaagaggagggagatggatgatgggctggctgagggagggccgcagcgatccaacacatatgtgatcaagctgttcgaccggagcgtggacttggcccagttcagcgagaacacgccactgtacccaatctgccgcgcctggatgcgcaacagcccctctgtgcgcgagcgtgaatgctctcccagctcacccctgcccccgctgcctgaggatgaggagggctcagaggtaaccaacagcaagagtcgtgatgtgtacaagctgccgccacccacacccccggggccacccggagatgcctgcagatcccgcatcccatctccactgcagcctgagatgcagggcacccctgacgatgagccctctgagcccgagccctcaccctccacactcatctatcgcaacatgcagcgctggaaacgcatccgccagaggtggaaggaggcctctcatcggaaccagcttcgttactcagaaagcatgaagatcctacgagagatgtacgaacgacagtgatgttcccaggtccccccacaccagtaaacatcccccagctcca

SEQ ID NO: 371464 - DNA, 875 bp, Homo sapiens
gctggacacaaccaaaggcggaggacccgtggcccacgaagctcatctttgaactgtccccgccttctcccgccttgacttgtgaccctaggccctttggggcgcctctgacccagctagccagatcccggacccaaaccatgttccctgtgaaggtgaaagtggagaaatcagagctggagatggccaaagcccggaaccaactggatgctgtcttgcagtgtctgctggagaagagtcacatggacagggagcgtctggatgaggaagctgggaaaacaccctcagacacccacaataaggactgctccatcgcagccactggcaaaaggatgatgggctggctgagggagggccgcagcgatccaacacatatgtgatcaagctgttcgaccggagcgtggacttggcccagttcagcgagaacacgccactgtacccaatctgccgcgcctggatgcgcaacagcccctctgtgcgcgagcgtgaatgctctcccagctcacccctgcccccgctgcctgaggatgaggagggctcagaggtaaccaacagcaagagtcgtgatgtgtacaagctgccgccacccacacccccggggccacccggagatgcctgcagatcccgcatcccatctccactgcagcctgagatgcagggcacccctgacgatgagccctctgagcccgagccctcaccctccacactcatctatcgcaacatgcagcgctggaaacgcatccgccagaggtggaaggaggcctctcatcggaaccagcttcgttactcagaaagcatgaagatcctacgagagatgtacgaacgacagtgatgttcccaggtccccccacaccagtaaacatcccccagctcca

SEQ ID NO: 371465 - DNA, 1274 bp, Homo sapiens
tgcgtgcagtgttgcctcgcccaaagaagactacaatctccagggaaacctggggcgtctcgcgcaaacgtccataactgaaagtagctaaggcaccccagccggaggaagtgagctctcctggggcgtggttgttcgtgatccttgcatctgttacttagggtcaaggcttgggtcttgccccgcagacccttgggacgacccggccccagcgcagctatgaacctggagcgagtgtccaatgaggagaaattgaacctgtgccggaagtactacctgggggggtttgctttcctgccttttctctggttggtcaacatcttctggttcttccgagaggccttccttgtcccagcctacacagaacagagccaaatcaaaggctgtgagtctagagcacagaggagggaggccagtggcaggggagagggggaagcggggaatcttggtgggaagggacaatggaggatccaaaatgttggggctctgggtgagaagggaaggctggtctagggaagtctggagagcagccggaggccaacccttccagcttctgtttcccatgacagatgtctggcgctcagctgtgggcttcctcttctgggtgatagtgctcacctcctggatcaccatcttccagatctaccggccccgctggggtgcccttggggactacctctccttcaccatacccctgggcaccccctgacaacttctgcacatactggggccctgcttattctcccaggacaggctccttaaagcagaggagcctgtcctgggagccccttctcaaactcctaagacttgttttcatgtcccacgttctctgctgacatcccccaataaaggaccctaactttcgatactgacttcctgggatcttttagaggttgaggcataaatgattattaatatttaaaaacatctgttgagagctttgtacgaggcttagtatttagacatgatgtacattttttacagtgcatactactcataatcttctgaactaggaactttcctgctcaggaaactattagatgagaaactaagaaaggaatagtgcttccatttctttttcttttttcttttttttttttttttttgagacagagtcttgctctgtcagccaggctggagtgcagtggtaggatcggcctagtgcttccatttctaggggctgttatcctgtactggtagtcgtgaattcaaaaatataactttcctactgtgggctgcagtattctcatcagaagtgtagatcacgatgctac

SEQ ID NO: 371466 - DNA, 967 bp, Homo sapiens
  misc_feature (677)..(677): n is a, c, g, or t
  misc_feature (687)..(687): n is a, c, g, or t
  misc_feature (692)..(692): n is a, c, g, or t
  misc_feature (810)..(810): n is a, c, g, or t
tgcgtgcagtgttgcctcgcccaaagaagactacaatctccagggaaacctggggcgtctcgcgcaaacgtccataactgaaagtagctaaggcaccccagccggaggaagtgagctctcctggggcgtggttgttcgtgatccttgcatctgttacttagggtcaaggcttgggtcttgccccgcagacccttgggacgacccggccccagcgcagctatgaacctggagcgagtgtccaatgaggagaaattgaacctgtgccggaagtactacctgggggggtttgctttcctgccttttctctggttggtcaacatcttctggttcttccgagaggccttccttgtcccagcctacacagaacagagccaaatcaaaggctatgtctggcgctcagctgtgggcttcctcttctgggtgatagtgctcacctcctggatcaccatcttccagatctaccggccccgctggggtgcccttggggactacctctccttcaccatacccctgggcaccccctgacaacttctcctgggagccccttctcaaactcctaagacttgttttcatgtcccacgttctctgctgacatcccccaataaaggaccctaactttcgaaaaaaaaaaaaaaaaaaaaaaaaaaaaaaccggggggtttttttggggggggganaaaaggggtngaaanggcatgggatagggttccgggcccccgtttgtggtcgcagggggaaactgggagagccccccagaggagggcggataattcgaaagccggggttcgatatctctcctctacacaaganaaagaaggagagacgaggagggcgacacgtgtaacacgcgggcgaagacgaggagaagagatggatcaacgaaagaggccggacacggaggctagaaaagaaaagacaaagagaaaagaggagaacaggcacagagaagacgcgcagaggcgagggg

SEQ ID NO: 371467 - DNA, 1058 bp, Homo sapiens
tgcgtgcagtgttgcctcgcccaaagaagactacaatctccagggaaacctggggcgtctcgcgcaaacgtccataactgaaagtagctaaggcaccccagccggaggaagtgagctctcctggggcgtggttgttcgtgatccttgcatctgttacttagggtcaaggcttgggtcttgccccgcagacccttgggacgacccggccccagcgcagctatgaacctggagcgagtgtccaatgaggagaaattgaacctgtgccggaagtactacctgggggggtttgctttcctgccttttctctggttggtcaacatcttctggttcttccgagaggccttccttgtcccagcctacacagaacagagccaaatcaaaggctatgtctggcgctcagctgtgggcttcctcttctgggtgatagtgctcacctcctggatcaccatcttccagatctaccggccccgctggggtgcccttggggactacctctccttcaccatacccctgggcaccccctgacaacttctgcacatactggggccctgcttattctctcctgggagccccttctcaaactcctaagacttgttttcatgtcccacgttctctgctgacatcccccaataaaggaccctaactttcgatactgacttcctgggatcttttagaggttgaggcataaatgattattaatatttaaaaacatctgttgagagctttgtacgaggcttagtatttagacatgatgtacattttttacagtgcatactactcataatcttctgaactaggaactttcctgctcaggaaactattagatgagaaactaagaaaggaatagtgcttccatttctttttcttttttcttttttttttttttttttgagacagagtcttgctctgtcagccaggctggagtgcagtggtaggatcggcctagtgcttccatttctaggggctgttatcctgtactggtagtcgtgaattcaaaaatataactttcctactgtgggctgcagtattctcatcagaagtgtagatcacgatgctac

SEQ ID NO: 371468 - DNA, 1050 bp, Homo sapiens
tgcgtgcagtgttgcctcgcccaaagaagactacaatctccagggaaacctggggcgtctcgcgcaaacgtccataactgaaagtagctaaggcaccccagccggaggaagtgagctctcctggggcgtggttgttcgtgatccttgcatctgttacttagggtcaaggcttgggtcttgccccgcagacccttgggacgacccggccccagcgcagctatgaacctggagcgagtgtccaatgaggagaaattgaacctgtgccggaagtactacctgggggggtttgctttcctgccttttctctggttggtcaacatcttctggttcttccgagaggccttcatgtctggcgctcagctgtgggcttcctcttctgggtgatagtgctcacctcctggatcaccatcttccagatctaccggccccgctggggtgcccttggggactacctctccttcaccatacccctgggcaccccctgacaacttctgcacatactggggccctgcttattctcccaggacaggctccttaaagcagaggagcctgtcctgggagccccttctcaaactcctaagacttgttttcatgtcccacgttctctgctgacatcccccaataaaggaccctaactttcgatactgacttcctgggatcttttagaggttgaggcataaatgattattaatatttaaaaacatctgttgagagctttgtacgaggcttagtatttagacatgatgtacattttttacagtgcatactactcataatcttctgaactaggaactttcctgctcaggaaactattagatgagaaactaagaaaggaatagtgcttccatttctttttcttttttcttttttttttttttttttgagacagagtcttgctctgtcagccaggctggagtgcagtggtaggatcggcctagtgcttccatttctaggggctgttatcctgtactggtagtcgtgaattcaaaaatataactttcctactgtgggctgcagtattctcatcagaagtgtagatcacgatgctac

SEQ ID NO: 371469 - DNA, 1024 bp, Homo sapiens
tgcgtgcagtgttgcctcgcccaaagaagactacaatctccagggaaacctggggcgtctcgcgcaaacgtccataactgaaagtagctaaggcaccccagccggaggaagtgagctctcctggggcgtggttgttcgtgatccttgcatctgttacttagggtcaaggcttgggtcttgccccgcagacccttgggacgacccggccccagcgcagctatgaacctggagcgagtgtccaatgaggagaaattgaacctgtgccggaagtactacctgggggggtttgctttcctgccttttctctggttggtcaacatcttctggttcttccgagaggccttccttgtcccagcctacacagaacagagccaaatcaaaggctatgtctggcgctcagctgtgggcttcctcttctgggtgatagtgctcacctcctggatcaccatcttccagatctaccggctgcacatactggggccctgcttattctcccaggacaggctccttaaagcagaggagcctgtcctgggagccccttctcaaactcctaagacttgttttcatgtcccacgttctctgctgacatcccccaataaaggaccctaactttcgatactgacttcctgggatcttttagaggttgaggcataaatgattattaatatttaaaaacatctgttgagagctttgtacgaggcttagtatttagacatgatgtacattttttacagtgcatactactcataatcttctgaactaggaactttcctgctcaggaaactattagatgagaaactaagaaaggaatagtgcttccatttctttttcttttttcttttttttttttttttttgagacagagtcttgctctgtcagccaggctggagtgcagtggtaggatcggcctagtgcttccatttctaggggctgttatcctgtactggtagtcgtgaattcaaaaatataactttcctactgtgggctgcagtattctcatcagaagtgtagatcacgatgctac

SEQ ID NO: 371470 - DNA, 1687 bp, Homo sapiens
gctggacacaaccaaaggcggaggacccgtggcccacgaagctcatctttgaactgtccccgccttctcccgccttgacttgtgaccctaggccctttggggcgcctctgacccagctagccagatcccggacccaaaccatgttccctgtgaaggtgaaagtggagaaatcagagctggagatggccaaagcccggaaccaactggatgctgtcttgcagtgtctgctggagaagagtcacatggacagggagcgtctggatgaggaagctgggaaaacaccctcagacacccacaataaggactgctccatcgcagccactggcaaaaggccatctgcccgcttcccccaccagcggaggaagaagaggagggagatggatgatgggctggctgagggagggccgcagcgatccaacacatatgtgatcaagctgttcgaccggagcgtggacttggcccagttcagcgagaacacgccactgtacccaatctgccgcgcctggatgcgcaacagcccctctgtgcgcgagcgtgaatgctctcccagctcacccctgcccccgctgcctgaggatgaggaggtgggatgggtagtgggtcccagcccagcagcctggtgccagggcagtgggtggataggctcaaaggatcctgcccctaagctagtgggatagacagacacaggtccctcacgtgaatcctggatcaggctaggcacacagatgtgcactcttaggttggggtgtggatcagagtccctagggaagacatacgtaaccacctggcctgggagacagggaacagggttaccctggacagttagatgtggacctccaagatcaggggttcccaagagccgaggggctagacaagggtccttagtacagacagaagtggccaccaggccttgaggagcaggggctgggcaggaatggatgggagtctataagccatctgacccagcggggtagacaagggtccccaggacagacatataggacccttcagacatataggactgtcagaaatggacagagcttcctaggtggcacagacgtgaccccctagacaggattccctgaggcaggcagacgcgactccctgggctgacaggtgtagatggagtctctgggctggataggagaagacaggggtccctggggcaggcacacttgacccgctggctggttgaggtgtctgcccttcatacatgcctcctgtctgagtcccttagcgagcccctcatgccatttgttgctgggaaaggcaggagggatgaatgtggattcccagcccctctgctttgactctcttgggcctggcatggggcccttgtgtccccagggctcagaggtaaccaacagcaagagtcgtgatgtgtacaagctgccgccacccacacccccggggccacccggagatgcctgcagatcccgcatcccatctccactgcagcctgagatgcagggcacccctgacgatgagccctctgagcccgagccctcaccctccacactcatctatcgcaacatgcagcgctggaaacgcatccgccagaggtggaaggaggcctctcatcggaaccagcttcgttactcagaaagcatgaagatcctacgagagatgtacgaacgacagtgatgttcccaggtccccccacaccagtaaacatcccccagctcca

SEQ ID NO: 371471 - DNA, 935 bp, Homo sapiens
tgcgtgcagtgttgcctcgcccaaagaagactacaatctccagggaaacctggggcgtctcgcgcaaacgtccataactgaaagtagctaaggcaccccagccggaggaagtgagctctcctggggcgtggttgttcgtgatccttgcatctgttacttagggtcaaggcttgggtcttgccccgcagacccttgggacgacccggccccagcgcagctatgaacctggagcgagtgtccaatgaggagaaattgaacctgtgccggaagtactacctgggggggtttgctttcctgccttttctctggttggtcaacatcttctggttcttccgagaggccttccttgtcccagcctacacagaacagagccaaatcaaaggctatgtctggcgctcagctgtgggcttcctcttctgggtgatagtgctcacctctcctgggagccccttctcaaactcctaagacttgttttcatgtcccacgttctctgctgacatcccccaataaaggaccctaactttcgatactgacttcctgggatcttttagaggttgaggcataaatgattattaatatttaaaaacatctgttgagagctttgtacgaggcttagtatttagacatgatgtacattttttacagtgcatactactcataatcttctgaactaggaactttcctgctcaggaaactattagatgagaaactaagaaaggaatagtgcttccatttctttttcttttttcttttttttttttttttttgagacagagtcttgctctgtcagccaggctggagtgcagtggtaggatcggcctagtgcttccatttctaggggctgttatcctgtactggtagtcgtgaattcaaaaatataactttcctactgtgggctgcagtattctcatcagaagtgtagatcacgatgctac

SEQ ID NO: 371472 - DNA, 1289 bp, Homo sapiens
tgcgtgcagtgttgcctcgcccaaagaagactacaatctccagggaaacctggggcgtctcgcgcaaacgtccataactgaaagtagctaaggcaccccagccggaggaagtgagctctcctggggcgtggttgttcgtgatccttgcatctgttacttagggtcaaggcttgggtcttgccccgcagacccttgggacgacccggccccagcgcagctatgaacctggagcgagtgtccaatgaggagaaattgaacctgtgccggaagtactacctgggggggtttgctttcctgccttttctctggttggtcaacatcttctggttcttccgagaggccttccttgtcccagcctacacagaacagagccaaatcaaaggctagctggagatggccaaagcccggaaccaactggatgctgtcttgcagtgtctgctggagaagagtcacatggacagggagcgtctggatgaggaagctgggaaaacaccctcagacacccacaataaggactgctccatcgcagccactggcaaaagggtaaggtggcagggtcccagccagctgactagaggctcccagctcctaccccagtcctgacactccctctccctacgcaggccatctgcccgcttcccccaccagcggaggaagaagaggagggagatggatgatgggctggctgagggagggccgcagcgatccaacacatatgtgatcaagctgttcgaccggagcgtggacttggcccagttcagcgagaacacgccactgtacccaatctgccgcgcctggatgcgcaacagcccctctgtgcgcgagcgtgaatgctctcccagctcacccctgcccccgctgcctgaggatgaggagggctcagaggtaaccaacagcaagagtcgtgatgtgtacaagctgccgccacccacacccccggggccacccggagatgcctgcagatcccgcatcccatctccactgcagcctgagatgcagggcacccctgacgatgagccctctgagcccgagccctcaccctccacactcatctatcgcaacatgcagcgctggaaacgcatccgccagaggtgagcgtcccccagcctgcttgcccctcgtagggccctttgcaactgctgagtctcccctctgcctccccaggtggaaggaggcctctcatcggaaccagcttcgttactcagaaagcatgaagatcctacgagagatgtacgaacgacagtgatgttcccaggtccccccacaccagtaaacatcccccagctcca

SEQ ID NO: 371473 - DNA, 960 bp, Homo sapiens
tgcgtgcagtgttgcctcgcccaaagaagactacaatctccagggaaacctggggcgtctcgcgcaaacgtccataactgaaagtagctaaggcaccccagccggaggaagtgagctctcctggggcgtggttgttcgtgatccttgcatctgttacttagggtcaaggcttgggtcttgccccgcagacccttgggacgacccggccccagcgcagctatgaacctggagcgagtgtccaatgaggagaaattgaacctgtgccggaagtactacctgggggggtttgctttcctgccttttctctggttggtcaacatcttctggttcttccgagaggccttccttgtcccagcctacacagaacagagccaaatcaaaggctagctggagatggccaaagcccggaaccaactggatgctgtcttgcagtgtctgctggagaagagtcacatggacagggagcgtctggatgaggaagctgggaaaacaccctcagacacccacaataaggactgctccatcgcagccactggcaaaaggccatctgcccgcttcccccaccagcggaggaagaagaggagggagatggatgatgggctggctgagggagggccgcagcgatccaacacatatgtgatcaagctgttcgaccggagcgtggacttggcccagttcagcgagaacacgccactgtacccaatctgccgcgcctggatgcgcaacagcccctctgtgcgcgagcgtgaatgctctcccagccctctgagcccgagccctcaccctccacactcatctatcgcaacatgcagcgctggaaacgcatccgccagaggtggaaggaggcctctcatcggaaccagcttcgttactcagaaagcatgaagatcctacgagagatgtacgaacgacagtgatgttcccaggtccccccacaccagtaaacatcccccagctcca

SEQ ID NO: 371474 - DNA, 924 bp, Homo sapiens
gctggacacaaccaaaggcggaggacccgtggcccacgaagctcatctttgaactgtccccgccttctcccgccttgacttgtgaccctaggccctttggggcgcctctgacccagctagccagatcccggacccaaaccatgttccctgtgaaggtgaaagtggagaaatcagagctggagatggccaaagcccggaaccaactggatgctgtcttgcagtgtctgctggagaagagtcacatggacagggagcgtctggatgaggaagctgggaaaacaccctcagacacccacaataaggactgctccatcgcagccactggcaaaaggccatctgcccgcttcccccaccagcggaggaagaagaggagggagatggatgatgggctggctgagggagggccgcagcgatccaacacatatgtgatcaagctgttcgaccggagcgtggacttggcccagttcagcgagaacacgccactgtacccaatctgccgcgcctggatgcgcaacagcccctctgtgcgcgagcgtgaatgctctcccagctcacccctgcccccgctgcctgaggatgaggagggctcagaggtaaccaacagcaagagtcgtgatgtgtacaagctgccgccacccacacccccggggccacccggagatgcctgcagatcccgcatcccatctccactgcagcctgagatgcagggcacccctgacgatgagccctctgagcccgagccctcaccctccacactcatctatcgcaacatgcagcgctggaaacgcatccgccagaggtggaaggaggcctctcatcggaaccagcttcgttactcagaaagcatgaagatcctacgagagatgtacgaacgacagtgatgttcccaggtccccccacaccagtaaacatcccccagctcca

SEQ ID NO: 371475 - DNA, 921 bp, Homo sapiens
tgcgtgcagtgttgcctcgcccaaagaagactacaatctccagggaaacctggggcgtctcgcgcaaacgtccataactgaaagtagctaaggcaccccagccggaggaagtgagctctcctggggcgtggttgttcgtgatccttgcatctgttacttagggtcaaggcttgggtcttgccccgcagacccttgggacgacccggccccagcgcagctatgaacctggagcgagtgtccaatgaggagaaattgaacctgtgccggaagtactacctgggggggtttgctttcctgccttttctctggttggtcaacatcttctggttcttccgagaggccttccttgtcccagcctacacagaacagagccaaatcaaaggctatgtctggcgctcagctgtgggcttcctcttctgggtgatagtgctcacctcctggatcaccatcttccagatctaccggccccgctggggtgcccttggggactacctctccttcaccatacccctgggcaccccctgacaacttctgcacatactggggccctgcttattctcccaggacaggctccttaaagcagaggagcctgtcctgggagccccttctcaaactcctaagacttgttttcatgtcccacgttctctgctgacatcccccaataaaggaccctaactttcgaaaaaaaaaaaaaagaacaacgaacaaagaaaaaaaaacaccgccggcgggaccttaatatcgcggcggggggcaaaaagagcgcgtcttaaatgtggcaccatgtgccagaaggtggctcccgtgagccccacgttttgtgaccacacgggggaaaaaccggccgggggcccccataaagggggcgcggaaaaagttctgaaacgccggtaccgtgtctccacgacacatagcgaacat

SEQ ID NO: 371476 - DNA, 2372 bp, Homo sapiens
gctggacacaaccaaaggcggaggacccgtggcccacgaagctcatctttgaactgtccccgccttctcccgccttgacttgtgaccctaggccctttggggcgcctctgacccagctagccagatcccggacccaaaccatgttccctgtgaaggtgaaagtggagaaatcagagctggagatggccaaagcccggaaccaactggatgctgtcttgcagtgtctgctggagaagagtcacatggacagggagcgtctggatgaggaagctgggaaaacaccctcagacacccacaataaggactgctccatcgcagccactggcaaaaggccatctgcccgcttcccccaccagcggaggaagaagaggagggagatggatgatgggctggctgagggagggccgcagcgatccaacacatatgtgatcaagctgttcgaccggagcgtggacttggcccagttcagcgagaacacgccactgtacccaatctgccgcgcctggatgcgcaacagcccctctgtgcgcgagcgtgaatgctctcccagctcacccctgcccccgctgcctgaggatgaggaggtgggatgggtagtgggtcccagcccagcagcctggtgccagggcagtgggtggataggctcaaaggatcctgcccctaagctagtgggatagacagacacaggtccctcacgtgaatcctggatcaggctaggcacacagatgtgcactcttaggttggggtgtggatcagagtccctagggaagacatacgtaaccacctggcctgggagacagggaacagggttaccctggacagttagatgtggacctccaagatcaggggttcccaagagccgaggggctagacaagggtccttagtacagacagaagtggccaccaggccttgaggagcaggggctgggcaggaatggatgggagtctataagccatctgacccagcggggtagacaagggtccccaggacagacatataggacccttcagacatataggactgtcagaaatggacagagcttcctaggtggcacagacgtgaccccctagacaggattccctgaggcaggcagacgcgactccctgggctgacaggtgtagatggagtctctgggctggataggagaagacaggggtccctggggcaggcacacttgacccgctggctggttgaggtgtctgcccttcatacatgcctcctgtctgagtcccttagcgagcccctcatgccatttgttgctgggaaaggcaggagggatgaatgtggattcccagcccctctgctttgactctcttgggcctggcatggggcccttgtgtccccagggctcagaggtaaccaacagcaagagtcgtgatgtgtacaagctgccgccacccacacccccggggccacccggagatgcctgcagatcccgcatcccatctccactgcagcctgagatgcagggcacccctgacgatgagccctctgagcccgagccctcaccctccacactcatctatcgcaacatgcagcgctggaaacgcatccgccagaggtggaaggaggcctctcatcggaaccagcttcgttactcagaaagcatgaagatcctacgagagatgtacgaacgacagtgatgttcccaggtccccccacaccagtaaacatcccccagctccaaaagaaaaaaagacacccaaaaccagaaacagacaagcacaaaacaacaacaacttctacaaaaacaaacaccacgaaccaccacacaaaacacaaactgggggggcggcaggcccggccccggacaaaagaggcgtttttcacagacaccacacctcgggtgggggccacagcgccaccccccgaacgttgaatcgatgagaaccacgacggcgcccacaaaccggacgctgtcccccaaccgacaaactcccgcgcgtcacacacaaaacagagggcggggcatcatccaccaccataaaaacaaaaaccacccgccgggagtaacacaaccacccgcgcccctgacagaacaccacacctacacaagagcggcgcctccaagacggcgcccacataacaaggggggagctcacacaaccagccaggggagggctcccacaaccggaagcggccggccgcaacacaaaaaacataatacgcgccgccgccgcggagggagggagaacaaccacgacagccaccaacaccgaccccagactccatgcaccaaccaccgacgcaacgacggcacgacacagacgacaacgacgcgagaccatatgcaccgacaaccagaccaccaacacgatcaacatcgagaactacaacagccacccagagtagcacacgacaaacagaaacc

SEQ ID NO: 371477 - DNA, 1156 bp, Homo sapiens
tgcgtgcagtgttgcctcgcccaaagaagactacaatctccagggaaacctggggcgtctcgcgcaaacgtccataactgaaagtagctaaggcaccccagccggaggaagtgagctctcctggggcgtggttgttcgtgatccttgcatctgttacttagggtcaaggcttgggtcttgccccgcagacccttgggacgacccggccccagcgcagctatgaacctggagcgagtgtccaatgaggagaaattgaacctgtgccggaagtactacctgggggggtttgctttcctgccttttctctggttggtcaacatcttctggttcttccgagaggccttccttgtcccagcctacacagaacagagccaaatcaaaggctagctggagatggccaaagcccggaaccaactggatgctgtcttgcagtgtctgctggagaagagtcacatggacagggagcgtctggatgaggaagctgggaaaacaccctcagacacccacaataaggactgctccatcgcagccactggcaaaagggtaaggtggcagggtcccagccagctgactagaggctcccagctcctaccccagtcctgacactccctctccctacgcaggccatctgcccgcttcccccaccagcggaggaagaagaggagggagatggatgatgggctggctgagggagggccgcagcgatccaacacatatgtgatcaagctgttcgaccggagcgtggacttggcccagttcagcgagaacacgccactgtacccaatctgccgcgcctggatgcgcaacagcccctctggctcagaggtaaccaacagcaagagtcgtgatgtgtacaagctgccgccacccacacccccggggccacccggagatgcctgcagatcccgcatcccatctccactgcagcctgagatgcagggcacccctgacgatgagccctctgagcccgagccctcaccctccacactcatctatcgcaacatgcagcgctggaaacgcatccgccagaggtggaaggaggcctctcatcggaaccagcttcgttactcagaaagcatgaagatcctacgagagatgtacgaacgacagtgatgttcccaggtccccccacaccagtaaacatcccccagctcca

SEQ ID NO: 371478 - DNA, 1149 bp, Homo sapiens
tgcgtgcagtgttgcctcgcccaaagaagactacaatctccagggaaacctggggcgtctcgcgcaaacgtccataactgaaagtagctaaggcaccccagccggaggaagtgagctctcctggggcgtggttgttcgtgatccttgcatctgttacttagggtcaaggcttgggtcttgccccgcagacccttgggacgacccggccccagcgcagctatgaacctggagcgagtgtccaatgaggagaaattgaacctgtgccggaagtactacctgggggggtttgctttcctgccttttctctggttggtcaacatcttctggttcttccgagaggccttccttgtcccagcctacacagaacagagccaaatcaaaggctagctggagatggccaaagcccggaaccaactggatgctgtcttgcagtgtctgctggagaagagtcacatggacagggagcgtctggatgaggaagctgggaaaacaccctcagacacccacaataaggactgctccatcgcagccactggcaaaagggtaaggtggcagggtcccagccagctgactagaggctcccagctcctaccccagtcctgacactccctctccctacgcaggccatctgcccgcttcccccaccagcggaggaagaagaggagggagatggatgatgggctggctgagggagggccgcagcgatccaacacatatgtgatcaagctgttcgaccggagcgtggacttggcccagttcagcgagaacacgccactgtacccaatctgccgcgcctggatgcgcaacagcccctctgtgcgcgagcgtgaatgctctcccagctcacccctgcccccgctgcctgaggatgaggagcacccggagatgcctgcagatcccgcatcccatctccactgcagcctgagatgcagggcacccctgacgatgagccctctgagcccgagccctcaccctccacactcatctatcgcaacatgcagcgctggaaacgcatccgccagaggtggaaggaggcctctcatcggaaccagcttcgttactcagaaagcatgaagatcctacgagagatgtacgaacgacagtgatgttcccaggtccccccacaccagtaaacatcccccagctcca

SEQ ID NO: 371479 - DNA, 288 bp, Homo sapiens
cggcacgaggggctggaacaaggtagctcagctacgcgttctaagtgccatcacacgcaaattcaagctagagccatctgtgagcctggtaaacgtgctagattgctgccctccccagctgacgggcgcggacctctactctctctgcttctaagagaaaggcccatctactcaggaagagggccagggccttgggttctggggattgggccctgagagggctagttctgtggctgaaaataaagcatgtcccgccccctactggtgttgtggcatgaaaggttggag

SEQ ID NO: 371480 - DNA, 3386 bp, Homo sapiens
gcggaagcggccctcgcgcacactagtcgtctggctctctggctccggaagctgcgctccttcaccctcctcgttggtgtcctgtcaccatggcgctggctgtcttgcgggtcctggagccctttccgaccgagacacccccgttggcagtgctgctgccacccgggggcccgtggccggcggcggagctgggcctggtgctggccctgaggcctgcaggggagagcccggcagggccggcgctgctggtggcagccctggaggggccggacgcgggcaccgaagagcagggtcccgggccgccgcagctactggttagccgcgcgctgctgcggctcctggcactgggctccggggcctgggtgcgggcgcgggcggtgcggcggcccccggcgctaggttgggcactgcttggcacctcgctggggcctgggctcggaccgcgagtcgggccgctgctggtgaggcgcggagagaccctcccagtgcccggaccgcgggtgctggagacgcggccggcgttgcaagggctgctgggcccagggactcggctggctgtgactgagctccgcgggcgggccagactgtgtccagagtctggggacagcagtcggcccccacccccgcccgtggtgtcctcctttgcggtttctggcacagtgcggcgactccagggagttctgggagggactggagattcactaggggtgagccggagctgtctccgtggccttggcctcttccagggcgaatgggtgtgggtggcccaggccagagagtcatcgaacacttcacagccgcacttggctagggtgcaggtcctagaacctcgctgggacctctctgatagactgggacccggctctggaccgctgggagagcccctcgctgacggactggcgcttgtccctgccactttggcttttaatcttggctgtgaccccctggaaatgggagagctcagaattcagaggtacttggaaggctccatcgcccctgaagacaaaggaagctgctcattgctgcctgggcctccatttgccagagagttacacatcgaaattgtgtcttctccccactacagcactaatggaaattatgacggtgttctttaccggcactttcagatacccagggtagtccaggaaggggatgttctatgtgtgccaacaattgggcaagtagagatcctggaaggaagtccagagaaactgcccaggtggcgggaaatgttttttaaagtgaagaaaacagttggggaagctccagatggaccagccagtgcctacttggccgacaccacccatacctccttgtacatggtgggttctaccctgagccctgttccatggctcccttcagaggaatccactctctggagcagtttgtctcctccaggcctggaggccttggtgtctgaactctgtgctgtcctgaagcctcgcctccagccagggggtgccctgctgacaggaactagcagtgtccttctacggggccccccaggctgtgggaagaccacagtagttgctgctgcctgtagtcaccttgggctccacttactgaaggtgccctgctccagcctctgtgcagaaagtagtggggctgtggagacaaaactgcaggccatcttctcccgggcccgccgttgccggcctgcagtcctgttgctcacagctgtggaccttctgggccgggaccgtgatgggctgggtgaggatgcccgtgtgatggctgtgctgcgtcacctcctcctcaatgaggaccccctcaacagctgccctcccctcatggttgtggccaccacaagccgggcccaggacctgcctgctgatgtgcagacagcatttcctcatgagctcgaggtgcctgctctgtcagaggggcagcggctcagcatcctgcgggccctcactgcccaccttcccctgggccaggaggtgaacttggcacagctagcacggcggtgtgcaggctttgtggtaggggatctctatgcccttctgacccacagcagccgggcagcctgcaccaggatcaagaactcaggtttggcaggtggcttgactgaggaggatgagggggagctgtgtgctgccggctttcctctcctggctgaggactttgggcaggcactggagcaactgcagacagctcactcccaggccgttggagcccccaagatcccctcagtgtcctggcatgatgtgggtgggctgcaggaggtgaagaaggagatcctggagaccattcagctccccctggagcaccctgagctactgagcctgggcctgagacgctcaggccttctgctccatgggccccctggcaccggcaagacccttctggccaaggcagtagccactgagtgcagccttaccttcctcagcgtgaaggggccagagctcattaacatgtatgtgggccaaagtgaggagaatgtgcgggaagtgtttgccagggccagggctgcagctccatgcattatcttctttgatgaactggactctttggccccaagccgggggcgaagtggagattctggaggagtgatggacagggtggtgtctcagctccttgccgagctagatgggctgcacagcactcaggatgtgtttgtgattggagccaccaacagaccagatctcctggaccctgcccttctgcggcctggcagatttgacaagctggtgtttgtgggggcaaatgaggaccgggcctcccagctacgcgttctaagtgccatcacacgcaaattcaagctagagccatctgtgagcctggtaaacgtgctagattgctgccctccccagctgacgggcgcggacctctactctctctgctctgatgctatgacagctgccctcaaacgcagggttcatgacctggaggaagggctggaacaaggtagctcagcactgatgctcaccatggaggacttgctgcaggctgccgcccggctgcaaccctcagtcagtgagcaggagctgctccggtacaagcgcatccagcgcaagtttgctgcctgctaggagccccccagggtctgggaccccgctcagcatggctgcaggtaccttgatagcccacagagagatctgggaaggaagggctcctcctcaggctgctgccaacccacctggaggccacctccctccaggagatcccagggtgcaaagtggcattgagacagcagcaacagctcaagagatatctcctgcctacttgcccctccttccaggccggctctaagagaaaggcccatctactcaggaagagggccagggccttgggttctggggattgggccctgagagggctagttctgtggctgaaaataaagcatgtcccgccccctactggtgttgtggcatgaaaggttggag

SEQ ID NO: 371481 - DNA, 3302 bp, Homo sapiens
gcggaagcggccctcgcgcacactagtcgtctggctctctggctccggaagctgcgctccttcaccctcctcgttggtgtcctgtcaccatggcgctggctgtcttgcgggtcctggagccctttccgaccgagacacccccgttggcagtgctgctgccacccgggggcccgtggccggcggcggagctgggcctggtgctggccctgaggcctgcaggggagagcccggcagggccggcgctgctggtggcagccctggaggggccggacgcgggcaccgaagagcagggtcccgggccgccgcagctactggttagccgcgcgctgctgcggctcctggcactgggctccggggcctgggtgcgggcgcgggcggtgcggcggcccccggcgctaggttgggcactgcttggcacctcgctggggcctgggctcggaccgcgagtcgggccgctgctggtgaggcgcggagagaccctcccagtgcccggaccgcgggtgctggagacgcggccggcgttgcaagggctgctgggcccagggactcggctggctgtgactgagctccgcgggcgggccagactgtgtccagagtctggggacagcagtcggcccccacccccgcccgtggtgtcctcctttgcggtttctggcacagtgcggcgactccagggagttctgggagggactggagattcactaggggtgagccggagctgtctccgtggccttggcctcttccagggcgaatgggtgtgggtggcccaggccagagagtcatcgaacacttcacagccgcacttggctagggtgcaggtcctagaacctcgctgggacctctctgatagactgggacccggctctggaccgctgggagagcccctcgctgacggactggcgcttgtccctgccactttggcttttaatcttggctgtgaccccctggaaatgggagagctcagaattcagaggtacttggaaggctccatcgcccctgaagacaaaggaagctgctcattgctgcctgggcctccatttgccagagagttacacatcgaaattgtgtcttctccccactacagcactaatggaaattatgacggtgttctttaccggcactttcagatacccaggtggcgggaaatgttttttaaagtgaagaaaacagttggggaagctccagatggaccagccagtgcctacttggccgacaccacccatacctccttgtacatggtgggttctaccctgagccctgttccatggctcccttcagaggaatccactctctggagcagtttgtctcctccaggcctggaggccttggtgtctgaactctgtgctgtcctgaagcctcgcctccagccagggggtgccctgctgacaggaactagcagtgtccttctacggggccccccaggctgtgggaagaccacagtagttgctgctgcctgtagtcaccttgggctccacttactgaaggtgccctgctccagcctctgtgcagaaagtagtggggctgtggagacaaaactgcaggccatcttctcccgggcccgccgttgccggcctgcagtcctgttgctcacagctgtggaccttctgggccgggaccgtgatgggctgggtgaggatgcccgtgtgatggctgtgctgcgtcacctcctcctcaatgaggaccccctcaacagctgccctcccctcatggttgtggccaccacaagccgggcccaggacctgcctgctgatgtgcagacagcatttcctcatgagctcgaggtgcctgctctgtcagaggggcagcggctcagcatcctgcgggccctcactgcccaccttcccctgggccaggaggtgaacttggcacagctagcacggcggtgtgcaggctttgtggtaggggatctctatgcccttctgacccacagcagccgggcagcctgcaccaggatcaagaactcaggtttggcaggtggcttgactgaggaggatgagggggagctgtgtgctgccggctttcctctcctggctgaggactttgggcaggcactggagcaactgcagacagctcactcccaggccgttggagcccccaagatcccctcagtgtcctggcatgatgtgggtgggctgcaggaggtgaagaaggagatcctggagaccattcagctccccctggagcaccctgagctactgagcctgggcctgagacgctcaggccttctgctccatgggccccctggcaccggcaagacccttctggccaaggcagtagccactgagtgcagccttaccttcctcagcgtgaaggggccagagctcattaacatgtatgtgggccaaagtgaggagaatgtgcgggaagtgtttgccagggccagggctgcagctccatgcattatcttctttgatgaactggactctttggccccaagccgggggcgaagtggagattctggaggagtgatggacagggtggtgtctcagctccttgccgagctagatgggctgcacagcactcaggatgtgtttgtgattggagccaccaacagaccagatctcctggaccctgcccttctgcggcctggcagatttgacaagctggtgtttgtgggggcaaatgaggaccgggcctcccagctacgcgttctaagtgccatcacacgcaaattcaagctagagccatctgtgagcctggtaaacgtgctagattgctgccctccccagctgacgggcgcggacctctactctctctgctctgatgctatgacagctgccctcaaacgcagggttcatgacctggaggaagggctggaacaaggtagctcagcactgatgctcaccatggaggacttgctgcaggctgccgcccggctgcaaccctcagtcagtgagcaggagctgctccggtacaagcgcatccagcgcaagtttgctgcctgctaggagccccccagggtctgggaccccgctcagcatggctgcaggtaccttgatagcccacagagagatctgggaaggaagggctcctcctcaggctgctgccaacccacctggaggccacctccctccaggagatcccagggtgcaaagtggcattgagacagcagcaacagctcaagagatatctcctgcctacttgcccctccttccaggccggctctaagagaaaggcccatctactcaggaagagggccagggccttgggttctggggattgggccctgagagggctagttctgtggctgaaaataaagcatgtcccgccccctactggtgttgtggcatgaaaggttggag

SEQ ID NO: 371482 - DNA, 3640 bp, Homo sapiens
gcggaagcggccctcgcgcacactagtcgtctggctctctggctccggaagctgcgctccttcaccctcctcgttggtgtcctgtcaccatggcgctggctgtcttgcgggtcctggagccctttccgaccgagacacccccgttggcagtgctgctgccacccgggggcccgtggccggcggcggagctgggcctggtgctggccctgaggcctgcaggggagagcccggcagggccggcgctgctggtggcagccctggaggggccggacgcgggcaccgaagagcagggtcccgggccgccgcagctactggttagccgcgcgctgctgcggctcctggcactgggctccggggcctgggtgcgggcgcgggcggtgcggcggcccccggcgctaggttgggcactgcttggcacctcgctggggcctgggctcggaccgcgagtcgggccgctgctggtgaggcgcggagagaccctcccagtgcccggaccgcgggtgctggagacgcggccggcgttgcaagggctgctgggcccagggactcggctggctgtgactgagctccgcgggcgggccagactgtgtccagagtctggggacagcagtcggcccccacccccgcccgtggtgtcctcctttgcggtttctggcacagtgcggcgactccagggagttctgggagggactggagattcactaggggtgagccggagctgtctccgtggccttggcctcttccagggcgaatgggtgtgggtggcccaggccagagagtcatcgaacacttcacagccgcacttggctagggtgcaggtcctagaacctcgctgggacctctctgatagactgggacccggctctggaccgctgggagagcccctcgctgacggactggcgcttgtccctgccactttggcttttaatcttggctgtgaccccctggaaatgggagagctcagaattcagaggtacttggaaggctccatcgcccctgaagacaaaggaagctgctcattgctgcctgggcctccatttgccagagagttacacatcgaaattgtgtcttctccccactacagcactaatggaaattatgacggtgttctttaccggcactttcagatacccagggtagtccaggaaggggatgttctatgtgtgccaacaattgggcaagtagagatcctggaaggaagtccagagaaactgcccaggtggcgggaaatgttttttaaagtgaagaaaacagttggggaagctccagatggaccagccagtgcctacttggccgacaccacccatacctccttgtacatggtgggttctaccctgagccctgttccatggctcccttcagaggaatccactctctggagcagtttgtctcctccaggcctggaggccttggtgtctgaactctgtgctgtcctgaagcctcgcctccagccagggggtgccctgctgacaggaactagcagtgtccttctacggggccccccaggctgtgggaagaccacagtagttgctgctgcctgtagtcaccttgggctccacttactgaaggtgccctgctccagcctctgtgcagaaagtagtggggctgtggagacaaaactgcaggccatcttctcccgggcccgccgttgccggcctgcagtcctgttgctcacagctgtggaccttctgggccgggaccgtgatgggctgggtgaggatgcccgtgtgatggctgtgctgcgtcacctcctcctcaatgaggaccccctcaacagctgccctcccctcatggttgtggccaccacaagccgggcccaggacctgcctgctgatgtgcagacagcatttcctcatgagctcgaggtgcctgctctgtcagaggggcagcggctcagcatcctgcgggccctcactgcccaccttcccctgggccaggaggtgaacttggcacagctagcacggcggtgtgcaggctttgtggtaggggatctctatgcccttctgacccacagcagccgggcagcctgcaccaggatcaagaactcaggtttggcaggtggcttgactgaggaggatgagggggagctgtgtgctgccggctttcctctcctggctgaggactttgggcaggcactggagcaactgcagacagctcactcccaggccgttggagcccccaagatcccctcagtgtcctggcatgatgtgggtgggctgcaggaggtgaagaaggagatcctggagaccattcagctccccctggagcaccctgagctactgagcctgggcctgagacgctcaggccttctgctccatgggccccctggcaccggcaagacccttctggccaaggcagtagccactgagtgcagccttaccttcctcagcgtgaaggggccagagctcattaacatgtatgtgggccaaagtgaggagaatgtgcgggaaggtgagtgagcagggaggggcagggcgtcccatgcttcccaaaccccgatggcccccaagccaccccctactcccaggctactcatgatcattcctaatcctcctttctacaagtcaggttcctgcccagctgggtctagtacctgggatgccagtgctgtattgtcaggccccagtttccctccctgctctcacctaacttcaaccccccacaagccgagctttgccctcctgtgggcccctctctctcttcagtgtttgccagggccagggctgcagctccatgcattatcttctttgatgaactggactctttggccccaagccgggggcgaagtggagattctggaggagtgatggacagggtggtgtctcagctccttgccgagctagatgggctgcacagcactcaggatgtgtttgtgattggagccaccaacagaccagatctcctggaccctgcccttctgcggcctggcagatttgacaagctggtgtttgtgggggcaaatgaggaccgggcctcccagctacgcgttctaagtgccatcacacgcaaattcaagctagagccatctgtgagcctggtaaacgtgctagattgctgccctccccagctgacgggcgcggacctctactctctctgctctgatgctatgacagctgccctcaaacgcagggttcatgacctggaggaagggctggaacaaggtagctcagcactgatgctcaccatggaggacttgctgcaggctgccgcccggctgcaaccctcagtcagtgagcaggagctgctccggtacaagcgcatccagcgcaagtttgctgcctgctaggagccccccagggtctgggaccccgctcagcatggctgcaggtaccttgatagcccacagagagatctgggaaggaagggctcctcctcaggctgctgccaacccacctggaggccacctccctccaggagatcccagggtgcaaagtggcattgagacagcagcaacagctcaagagatatctcctgcctacttgcccctccttccaggccggctctaagagaaaggcccatctactcaggaagagggccagggccttgggttctggggattgggccctgagagggctagttctgtggctgaaaataaagcatgtcccgccccctactggtgttgtggcatgaaaggttggag

SEQ ID NO: 371483 - DNA, 3761 bp, Homo sapiens
gcggaagcggccctcgcgcacactagtcgtctggctctctggctccggaagctgcgctccttcaccctcctcgttggtgtcctgtcaccatggcgctggctgtcttgcgggtcctggagccctttccgaccgagacacccccgttggcagtgctgctgccacccgggggcccgtggccggcggcggagctgggcctggtgctggccctgaggcctgcaggggagagcccggcagggccggcgctgctggtggcagccctggaggggccggacgcgggcaccgaagagcagggtcccgggccgccgcagctactggttagccgcgcgctgctgcggctcctggcactgggctccggggcctgggtgcgggcgcgggcggtgcggcggcccccggcgctaggttgggcactgcttggcacctcgctggggcctgggctcggaccgcgagtcgggccgctgctggtgaggcgcggagagaccctcccagtgcccggaccgcgggtgctggagacgcggccggcgttgcaagggctgctgggcccagggactcggctggctgtgactgagctccgcgggcgggccagactgtgtccagagtctggggacagcagtcggcccccacccccgcccgtggtgtcctcctttgcggtttctggcacagtgcggcgactccagggagttctgggagggactggagattcactaggggtgagccggagctgtctccgtggccttggcctcttccagggcgaatgggtgtgggtggcccaggccagagagtcatcgaacacttcacagccgcacttggctagggtgcaggtcctagaacctcgctgggacctctctgatagactgggacccggctctggaccgctgggagagcccctcgctgacggactggcgcttgtccctgccactttggcttttaatcttggctgtgaccccctggaaatgggagagctcagaattcagaggtacttggaaggctccatcgcccctgaagacaaaggaagctgctcattgctgcctgggcctccatttgccagagagttacacatcgaaattgtgtcttctccccactacagcactaatggaaattatgacggtgttctttaccggcactttcagatacccagggtagtccaggaaggggatgttctatgtgtgccaacaattgggcaagtagagatcctggaaggaagtccagagaaactgcccaggtggcgggaaatgttttttaaagtgaagaaaacagttggggaagctccagatggaccagccagtgcctacttggccgacaccacccatacctccttgtacatggtgggttctaccctgagccctgttccatggctcccttcagaggaatccactctctggagcagtttgtctcctccaggcctggaggccttggtgtctgaactctgtgctgtcctgaagcctcgcctccagccagggggtgccctgctgacaggaactagcagtgtccttctacggggccccccaggctgtgggaagaccacagtagttgctgctgcctgtagtcaccttgggctccacttactgaaggtgagggtctctggagagtagaaccccagctacttcccctccccagctcatgttctccctctctgctgcttcctctcccctccctcctctgtctactcacaggccctagcacttcagcccagtgggtcaggcatattcccatgatgctgagctatggagaggtactttcaaggaggagggagttgcaagatattggtggacagtccagggaatgggatagggtaaaaaagaggtaggacttggccagggtaccttccctgtccctgccctccagagaaaaagatggcccacatcttccacctcctcctcccctgattctcctgcccttgtcatgctttccccttgctcacagacccattgggatcccctccccaggtgccctgctccagcctctgtgcagaaagtagtggggctgtggagacaaaactgcaggccatcttctcccgggcccgccgttgccggcctgcagtcctgttgctcacagctgtggaccttctgggccgggaccgtgatgggctgggtgaggatgcccgtgtgatggctgtgctgcgtcacctcctcctcaatgaggaccccctcaacagctgccctcccctcatggttgtggccaccacaagccgggcccaggacctgcctgctgatgtgcagacagcatttcctcatgagctcgaggtgcctgctctgtcagaggggcagcggctcagcatcctgcgggccctcactgcccaccttcccctgggccaggaggtgaacttggcacagctagcacggcggtgtgcaggctttgtggtaggggatctctatgcccttctgacccacagcagccgggcagcctgcaccaggatcaagaactcaggtttggcaggtggcttgactgaggaggatgagggggagctgtgtgctgccggctttcctctcctggctgaggactttgggcaggcactggagcaactgcagacagctcactcccaggccgttggagcccccaagatcccctcagtgtcctggcatgatgtgggtgggctgcaggaggtgaagaaggagatcctggagaccattcagctccccctggagcaccctgagctactgagcctgggcctgagacgctcaggccttctgctccatgggccccctggcaccggcaagacccttctggccaaggcagtagccactgagtgcagccttaccttcctcagcgtgaaggggccagagctcattaacatgtatgtgggccaaagtgaggagaatgtgcgggaagtgtttgccagggccagggctgcagctccatgcattatcttctttgatgaactggactctttggccccaagccgggggcgaagtggagattctggaggagtgatggacagggtggtgtctcagctccttgccgagctagatgggctgcacagcactcaggatgtgtttgtgattggagccaccaacagaccagatctcctggaccctgcccttctgcggcctggcagatttgacaagctggtgtttgtgggggcaaatgaggaccgggcctcccagctacgcgttctaagtgccatcacacgcaaattcaagctagagccatctgtgagcctggtaaacgtgctagattgctgccctccccagctgacgggcgcggacctctactctctctgctctgatgctatgacagctgccctcaaacgcagggttcatgacctggaggaagggctggaacaaggtagctcagcactgatgctcaccatggaggacttgctgcaggctgccgcccggctgcaaccctcagtcagtgagcaggagctgctccggtacaagcgcatccagcgcaagtttgctgcctgctaggagccccccagggtctgggaccccgctcagcatggctgcaggtaccttgatagcccacagagagatctgggaaggaagggctcctcctcaggctgctgccaacccacctggaggccacctccctccaggagatcccagggtgcaaagtggcattgagacagcagcaacagctcaagagatatctcctgcctacttgcccctccttccaggccggctctaagagaaaggcccatctactcaggaagagggccagggccttgggttctggggattgggccctgagagggctagttctgtggctgaaaataaagcatgtcccgccccctactggtgttgtggcatgaaaggttggag

SEQ ID NO: 371484 - DNA, 3308 bp, Homo sapiens
gcggaagcggccctcgcgcacactagtcgtctggctctctggctccggaagctgcgctccttcaccctcctcgttggtgtcctgtcaccatggcgctggctgtcttgcgggtcctggagccctttccgaccgagacacccccgttggcagtgctgctgccacccgggggcccgtggccggcggcggagctgggcctggtgctggccctgaggcctgcaggggagagcccggcagggccggcgctgctggtggcagccctggaggggccggacgcgggcaccgaagagcagggtcccgggccgccgcagctactggttagccgcgcgctgctgcggctcctggcactgggctccggggcctgggtgcgggcgcgggcggtgcggcggcccccggcgctaggttgggcactgcttggcacctcgctggggcctgggctcggaccgcgagtcgggccgctgctggtgaggcgcggagagaccctcccagtgcccggaccgcgggtgctggagacgcggccggcgttgcaagggctgctgggcccagggactcggctggctgtgactgagctccgcgggcgggccagactgtgtccagagtctggggacagcagtcggcccccacccccgcccgtggtgtcctcctttgcggtttctggcacagtgcggcgactccagggagttctgggagggactggagattcactaggggtgagccggagctgtctccgtggccttggcctcttccagggcgaatgggtgtgggtggcccaggccagagagtcatcgaacacttcacagccgcacttggctagggtgcaggtcctagaacctcgctgggacctctctgatagactgggacccggctctggaccgctgggagagcccctcgctgacggactggcgcttgtccctgccactttggcttttaatcttggctgtgaccccctggaaatgggagagctcagaattcagaggtacttggaaggctccatcgcccctgaagacaaaggaagctgctcattgctgcctgggcctccatttgccagagagttacacatcgaaattgtgtcttctccccactacagcactaatggaaattatgacggtgttctttaccggcactttcagatacccagggtagtccaggaaggggatgttctatgtgtgccaacaattgggcaagtagagatcctggaaggaagtccagagaaactgcccaggtggcgggaaatgttttttaaagtgaagaaaacagttggggaagctccagatggaccagccagtgcctacttggccgacaccacccatacctccttgtacatggtgggttctaccctgagccctgttccatggctcccttcagaggaatccactctctggagcagtttgtctcctccaggcctggaggccttggtgtctgaactctgtgctgtcctgaagcctcgcctccagccagggggtgccctgctgacaggaactagcagtgtccttctacggggccccccaggctgtgggaagaccacagtagttgctgctgcctgtagtcaccttgggctccacttactgaaggtgccctgctccagcctctgtgcagaaagtagtggggctgtggagacaaaactgcaggccatcttctcccgggcccgccgttgccggcctgcagtcctgttgctcacagctgtggaccttctgggccgggaccgtgatgggctgggtgaggatgcccgtgtgatggctgtgctgcgtcacctcctcctcaatgaggaccccctcaacagctgccctcccctcatggttgtggccaccacaagccgggcccaggacctgcctgctgatgtgcagacagcatttcctcatgagctcgaggtgcctgctctgtcagaggggcagcggctcagcatcctgcgggccctcactgcccaccttcccctgggccaggaggtgaacttggcacagctagcacggcggtgtgcaggctttgtggtaggggatctctatgcccttctgacccacagcagccgggcagcctgcaccaggatcaagaactcaggtttggcaggtggcttgactgaggaggatgagggggagctgtgtgctgccggctttcctctcctggctgaggactttgggcaggcactggagcaactgcagacagctcactcccaggccgttggagcccccaagatcccctcagtgtcctggcatgatgtgggtgggctgcaggaggtgaagaaggagatcctggagaccattcagctccccctggagcaccctgagctactgagcctgggcctgagacgctcaggccttctgctccatgggccccctggcaccggcaagacccttctggccaaggcagtagccactgagtgcagccttaccttcctcagcgtgaaggggccagagctcattaacatgtatgtgggccaaagtgaggagaatgtgcgggaagtgtttgccagggccagggctgcagctccatgcattatcttctttgatgaactggactctttggccccaagccgggggcgaagtggagattctggaggagtgatggacagggtggtgtctcagctccttgccgagctagatgggctgcacagcactcaggatgtgtttgtgattggagccaccaacagaccagatctcctggaccctgcccttctgcggcctggcagatttgacaagctggtgtttgtgggggcaaatgaggaccgggcctcccagctacgcgttctaagtgccatcacacgcaaattcaagctagagccatctgtgagcctggtaaacgtgctagattgctgccctccccagctgacgggcgcggacctctactctctctgctctgatgctatgacagctgccctcaaacgcagggttcatgacctggaggaagggctggaacaaggtagctcagcactgatgctcaccatggaggacttgctgcaggctgccgcccggctgcaaccctcagtcagtgagcaggagctgctccggtacaagcgcatccagcgcaagtttgctgcctgctaggagccccccagggtctgggaccccgctcagcatggctgcaggtaccttgatagcccacagagagatctgggaaggaagggctcctcctcaggctgctgccaacccacctggaggccacctccctccaggagatcccagggtgcaaagtggcattgagaaagagcagggttgtgggaggagtaagccctgggagagggtgggggggtgggcagcatgggagcctgatccttctgacataaataaacacaatgcatgcaggaactgaaaaagactata

SEQ ID NO: 371485 - DNA, 2358 bp, Homo sapiens
gcggaagcggccctcgcgcacactagtcgtctggctctctggctccggaagctgcgctccttcaccctcctcgttggtgtcctgtcaccatggcgctggctgtcttgcgggtcctggagccctttccgaccgagacacccccgttggcagtgctgctgccacccgggggcccgtggccggcggcggagctgggcctggtgctggccctgaggcctgcaggggagagcccggcagggccggcgctgctggtggcagccctggaggggccggacgcgggcaccgaagagcagggtcccgggccgccgcagctactggttagccgcgcgctgctgcggctcctggcactgggctccggggcctgggtgcgggcgcgggcggtgcggcggcccccggcgctaggttgggcactgcttggcacctcgctggggcctgggctcggaccgcgagtcgggccgctgctggtgaggcgcggagagaccctcccagtgcccggaccgcgggtgctggagacgcggccggcgttgcaagggctgctgggcccagggactcggctggctgtgactgagctccgcgggcgggccagactgtgtccagagtctggggacagcagtcggcccccacccccgcccgtggtgtcctcctttgcggtttctggcacagtgcggcgactccagggagttctgggagggactggagattcactaggggtgagccggagctgtctccgtggccttggcctcttccagggcgaatgggtgtgggtggcccaggccagagagtcatcgaacacttcacagccgcacttggctagggtgcaggtcctagaacctcgctgggacctctctgatagactgggacccggctctggaccgctgggagagcccctcgctgacggactggcgcttgtccctgccactttggcttttaatcttggctgtgaccccctggaaatgggagagctcagaattcagaggtacttggaaggctccatcgcccctgaagacaaaggaagctgctcattgctgcctgggcctccatttgccagagagttacacatcgaaattgtgtcttctccccactacagcactaatggaaattatgacggtgttctttaccggcactttcagatacccagggtagtccaggaaggggatgttctatgtgtgccaacaattgggcaagtagagatcctggaaggaagtccagagaaactgcccaggtggcgggaaatgttttttaaagtgaagaaaacagttggggaagctccagatggaccagccagtgcctacttggccgacaccacccatacctccttgtacatggtgggttctaccctgagccctgttccatggctcccttcagaggaatccactctctggagcagtttgtctcctccaggcctggaggccttggtgtctgaactctgtgctgtcctgaagcctcgcctccagccagggggtgccctgctgacaggaactagcagtgtccttctacggggccccccaggctgtgggaagaccacagtagttgctgctgcctgtagtcaccttgggctccacttactgaaggtgccctgctccagcctctgtgcagaaagtagtggggctgtggagacaaaactgcaggccatcttctcccgggcccgccgttgccggcctgcagtcctgttgctcacagctgtggaccttctgggccgggaccgtgatgggctgggtgaggatgcccgtgtgatggctgtgctgcgtcacctcctcctcaatgaggaccccctcaacagctgccctcccctcatggttgtggccaccacaagccgggcccaggacctgcctgctgatgtgcagacagcatttcctcatgagctcgaggtgcctgctctgtcagaggggcagcggctcagcatcctgcgggccctcactgcccaccttcccctgggccaggaggtgaacttggcacagctagcacggcggtgtgcagtgagtatcaagggagagtactggccctccctaggaggtccctggcttttgttacaagaactcagtcctgttgccttgtgagtgagagtagaaaacccagcgcgggcgccgtggctcacgcctgtaatcctagcactttgggaggccgaggtgggcggatcacctgaggttgggagtttgagaccagcctggccaacatggagaaaccccgtctctactaaaaatacaaagttagccaggtgtggtggcacatgcctgtaatcccagctacttgggaggctgaggtgagataatcgcttgaacccgggtggaagttgcggtgagccgagatcgcgccattgcactccagcctgagcaacaagagcaaaactccgtctcaaaaaaa

SEQ ID NO: 371486 - DNA, 780 bp, Homo sapiens
ccatacctccttgtacatggtgaggccccaaggatgggtgtagaccagcgcagggggtagaaacgatttttagaaacgaaagctttttattacctttcacaggtgggttctaccctgagccctgttccatggctcccttcagaggaatccactctctggagcagtttgtctcctccaggcctggaggccttggtgtctgaactctgtgctgtcctgaagcctcgcctccagccagggtgagtgaggtcatcaccccagggtgtgagaaaagcctgcttagaacatccctggaggagcagcagccagatgggtagttcctaatgaactggccagagtgggattgggaggaccttcctcaaaccagtatgtcctacacaaggccaccaggccactcctttctgtaagccaattcccaggctcctttcctgggataacctctgtcctccagggctggctctggaggaataatctccagcaggggcatctgtttctgagactgcccttccccttggggaactcactggccatcctgcactttactgccctggccctgaaggacacaactcctcataccagtggcccaggtgtggacgcagatccccacctcagtgccaccacaatgtctctcaataccattcagaccagtcataacgttgaggttttattggcagcacagcaatgccaaagggaattaattagtctttggctgttggatatgctggatgccccggccagagcaccgcaggtggtgtgggagacacagcctcactacatggggac

SEQ ID NO: 371487 - DNA, 292 bp, Homo sapiens
aaggccaccaggccactcctttctgtaagccaattcccaggctcctttcctgggataacctctgtcctccagggctggctctggaggaataatctccagcaggggcatctgtttctgagactgcccttccccttggggaactcactggccatcctgcactttactgccctggccctgaaggacacaactcctcataccagtggcccaggtgtggacgcagatccccacctcagtgccaccacaatgtctctcaataccattcagaccagtcataacgttgaggttttattgg

SEQ ID NO: 371488 - DNA, 3509 bp, Homo sapiens
gcggaagcggccctcgcgcacactagtcgtctggctctctggctccggaagctgcgctccttcaccctcctcgttggtgtcctgtcaccatggcgctggctgtcttgcgggtcctggagccctttccgaccgagacacccccgttggcagtgctgctgccacccgggggcccgtggccggcggcggagctgggcctggtgctggccctgaggcctgcaggggagagcccggcagggccggcgctgctggtggcagccctggaggggccggacgcgggcaccgaagagcagggtcccgggccgccgcagctactggttagccgcgcgctgctgcggctcctggcactgggctccggggcctgggtgcgggcgcgggcggtgcggcggcccccggcgctaggttgggcactgcttggcacctcgctggggcctgggctcggaccgcgagtcgggccgctgctggtgaggcgcggagagaccctcccagtgcccggaccgcgggtgctggagacgcggccggcgttgcaagggctgctgggcccagggactcggctggctgtgactgagctccgcgggcgggccagactgtgtccagagtctggggacagcagtcggcccccacccccgcccgtggtgtcctcctttgcggtttctggcacagtgcggcgactccagggagttctgggagggactggagattcactaggggtgagccggagctgtctccgtggccttggcctcttccagggcgaatgggtgtgggtggcccaggccagagagtcatcgaacacttcacagccgcacttggctagggtgcaggtcctagaacctcgctgggacctctctgatagactgggacccggctctggaccgctgggagagcccctcgctgacggactggcgcttgtccctgccactttggcttttaatcttggctgtgaccccctggaaatgggagagctcagaattcagaggtacttggaaggctccatcgcccctgaagacaaaggaagctgctcattgctgcctgggcctccatttgccagagagttacacatcgaaattgtgtcttctccccactacagcactaatggaaattatgacggtgttctttaccggcactttcagatacccagggtagtccaggaaggggatgttctatgtgtgccaacaattgggcaagtagagatcctggaaggaagtccagagaaactgcccaggtggcgggaaatgttttttaaagtgaagaaaacagttggggaagctccagatggaccagccagtgcctacttggccgacaccacccatacctccttgtacatggtgggttctaccctgagccctgttccatggctcccttcagaggaatccactctctggagcagtttgtctcctccaggcctggaggccttggtgtctgaactctgtgctgtcctgaagcctcgcctccagccagggggtgccctgctgacaggaactagcagtgtccttctacggggccccccaggctgtgggaagaccacagtagttgctgctgcctgtagtcaccttgggctccacttactgaaggtgccctgctccagcctctgtgcagaaagtagtggggctgtggagacaaaactgcaggccatcttctcccgggcccgccgttgccggcctgcagtcctgttgctcacagctgtggaccttctgggccgggaccgtgatgggctgggtgaggatgcccgtgtgatggctgtgctgcgtcacctcctcctcaatgaggaccccctcaacagctgccctcccctcatggttgtggccaccacaagccgggcccaggacctgcctgctgatgtgcagacagcatttcctcatgagctcgaggtgcctgctctgtcagaggggcagcggctcagcatcctgcgggccctcactgcccaccttcccctgggccaggaggtgaacttggcacagctagcacggcggtgtgcaggctttgtggtaggggatctctatgcccttctgacccacagcagccgggcagcctgcaccaggatcaagaactcaggtttggcaggtggcttgactgaggaggatgagggggagctgtgtgctgccggctttcctctcctggctgaggactttgggcaggcactggagcaactgcagacagctcactcccaggccgttggagcccccaagatcccctcagtgtcctggcatgatgtgggtgggctgcaggaggtgaagaaggagatcctggagaccattcagctccccctggagcaccctgagctactgagcctgggcctgagacgctcaggccttctgctccatgggccccctggcaccggcaagacccttctggccaaggcagtagccactgagtgcagccttaccttcctcagcgtgaaggggccagagctcattaacatgtatgtgggccaaagtgaggagaatgtgcgggaagtgtttgccagggccagggctgcagctccatgcattatcttctttgatgaactggactctttggccccaagccgggggcgaagtggagattctggaggagtgatggacagggtggtgtctcagctccttgccgagctagatgggctgcacagcactcaggatgtgtttgtgattggagccaccaacagaccagatctcctggaccctgcccttctgcggcctggcagatttgacaagctggtgtttgtgggggcaaatgaggaccgggcctcccagctacgcgttctaagtgccatcacacgcaaattcaagctagagccatctgtgagcctggtaaacgtgctagattgctgccctccccagctgacgggcgcggacctctactctctctgctctgatgctatgacagctgccctcaaacgcagggttcatgacctggaggaagggctggaacaaggtagctcagcactgatgctcaccatggaggacttgctgcaggctgccgcccggctgcaaccctcagtcagtgagcaggagctgctccggtacaagcgcatccagcgcaagtttgctgcctgctaggagccccccagggtctgggaccccgctcagcatggctgcaggtaccttgatagcccacagagagatctgggaaggaagggctcctcctcaggctgctgccaacccacctggaggccacctccctccaggagatcccagggtgcaaagtggcattgagacagcagcaacagctcaagagatatctcctgcctacttgcccctccttccaggccggctctaagagaaaggcccatctactcaggaagagggccagggccttgggttctggggattgggccctgagagggctagttctgtggctgaaaataaagcatgtcccgccccctactggtgttgtggcatgaaaggttggagtgagaaagagcagggttgtgggaggagtaagccctgggagagggtgggggggtgggcagcatgggagcctgatccttctgacataaataaacacaatgcatgcaggaactgaaaaagactata

SEQ ID NO: 371489 - DNA, 3182 bp, Homo sapiens
gcggaagcggccctcgcgcacactagtcgtctggctctctggctccggaagctgcgctccttcaccctcctcgttggtgtcctgtcaccatggcgctggctgtcttgcgggtcctggagccctttccgaccgagacacccccgttggcagtgctgctgccacccgggggcccgtggccggcggcggagctgggcctggtgctggccctgaggcctgcaggggagagcccggcagggccggcgctgctggtggcagccctggaggggccggacgcgggcaccgaagagcagggtcccgggccgccgcagctactggttagccgcgcgctgctgcggctcctggcactgggctccggggcctgggtgcgggcgcgggcggtgcggcggcccccggcgctaggttgggcactgcttggcacctcgctggggcctgggctcggaccgcgagtcgggccgctgctggtgaggcgcggagagaccctcccagtgcccggaccgcgggtgctggagacgcggccggcgttgcaagggctgctgggcccagggactcggctggctgtgactgagctccgcgggcgggccagactgtgtccagagtctggggacagcagtcggcccccacccccgcccgtggtgtcctcctttgcggtttctggcacagtgcggcgactccagggagttctgggagggactggagattcactaggggtgagccggagctgtctccgtggccttggcctcttccagggcgaatgggtgtgggtggcccaggccagagagtcatcgaacacttcacagccgcacttggctagggtgcaggtcctagaacctcgctgggacctctctgatagactgggacccggctctggaccgctgggagagcccctcgctgacggactggcgcttgtccctgccactttggcttttaatcttggctgtgaccccctggaaatgggagagctcagaattcagaggtacttggaaggctccatcgcccctgaagacaaaggaagctgctcattgctgcctgggcctccatttgccagagagttacacatcgaaattgtgtcttctccccactacagcactaatggaaattatgacggtgttctttaccggcactttcagatacccagggtagtccaggaaggggatgttctatgtgtgccaacaattgggcaagtagagatcctggaaggaagtccagagaaactgcccaggtggcgggaaatgttttttaaagtgaagaaaacagttggggaagctccagatggaccagccagtgcctacttggccgacaccacccatacctccttgtacatggtgggttctaccctgagccctgttccatggctcccttcagaggaatccactctctggagcagtttgtctcctccaggcctggaggccttggtgtctgaactctgtgctgtcctgaagcctcgcctccagccagggggtgccctgctgacaggaactagcagtgtccttctacggggccccccaggctgtgggaagaccacagtagttgctgctgcctgtagtcaccttgggctccacttactgaaggtgccctgctccagcctctgtgcagaaagtagtggggctgtggagacaaaactgcaggccatcttctcccgggcccgccgttgccggcctgcagtcctgttgctcacagctgtggaccttctgggccgggaccgtgatgggctgggtgaggatgcccgtgtgatggctgtgctgcgtcacctcctcctcaatgaggaccccctcaacagctgccctcccctcatggttgtggccaccacaagccgggcccaggacctgcctgctgatgtgcagacagcatttcctcatgagctcgaggtgcctgctctgtcagaggggcagcggctcagcatcctgcgggccctcactgcccaccttcccctgggccaggaggtgaacttggcacagctagcacggcggtgtgcaggctttgtggtaggggatctctatgcccttctgacccacagcagccgggcagcctgcaccaggatcaagaactcaggtttggcaggtggcttgactgaggaggatgagggggagctgtgtgctgccggctttcctctcctggctgaggactttgggcaggcactggagcaactgcagacagctcactcccaggccgttggagcccccaagatcccctcagtgtcctggcatgataacatgtatgtgggccaaagtgaggagaatgtgcgggaagtgtttgccagggccagggctgcagctccatgcattatcttctttgatgaactggactctttggccccaagccgggggcgaagtggagattctggaggagtgatggacagggtggtgtctcagctccttgccgagctagatgggctgcacagcactcaggatgtgtttgtgattggagccaccaacagaccagatctcctggaccctgcccttctgcggcctggcagatttgacaagctggtgtttgtgggggcaaatgaggaccgggcctcccagctacgcgttctaagtgccatcacacgcaaattcaagctagagccatctgtgagcctggtaaacgtgctagattgctgccctccccagctgacgggcgcggacctctactctctctgctctgatgctatgacagctgccctcaaacgcagggttcatgacctggaggaagggctggaacaaggtagctcagcactgatgctcaccatggaggacttgctgcaggctgccgcccggctgcaaccctcagtcagtgagcaggagctgctccggtacaagcgcatccagcgcaagtttgctgcctgctaggagccccccagggtctgggaccccgctcagcatggctgcaggtaccttgatagcccacagagagatctgggaaggaagggctcctcctcaggctgctgccaacccacctggaggccacctccctccaggagatcccagggtgcaaagtggcattgagacagcagcaacagctcaagagatatctcctgcctacttgcccctccttccaggccggctctaagagaaaggcccatctactcaggaagagggccagggccttgggttctggggattgggccctgagagggctagttctgtggctgaaaataaagcatgtcccgccccctactggtgttgtggcatgaaaggttggag

SEQ ID NO: 371490 - DNA, 1612 bp, Homo sapiens
  misc_feature (38)..(38): n is a, c, g, or t
  misc_feature (40)..(40): n is a, c, g, or t
  misc_feature (53)..(53): n is a, c, g, or t
  misc_feature (78)..(78): n is a, c, g, or t
  misc_feature (102)..(102): n is a, c, g, or t
  misc_feature (122)..(122): n is a, c, g, or t
  misc_feature (130)..(130): n is a, c, g, or t
aaggtatccaccctcgatgcaatccaccttgttttttntnagggtggaatgtnatgttcagcagcaaacttgcaacanactggccttctgtttgtaactttnaaaaggcccacatgatacanttagaganttcccacgcactttccatctcctagatcccctcagtgtcctggcatgatgtgggtgggctgcaggaggtgaagaaggagatcctggagaccattcagctccccctggagcaccctgagctactgagcctgggcctgagacgctcaggccttctgctccatgggccccctggcaccggcaagacccttctggccaaggcagtagccactgagtgcagccttaccttcctcagcgtgaaggggccagagctcattaacatgtatgtgggccaaagtgaggagaatgtgcgggaaggtgagtgagcagggaggggcagggcgtcccatgcttcccaaaccccgatggcccccaagccaccccctactcccaggctactcatgatcattcctaatcctcctttctacaagtcaggttcctgcccagctgggtctagtacctgggatgccagtgctgtattgtcaggccccagtttccctccctgctctcacctaacttcaaccccccacaagccgagctttgccctcctgtgggcccctctctctcttcagtgtttgccagggccagggctgcagctccatgcattatcttctttgatgaactggactctttggccccaagccgggggcgaagtggagattctggaggagtgatggacagggtggtgtctcagctccttgccgagctagatgggctgcacagcactcaggatgtgtttgtgattggagccaccaacagaccagatctcctggaccctgcccttctgcggcctggcagatttgacaagctggtgtttgtgggggcaaatgaggaccgggcctcccagctacgcgttctaagtgccatcacacgcaaattcaagctagagccatctgtgagcctggtaaacgtgctagattgctgccctccccagctgacgggcgcggacctctactctctctgctctgatgctatgacagctgccctcaaacgcagggttcatgacctggaggaagggctggaacaaggtagctcagcactgatgctcaccatggaggacttgctgcaggctgccgcccggctgcaaccctcagtcagtgagcaggagctgctccggtacaagcgcatccagcgcaagtttgctgcctgctaggagccccccagggtctgggaccccgctcagcatggctgcaggtaccttgatagcccacagagagatctgggaaggaagggctcctcctcaggctgctgccaacccacctggaggccacctccctccaggagatcccagggtgcaaagtggcattgagacagcagcaacagctcaagagatatctcctgcctacttgcccctccttccaggccggctctaagagaaaggcccatctactcaggaagagggccagggccttgggttctggggattgggccctgagagggctagttctgtggctgaaaataaagcatgtcccgccccctactggtgttgtggcatgaaaggttggag

SEQ ID NO: 371491 - DNA, 3391 bp, Homo sapiens
gcggaagcggccctcgcgcacactagtcgtctggctctctggctccggaagctgcgctccttcaccctcctcgttggtgtcctgtcaccatggcgctggctgtcttgcgggtcctggagccctttccgaccgagacacccccgttggcagtgctgctgccacccgggggcccgtggccggcggcggagctgggcctggtgctggccctgaggcctgcaggggagagcccggcagggccggcgctgctggtggcagccctggaggggccggacgcgggcaccgaagagcagggtcccgggccgccgcagctactggttagccgcgcgctgctgcggctcctggcactgggctccggggcctgggtgcgggcgcgggcggtgcggcggcccccggcgctaggttgggcactgcttggcacctcgctggggcctgggctcggaccgcgagtcgggccgctgctggtgaggcgcggagagaccctcccagtgcccggaccgcgggtgctggagacgcggccggcgttgcaagggctgctgggcccagggactcggctggctgtgactgagctccgcgggcgggccagactgtgtccagagtctggggacagcagtcggcccccacccccgcccgtggtgtcctcctttgcggtttctggcacagtgcggcgactccagggagttctgggagggactggagattcactaggggtgagccggagctgtctccgtggccttggcctcttccagggcgaatgggtgtgggtggcccaggccagagagtcatcgaacacttcacagccgcacttggctagggtgcaggtcctagaacctcgctgggacctctctgatagactgggacccggctctggaccgctgggagagcccctcgctgacggactggcgcttgtccctgccactttggcttttaatcttggctgtgaccccctggaaatgggagagctcagaattcagaggtacttggaaggctccatcgcccctgaagacaaaggaagctgctcattgctgcctgggcctccatttgccagagagttacacatcgaaattgtgtcttctccccactacagcactaatggaaattatgacggtgttctttaccggcactttcagatacccagggtagtccaggaaggggatgttctatgtgtgccaacaattgggcaagtagagatcctggaaggaagtccagagaaactgcccaggtggcgggaaatgttttttaaagtgaagaaaacagttggggaagctccagatggaccagccagtgcctacttggccgacaccacccatacctccttgtacatggtgggttctaccctgagccctgttccatggctcccttcagaggaatccactctctggagcagtttgtctcctccaggcctggaggccttggtgtctgaactctgtgctgtcctgaagcctcgcctccagccagggggtgccctgctgacaggaactagcagtgtccttctacggggccccccaggctgtgggaagaccacagtagttgctgctgcctgtagtcaccttgggctccacttactgaaggtgccctgctccagcctctgtgcagaaagtagtggggctgtggagacaaaactgcaggccatcttctcccgggcccgccgttgccggcctgcagtcctgttgctcacagctgtggaccttctgggccgggaccgtgatgggctgggtgaggatgcccgtgtgatggctgtgctgcgtcacctcctcctcaatgaggaccccctcaacagctgccctcccctcatggttgtggccaccacaagccgggcccaggacctgcctgctgatgtgcagacagcatttcctcatgagctcgaggtgcctgctctgtcagaggggcagcggctcagcatcctgcgggccctcactgcccaccttcccctgggccaggaggtgaacttggcacagctagcacggcggtgtgcaggctttgtggtaggggatctctatgcccttctgacccacagcagccgggcagcctgcaccaggatcaagaactcaggtttggcaggtggcttgactgaggaggatgagggggagctgtgtgctgccggctttcctctcctggctgaggactttgggcaggcactggagcaactgcagacagctcactcccaggccgttggagcccccaagatcccctcagtgtcctggcatgatgtgggtgggctgcaggaggtgaagaaggagatcctggagaccattcagctccccctggagcaccctgagctactgagcctgggcctgagacgctcaggccttctgctccatgggccccctggcaccggcaagacccttctggccaaggcagtagccactgagtgcagccttaccttcctcagcgtgaaggggccagagctcattaacatgtatgtgggccaaagtgaggagaatgtgcgggaagtgtttgccagggccagggctgcagctccatgcattatcttctttgatgaactggactctttggccccaagccgggggcgaagtggagattctggaggagtgatggacagggtggtgtctcagctccttgccgagctagatgggctgcacagcactcaggatgtgtttgtgattggagccaccaacagaccagatctcctggaccctgcccttctgcggcctggcagatttgacaagctggtgtttgtgggggcaaatgaggaccgggcctcccagctacgcgttctaagtgccatcacacgcaaattcaagctagagccatctgtgagcctggtaaacgtgctagattgctgccctccccagctgacgggcgcggacctctactctctctgctctgatgctatgacagctgccctcaaacgcagggttcatgacctggaggaagggctggaacaaggtagctcagcactgatgctcaccatggaggacttgctgcaggctgccgcccggctgcaaccctcagtcagtgagcaggagctgctccggtacaagcgcatccagcgcaagtttgctgcctgctaggagccccccagggtctgggaccccgctcagcatggctgcaggaaaacacaacactccacccccgcccccacttaaaggagccccaggcagaatgaacagtgttcctggtgactgggctgggggagcctggctagacctgcataccccacttgtcgaaggcgggctcgtgccgccggttccagcgctccttaagtgcatacttcagcatcttgtcactggcatccacactcgtcacactgaagccctcttccaccagcataatggagtccaccctgagtacggccagcgaggagaggcagagagaggcagttaggggagcctgggagggccaggaggagaccctgcactggacacttttg

SEQ ID NO: 371492 - DNA, 4969 bp, Homo sapiens
cgcgcggcggctcagcggcctggcagaggtttcagcgctgaggaggcctgagttccgtcatggccctctattatgaccaccagatagaagccccggatgcagcagggtcaccctcatttatcagctggcaccctgtccatccattcttggcagttgcttacatcagcacaacctcaacaggcagcgtggatatttacctggagcaaggggagtgcgtgccagatacacacgtcgagaggccgttccgggttgcttccctgtgctggcacccgacgcggctggtgctggctgtgggctgggagactggagaagtgacggtgtttaacaagcaggacaaggagcagcacacgatgcccctgacacacacagccgacatcaccgtgctccgttggagccccagtggaaactgcctgctgtctggggacaggcttggtgtcttgctcttgtggaggttggaccaaaggggccgagtgcaagggacgcctctgctgaaacacgagtatgggaaacacctcacgcactgcatcttccggctcccccctcctggcgaggacctggttcagttggcaaaggcagctgtgagcggtgatgagaaagccctggacatgtttaactggaagaagagcagttctggaagtttgctgaagatggggtctcacgaggggctgttgttctttgtcagtctgatggacgggacagtgcactatgtggatgagaagggcaagaccactcaggtggtgtccgcagacagcacgattcagatgctgttctacatggagaagagggaggcactggtggtggtcacagagaacctccggctgtccctgtacacggtgcctcctgagggcaaagcagaagaagtgatgaaggtcaagctgagcgggaaaaccggccgccgggcagacatcgctttgattgaaggcagccttctcgtgatggccgtcggggaggctgccctcagattctgggacatagaacgaggagagaattatatactgagtccagatgagaagtttggctttgagaaaggagagaatatgaactgtgtgtgttactgtaaagtcaaaggtcttctggccgctggtaccgacagagggcgagtagccatgtggaggaaagtaccagacttcctgggcagccccggggcagagggcaaggacaggtgggcccttcagacccctaccgagctccaaggaaacatcacgcaaatccagtggggttccaggaagaacctgctggcagtgaacagcgtcatctccgtggccatcctcagcgagcgggccatgtcgtcacacttccaccagcaagtggccgccatgcaggtctccccgagtctgctgaatgtgtgcttcctgtccacgggggtcgcacacagcctgcgcaccgacatgcacatcagtggagtgtttgccaccaaggatgctgtcgcagtctggaacggaaggcaggtggcgatcttcgagctttctggagccgcgatacggagtgcagggaccttcttgtgtgagacgcctgtgttagcaatgcatgaagaaaacgtttacacggtggagtcaaaccgagttcaagttcgaacctggcaggggactgtcaaacaactcctccttttctcggagactgaggggaatccctgcttcttggacatctgtgggaatttcctggttgtagggacagacttggctcactttaaaagctttgatctttcccgaagagaggccaaagcacactgtagctgcaggagcctggcggagctggtccctggggtggggggcatcgcttctctgcggtgcagcagcagcgggagcaccatcagcatcctccccagcaaggctgacaacagccctgattccaaaatctgcttctacgatgttgaaatggacacagtgaccgtctttgacttcaagactggacaaattgatcggagagagacgctgtcctttaatgagcaagagactaataagagccacctctttgtggatgagggactgaaaaattatgttcccgtgaaccacttctgggaccagagtgagccccggctgtttgtatgcgaagccgtgcaggagacgccgcgctcccagcctcagtctgcaaacgggcagccccaagatgggcgcgctggccctgcggcagatgttttgatcctgtccttcttcatttccgaagagcacggcttcctgcttcatgagagcttcccccggcctgccacctcccacagtctcctggggatggaagtgccttattactacttcacaagaaagcccgaagaagcagacagagaagacgaggtggagcctgggtgccaccacatccctcagatggtgtccaggagacccctgcgagactttgtggggctggaggactgcgacaaggccacccgggacgccatgctccacttcagcttctttgtcaccataggagacatggacgaagccttcaaatccatcaagctcatcaaaagtgaggccgtctgggagaacatggcgcgcatgtgcgtgaagacccagcggctggacgtggccaaggtgtgcctggggaacatgggccatgcccgcggggcccgagcgctgcgtgaggcggagcaggagccggagctagaggcccgcgtggccgtgctggccacgcagctgggcatgctggaggacgccgagcagctgtacaggaagtgcaagcgccacgacctcctgaacaagttctaccaggctgcgggccggtggcaggaggccctccaggtagccgagcaccacgatcgcgtgcacctgcgcagcacctaccaccgctatgccgggcacctggaggccagcgccgactgcagccgggccctcagttactacgagaagtcggacacgcaccgcttcgaggtgcccaggatgctgtcggaggacctgccgtccctggagctctacgtgaataaaatgaaggataagaccctgtggcggtggtgggcgcagtacctggagagccagggcgagatggacgccgcgctgcactactacgagctggcccgggaccacttctccctggtccgcatccactgcttccagggcaatgtccagaaggctgcgcaaatagccaacgagacaggaaacctggcggcctcctaccacctcgcccgccagtacgagagccaggaggaggtcgggcaggcggtgcacttctacacccgggcacaggccttcaagaatgccatccgcctgtgcaaggagaacggcctggacgaccagctcatgaacttggccctgctgagctcccccgaggacatgatcgaggcggcccgatactacgaggagaagggcgtgcagatggacagggcggtcatgctgtaccacaaggctggccacttctccaaggccctggagctggcctttgccacccagcagtttgtggccctacagctcatagcagaggacctggatgagacgtcagaccctgcgctcctggcccgctgctccgacttcttcatcgagcacagtcagtacgagagggcggtagagctgctgctggctgccaggaagtatcaggaagccctgcagctgtgcctggggcagaacatgagcatcaccgaggagatggcggaaaagatgaccgtggccaaggactcctcggacctgcctgaggagtcgcggcgggagctgctggagcagatagcagactgctgcatgcgccagggcagctaccacctggccaccaagaagtacacgcaggccggcaacaagctgaaggccatgagggcgctgctcaaatccggagacacggagaaaatcacgttcttcgcgagcgtgtccaggcagaaggaaatctacatcatggctgctaactacctgcagtccctggactggcggaaggagccggagatcatgaagaacatcatcggcttctacaccaaggggcgggccctggacctcctggctggcttttatgacgcttgtgcccaggtggagattgatgaataccagaactacgacaaagcccacggggcgctgaccgaggcctacaagtgcctggccaaggccaaggccaagagccccctggaccaggagaccaggctggcgcagctgcagagcaggatggcactggtgaagaggttcatccaggcccgcaggacgtacacagaggaccccaaggagtccatcaagcagtgtgagctgctcctggaggaaccagacctggacagcaccatccgcatcggggacgtctatggcttcctggtggagcactacgtgcggaaggaggaataccagacggcctacagattcctggaggagatgcggcggcggcttcccttggccaacatgtcctactacgtgagcccgcaggccgtggacgccgtgcaccgggggctgggtctcccactgccacgcaccgtccccgagcaggtccgccacaacagcatggaggacgccagggagctggacgaggaggtggtggaagaggcagatgacgacccctgaggggcctgggccccaggaccagcgtgctgctgcagaaaggcatcttctggaattttttcgtcagctgtggcaaagccagcatttttgctgggaaaaaacatgtctgtgttggaatacgcgacagagctgggcgagaacgcagcggcccgggccggcggagggtgtgacccgtctgcaccttgctctgtcccacctgcctctgggtgcccggcagctccactagatttttggattcattcctttgaagggagtcgggttcacccttccatcgtattctcccaactacacattgtaaagcctgagaaacttctagaacctcaggaagctgcagctggagggctggggcacctgcccccctgctccccacacatcatatcctccccatactcctgcagggcccacggctcctgagcaacagctgggacacccgggccttggcggctgcaccccctgctaggctctgcccaccggccaccaacactcctgtaattccaataaagcagtttattttctgagaaaac

SEQ ID NO: 371493 - DNA, 2995 bp, Homo sapiens
  misc_feature (1)..(4): n is a, c, g, or t
nnnngtcccagaggagaggccagggatgccgggtgcgggacagatccctcgtctcgcctgttgcttttaagcctggtggcccccggggcctggaggctggtactgagcgactattgcctgccctggggacttcacaccccccagccatccagttgcccccaggaccataggtacccccaggaccataggaaccacaagcctccccccgcccgtgtgttccaggcctgcccccgccacgggaatgctgccctcaaaaggggggcagatatcacaggattgctgggaaggggagagacccgtgtgcctggagggagcaagttcacccagacctgcagggccagggacctgtacttggaggacctcggggccagggacctgtacttggagggccttggggccagggacctgtacttggaggacctcggggccagggacctgtacttggaggacctcgaggccaggtcattcttaggtggcaagaaggtgaggccgtctgggagaacatggcgcgcatgtgcgtgaagacccagcggctggacgtggccaaggtgtgcctggggaacatgggccatgcccgcggggcccgagcgctgcgtgaggcggagcaggagccggagctagaggcccgcgtggccgtgctggccacgcagctgggcatgctggaggacgccgagcagctgtacaggaagtgcaagcgccacgacctcctgaacaagttctaccaggctgcgggccggtggcaggaggccctccaggtagccgagcaccacgatcgcgtgcacctgcgcagcacctaccaccgctatgccgggcacctggaggccagcgccgactgcagccgggccctcagttactacgagaagtcggacacgcaccgcttcgaggtgcccaggatgctgtcggaggacctgccgtccctggagctctacgtgaataaaatgaaggataagaccctgtggcggtggtgggcgcagtacctggagagccagggcgagatggacgccgcgctgcactactacgagctggcccgggaccacttctccctggtccgcatccactgcttccagggcaatgtccagaaggctgcgcaaatagccaacgagacaggaaacctggcggcctcctaccacctcgcccgccagtacgagagccaggaggaggtcgggcaggcggtgcacttctacacccgggcacaggccttcaagaatgccatccgcctgtgcaaggagaacggcctggacgaccagctcatgaacttggccctgctgagctcccccgaggacatgatcgaggcggcccgatactacgaggagaagggcgtgcagatggacagggcggtcatgctgtaccacaaggctggccacttctccaaggccctggagctggcctttgccacccagcagtttgtggccctacagctcatagcagaggacctggatgagacgtcagaccctgcgctcctggcccgctgctccgacttcttcatcgagcacagtcagtacgagagggcggtagagctgctgctggctgccaggaagtatcaggaagccctgcagctgtgcctggggcagaacatgagcatcaccgaggagatggcggaaaagatgaccgtggccaaggactcctcggacctgcctgaggagtcgcggcgggagctgctggagcagatagcagactgctgcatgcgccagggcagctaccacctggccaccaagaagtacacgcaggccggcaacaagctgaaggccatgagggcgctgctcaaatccggagacacggagaaaatcacgttcttcgcgagcgtgtccaggcagaaggaaatctacatcatggctgctaactacctgcagtccctggactggcggaaggagccggagatcatgaagaacatcatcggcttctacaccaaggggcgggccctggacctcctggctggcttttatgacgcttgtgcccaggtggagattgatgaataccagaactacgacaaagcccacggggcgctgaccgaggcctacaagtgcctggccaaggccaaggccaagagccccctggaccaggagaccaggctggcgcagctgcagagcaggatggcactggtgaagaggttcatccaggcccgcaggacgtacacagaggaccccaaggagtccatcaagcagtgtgagctgctcctggaggaaccagacctggacagcaccatccgcatcggggacgtctatggcttcctggtggagcactacgtgcggaaggaggaataccagacggcctacagattcctggaggagatgcggcggcggcttcccttggccaacatgtcctactacgtgagcccgcaggccgtggacgccgtgcaccgggggctgggtctcccactgccacgcaccgtccccgagcaggtccgccacaacagcatggaggacgccagggagctggacgaggaggtggtggaagaggcagatgacgacccctgaggggcctgggccccaggaccagcgtgctgctgcagaaaggcatcttctggaattttttcgtcagctgtggcaaagccagcatttttgctgggaaaaaacatgtctgtgttggaatacgcgacagagctgggcgagaacgcagcggcccgggccggcggagggtgtgacccgtctgcaccttgctctgtcccacctgcctctgggtgcccggcagctccactagatttttggattcattcctttgaagggagtcgggttcacccttccatcgtattctcccaactacacattgtaaagcctgagaaacttctagaacctcaggaagctgcagctggagggctggggcacctgcccccctgctccccacacatcatatcctccccatactcctgcagggcccacggctcctgagcaacagctgggacacccgggccttggcggctgcaccccctgctaggctctgcccaccggccaccaacactcctgtaattccaataaagcagtttattttctgagaaaac

SEQ ID NO: 371494 - DNA, 2100 bp, Homo sapiens
aagggcgtgcagatggacagggcggtcatgctgtaccacaaggctggccacttctccaaggccctggagctggcctttgccacccagcagtttgtggccctacagctcatagcagaggacctggatgagacgtcagaccctgcgctcctggcccgctgctccgacttcttcatcgagcacagtcagtacgagagggcggtagagctgctgctggctgtccacgggggtcgcacacagcctgcgcaccgacatgcacatcagtggagtgtttgccaccaaggatgctgtcgcagtctggaacggaaggcaggtggcgatcttcgagctttctggagccgcgatacggagtgcagggaccttcttgtgtgagacgcctgtgttagcaatgcatgaagaaaacgtttacacggtggagtcaaaccgagttcaagttcgaacctggcaggggactgtcaaacaactcctccttttctcggagactgaggggaatccctgcttcttggacatctgtgggaatttcctggttgtagggacagacttggctcactttaaaagctttgatctttcccgaagagaggccaaagcacactgtagctgcaggagcctggcggagctggtccctggggtggggggcatcgcttctctgcggtgcagcagcagcgggagcaccatcagcatcctccccagcaaggctgacaacagccctgattccaaaatctgcttctacgatgttgaaatggacacagtgaccgtctttgacttcaagactggacaggcttggtgtcttgctcttgtggaggttggaccaaaggggccgagtgcaagggacgcctctgctgaaacacgagtatgggaaacacctcacgcactgcatcttccggctcccccctcctggcgaggacctggttcagttggcaaaggcagctgtgagcggtgatgagaaagccctggacatgtttaactggaagaagagcagttctggaagtttgctgaagatggggtctcacgaggggctgttgttctttgtcagtctgatggacgggacagtgcactatgtggatgagaagggcaagaccactcaggtggtgtccgcagacagcacgattcagatgctgttctacatggagaagagggaggcactggtggtggtcacagagaacctccggctgtccctgtacacggtgcctcctgagggcaaagcagaagaagtgatgaaggtcaagctgagcgggaaaaccggccgccgggcagacatcgctttgattgaaggcagccttctcgtgatggccgtcggggaggctgccctcagattctgggacatagaacgaggagagaattatatactgagtccagatgagaagtttggctttgagaaaggagagaatatgaactgtgtgtgttactgtaaagtcaaaggtcttctggccgctggtaccgacagagggcgagtagccatgtggaggaaagtaccagactcccactgccacgcaccgtccccgagcaggtccgccacaacagcatggaggacgccagggagctggacgaggaggtggtggaagaggcagatgacgacccctgaggggcctgggccccaggaccagcgtgctgctgcagaaaggcatcttctggaattttttcgtcagctgtggcaaagccagcatttttgctgggaaaaaacatgtctgtgttggaatacgcgacagagctgggcgagaacgcagcggcccgggccggcggagggtgtgacccgtctgcaccttgctctgtcccacctgcctctgggtgcccggcagctccactagatttttggattcattcctttgaagggagtcgggttcacccttccatcgtattctcccaactacacattgtaaagcctgagaaacttctagaacctcaggaagctgcagctggagggctggggcacctgcccccctgctccccacacatcatatcctccccatactcctgcagggcccacggctcctgagcaacagctgggacacccgggccttggcggctgcaccccctgctaggctctgcccaccggccaccaacactcctgtaattccaataaagcagtttattttctgagaaaac

SEQ ID NO: 371495 - DNA, 486 bp, Homo sapiens
atgggcttaacagattctttcccaaaagctggtttgatggaggcacttgtagaggctctggagacgctggacgcctgaaagtttcagcgctgaggaggcctgagttccgtcatggccctctattatgaccaccagatagaagccccggatgcagcagggtcaccctcatttatcagctggcaccctgtccatccattcttggcagttgcttacatcagcacaacctcaacaggcagcgtggatatttacctggagcaaggggagtgcgtgccagatacacacgtcgagaggccgttccgggttgcttccctgtgctggcacccgacgcggctggtgctggctgtgggctgggagactggagaagtgacggtgtttaacaagcaggacaaggagcagcacacgatgcccctgacacacacagccgacatcaccgtgctccgttggagccccacactcagcacccttgtggctcccatcgccttaggg

SEQ ID NO: 371496 - DNA, 3831 bp, Homo sapiens
aagggcgtgcagatggacagggcggtcatgctgtaccacaaggctggccacttctccaaggccctggagctggcctttgccacccagcagtttgtggccctacagctcatagcagaggacctggatgagacgtcagaccctgcgctcctggcccgctgctccgacttcttcatcgagcacagtcagtacgagagggcggtagagctgctgctggctgtccacgggggtcgcacacagcctgcgcaccgacatgcacatcagtggagtgtttgccaccaaggatgctgtcgcagtctggaacggaaggcaggtggcgatcttcgagctttctggagccgcgatacggagtgcagggaccttcttgtgtgagacgcctgtgttagcaatgcatgaagaaaacgtttacacggtggagtcaaaccgagttcaagttcgaacctggcaggggactgtcaaacaactcctccttttctcggagactgaggggaatccctgcttcttggacatctgtgggaatttcctggttgtagggacagacttggctcactttaaaagctttgatctttcccgaagagaggccaaagcacactgtagctgcaggagcctggcggagctggtccctggggtggggggcatcgcttctctgcggtgcagcagcagcgggagcaccatcagcatcctccccagcaaggctgacaacagccctgattccaaaatctgcttctacgatgttgaaatggacacagtgaccgtctttgacttcaagactggacaaattgatcggagagagacgctgtcctttaatgagcaagagactaataagagccacctctttgtggatgagggactgaaaaattatgttcccgtgaaccacttctgggaccagagtgagccccggctgtttgtatgcgaagccgtgcaggagacgccgcgctcccagcctcagtctgcaaacgggcagccccaagatgggcgcgctggccctgcggcagatgttttgatcctgtccttcttcatttccgaagagcacggcttcctgcttcatgagagcttcccccggcctgccacctcccacagtctcctggggatggaagtgccttattactacttcacaagaaagcccgaagaagcagacagagaagacgaggtggagcctgggtgccaccacatccctcagatggtgtccaggagacccctgcgagactttgtggggctggaggactgcgacaaggccacccgggacgccatgctccacttcagcttctttgtcaccataggagacatggacgaagccttcaaatccatcaagctcatcaaaagtgaggccgtctgggagaacatggcgcgcatgtgcgtgaagacccagcggctggacgtggccaaggtgtgcctggggaacatgggccatgcccgcggggcccgagcgctgcgtgaggcggagcaggagccggagctagaggcccgcgtggccgtgctggccacgcagctgggcatgctggaggacgccgagcagctgtacaggaagtgcaagcgccacgacctcctgaacaagttctaccaggctgcgggccggtggcaggaggccctccaggtagccgagcaccacgatcgcgtgcacctgcgcagcacctaccaccgctatgccgggcacctggaggccagcgccgactgcagccgggccctcagttactacgagaagtcggacacgcaccgcttcgaggtgcccaggatgctgtcggaggacctgccgtccctggagctctacgtgaataaaatgaaggataagaccctgtggcggtggtgggcgcagtacctggagagccagggcgagatggacgccgcgctgcactactacgagctggcccgggaccacttctccctggtccgcatccactgcttccagggcaatgtccagaaggctgcgcaaatagccaacgagacaggaaacctggcggcctcctaccacctcgcccgccagtacgagagccaggaggaggtcgggcaggcggtgcacttctacacccgggcacaggccttcaagaatgccatccgcctgtgcaaggagaacggcctggacgaccagctcatgaacttggccctgctgagctcccccgaggacatgatcgaggcggcccgatactacgaggagaagggcgtgcagatggacagggcggtcatgctgtaccacaaggctggccacttctccaaggccctggagctggcctttgccacccagcagtttgtggccctacagctcatagcagaggacctggatgagacgtcagaccctgcgctcctggcccgctgctccgacttcttcatcgagcacagtcagtacgagagggcggtagagctgctgctggctgccaggaagtatcaggaagccctgcagctgtgcctggggcagaacatgagcatcaccgaggagatggcggaaaagatgaccgtggccaaggactcctcggacctgcctgaggagtcgcggcgggagctgctggagcagatagcagactgctgcatgcgccagggcagctaccacctggccaccaagaagtacacgcaggccggcaacaagctgaaggccatgagggcgctgctcaaatccggagacacggagaaaatcacgttcttcgcgagcgtgtccaggcagaaggaaatctacatcatggctgctaactacctgcagtccctggactggcggaaggagccggagatcatgaagaacatcatcggcttctacaccaaggggcgggccctggacctcctggctggcttttatgacgcttgtgcccaggtggagattgatgaataccagaactacgacaaagcccacggggcgctgaccgaggcctacaagtgcctggccaaggccaaggccaagagccccctggaccaggagaccaggctggcgcagctgcagagcaggatggcactggtgaagaggttcatccaggcccgcaggacgtacacagaggaccccaaggagtccatcaagcagtgtgagctgctcctggaggaaccagacctggacagcaccatccgcatcggggacgtctatggcttcctggtggagcactacgtgcggaaggaggaataccagacggcctacagattcctggaggagatgcggcggcggcttcccttggccaacatgtcctactacgtgagcccgcaggccgtggacgccgtgcaccgggggctgggtctcccactgccacgcaccgtccccgagcaggtccgccacaacagcatggaggacgccagggagctggacgaggaggtggtggaagaggcagatgacgacccctgaggggcctgggccccaggaccagcgtgctgctgcagaaaggcatcttctggaattttttcgtcagctgtggcaaagccagcatttttgctgggaaaaaacatgtctgtgttggaatacgcgacagagctgggcgagaacgcagcggcccgggccggcggagggtgtgacccgtctgcaccttgctctgtcccacctgcctctgggtgcccggcagctccactagatttttggattcattcctttgaagggagtcgggttcacccttccatcgtattctcccaactacacattgtaaagcctgagaaacttctagaacctcaggaagctgcagctggagggctggggcacctgcccccctgctccccacacatcatatcctccccatactcctgcagggcccacggctcctgagcaacagctgggacacccgggccttggcggctgcaccccctgctaggctctgcccaccggccaccaacactcctgtaattccaataaagcagtttattttctgagaaaac

SEQ ID NO: 371497 - DNA, 4355 bp, Homo sapiens
cgcgcggcggctcagcggcctggcagaggtttcagcgctgaggaggcctgagttccgtcatggccctctattatgaccaccagatagaagccccggatgcagcagggtcaccctcatttatcagctggcaccctgtccatccattcttggcagttgcttacatcagcacaacctcaacaggcagcgtggatatttacctggagcaaggggagtgcgtgccagatacacacgtcgagaggccgttccgggttgcttccctgtgctggcacccgacgcggctggtgctggctgtgggctgggagactggagaagtgacggtgtttaacaagcaggacaaggagcagcacacgatgcccctgacacacacagccgacatcaccgtgctccgttggagccccagtggaaactgcctgctgtctggggacaggcttggtgtcttgctcttgtggaggttggaccaaaggggccgagtgcaagggacgcctctgctgaaacacgagtatgggaaacacctcacgcactgcatcttccggctcccccctcctggcgaggacctggttcagttggcaaaggcagctgtgagcggtgatgagaaagccctggacatgtttaactggaagaagagcagttctggaagtttgctgaagatggggtctcacgaggggctgttgttctttgtcagtctgatggacgggacagtgcactatgtggatgagaagggcaagaccactcaggtggtgtccgcagacagcacgattcagatgctgttctacatggagaagagggaggcactggtggtggtcacagagaacctccggctgtccctgtacacggtgcctcctgagggcaaagcagaagaagtgatgaaggtcaagctgagcgggaaaaccggccgccgggcagacatcgctttgattgaaggcagccttctcgtgatggccgtcggggaggctgccctcagattctgggacatagaacgaggagagaattatatactgagtccagatgagaagtttggctttgagaaaggagagaatatgaactgtgtgtgttactgtaaagtcaaaggtcttctggccgctggtaccgacagagggcgagtagccatgtggaggaaagtaccagacttcctgggcagccccggggcagagggcaaggacaggtgggcccttcagacccctaccgagctccaaggaaacatcacgcaaatccagtggggttccaggaagaacctgctggcagtgaacagcgtcatctccgtggccatcctcagcgagcgggccatgtcgtcacacttccaccagcaagtggccgccatgcaggtctccccgagtctgctgaatgtgtgcttcctgtccacgggggtcgcacacagcctgcgcaccgacatgcacatcagtggagtgtttgccaccaaggatgctgtcgcagtctggaacggaaggcaggtggcgatcttcgagctttctggagccgcgatacggagtgcagggaccttcttgtgtgagacgcctgtgttagcaatgcatgaagaaaacgtttacacggtggagtcaaaccgagttcaagttcgaacctggcaggggactgtcaaacaactcctccttttctcggagactgaggggaatccctgcttcttggacatctgtgggaatttcctggttgtagggacagacttggctcactttaaaagctttgatctttcccgaagagaggccaaagcacactgtagctgcaggagcctggcggagctggtccctggggtggggggcatcgcttctctgcggtgcagcagcagcgggagcaccatcagcatcctccccagcaaggctgacaacagccctgattccaaaatctgcttctacgatgttgaaatggacacagtgaccgtctttgacttcaagactggacaaattgatcggagagagacgctgtcctttaatgagcaagagactaataagagccacctctttgtggatgagggactgaaaaattatgttcccgtgaaccacttctgggaccagagtgagccccggctgtttgtatgcgaagccgtgcaggagacgccgcgctcccagcctcagtctgcaaacgggcagccccaagatgggcgcgctggccctgcggcagatgttttgatcctgtccttcttcatttccgaagagcacggcttcctgcttcatgagagcttcccccggcctgccacctcccacagtctcctggggatggaagtgccttattactacttcacaagaaagcccgaagaagcagacagagaagacgaggtggagcctgggtgccaccacatccctcagatggtgtccaggagacccctgcgagactttgtggggctggaggactgcgacaaggccacccgggacgccatgctccacttcagcttctttgtcaccataggagacatggacgaagccttcaaatccatcaagctcatcaaaagtgaggccgtctgggagaacatggcgcgcatgtgcgtgaagacccagcggctggacgtggccaaggtgtgcctggggaacatgggccatgcccgcggggcccgagcgctgcgtgaggcggagcaggagccggagctagaggcccgcgtggccgtgctggccacgcagctgggcatgctggaggacgccgagcagctgtacaggaagtgcaagcgccacgacctcctgaacaagttctaccaggctgcgggccggtggcaggaggccctccaggtagccgagcaccacgatcgcgtgcacctgcgcagcacctaccaccgctatgccgggcacctggaggccagcgccgactgcagccgggccctcagttactacgagaagtcggacacgcaccgcttcgaggtgcccaggatgctgtcggaggacctgccgtccctggagctctacgtgaataaaatgaaggataagaccctgtggcggtggtgggcgcagtacctggagagccagggcgagatggacgccgcgctgcactactacgagctggcccgggaccacttctccctggtccgcatccactgcttccagggcaatgtccagaaggctgcgcaaatagccaacgagacaggaaacctggcggcctcctaccacctcgcccgccagtacgagagccaggaggaggtcgggcaggcggtgcacttctacacccgggcacaggccttcaagaatgccatccgcctgtgcaaggagaacggcctggacgaccagctcatgaacttggccctgctgagctcccccgaggacatgatcgaggcggcccgatactacgaggagaagggcgtgcagatggacagggcggtcatgctgtaccacaaggctggccacttctccaaggccctggagctggcctttgccacccagcagtttgtggccctacagctcatagcagaggacctggatgagacgtcagaccctgcgctcctggcccgctgctccgacttcttcatcgagcacagtcagtacgagagggcggtagagctgctgctggctgccaggaagtatcaggaagccctgcagctgtgcctggggcagaacatgagcatcaccgaggagatggcggaaaagatgaccgtggccaaggactcctcggacctgcctgaggagtcgcggcgggagctgctggagcagatagcagactgctgcatgcgccagggcagctaccacctggccaccaagaagtacacgcaggccggcaacaagctgaaggccatgagggcgctgctcaaatccggagacacggagaaaatcacgttcttcgcgagcgtgtccaggcagaaggaaatctacatcatggctgctaactacctgcagtccctggactggcggaaggagccggagatcatgaagaacatcatcggcttctacaccaaggggcgggccctggacctcctggctggcttttatgacgcttgtgcccaggtggagattgatgaataccagaactacgacaaagcccacggggcgctgaccgaggcctacaagtgcctggccaaggccaaggccaagagccccctggaccaggagaccaggctggcgcagctgcagagcaggatggcactggtgaagaggttcatccaggcccgcaggacgtacacagaggaccccaaggagtccatcaagcagtgtgagctgctcctggaggaaccagacctggacagcaccatccgcatcggggacgtctatggcttcctggtggagcactacgtgcggaaggaggaataccagacggtgaggcctgagtgctgctcactagcagcatcccgccacacaaggctcctgaaacgaaggcttaacggctcaaactgaggctgtgtgtggcggctcactcctgtaatcccagca

SEQ ID NO: 371498 - DNA, 3361 bp, Homo sapiens
  misc_feature (3287)..(3287): n is a, c, g, or t
cgcgcggcggctcagcggcctggcagaggtttcagcgctgaggaggcctgagttccgtcatggccctctattatgaccaccagatagaagccccggatgcagcagggtcaccctcatttatcagctggcaccctgtccatccattcttggcagttgcttacatcagcacaacctcaacaggcagcgtggatatttacctggagcaaggggagtgcgtgccagatacacacgtcgagaggccgttccgggttgcttccctgtgctggcacccgacgcggctggtgctggctgtgggctgggagactggagaagtgacggtgtttaacaagcaggacaaggagcagcacacgatgcccctgacacacacagccgacatcaccgtgctccgttggagccccagtggaaactgcctgctgtctggggacaggcttggtgtcttgctcttgtggaggttggaccaaaggggccgagtgcaagggacgcctctgctgaaacacgagtatgggaaacacctcacgcactgcatcttccggctcccccctcctggcgaggacctggttcagttggcaaaggcagctgtgagcggtgatgagaaagccctggacatgtttaactggaagaagagcagttctggaagtttgctgaagatggggtctcacgaggggctgttgttctttgtcagtctgatggacgggacagtgcactatgtggatgagaagggcaagaccactcaggtggtgtccgcagacagcacgattcagatgctgttctacatggagaagagggaggcactggtggtggtcacagagaacctccggctgtccctgtacacggtgcctcctgagggcaaagcagaagaagtgatgaaggtcaagctgagcgggaaaaccggccgccgggcagacatcgctttgattgaaggcagccttctcgtgatggccgtcggggaggctgccctcagattctgggacatagaacgaggagagaattatatactgagtccagatgagaagtttggctttgagaaaggagagaatatgaactgtgtgtgttactgtaaagtcaaaggtcttctggccgctggtaccgacagagggcgagtagccatgtggaggaaagtaccagacttcctgggcagccccggggcagagggcaaggacaggtgggcccttcagacccctaccgagctccaaggaaacatcacgcaaatccagtggggttccaggaagaacctgctggcagtgaacagcgtcatctccgtggccatcctcagcgagcgggccatgtcgtcacacttccaccagcaagtggccgccatgcaggtctccccgagtctgctgaatgtgtgcttcctgtccacgggggtcgcacacagcctgcgcaccgacatgcacatcagtggagtgtttgccaccaaggatgctgtcgcagtctggaacggaaggcaggtggcgatcttcgagctttctggagccgcgatacggagtgcagggaccttcttgtgtgagacgcctgtgttagcaatgcatgaagaaaacgtttacacggtggagtcaaaccgagttcaagttcgaacctggcaggggactgtcaaacaactcctccttttctcggagactgaggggaatccctgcttcttggacatctgtgggaatttcctggttgtagggacagacttggctcactttaaaagctttgatctttcccgaagagaggccaaagcacactgtagctgcaggagcctggcggagctggtccctggggtggggggcatcgcttctctgcggtgcagcagcagcgggagcaccatcagcatcctccccagcaaggctgacaacagccctgattccaaaatctgcttctacgatgttgaaatggacacagtgaccgtctttgacttcaagactggacaaattgatcggagagagacgctgtcctttaatgagcaagagactaataagagccacctctttgtggatgagggactgaaaaattatgttcccgtgaaccacttctgggaccagagtgagccccggctgtttgtatgcgaagccgtgcaggagacgccgcgctcccagcctcagtctgcaaacgggcagccccaagatgggcgcgctggccctgcggcagatgttttgatcctgtccttcttcatttccgaagagcacggcttcctgcttcatgagagcttcccccggcctgccacctcccacagtctcctggggatggaagtgccttattactacttcacaagaaagcccgaagaagcagacagagaagacgaggtggagcctgggtgccaccacatccctcagatggtgtccaggagacccctgcgagactttgtggggctggaggactgcgacaaggccacccgggacgccatgctccacttcagcttctttgtcaccataggagacatggacgaagccttcaaatccatcaagctcatcaaaagtgaggccgtctgggagaacatggcgcgcatgtgcgtgaagacccagcggctggacgtggccaaggtgtgcctggggaacatgggccatgcccgcggggcccgagcgctgcgtgaggcggagcaggagccggagctagaggcccgcgtggccgtgctggccacgcagctgggcatgctggaggacgccgagcagctgtacaggaagtgcaagcgccacgacctcctgaacaagttctaccaggctgcgggccggtggcaggaggccctccaggtagccgagcaccacgatcgcgtgcacctgcgcagcacctaccaccgctatgccgggcacctggaggccagcgccgactgcagccgggccctcagttactacgagaagtcggacacgcaccgcttcgaggtgcccaggatgctgtcggaggacctgccgtccctggagctctacgtgaataaaatgaaggataagaccccgtgggcggtgttggggccagacctggggagcctgggcgcttcgttccgcgtccgccaagcggccgcggcctccccgggcgcacccacgtggtccagggcacggtccaaagcgggtcgaaattcccgggacatgaaacagtgtgggggccacaacgtgtccaggcagatgaatactcgtgcttaggtggctgagggggggactactacagggacaaggactaaaaaagaatccaaggtgctgaaaactgtcgtgaagagacaatagtacgttaggtacccaggaagaagtgccggcgcaccagagaaggcgaagcgcaggagagtaagtcaagacagacacgagttacagcaggcagtnacaatccgaagttgcagcctgaagaaaataggctacggacgtgctagttcttatctcactatcatcagtacagt

SEQ ID NO: 371499 - DNA, 2839 bp, Homo sapiens
cgcgcggcggctcagcggcctggcagaggtttcagcgctgaggaggcctgagttccgtcatggccctctattatgaccaccagatagaagccccggatgcagcagggtcaccctcatttatcagctggcaccctgtccatccattcttggcagttgcttacatcagcacaacctcaacaggcagcgtggatatttacctggagcaaggggagtgcgtgccagatacacacgtcgagaggccgttccgggttgcttccctgtgctggcacccgacgcggctggtgctggctgtgggctgggagactggagaagtgacggtgtttaacaagcaggacaaggagcagcacacgatgcccctgacacacacagccgacatcaccgtgctccgttggagccccagtggaaactgcctgctgtctggggacaggcttggtgtcttgctcttgtggaggttggaccaaaggggccgagtgcaagggacgcctctgctgaaacacgagtatgggaaacacctcacgcactgcatcttccggctcccccctcctggcgaggacctggttcagttggcaaaggcagctgtgagcggtgatgagaaagccctggacatgtttaactggaagaagagcagttctggaagtttgctgaagatggggtctcacgaggggctgttgttctttgtcagtctgatggacgggacagtgcactatgtggatgagaagggcaagaccactcaggtggtgtccgcagacagcacgattcagatgctgttctacatggagaagagggaggcactggtggtggtcacagagaacctccggctgtccctgtacacggtgcctcctgagggcaaagcagaagaagtgatgaaggtcaagctgagcgggaaaaccggccgccgggcagacatcgctttgattgaaggcagccttctcgtgatggccgtcggggaggctgccctcagattctgggacatagaacgaggagagaattatatactgagtccagatgagaagtttggctttgagaaaggagagaatatgaactgtgtgtgttactgtaaagtcaaaggtcttctggccgctggtaccgacagagggcgagtagccatgtggaggaaagtaccagacttcctgggcagccccggggcagagggcaaggacaggtgggcccttcagacccctaccgagctccaaggaaacatcacgcaaatccagtggggttccaggaagaacctgctggcagtgaacagcgtcatctccgtggccatcctcagcgagcgggccatgtcgtcacacttccaccagcaagtggccgccatgcaggtctccccgagtctgctgaatgtgtgcttcctgtccacgggggtcgcacacagcctgcgcaccgacatgcacatcagtggagtgtttgccaccaaggatgctgtcgcagtctggaacggaaggcaggtggcgatcttcgagctttctggagccgcgatacggagtgcagggaccttcttgtgtgagacgcctgtgttagcaatgcatgaagaaaacgtttacacggtggagtcaaaccgagttcaagttcgaacctggcaggggactgtcaaacaactcctccttttctcggagactgaggggaatccctgcttcttggacatctgtgggaatttcctggttgtagggacagacttggctcactttaaaagctttgatctttcccgaagagaggccaaagcacactgtagctgcaggagcctggcggagctggtccctggggtggggggcatcgcttctctgcggtgcagcagcagcgggagcaccatcagcatcctccccagcaaggctgacaacagccctgattccaaaatctgcttctacgatgttgaaatggacacagtgaccgtctttgacttcaagactggacaaattgatcggagagagacgctgtcctttaatgagcaagagactaataagagccacctctttgtggatgagggactgaaaaattatgttcccgtgaaccacttctgggaccagagtgagccccggctgtttgtatgcgaagccgtgcaggagacgccgcgctcccagcctcagtctgcaaacgggcagccccaagatgggcgcgctggccctgcggcagatgttttgatcctgtccttcttcatttccgaagagcacggcttcctgcttcatgagagcttcccccggcctgccacctcccacagtctcctggggatggaagtgccttattactacttcacaagaaagcccgaagaagcagacagagaagacgaggtggagcctgggtgccaccacatccctcagatggtgtccaggagacccctgcgagactttgtggggctggaggactgcgacaaggccacccgggacgccatgctccacttcagcttctttgtcaccataggagacatggacgaagccttcaaatccatcaagctcatcaaaaggtgaggatcccgaccactgggatgttgggagatagcgcgtgctcacggctctttcctttctccctgtttgccttcttggttcgcctgttgaaatatttgactcctcatgactgcgtcatggtgtatttcatggtcttcccactcgatgaaatgctgcccagcttgcagatgccacgtgggaagctctcagcctctctggtgctgggagcctctcgggctgtttagctgcttcctagtggaaagttctgccgttcctaaacatctataatacccatccctctgggaataattgctcctaaacagaagtttggacaagtaaacactaaaaacagccaggtggaaacacaattaaaaatgctctgaaagagggtatcaatcaag

SEQ ID NO: 371500 - DNA, 314 bp, Homo sapiens
ggacagtgcactatgtggatgagaagggcaagaccactcaggtggtgtccgcagacagcacgattcagatgctgttctacatggagaagagggaggcactggtggtggtcacagagaacctccggctgtccctgtacacggtgcctcctgagggcaaagcagaagaagtgatgaaggtgagtgggagtgggcttgggggctcacgctggggatcttgggccaggttctctctggcctcgttgacggccctttctcttctggatagcaagactgaaaaaaagcctatcaactgagttagggcggctaacgtagct

SEQ ID NO: 371501 - DNA, 715 bp, Homo sapiens
cctgttggtaaatatctgtctgtctgcagagggatttctcccccataagggagctaaatccagaggacgaggtctgggtgagggcttcagctttacatatgaattaacaaacacatgggtcctttgtcatttagcccgaagaagcagacagagaagacgaggtggagcctgggtgccaccacatccctcagatggtgtccaggagacccctgcgagactttgtggggctggaggactgcgacaaggccacccgggacgccatgctccacttcagcttctttgtcaccataggagacatggacgaagccttcaaatccatcaagctcatcaaaaggtgaggatcccgaccactgggatgttgggagatagcgcgtgctcacggctctttcctttctccctgtttgccttcttggttcgcctgttgaaatatttgactcctcatgactgcgtcatggtgtatttcatggtcttcccactcgatgaaatgctgcccagcttgcagatgccacgtgggaagctctcagcctctctggtgctgggagcctctcgggctgtttagctgcttcctagtggaaagttctgccgttcctaaacatctataatacccatccctctgggaataattgctcctaaacagaagtttggacaagtaaacactaaaaacagccaggtggaaacacaattaaaaatgctctgaaagagggtatcaatcaag

SEQ ID NO: 371502 - DNA, 4246 bp, Homo sapiens
cgcgcggcggctcagcggcctggcagaggtttcagcgctgaggaggcctgagttccgtcatggccctctattatgaccaccagatagaagccccggatgcagcagggtcaccctcatttatcagctggcaccctgtccatccattcttggcagttgcttacatcagcacaacctcaacaggcagcgtggatatttacctggagcaaggggagtgcgtgccagatacacacgtcgagaggccgttccgggttgcttccctgtgctggcacccgacgcggctggtgctggctgtgggctgggagactggagaagtgacggtgtttaacaagcaggacaaggagcagcacacgatgcccctgacacacacagccgacatcaccgtgctccgttggagccccagtggaaactgcctgctgtctggggacaggcttggtgtcttgctcttgtggaggttggaccaaaggggccgagtgcaagggacgcctctgctgaaacacgagtatgggaaacacctcacgcactgcatcttccggctcccccctcctggcgaggacctggttcagttggcaaaggcagctgtgagcggtgatgagaaagccctggacatgtttaactggaagaagagcagttctggaagtttgctgaagatggggtctcacgaggggctgttgttctttgtcagtctgatggacgggacagtgcactatgtggatgagaagggcaagaccactcaggtggtgtccgcagacagcacgattcagatgctgttctacatggagaagagggaggcactggtggtggtcacagagaacctccggctgtccctgtacacggtgcctcctgagggcaaagcagaagaagtgatgaaggtcaagctgagcgggaaaaccggccgccgggcagacatcgctttgattgaaggcagccttctcgtgatggccgtcggggaggctgccctcagattctgggacatagaacgaggagagaattatatactgagtccagatgagaagtttggctttgagaaaggagagaatatgaactgtgtgtgttactgtaaagtcaaaggtcttctggccgctggtaccgacagagggcgagtagccatgtggaggaaagtaccagacttcctgggcagccccggggcagagggcaaggacaggtgggcccttcagacccctaccgagctccaaggaaacatcacgcaaatccagtggggttccaggaagaacctgctggcagtgaacagcgtcatctccgtggccatcctcagcgagcgggccatgtcgtcacacttccaccagcaagtggccgccatgcaggtctccccgagtctgctgaatgtgtgcttcctgtccacgggggtcgcacacagcctgcgcaccgacatgcacatcagtggagtgtttgccaccaaggatgctgtcgcagtctggaacggaaggcaggtggcgatcttcgagctttctggagccgcgatacggagtgcagggaccttcttgtgtgagacgcctgtgttagcaatgcatgaagaaaacgtttacacggtggagtcaaaccgagttcaagttcgaacctggcaggggactgtcaaacaactcctccttttctcggagactgaggggaatccctgcttcttggacatctgtgggaatttcctggttgtagggacagacttggctcactttaaaagctttgatctttcccgaagagaggccaaagcacactgtagctgcaggagcctggcggagctggtccctggggtggggggcatcgcttctctgcggtgcagcagcagcgggagcaccatcagcatcctccccagcaaggctgacaacagccctgattccaaaatctgcttctacgatgttgaaatggacacagtgaccgtctttgacttcaagactggacaaattgatcggagagagacgctgtcctttaatgagcaagagactaataagagccacctctttgtggatgagggactgaaaaattatgttcccgtgaaccacttctgggaccagagtgagccccggctgtttgtatgcgaagccgtgcaggagacgccgcgctcccagcctcagtctgcaaacgggcagccccaagatgggcgcgctggccctgcggcagatgttttgatcctgtccttcttcatttccgaagagcacggcttcctgcttcatgagagcttcccccggcctgccacctcccacagtctcctggggatggaagtgccttattactacttcacaagaaagcccgaagaagcagacagagaagacgaggtggagcctgggtgccaccacatccctcagatggtgtccaggagacccctgcgagactttgtggggctggaggactgcgacaaggccacccgggacgccatgctccacttcagcttctttgtcaccataggagacatggacgaagccttcaaatccatcaagctcatcaaaagtgaggccgtctgggagaacatggcgcgcatgtgcgtgaagacccagcggctggacgtggccaaggtgtgcctggggaacatgggccatgcccgcggggcccgagcgctgcgtgaggcggagcaggagccggagctagaggcccgcgtggccgtgctggccacgcagctgggcatgctggaggacgccgagcagctgtacaggaagtgcaagcgccacgacctcctgaacaagttctaccaggctgcgggccggtggcaggaggccctccaggtagccgagcaccacgatcgcgtgcacctgcgcagcacctaccaccgctatgccgggcactatcaggaagccctgcagctgtgcctggggcagaacatgagcatcaccgaggagatggcggaaaagatgaccgtggccaaggactcctcggacctgcctgaggagtcgcggcgggagctgctggagcagatagcagactgctgcatgcgccagggcagctaccacctggccaccaagaagtacacgcaggccggcaacaagctgaaggccatgagggcgctgctcaaatccggagacacggagaaaatcacgttcttcgcgagcgtgtccaggcagaaggaaatctacatcatggctgctaactacctgcagtccctggactggcggaaggagccggagatcatgaagaacatcatcggcttctacaccaaggggcgggccctggacctcctggctggcttttatgacgcttgtgcccaggtggagattgatgaataccagaactacgacaaagcccacggggcgctgaccgaggcctacaagtgcctggccaaggccaaggccaagagccccctggaccaggagaccaggctggcgcagctgcagagcaggatggcactggtgaagaggttcatccaggcccgcaggacgtacacagaggaccccaaggagtccatcaagcagtgtgagctgctcctggaggaaccagacctggacagcaccatccgcatcggggacgtctatggcttcctggtggagcactacgtgcggaaggaggaataccagacggcctacagattcctggaggagatgcggcggcggcttcccttggccaacatgtcctactacgtgagcccgcaggccgtggacgccgtgcaccgggggctgggtctcccactgccacgcaccgtccccgagcaggtccgccacaacagcatggaggacgccagggagctggacgaggaggtggtggaagaggcagatgacgacccctgaggggcctgggccccaggaccagcgtgctgctgcagaaaggcatcttctggaattttttcgtcagctgtggcaaagccagcatttttgctgggaaaaaacatgtctgtgttggaatacgcgacagagctgggcgagaacgcagcggcccgggccggcggagggtgtgacccgtctgcaccttgctctgtcccacctgcctctgggtgcccggcagctccactagatttttggattcattcctttgaagggagtcgggttcacccttccatcgtattctcccaactacacattgtaaagcctgagaaacttctagaacctcaggaagctgcagctggagggctggggcacctgcccccctgctccccacacatcatatcctccccatactcctgcagggcccacggctcctgagcaacagctgggacacccgggccttggcggctgcaccccctgctaggctctgcccaccggccaccaacactcctgtaattccaataaagcagtttattttctgagaaaac

SEQ ID NO: 371503 - DNA, 2621 bp, Homo sapiens
ccggcccctgcctcttggggttaggaaggccgtgggactcgtgacgggcacctctctgcatggcctgcagtcttgcccaggggcggagccgatgggtgaaggcccctcctcatgcccgtttggcagctgtgcctgatgactacttgccccaggagaaggggccgtagggccagggggccctgaggtgctgggcaggagcctcacagacccccgtctgcccacagtgaggccgtctgggagaacatggcgcgcatgtgcgtgaagacccagcggctggacgtggccaaggaggacgccgagcagctgtacaggaagtgcaagcgccacgacctcctgaacaagttctaccaggctgcgggccggtggcaggaggccctccaggtagccgagcaccacgatcgcgtgcacctgcgcagcacctaccaccgctatgccgggcacctggaggccagcgccgactgcagccgggccctcagttactacgagaagtcggacacgcaccgcttcgaggtgcccaggatgctgtcggaggacctgccgtccctggagctctacgtgaataaaatgaaggataagaccctgtggcggtggtgggcgcagtacctggagagccagggcgagatggacgccgcgctgcactactacgagctggcccgggaccacttctccctggtccgcatccactgcttccagggcaatgtccagaaggctgcgcaaatagccaacgagacaggaaacctggcggcctcctaccacctcgcccgccagtacgagagccaggaggaggtcgggcaggcggtgcacttctacacccgggcacaggccttcaagaatgccatccgcctgtgcaaggagaacggcctggacgaccagctcatgaacttggccctgctgagctcccccgaggacatgatcgaggcggcccgatactacgaggagaagggcgtgcagatggacagggcggtcatgctgtaccacaaggctggccacttctccaaggccctggagctggcctttgccacccagcagtttgtggccctacagctcatagcagaggacctggatgagacgtcagaccctgcgctcctggcccgctgctccgacttcttcatcgagcacagtcagtacgagagggcggtagagctgctgctggctgccaggaagtatcaggaagccctgcagctgtgcctggggcagaacatgagcatcaccgaggagatggcggaaaagatgaccgtggccaaggactcctcggacctgcctgaggagtcgcggcgggagctgctggagcagatagcagactgctgcatgcgccagggcagctaccacctggccaccaagaagtacacgcaggccggcaacaagctgaaggccatgagggcgctgctcaaatccggagacacggagaaaatcacgttcttcgcgagcgtgtccaggcagaaggaaatctacatcatggctgctaactacctgcagtccctggactggcggaaggagccggagatcatgaagaacatcatcggcttctacaccaaggggcgggccctggacctcctggctggcttttatgacgcttgtgcccaggtggagattgatgaataccagaactacgacaaagcccacggggcgctgaccgaggcctacaagtgcctggccaaggccaaggccaagagccccctggaccaggagaccaggctggcgcagctgcagagcaggatggcactggtgaagaggttcatccaggcccgcaggacgtacacagaggaccccaaggagtccatcaagcagtgtgagctgctcctggaggaaccagacctggacagcaccatccgcatcggggacgtctatggcttcctggtggagcactacgtgcggaaggaggaataccagacggcctacagattcctggaggagatgcggcggcggcttcccttggccaacatgtcctactacgtgagcccgcaggccgtggacgccgtgcaccgggggctgggtctcccactgccacgcaccgtccccgagcaggtccgccacaacagcatggaggacgccagggagctggacgaggaggtggtggaagaggcagatgacgacccctgaggggcctgggccccaggaccagcgtgctgctgcagaaaggcatcttctggaattttttcgtcagctgtggcaaagccagcatttttgctgggaaaaaacatgtctgtgttggaatacgcgacagagctgggcgagaacgcagcggcccgggccggcggagggtgtgacccgtctgcaccttgctctgtcccacctgcctctgggtgcccggcagctccactagatttttggattcattcctttgaagggagtcgggttcacccttccatcgtattctcccaactacacattgtaaagcctgagaaacttctagaacctcaggaagctgcagctggagggctggggcacctgcccccctgctccccacacatcatatcctccccatactcctgcagggcccacggctcctgagcaacagctgggacacccgggccttggcggctgcaccccctgctaggctctgcccaccggccaccaacactcctgtaattccaataaagcagtttattttctgagaaaac

SEQ ID NO: 371504 - DNA, 3347 bp, Homo sapiens
cgcgcggcggctcagcggcctggcagaggtttcagcgctgaggaggcctgagttccgtcatggccctctattatgaccaccagatagaagccccggatgcagcagggtcaccctcatttatcagctggcaccctgtccatccattcttggcagttgcttacatcagcacaacctcaacaggcagcgtggatatttacctggagcaaggggagtgcgtgccagatacacacgtcgagaggccgttccgggttgcttccctgtgctggcacccgacgcggctggtgctggctgtgggctgggagactggagaagtgacggtgtttaacaagcaggacaaggagcagcacacgatgcccctgacacacacagccgacatcaccgtgctccgttggagccccagtggaaactgcctgctgtctggggacaggcttggtgtcttgctcttgtggaggttggaccaaaggggccgagtgcaagggacgcctctgctgaaacacgagtatgggaaacacctcacgcactgcatcttccggctcccccctcctggcgaggacctggttcagttggcaaaggcagctgtgagcggtgatgagaaagccctggacatgtttaactggaagaagagcagttctggaagtttgctgaagatggggtctcacgaggggctgttgttctttgtcagtctgatggacgggacagtgcactatgtggatgagaagggcaagaccactcaggtggtgtccgcagacagcacgattcagatgctgttctacatggagaagagggaggcactggtggtggtcacagagaacctccggctgtccctgtacacggtgcctcctgagggcaaagcagaagaagtgatgaaggtcaagctgagcgggaaaaccggccgccgggcagacatcgctttgattgaaggcagccttctcgtgatggccgtcggggaggctgccctcagattctgggacatagaacgaggagagaattatatactgagtccagatgagaagtttggctttgagaaaggagagaatatgaactgtgtgtgttactgtaaagtcaaaggtcttctggccgctggtaccgacagagggcgagtagccatgtggaggaaagtaccagacttcctgggcagccccggggcagagggcaaggacaggtgggcccttcagacccctaccgagctccaaggaaacatcacgcaaatccagtggggttccaggaagaacctgctggcagtgaacagcgtcatctccgtggccatcctcagcgagcgggccatgtcgtcacacttccaccagcaagtggccgccatgcaggtctccccgagtctgctgaatgtgtgcttcctgtccacgggggtcgcacacagcctgcgcaccgacatgcacatcagtggagtgtttgccaccaaggatgctgtcgcagtctggaacggaaggcaggtggcgatcttcgagctttctggagccgcgatacggagtgcagggaccttcttgtgtgagacgcctgtgttagcaatgcatgaagaaaacgtttacacggtggagtcaaaccgagttcaagttcgaacctggcaggggactgtcaaacaactcctccttttctcggagactgaggggaatccctgcttcttggacatctgtgggaatttcctggttgtagggacagacttggctcactttaaaagctttgatctttcccgaagagaggccaaagcacactgtagctgcaggagcctggcggagctggtccctggggtggggggcatcgcttctctgcggtgcagcagcagcgggagcaccatcagcatcctccccagcaaggctgacaacagccctgattccaaaatctgcttctacgatgttgaaatggacacagtgaccgtctttgacttcaagactggacaaattgatcggagagagacgctgtcctttaatgagcaagagactaataagagccacctctttgtggatgagggactgaaaaattatgttcccgtgaaccacttctgggaccagagtgagccccggctgtttgtatgcgaagccgtgcaggagacgccgcgctcccagcctcagtctgcaaacgggcagccccaagatgggcgcgctggccctgcggcagatgttttgatcctgtccttcttcatttccgaagagcacggcttcctgcttcatgagagcttcccccggcctgccacctcccacagtctcctggggatggaagtgccttattactacttcacaagaaagcccgaagaagcagacagagaagacgaggtggagcctgggtgccaccacatccctcagatggtgtccaggagacccctgcgagactttgtggggctggaggactgcgacaaggccacccgggacgccatgctccacttcagcttctttgtcaccataggagacatggacgaagccttcaaatccatcaagctcatcaaaagtgaggccgtctgggagaacatggcgcgcatgtgcgtgaagacccagcggctggacgtggccaaggtgtgcctggggaacatgggccatgcccgcggggcccgagcgctgcgtgaggcggagcaggagccggagctagaggcccgcgtggccgtgctggccacgcagctgggcatgctggaggacgccgagcagctgtacaggaagtgcaagcgccacgacctcctgaacaagttctaccaggctgcgggccggtggcaggaggccctccaggtagccgagcaccacgatcgcgtgcacctgcgcagcacctaccaccgctatgccgggcacctggaggccagcgccgactgcagccgggccctcagttactacgagaagtcggacacgcaccgcttcgaggtgcccaggatgctgtcggaggacctgccgtccctggagctctacgtgaataaaatgaaggataagaccctgtggcggtggtgggcgcagtacctggagagccagggcgagatggacgccgcgctgcactactacgagctggcccgggaccacttctccctggtccgcatccactgcttccagggcaatgtccagaaggctgcgcaaatagccaacgagacaggaaacctggcggcctcctaccacctcgcccgccagtacgagagccaggaggaggtcgggcaggcggtgcacttctacacccgggcacaggccttcaagaatgccatccgcctgtgcaaggtaccacgggcccggggtggggagccggcgcttctcgaggtcccctgaggagagcttcaagtggaaaagtggacagagagaatcgtgtcagtgacacgtggtccggccagtgtctgccactcactgctcaccccgtctgcctcaccc

SEQ ID NO: 371505 - DNA, 2281 bp, Homo sapiens
cgcgcggcggctcagcggcctggcagaggtttcagcgctgaggaggcctgagttccgtcatggccctctattatgaccaccagatagaagccccggatgcagcagggtcaccctcatttatcagctggcaccctgtccatccattcttggcagttgcttacatcagcacaacctcaacaggcagcgtggatatttacctggagcaaggggagtgcgtgccagatacacacgtcgagaggccgttccgggttgcttccctgtgctggcacccgacgcggctggtgctggctgtgggctgggagactggagaagtgacggtgtttaacaagcaggacaaggagcagcacacgatgcccctgacacacacagccgacatcaccgtgctccgttggagccccagtggaaactgcctgctgtctggggacaggcttggtgtcttgctcttgtggaggttggaccaaaggggccgagtgcaagggacgcctctgctgaaacacgagtatgggaaacacctcacgcactgcatcttccggctcccccctcctggcgaggacctggttcagttggcaaaggcagctgtgagcggtgatgagaaagccctggacatgtttaactggaagaagagcagttctggaagtttgctgaagatggggtctcacgaggggctgttgttctttgtcagtctgatggacgggacagtgcactatgtggatgagaagggcaagaccactcaggtggtgtccgcagacagcacgattcagatgctgttctacatggagaagagggaggcactggtggtggtcacagagaacctccggctgtccctgtacacggtgcctcctgagggcaaagcagaagaagtgatgaaggtcaagctgagcgggaaaaccggccgccgggcagacatcgctttgattgaaggcagccttctcgtgatggccgtcggggaggctgccctcagattctgggacatagaacgaggagagaattatatactgagtccagatgagaagtttggctttgagaaaggagagaatatgaactgtgtgtgttactgtaaagtcaaaggtcttctggccgctggtaccgacagagggcgagtagccatgtggaggaaagtaccagacttcctgggcagccccggggcagagggcaaggacaggtgggcccttcagacccctaccgagctccaaggaaacatcacgcaaatccagtggggttccaggaagaacctgctggcagtgaacagcgtcatctccgtggccatcctcagcgagcgggccatgtcgtcacacttccaccagcaagtggccgccatgcaggtctccccgagtctgctgaatgtgtgcttcctgtccacgggggtcgcacacagcctgcgcaccgacatgcacatcagtggagtgtttgccaccaaggatgctgtcgcagtctggaacggaaggcaggtggcgatcttcgagctttctggagccgcgatacggagtgcagggaccttcttgtgtgagacgcctgtgttagcaatgcatgaagaaaacgtttacacggtggagtcaaaccgagttcaagttcgaacctggcaggggactgtcaaacaactcctccttttctcggagactgaggggaatccctgcttcttggacatctgtgggaatttcctggttgtagggacagacttggctcactttaaaagctttgatctttcccgaagagaggccaaagcacactgtagctgcaggagcctggcggagctggtccctggggtggggggcatcgcttctctgcggtgcagcagcagcgggagcaccatcagcatcctccccagcaaggctgacaacagccctgattccaaaatctgcttctacgatgttgaaatggacacagtgaccgtctttgacttcaagactggacaaattgatcggagagagacgctgtcctttaatgagcaagagactaataagagccacctctttgtggatgagggactgaaaaattatgttcccgtgaaccacttctgggaccagagtgagccccggctgtttgtatgcgaagccgtgcaggagacgccgcgctcccagcctcagtctgcaaacgggcagccccaagatgggcgcgctggccctgcggcagatgttttgatcctgtccttcttcatttccgaagagcacggcttcctgcttcatgagagcttcccccggcctgccacctcccacagtctcctggggatggaagtgccttattactacttcacaagaaaggtacgaagccacgacatccgcac

SEQ ID NO: 371506 - DNA, 1713 bp, Homo sapiens
atactacgcccttttacgtaagggacttgatcatcgcagattttgttatccacagggtcgtgaaaccaattcccccatgctgagggactcctggaataatactaacttcacagagttctgaggactaagccacagaacaaatgtagagtgcttgtcacagtgcctggcaggtcctaacccttaggaaatgttagctgtagtcacagaagctttcaaacagctcgtgtagactatagtcttatatatgttctagcttggggccaaaaaaggaagtttgggagctcagaaactggcaaacacatgctttaatgaaattgaaaaacaagctcaagctgcggataaaatgaaggagcaggaagacctggccaaggtggtatctaaagaagaatcaatgtaagtttaatttcattatattaatacattttcagggaataaaactattaactcaagattttgctttccaaatgccatgtatttttgtgtggggggggaagggagggtactgcaaaattcagttttatgaaaactgatattgcattggcatgtggattggaagggaaagagacgatgggggcagcaacactctgctgaggctgtaagggcagactggagtgacatcagtgagaagggaaagacagagatgcatggaggtgtttacacatgaaacatgcttcacattattagagttggggaaatgcaaatcaaggccacagtaagataccactgtgtactctctagggaagctataataaaaaaatcagtaacaggtgttggctaggatgtggagaaatttgaacccttgtacattgctgatggcaatgtgaaatggtgccactgttgtgaaaaacagtttggcagtccttcagaaagttaaatgtaaagtttccatgtgacccagcaaatctactcctaagtatatactcaagagaaattaaaacttacatctgtgcaaccacacacaaactcgtgcatgaatgttcatagtggcgttaatcctaatagccaaaaagtagaaataagctaaatgtctaccaactgataaatgagaaagaaaatgtggtatgtccatacaatggactattactcagccacaaaaaggaatgtagtcctgatattggccacaacatggataaaccttgaaaagtttatgctaagaaagaagccagtcataaaagatcacatgatatgattctgtctatatgcaatgtccagaataggcaaatccgtagagacagaaagcaacttactggttgccagggcctggggtgaggagagaatggagagtggctgctaatggtccaggcctgctttttggactgctgaaagtgttctggagttagtggtgatgatggcacagctttgtgaatgtgctgaaaccactgaatcatgcactttaacagggtgagttttacggtatgtgaattatatctgcataatgaaaaaagtatttataatctgaagccctgttggactctgtgactaaattctaaatacatgatggaagactatggctctggtcgtgtctccagaggttctgagcctggatcttggagagggagaaggaagagtttcagagaatgaagaaggtggaatgatcgtgtgtgtcgggggcctgcctgaagtggaggagttggaacgataatgtggagcaccttaaagtcaggctgtggttgtccacttacccaagagaaacagctccttcagcagtgctgt

SEQ ID NO: 371507 - DNA, 706 bp, Homo sapiens
tctctaaaaaaaaaaaaaaaaaaaaaaaaaaatagccagatgtggtggtgcgcacctgtgatcccaactactcaggaggctgaagtggaaggctcccttgatctgggaggtaatgccactgcactcagctaaggtgacagagcgagaccctgtctcaaaaaaaaaaaaaaagttgttgtaatatattttttaaatgctcctgaagaaagtactgagaggggcaagctcaggctctatttctcttcagtgtgctgttaaaaaaaaaaatacattttctctgagtttggagactgcgtggaaatactgaggacaccattttgacaaagttctgttaatccaaaatatgcttatcaacttgagtcttctggatgagaaactaaagtggaaaatgttatcatctcttaaataataaagtgcagtatcttagaattttaaaagacacactaaaaaagaaaaattatttctattggtcttactttttaatttttattttttggcagaggtatcctctatcataaaaaagaaaccaaatcaagctaaaaaaggcgtgagtattatgtactttatatataaaaatctggtagttaagctttaaaactaaaaagccgcttcgtcattttagttttattcttttgaaccatcttgtaataaatgtagctttgatataaggagtctatgttttgttcaaagagattaatgtcaaaga

SEQ ID NO: 371508 - DNA, 595 bp, Homo sapiens
tttaaagacggagttttccctcttgtttcccaggctgtagcgcaatggcgcgatctcggctcactgcaacatccacctcccgggttcaagcgattctcctgcctcagcctcccaactagctgggattataggcatgtgccaccacacctggctaattttgtatttttagtggagacggggtttcgccatgttggtcaggcttgtctcaaactcctgacctcaggtgatccacctgtcccaaagtgctgggattacaggcgtgagccaccacacctggccgacccttctgtcttaacaggaagaaatattcataatagactataaagtgggggaaaaatattactgaacatggaatataataatcatttttgtaaaaaaagaaaaacataccaaaaacgttctggaaagcacatagcaaattgttaaatagagagtgaaattactgaggatttttagttctcacttgatatagtgttgaagtgtctgaacttttataatgagtatgggttacttttatcatcaaaaacaaaatttcaatttaaaaacttataaaaatagttgatacataatgattcacatttggtgactttcttac

SEQ ID NO: 371509 - DNA, 2945 bp, Homo sapiens
cgcggctgaagcgagggcggggagggaaagcgagcggcgcctgcgccccggcggtggacgggcccggtcgtgggcggggattggggcggagcctgaccgttacgcgcagccccgcccccgcggcctcgtcgctcctgctgaggcggtagccgcttttcgtcgactcttaccggttggctgggccagctgcgccgcggctcacagctgacgatgggggaccccagcaagcaggacatcttgaccatcttcaagcgcctccgctcggtgcccactaacaaggtgtgttttgattgtggtgccaaaaatcccagctgggcaagcataacctatggagtgttcctttgcattgattgctcagggtcccaccggtcacttggtgttcacttgagttttattcgatctacagagttggattccaactggtcatggtttcagttgcgatgcatgcaagtcggaggaaacgctagtgcatcttccttttttcatcaacatgggtgttccaccaatgacaccaatgccaagtacaacagtcgtgctgctcagctctatagggagaaaatcaaatcgctcgcctctcaagcaacacggaagcatggcactgatctgtggcttgatagttgtgtggttccacctttgtcccctccaccaaaggaggaagatttttttgcctctcacgtttctcctgaggtgagtgacacagcgtgggcatcagcaatagcagaaccatcttctttaacatcaaggcctgtggaaaccactttggaaaataatgaaggtggacaagagcaaggaccaagtgtggaaggtcttaatgtaccaacaaaggctactttagaggtatcctctatcataaaaaagaaaccaaatcaagctaaaaaaggccttggggccaaaaaaggaagtttgggagctcagaaactggcaaacacatgctttaatgaaattgaaaaacaagctcaagctgcggataaaatgaaggagcaggaagacctggccaaggtggtatctaaagaagaatcaattgtttcatcattacgattagcctataaggatcttgaaattcaaatgaagaaagacgaaaagatgaacattagtggcaaaaaaaatgttgactcagacagactcggcatgggatttggaaattgcagaagtgttatttcacattcagtgacttcagatatgcagaccatagagcaggaatcacccattatggcaaaaccaagaaaaaagtataatgatgacagtgacgattcatattttacttccagctcaaggtactttgacgagccagtggagttaaggagcagttctttctctagctgggatgacagttcagattcctattggaaaaaagagaccagcaaagatactgaaacagttctgaaaaccacaggctattcagacagacctactgctcgccgcaagccagattatgagccagttgaaaatacagatgaggcccagaagaagtttggcaatgtcaaggccatttcatcagatatgtattttggaagacaatcccaggctgattatgagaccagggcccgcctagagaggctgtcagcaagttcctccataagctcggctgatctgttcgaggagccgaggaagcagccagcagggaactacagcctgtccagtgtgctgcccaacgcccccgacatggcgcagttcaagcagggagtgagatcggttgctggaaaactctccgtctttgctaatggagtcgtgacttcaattcaggatcgctacggttcttaatactgaagtcatgatgtgtatttcctggagaaattcctctttaaatgaacaagtaaccacatctcaggcggcagtgaagtccagatagttttgcagattgttttgctactttttcatatggtatatgtttctgatttttaatatttcttttgagaaattctgagttctgatgtaggagctttcctgtgatttctgtttcacgttccttcctgtcacaccctcctttggcgtctctgtgtatatccttgctttattttcttggaacctttgatttcaacactgagggcctggagacctcggctcctcctgctcctgaaccaggaggcttcatgtgggggaggaggagaggtctccatgtgacacatgggctcagggctgccagaatcagcggatgctggatgggcctgcagaaacaacactcaccacacacacttccttcaaaagaccaaaagtgactggtgtctcgtgtgacagattgcttcatttatgtttctacatagtaaggtgactgccaaataatatttgaagtcatctgtctctttgtaaattattttatatgacctataaatttaaaaatgtttttcagtgagtgcttttaacaaacttaagcttctgccctgccaagggaattaatgttatcttgtgaaaggtgttgctgtttgaattgatgagaaatggaagatgagaactccctaagagttctcataataaatcatctcatcacaaatcaatacggtatacagagttaaagtggaatgaggtaagaagatacagctacagaaaatagttgcgtgtatgggagaacagtcattgtaattgggtagttttgttaataaatatttttaaatcttgcttttcagaaattaccgaatgtgtataaacaaataaagaaaaataatttagctgtgttttagacagcattagaatatattgttcagcacagtaaaatatatttgaaatttgataagccaaaaatgtggttttgaatgaatattttgtgaatctttcttaaaagctcaaatttgtagacttctaaatagaataaacacttgcagcagaaaaaaaaaagagagccacacaacttggggcccgcgccgcaagaatcctaaccccgtggcggcggcccgtatacaagcacggtccgcaacgcgcgcagggggggtcccacaaaacggggggcgggt

SEQ ID NO: 371510 - DNA, 2767 bp, Homo sapiens
cgcggctgaagcgagggcggggagggaaagcgagcggcgcctgcgccccggcggtggacgggcccggtcgtgggcggggattggggcggagcctgaccgttacgcgcagccccgcccccgcggcctcgtcgctcctgctgaggcggtagccgcttttcgtcgactcttaccggttggctgggccagctgcgccgcggctcacagctgacgatgggggaccccagcaagcaggacatcttgaccatcttcaagcgcctccgctcggtgcccactaacaaggtgtgttttgattgtggtgccaaaaatcccagctgggcaagcataacctatggagtgttcctttgcattgattgctcagggtcccaccggtcacttggtgttcacttgagttttattcgatctacagagttggattccaactggtcatggtttcagttgcgatgcatgcaagtcggaggaaacgctagtgcatcttccttttttcatcaacatgggtgttccaccaatgacaccaatgccaagtacaacagtcgtgctgctcagctctatagggagaaaatcaaatcgctcgcctctcaagcaacacggaagcatggcactgatctgtggcttgatagttgtgtggttccacctttgtcccctccaccaaaggaggaagatttttttgcctctcacgtttctcctgaggtgagtgacacagcgtgggcatcagcaatagcagaaccatcttctttaacatcaaggcctgtggaaaccactttggaaaataatgaaggtggacaagagcaaggaccaagtgtggaaggtcttaatgtaccaacaaaggctactttagaggtatcctctatcataaaaaagaaaccaaatcaagctaaaaaaggccttggggccaaaaaaggaagtttgggagctcagaaactggcaaacacatgctttaatgaaattgaaaaacaagctcaagctgcggataaaatgaaggagcaggaagacctggccaaggtggtatctaaagaagaatcaattgtttcatcattacgattagcctataaggatcttgaaattcaaatgaagaaagacgaaaagatgaacattagtggcaaaaaaaatgttgactcagacagactcggcatgggatttggaaattgcagaagtgttatttcacattcagtgacttcagatatgcagaccatagagcaggaatcacccattatggcaaaaccaagaaaaaagtataatgatgacagtgacgattcatattttacttccagctcaaggtactttgacgagccagtggagttaaggagcagttctttctctagctgggatgacagttcagattcctattggaaaaaagagaccagcaaagatactgaaacagttctgaaaaccacaggctattcagacagacctactgctcgccgcaagccagattatgagccagttgaaaatacagatgaggcccagaagaagtttggcaatgtcaaggccatttcatcagatatgtattttggaagacaatcccaggctgattatgagaccagggcccgcctagagaggctgtcagcaagttcctccataagctcggctgatctgttcgaggagccgaggaagcagccagcagggaactacagcctgtccagtgtgctgcccaacgcccccgacatggcgcagttcaagcagggagtgagatcggttgctggaaaactctccgtctttgctaatggagtcgtgacttcaattcaggatcgctacggttcttaatactgaagtcatgatgtgtatttcctggagaaattcctctttaaatgaacaagtaaccacatctcaggcggcagtgaagtccagatagttttgcagattgttttgctactttttcatatggtatatgtttctgatttttaatatttcttttgagaaattctgagttctgatgtaggagctttcctgtgatttctgtttcacgttccttcctgtcacaccctcctttggcgtctctgtgtatatccttgctttattttcttggaacctttgatttcaacactgagggcctggagacctcggctcctcctgctcctgaaccaggaggcttcatgtgggggaggaggagaggtctccatgtgacacatgggctcagggctgccagaatcagcggatgctggatgggcctgcagaaacaacactcaccacacacacttccttcaaaagaccaaaagtgactggtgtctcgtgtgacagattgcttcatttatgtttctacatagtaaggtgactgccaaataatatttgaagtcatctgtctctttgtaaattattttatatgacctataaatttaaaaatgtttttcagtgagtgcttttaacaaacttaagcttctgccctgccaagggaattaatgttatcttgtgaaaggtgttgctgtttgaattgatgagaaatggaagatgagaactccctaagagttctcataataaatcatctcatcacaaatcaatacggtatacagagttaaagtggaatgaggtaagaagatacagctacagaaaatagttgcgtgtatgggagaacagtcattgtaattgggtagttttgttaataaatatttttaaatcttgcttttcagaaattaccgaatgtgtataaacaaataaagaaaaataatttagctgtgttttagacagcattagaatatattgttcagcacagtaaaatatatttgaaatggtcgccatccgattctattctactgctatccttgaatgtcgccat

SEQ ID NO: 371511 - DNA, 2798 bp, Homo sapiens
cgcggctgaagcgagggcggggagggaaagcgagcggcgcctgcgccccggcggtggacgggcccggtcgtgggcggggattggggcggagcctgaccgttacgcgcagccccgcccccgcggcctcgtcgctcctgctgaggcggtagccgcttttcgtcgactcttaccggttggctgggccagctgcgccgcggctcacagctgacgatgggggaccccagcaagcaggacatcttgaccatcttcaagcgcctccgctcggtgcccactaacaaggtgtgttttgattgtggtgccaaaaatcccagctgggcaagcataacctatggagtgttcctttgcattgattgctcagggtcccaccggtcacttggtgttcacttgagttttattcgatctacagagttggattccaactggtcatggtttcagttgcgatgcatgcaagtcggaggaaacgctagtgcatcttccttttttcatcaacatgggtgttccaccaatgacaccaatgccaagtacaacagtcgtgctgctcagctctatagggagaaaatcaaatcgctcgcctctcaagcaacacggaagcatggcactgatctgtggcttgatagttgtgtggttccacctttgtcccctccaccaaaggaggaagatttttttgcctctcacgtttctcctgaggtgagtgacacagcgtgggcatcagcaatagcagaaccatcttctttaacatcaaggcctgtggaaaccactttggaaaataatgaaggtggacaagagcaaggaccaagtgtggaaggtcttaatgtaccaacaaaggctactttagaggtatcctctatcataaaaaagaaaccaaatcaagctaaaaaaggccttggggccaaaaaaggaagtttgggagctcagaaactggcaaacacatgctttaatgaaattgaaaaacaagctcaagctgcggataaaatgaaggagcaggaagacctggccaaggtggtatctaaagaagaatcaattgtttcatcattacgattagcctataaggatcttgaaattcaaatgaagaaagacgaaaagatgaacattagtggcaaaaaaaatgttgactcagacagactcggcatgggatttggaaattgcagaagtgttatttcacattcagtgacttcagatatgcagaccatagagcaggaatcacccattatggcaaaaccaagaaaaaagtataatgatgacagtgacgattcatattttacttccagctcaaggtactttgacgagccagtggagttaaggagcagttctttctctagctgggatgacagttcagattcctattggaaaaaagagaccagcaaagatactgaaacagttctgaaaaccacaggctattcagacagacctactgctcgccgcaagccagattatgagccagttgaaaatacagatgaggcccagaagaagtttggcaatgtcaaggccatttcatcagatatgtattttggaagacaatcccaggctgattatgagaccagggcccgcctagagaggctgtcagcaagttcctccataagctcggctgatctgttcgaggagccgaggaagcagccagcagggaactacagcctgtccagtgtgctgcccaacgcccccgacatggcgcagttcaagcagggagtgagatcggttgctggaaaactctccgtctttgctaatggagtcgtgacttcaattcaggatcgctacggttcttaatactgaagtcatgatgtgtatttcctggagaaattcctctttaaatgaacaagtaaccacatctcaggcggcagtgaagtccagatagttttgcagattgttttgctactttttcatatggtatatgtttctgatttttaatatttcttttgagaaattctgagttctgatgtaggagctttcctgtgatttctgtttcacgttccttcctgtcacaccctcctttggcgtctctgtgtatatccttgctttattttcttggaacctttgatttcaacactgagggcctggagacctcggctcctcctgctcctgaaccaggaggcttcatgtgggggaggaggagaggtctccatgtgacacatgggctcagggctgccagaatcagcggatgctggatgggcctgcagaaacaacactcaccacacacacttccttcaaaagaccaaaagtgactggtgtctcgtgtgacagattgcttcatttatgtttctacatagtaaggtgactgccaaataatatttgaagtcatctgtctctttgtaaattattttatatgacctataaatttaaaaatgtttttcagtgagtgcttttaacaaacttaagcttctgccctgccaagggaattaatgttatcttgtgaaaggtgttgctgtttgaattgatgagaaatggaagatgagaactccctaagagttctcataataaatcatctcatcacaaatcaatacggtatacagagttaaagtggaatgaggtaagaagatacagctacagaaaatagttgcgtgtatgggagaacagtcattgtaattgggtagttttgttaataaatatttttaaatcttgcttttcagaaattaccgaatgtgtataaacaaataaagaaaaataatttagctgtgttttagacagcattagaatatatttgaaatttgataagccaaaaatgtggttttgaatgaatattttgtgaatctttcttaaaagctcaaatttgtagacttctaaatagaataaacacttgcagcaga

SEQ ID NO: 371512 - DNA, 2629 bp, Homo sapiens
gacggaagtgcgagtccgggccctgtatgactatgaggggcaggagcatgatgagctgagcttcaaggctgagacggggtttcaccatattatccagtctggtcttgaactcctgagctcaagtgatcctcccgcctcagcctcccaaagtgctgggatcacaggcatgagcccctgagactgcaaataaaccatgctttagagaagatctacagagttggattccaactggtcatggtttcagttgcgatgcatgcaagtcggaggaaacgctagtgcatcttccttttttcatcaacatgggtgttccaccaatgacaccaatgccaagtacaacagtcgtgctgctcagctctatagggagaaaatcaaatcgctcgcctctcaagcaacacggaagcatggcactgatctgtggcttgatagttgtgtggttccacctttgtcccctccaccaaaggaggaagatttttttgcctctcacgtttctcctgaggtgagtgacacagcgtgggcatcagcaatagcagaaccatcttctttaacatcaaggcctgtggaaaccactttggaaaataatgaaggtggacaagagcaaggaccaagtgtggaaggtcttaatgtaccaacaaaggctactttagaggtatcctctatcataaaaaagaaaccaaatcaagctaaaaaaggccttggggccaaaaaaggaagtttgggagctcagaaactggcaaacacatgctttaatgaaattgaaaaacaagctcaagctgcggataaaatgaaggagcaggaagacctggccaaggtggtatctaaagaagaatcaattgtttcatcattacgattagcctataaggatcttgaaattcaaatgaagaaagacgaaaagatgaacattagtggcaaaaaaaatgttgactcagacagactcggcatgggatttggaaattgcagaagtgttatttcacattcagtgacttcagatatgcagaccatagagcaggaatcacccattatggcaaaaccaagaaaaaagtataatgatgacagtgacgattcatattttacttccagctcaaggtactttgacgagccagtggagttaaggagcagttctttctctagctgggatgacagttcagattcctattggaaaaaagagaccagcaaagatactgaaacagttctgaaaaccacaggctattcagacagacctactgctcgccgcaagccagattatgagccagttgaaaatacagatgaggcccagaagaagtttggcaatgtcaaggccatttcatcagatatgtattttggaagacaatcccaggctgattatgagaccagggcccgcctagagaggctgtcagcaagttcctccataagctcggctgatctgttcgaggagccgaggaagcagccagcagggaactacagcctgtccagtgtgctgcccaacgcccccgacatggcgcagttcaagcagggagtgagatcggttgctggaaaactctccgtctttgctaatggagtcgtgacttcaattcaggatcgctacggttcttaatactgaagtcatgatgtgtatttcctggagaaattcctctttaaatgaacaagtaaccacatctcaggcggcagtgaagtccagatagttttgcagattgttttgctactttttcatatggtatatgtttctgatttttaatatttcttttgagaaattctgagttctgatgtaggagctttcctgtgatttctgtttcacgttccttcctgtcacaccctcctttggcgtctctgtgtatatccttgctttattttcttggaacctttgatttcaacactgagggcctggagacctcggctcctcctgctcctgaaccaggaggcttcatgtgggggaggaggagaggtctccatgtgacacatgggctcagggctgccagaatcagcggatgctggatgggcctgcagaaacaacactcaccacacacacttccttcaaaagaccaaaagtgactggtgtctcgtgtgacagattgcttcatttatgtttctacatagtaaggtgactgccaaataatatttgaagtcatctgtctctttgtaaattattttatatgacctataaatttaaaaatgtttttcagtgagtgcttttaacaaacttaagcttctgccctgccaagggaattaatgttatcttgtgaaaggtgttgctgtttgaattgatgagaaatggaagatgagaactccctaagagttctcataataaatcatctcatcacaaatcaatacggtatacagagttaaagtggaatgaggtaagaagatacagctacagaaaatagttgcgtgtatgggagaacagtcattgtaattgggtagttttgttaataaatatttttaaatcttgcttttcagaaattaccgaatgtgtataaacaaataaagaaaaataatttagctgtgttttagacagcattagaatatattgttcagcacagtaaaatatatttgaaatttgataagccaaaaatgtggttttgaatgaatattttgtgaatctttcttaaaagctcaaatttgtagacttctaaatagaataaacacttgcagcaga

SEQ ID NO: 371513 - DNA, 3260 bp, Homo sapiens
cgcggctgaagcgagggcggggagggaaagcgagcggcgcctgcgccccggcggtggacgggcccggtcgtgggcggggattggggcggagcctgaccgttacgcgcagccccgcccccgcggcctcgtcgctcctgctgaggcggtagccgcttttcgtcgactcttaccggttggctgggccagctgcgccgcggctcacagctgacgatgggggaccccagcaagcaggacatcttgaccatcttcaagcgcctccgctcggtgcccactaacaaggtgtgttttgattgtggtgccaaaaatcccagctgggcaagcataacctatggagtgttcctttgcattgattgctcagggtcccaccggtcacttggtgttcacttgagttttattcgatctacagagttggattccaactggtcatggtttcagttgcgatgcatgcaagtcggaggaaacgctagtgcatcttccttttttcatcaacatgggtgttccaccaatgacaccaatgccaagtacaacagtcgtgctgctcagctctatagggagaaaatcaaatcgctcgcctctcaagcaacacggaagcatggcactgatctgtggcttgatagttgtgtggttccacctttgtcccctccaccaaaggaggaagatttttttgcctctcacgtttctcctgaggtgagtgacacagcgtgggcatcagcaatagcagaaccatcttctttaacatcaaggcctgtggaaaccactttggaaaataatgaaggtggacaagagcaaggaccaagtgtggaaggtcttaatgtaccaacaaaggctactttagaggtatcctctatcataaaaaagaaaccaaatcaagctaaaaaaggccttggggccaaaaaaggaagtttgggagctcagaaactggcaaacacatgctttaatgaaattgaaaaacaagctcaagctgcggataaaatgaaggagcaggaagacctggccaaggtggtatctaaagaagaatcaattgtttcatcattacgattagcctataaggatcttgaaattcaaatgaagaaagacgaaaagatgaacattagtggcaaaaaaaatgttgactcagacagactcggcatgggatttggaaattgcagaagtgttatttcacattcagtgacttcagatatgcagaccatagagcaggaatcacccattatggcaaaaccaagaaaaaagtataatgatgacagtgacgattcatattttacttccagctcaaggtactttgacgagccagtggagttaaggagcagttctttctctagctgggatgacagttcagattcctattggaaaaaagagaccagcaaagatactgaaacagttctgaaaaccacaggctattcagacagacctactgctcgccgcaagccagattatgagccagttgaaaatacagatgaggcccagaagaagtttggcaatgtcaaggccatttcatcagatatgtattttggaagacaatcccaggctgattatgagaccagggcccgcctagagaggctgtcagcaagttcctccataagctcggctgatctgttcgaggagccgaggaagcagccagcagggaactacagcctgtccagtgtgctgcccaacgcccccgacatggcgcagttcaagcagggagtgagatcggttgctggaaaactctccgtctttgctaatggagtcgtgacttcaattcaggtgaaggaattgaggcacagaaggttaggtcacttctgcaagatgaccagctgaaccaaaatttcagggcttcaaacaccaaatgtgttcctttgtcttccgtttcccacttgcttcccagagggctcagcaagtagcctctggcccactgagcatcctcccgcccactttgctccctgcctcctgatcccaggactgtggccgtggatgccagaggcaggatgtgaatcctgttgggttctgaagcccacacctaccctcagccttgaagctgcagcaatggctgctctccagatgagcacaccctcggggtgcagcgtccatgtcacatgcctgacatgggctgcagtgtcaatttgggtgatgctgaatattcagggcgtgggagtcagggatcgctgctgaatggtcgtgaacttccattttggttctctcttcaggatcgctacggttcttaatactgaagtcatgatgtgtatttcctggagaaattcctctttaaatgaacaagtaaccacatctcaggcggcagtgaagtccagatagttttgcagattgttttgctactttttcatatggtatatgtttctgatttttaatatttcttttgagaaattctgagttctgatgtaggagctttcctgtgatttctgtttcacgttccttcctgtcacaccctcctttggcgtctctgtgtatatccttgctttattttcttggaacctttgatttcaacactgagggcctggagacctcggctcctcctgctcctgaaccaggaggcttcatgtgggggaggaggagaggtctccatgtgacacatgggctcagggctgccagaatcagcggatgctggatgggcctgcagaaacaacactcaccacacacacttccttcaaaagaccaaaagtgactggtgtctcgtgtgacagattgcttcatttatgtttctacatagtaaggtgactgccaaataatatttgaagtcatctgtctctttgtaaattattttatatgacctataaatttaaaaatgtttttcagtgagtgcttttaacaaacttaagcttctgccctgccaagggaattaatgttatcttgtgaaaggtgttgctgtttgaattgatgagaaatggaagatgagaactccctaagagttctcataataaatcatctcatcacaaatcaatacggtatacagagttaaagtggaatgaggtaagaagatacagctacagaaaatagttgcgtgtatgggagaacagtcattgtaattgggtagttttgttaataaatatttttaaatcttgcttttcagaaattaccgaatgtgtataaacaaataaagaaaaataatttagctgtgttttagacagcattagaatatattgttcagcacagtaaaatatatttgaaatttgataagccaaaaatgtggttttgaatgaatattttgtgaatctttcttaaaagctcaaatttgtagacttctaaatagaataaacacttgcagcaga

SEQ ID NO: 371514 - DNA, 2485 bp, Homo sapiens
tctctaaaaaaaaaaaaaaaaaaaaaaaaaaatagccagatgtggtggtgcgcacctgtgatcccaactactcaggaggctgaagtggaaggctcccttgatctgggaggtaatgccactgcactcagctaaggtgacagagcgagaccctgtctcaaaaaaaaaaaaaaagttgttgtaatatattttttaaatgctcctgaagaaagtactgagaggggcaagctcaggctctatttctcttcagtgtgctgttaaaaaaaaaaatacattttctctgagtttggagactgcgtggaaatactgaggacaccattttgacaaagttctgttaatccaaaatatgcttatcaacttgagtcttctggatgagaaactaaagtggaaaatgttatcatctcttaaataataaagtgcagtatcttagaattttaaaagacacactaaaaaagaaaaattatttctattggtcttactttttaatttttattttttggcagaggtatcctctatcataaaaaagaaaccaaatcaagctaaaaaaggccttggggccaaaaaaggaagtttgggagctcagaaactggcaaacacatgctttaatgaaattgaaaaacaagctcaagctgcggataaaatgaaggagcaggaagacctggccaaggtggtatctaaagaagaatcaattgtttcatcattacgattagcctataaggatcttgaaattcaaatgaagaaagacgaaaagatgaacattagtggcaaaaaaaatgttgactcagacagactcggcatgggatttggaaattgcagaagtgttatttcacattcagtgacttcagatatgcagaccatagagcaggaatcacccattatggcaaaaccaagaaaaaagtataatgatgacagtgacgattcatattttacttccagctcaaggtactttgacgagccagtggagttaaggagcagttctttctctagctgggatgacagttcagattcctattggaaaaaagagaccagcaaagatactgaaacagttctgaaaaccacaggctattcagacagacctactgctcgccgcaagccagattatgagccagttgaaaatacagatgaggcccagaagaagtttggcaatgtcaaggccatttcatcagatatgtattttggaagacaatcccaggctgattatgagaccagggcccgcctagagaggctgtcagcaagttcctccataagctcggctgatctgttcgaggagccgaggaagcagccagcagggaactacagcctgtccagtgtgctgcccaacgcccccgacatggcgcagttcaagcagggagtgagatcggttgctggaaaactctccgtctttgctaatggagtcgtgacttcaattcaggatcgctacggttcttaatactgaagtcatgatgtgtatttcctggagaaattcctctttaaatgaacaagtaaccacatctcaggcggcagtgaagtccagatagttttgcagattgttttgctactttttcatatggtatatgtttctgatttttaatatttcttttgagaaattctgagttctgatgtaggagctttcctgtgatttctgtttcacgttccttcctgtcacaccctcctttggcgtctctgtgtatatccttgctttattttcttggaacctttgatttcaacactgagggcctggagacctcggctcctcctgctcctgaaccaggaggcttcatgtgggggaggaggagaggtctccatgtgacacatgggctcagggctgccagaatcagcggatgctggatgggcctgcagaaacaacactcaccacacacacttccttcaaaagaccaaaagtgactggtgtctcgtgtgacagattgcttcatttatgtttctacatagtaaggtgactgccaaataatatttgaagtcatctgtctctttgtaaattattttatatgacctataaatttaaaaatgtttttcagtgagtgcttttaacaaacttaagcttctgccctgccaagggaattaatgttatcttgtgaaaggtgttgctgtttgaattgatgagaaatggaagatgagaactccctaagagttctcataataaatcatctcatcacaaatcaatacggtatacagagttaaagtggaatgaggtaagaagatacagctacagaaaatagttgcgtgtatgggagaacagtcattgtaattgggtagttttgttaataaatatttttaaatcttgcttttcagaaattaccgaatgtgtataaacaaataaagaaaaataatttagctgtgttttagacagcattagaatatattgttcagcacagtaaaatatatttgaaatttgataagccaaaaatgtggttttgaatgaatattttgtgaatctttcttaaaagctcaaatttgtagacttctaaatagaataaacacttgcagcaga

SEQ ID NO: 371515 - DNA, 1699 bp, Homo sapiens
cccgtcttaaggaatgagaaattgcagaagtgttatttcacattcagtgacttcagatatgcagaccatagagcaggaatcacccattatggcaaaaccaagaaaaaagtataatgatgacagtgacgattcatattttacttccagctcaaggtactttgacgagccagtggagttaaggagcagttctttctctagctgggatgacagttcagattcctattggaaaaaagagaccagcaaagatactgaaacagttctgaaaaccacaggctattcagacagacctactgctcgccgcaagccagattatgagccagttgaaaatacagatgaggcccagaagaagtttggcaatgtcaaggccatttcatcagatatgtattttggaagacaatcccaggctgattatgagaccagggcccgcctagagaggctgtcagcaagttcctccataagctcggctgatctgttcgaggagccgaggaagcagccagcagggaactacagcctgtccagtgtgctgcccaacgcccccgacatggcgcagttcaagcagggagtgagatcggttgctggaaaactctccgtctttgctaatggagtcgtgacttcaattcaggatcgctacggttcttaatactgaagtcatgatgtgtatttcctggagaaattcctctttaaatgaacaagtaaccacatctcaggcggcagtgaagtccagatagttttgcagattgttttgctactttttcatatggtatatgtttctgatttttaatatttcttttgagaaattctgagttctgatgtaggagctttcctgtgatttctgtttcacgttccttcctgtcacaccctcctttggcgtctctgtgtatatccttgctttattttcttggaacctttgatttcaacactgagggcctggagacctcggctcctcctgctcctgaaccaggaggcttcatgtgggggaggaggagaggtctccatgtgacacatgggctcagggctgccagaatcagcggatgctggatgggcctgcagaaacaacactcaccacacacacttccttcaaaagaccaaaagtgactggtgtctcgtgtgacagattgcttcatttatgtttctacatagtaaggtgactgccaaataatatttgaagtcatctgtctctttgtaaattattttatatgacctataaatttaaaaatgtttttcagtgagtgcttttaacaaacttaagcttctgccctgccaagggaattaatgttatcttgtgaaaggtgttgctgtttgaattgatgagaaatggaagatgagaactccctaagagttctcataataaatcatctcatcacaaatcaatacggtatacagagttaaagtggaatgaggtaagaagatacagctacagaaaatagttgcgtgtatgggagaacagtcattgtaattgggtagttttgttaataaatatttttaaatcttgcttttcagaaattaccgaatgtgtataaacaaataaagaaaaataatttagctgtgttttagacagcattagaatatattgttcagcacagtaaaatatatttgaaatttgataagccaaaaatgtggttttgaatgaatattttgtgaatctttcttaaaagctcaaatttgtagacttctaaatagaataaacacttgcagcaga

SEQ ID NO: 371516 - DNA, 2332 bp, Homo sapiens
cgcggctgaagcgagggcggggagggaaagcgagcggcgcctgcgccccggcggtggacgggcccggtcgtgggcggggattggggcggagcctgaccgttacgcgcagccccgcccccgcggcctcgtcgctcctgctgaggcggtagccgcttttcgtcgactcttaccggttggctgggccagctgcgccgcggctcacagctgacgatgggggaccccagcaagcaggacatcttgaccatcttcaagcgcctccgctcggtgcccactaacaaggtgtgttttgattgtggtgccaaaaatcccagctgggcaagcataacctatggagtgttcctttgcattgattgctcagggtcccaccggtcacttggtgttcacttgagttttattcgatctacagagttggattccaactggtcatggtttcagttgcgatgcatgcaagtcggaggaaacgctagtgcatcttccttttttcatcaacatgggtgttccaccaatgacaccaatgccaagtacaacagtcgtgctgctcagctctatagggagaaaatcaaatcgctcgcctctcaagcaacacggaagcatggcactgatctgtggcttgatagttgtgtggttccacctttgtcccctccaccaaaggaggaagatttttttgcctctcacgtttctcctgaggtgagtgacacagcgtgggcatcagcaatagcagaaccatcttctttaacatcaaggcctgtggaaaccactttggaaaataatgaaggtggacaagagcaaggaccaagtgtggaaggtcttaatgtaccaacaaaggctactttagaggtatcctctatcataaaaaagaaaccaaatcaagctaaaaaaggccttggggccaaaaaaggaagtttgggagctcagaaactggcaaacacatgctttaatgaaattgaaaaacaagctcaagctgcggataaaatgaaggagcaggaagacctggccaaggtggtatctaaagaagaatcaattgtttcatcattacgattagcctataaggatcttgaaattcaaatgaagaaagacgaaaagatgaacattagtggcaaaaaaaatgttgactcagacagactcggcatgggatttggaaattgcagaagtgttatttcacattcagtgacttcagatatgcagaccatagagcaggaatcacccattatggcaaaaccaagaaaaaagtataatgatgacagtgacgattcatattttacttccagctcaaggtactttgacgagccagtggagttaaggagcagttctttctctagctgggatgacagttcagattcctattggaaaaaagagaccagcaaagatactgaaacagttctgaaaaccacaggctattcagacagacctactgctcgccgcaagccagattatgagccagttgaaaatacagatgaggcccagaagaagtttggcaatgtcaaggccatttcatcagatatgtattttggaagacaatcccaggctgattatgagaccagggcccgcctagagaggctgtcagcaagttcctccataagctcggctgatctgttcgaggagccgaggaagcagccagcagggaactacagcctgtccagtgtgctgcccaacgcccccgacatggcgcagttcaagcagggagtgagatcggttgctggaaaactctccgtctttgctaatggagtcgtgacttcaattcaggtcagtggaatggggcagtgctcactggctatgacggtaggttcagcagtttgaaaatgagacctgcttcaatcttcaactgctggaaaattcaattatatattattggatcgatatgtttgctacactataacccagaacattatgaaaaccagaaattataattttatatttaatattttctaacggatgactctaggggaattgttagaggaattgtcatgaccattgtccagtttttttcctagattggaacagagaagtattaagaagaaaactgaaattatctgtaatgccacatcacagggataacctctgttaatattttggtatatttttagctctagatttctaaggatatttttctatacgtagattaaaaagatatacatatctatctttttaaagttaaaaagggattatattgtatagagggttttatatcttgctttttctctgtgatgctgggagcatttccttgtaatgaaaagttttcctaaaaccacattctattgagtgaaaacataaccaaggatggcgcatacttgcgcatgagatcgaggccatctgtgacgatatgagtggctcg

SEQ ID NO: 371517 - DNA, 1756 bp, Homo sapiens
tggaggtgcacccatttcggagagttccctcagccccaggactctggatgtagccgttttcatgctgtgaatagcacagtcttccctttcatgtggcactgaagttaaaatgcatagagctctttcatgtcccttaggtcagctaagcccacatcagtgtccaaataggtaacatccctattttatagatggtcatccccattttagagatggctcccttttatatccccattttacaggtgaaggaattgaggcacagaaggttaggtcacttctgcaagatgaccagctgaaccaaaatttcagggcttcaaacaccaaatgtgttcctttgtcttccgtttcccacttgcttcccagagggctcagcaagtagcctctggcccactgagcatcctcccgcccactttgctccctgcctcctgatcccaggactgtggccgtggatgccagaggcaggatgtgaatcctgttgggttctgaagcccacacctaccctcagccttgaagctgcagcaatggctgctctccagatgagcacaccctcggggtgcagcgtccatgtcacatgcctgacatgggctgcagtgtcaatttgggtgatgctgaatattcagggcgtgggagtcagggatcgctgctgaatggtcgtgaacttccattttggttctctcttcaggatcgctacggttcttaatactgaagtcatgatgtgtatttcctggagaaattcctctttaaatgaacaagtaaccacatctcaggcggcagtgaagtccagatagttttgcagattgttttgctactttttcatatggtatatgtttctgatttttaatatttcttttgagaaattctgagttctgatgtaggagctttcctgtgatttctgtttcacgttccttcctgtcacaccctcctttggcgtctctgtgtatatccttgctttattttcttggaacctttgatttcaacactgagggcctggagacctcggctcctcctgctcctgaaccaggaggcttcatgtgggggaggaggagaggtctccatgtgacacatgggctcagggctgccagaatcagcggatgctggatgggcctgcagaaacaacactcaccacacacacttccttcaaaagaccaaaagtgactggtgtctcgtgtgacagattgcttcatttatgtttctacatagtaaggtgactgccaaataatatttgaagtcatctgtctctttgtaaattattttatatgacctataaatttaaaaatgtttttcagtgagtgcttttaacaaacttaagcttctgccctgccaagggaattaatgttatcttgtgaaaggtgttgctgtttgaattgatgagaaatggaagatgagaactccctaagagttctcataataaatcatctcatcacaaatcaatacggtatacagagttaaagtggaatgaggtaagaagatacagctacagaaaatagttgcgtgtatgggagaacagtcattgtaattgggtagttttgttaataaatatttttaaatcttgcttttcagaaattaccgaatgtgtataaacaaataaagaaaaataatttagctgtgttttagacagcattagaatatattgttcagcacagtaaaatatatttgaaatttgataagccaaaaatgtggttttgaatgaatattttgtgaatctttcttaaaagctcaaatttgtagacttctaaatagaataaacacttgcagcaga

SEQ ID NO: 371518 - DNA, 983 bp, Homo sapiens
gcggccgcccgcgcctcctcggccgcctgtcgggcatgaaaaccaaattctgcaccgggggcatatgcggatccctaaacgctcgggctgttagtgtgagtgctttcctgtgatttctgtttcacgttccttcctgtcacaccctcctttggcgtctctgtgtatatccttgctttattttcttggaacctttgatttcaacactgagggcctggagacctcggctcctcctgctcctgaaccaggaggcttcatgtgggggaggaggagaggtctccatgtgacacatgggctcagggctgccagaatcagcggatgctggatgggcctgcagaaacaacactcaccacacacacttccttcaaaagaccaaaagtgactggtgtctcgtgtgacagattgcttcatttatgtttctacatagtaaggtgactgccaaataatatttgaagtcatctgtctctttgtaaattattttatatgacctataaatttaaaaatgtttttcagtgagtgcttttaacaaacttaagcttctgccctgccaagggaattaatgttatcttgtgaaaggtgttgctgtttgaattgatgagaaatggaagatgagaactccctaagagttctcataataaatcatctcatcacaaatcaatacggtatacagagttaaagtggaatgaggtaagaagatacagctacagaaaatagttgcgtgtatgggagaacagtcattgtaattgggtagttttgttaataaatatttttaaatcttgcttttcagaaattaccgaatgtgtataaacaaataaagaaaaataatttagctgtgttttagacagcattagaatatattgttcagcacagtaaaatatatttgaaatttgataagccaaaaatgtggttttgaatgaatattttgtgaatctttcttaaaagctcaaatttgtagacttctaaatagaataaacacttgcagcaga

SEQ ID NO: 371519 - DNA, 1208 bp, Homo sapiens
cgcggctgaagcgagggcggggagggaaagcgagcggcgcctgcgccccggcggtggacgggcccggtcgtgggcggggattggggcggagcctgaccgttacgcgcagccccgcccccgcggcctcgtcgctcctgctgaggcggtagccgcttttcgtcgactcttaccggttggctgggccagctgcgccgcggctcacagctgacgatgggggaccccagcaagcaggacatcttgaccatcttcaagcgcctccgctcggtgcccactaacaaggtgtgttttgattgtggtgccaaaaatcccagctgggcaagcataacctatggagtgttcctttgcattgattgctcagggtcccaccggtcacttggtgttcacttgagttttattcgatctacagagttggattccaactggtcatggtttcagttgcgatgcatgcaagtcggaggaaacgctagtgcatcttccttttttcatcaacatgggtgttccaccaatgacaccaatgccaagtacaacagtcgtgctgctcagctctatagggagaaaatcaaatcgctcgcctctcaagcaacacggaagcatggcactgatctgtggcttgatagttgtgtggttccacctttgtcccctccaccaaaggaggaagatttttttgcctctcacgtttctcctgaggtgagtgacacagcgtgggcatcagcaatagcagaaccatcttctttaacatcaaggcctgtggaaaccactttggaaaataatgaaggtggagtccttagaactgtcatgtaatactattctatggttcagtggcatgctatgaaactattaaaaattaatcccaaagtgctgggattacaggcgtgagccaccacacctggccgacccttctgtcttaacaggaagaaatattcataatagactataaagtgggggaaaaatattactgaacatggaatataataatcatttttgtaaaaaaagaaaaacataccaaaaacgttctggaaagcacatagcaaattgttaaatagagagtgaaattactgaggatttttagttctcacttgatatagtgttgaagtgtctgaacttttataatgagtatgggttacttttatcatcaaaaacaaaatttcaatttaaaaacttataaaaatagttgatacataatgattcacatttggtgactttcttac

SEQ ID NO: 371520 - DNA, 968 bp, Homo sapiens
cgcggctgaagcgagggcggggagggaaagcgagcggcgcctgcgccccggcggtggacgggcccggtcgtgggcggggattggggcggagcctgaccgttacgcgcagccccgcccccgcggcctcgtcgctcctgctgaggcggtagccgcttttcgtcgactcttaccggttggctgggccagctgcgccgcggctcacagctgacgatgggggaccccagcaagcaggacatcttgaccatcttcaagcgcctccgctcggtgcccactaacaaggtgtgttttgattgtggtgccaaaaatcccagctgggcaagcataacctatggagtgttcctttgcattgattgctcagggtcccaccggtcacttggtgttcacttgagttttattcgatctacagagttggattccaactggtcatggtttcagttgcgatgcatgcaagtcggaggaaacgctagtgcatcttccttttttcatcaacatgggtgttccaccaatgacaccaatgccaagtacaacagtcgtgctgctcagctctatagggagaaaatcaaatcgctcgcctctcaagcaacacggaagcatggcactgatgtaagtcactggaggctggattgtttcctttagatacatgttcacttcatagaaaaagtgatttttatcctgaatagtaaaacttttctacctgagttgtcttacaaggaattagtgtacagtagattcttactattgaagtagttatgttctgtaaattcatcatgagtactggattagtgaatactaaaacattgctcctaggagaaatacaggattaggttcctataagctctggtctcattttcatcaactgatcaatacataaccttatttaacatgtgtttctatttaaagacacctttttaaatatatattgatggctcatgaatattgaactcacagccaaggactataactcagcc

SEQ ID NO: 371521 - DNA, 2820 bp, Homo sapiens
cgcggctgaagcgagggcggggagggaaagcgagcggcgcctgcgccccggcggtggacgggcccggtcgtgggcggggattggggcggagcctgaccgttacgcgcagccccgcccccgcggcctcgtcgctcctgctgaggcggtagccgcttttcgtcgactcttaccggttggctgggccagctgcgccgcggctcacagctgacgatgggggaccccagcaagcaggacatcttgaccatcttcaagcgcctccgctcggtgcccactaacaaggtgtgttttgattgtggtgccaaaaatcccagctgggcaagcataacctatggagtgttcctttgcattgattgctcagggtcccaccggtcacttggtgttcacttgagttttattcgatctacagagttggattccaactggtcatggtttcagttgcgatgcatgcaagtcggaggaaacgctagtgcatcttccttttttcatcaacatgggtgttccaccaatgacaccaatgccaagtacaacagtcgtgctgctcagctctatagggagaaaatcaaatcgctcgcctctcaagcaacacggaagcatggcactgatctgtggcttgatagttgtgtggttccacctttgtcccctccaccaaaggaggaagatttttttgcctctcacgtttctcctgaggtgagtgacacagcgtgggcatcagcaatagcagaaccatcttctttaacatcaaggcctgtggaaaccactttggaaaataatgaaggtggacaagagcaaggaccaagtgtggaaggtcttaatgtaccaacaaaggctactttagaggtatcctctatcataaaaaagaaaccaaatcaagctaaaaaaggccttggggccaaaaaaggaagtttgggagctcagaaactggcaaacacatgctttaatgaaattgaaaaacaagctcaagctgcggataaaatgaaggagcaggaagacctggccaaggtggtatctaaagaagaatcaattgtttcatcattacgattagcctataaggatcttgaaattcaaatgaagaaagacgaaaagatgaacattagtggcaaaaaaaatgttgactcagacagactcggcatgggatttggaaattgcagaagtgttatttcacattcagtgacttcagatatgcagaccatagagcaggaatcacccattatggcaaaaccaagaaaaaagtataatgatgacagtgacgattcatattttacttccagctcaaggtactttgacgagccagtggagttaaggagcagttctttctctagctgggatgacagttcagattcctattggaaaaaagagaccagcaaagatactgaaacagttctgaaaaccacaggctattcagacagacctactgctcgccgcaagccagattatgagccagttgaaaatacagatgaggcccagaagaagtttggcaatgtcaaggccatttcatcagatatgtattttggaagacaatcccaggctgattatgagaccagggcccgcctagagaggctgtcagcaagttcctccataagctcggctgatctgttcgaggagccgaggaagcagccagcagggaactacagcctgtccagtgtgctgcccaacgcccccgacatggcgcagttcaagcagggagtgagatcggttgctggaaaactctccgtctttgctaatggagtcgtgacttcaattcaggatcgctacggttcttaatactgaagtcatgatgtgtatttcctggagaaattcctctttaaatgaacaagtaaccacatctcaggcggcagtgaagtccagatagttttgcagattgttttgctactttttcatatggtatatgtttctgatttttaatatttcttttgagaaattctgagttctgatgtaggagctttcctgtgatttctgtttcacgttccttcctgtcacaccctcctttggcgtctctgtgtatatccttgctttattttcttggaacctttgatttcaacactgagggcctggagacctcggctcctcctgctcctgaaccaggaggcttcatgtgggggaggaggagaggtctccatgtgacacatgggctcagggctgccagaatcagcggatgctggatgggcctgcagaaacaacactcaccacacacacttccttcaaaagaccaaaagtgactggtgtctcgtgtgacagattgcttcatttatgtttctacatagtaaggtgactgccaaataatatttgaagtcatctgtctctttgtaaattattttatatgacctataaatttaaaaatgtttttcagtgagtgcttttaacaaacttaagcttctgccctgccaagggaattaatgttatcttgtgaaaggtgttgctgtttgaattgatgagaaatggaagatgagaactccctaagagttctcataataaatcatctcatcacaaatcaatacggtatacagagttaaagtggaatgaggtaagaagatacagctacagaaaatagttgcgtgtatgggagaacagtcattgtaattgggtagttttgttaataaatatttttaaatcttgcttttcagaaattaccgaatgtgtataaacaaataaagaaaaataatttagctgtgttttagacagcattagaatatattgttcagcacagtaaaatatatttgaaatttgataagccaaaaatgtggttttgaatgaatattttgtgaatctttcttaaaagctcaaatttgtagacttctaaatagaataaacacttgcagcaga

SEQ ID NO: 371522 - DNA, 2835 bp, Homo sapiens
cgcggctgaagcgagggcggggagggaaagcgagcggcgcctgcgccccggcggtggacgggcccggtcgtgggcggggattggggcggagcctgaccgttacgcgcagccccgcccccgcggcctcgtcgctcctgctgaggcggtagccgcttttcgtcgactcttaccggttggctgggccagctgcgccgcggctcacagctgacgatgggggaccccagcaagcaggacatcttgaccatcttcaagcgcctccgctcggtgcccactaacaaggtgtgttttgattgtggtgccaaaaatcccagctgggcaagcataacctatggagtgttcctttgcattgattgctcagggtcccaccggtcacttggtgttcacttgagttttattcgatctacagagttggattccaactggtcatggtttcagttgcgatgcatgcaagtcggaggaaacgctagtgcatcttccttttttcatcaacatgggtgttccaccaatgacaccaatgccaagtacaacagtcgtgctgctcagctctatagggagaaaatcaaatcgctcgcctctcaagcaacacggaagcatggcactgatctgtggcttgatagttgtgtggttccacctttgtcccctccaccaaaggaggaagatttttttgcctctcacgtttctcctgaggtgagtgacacagcgtgggcatcagcaatagcagaaccatcttctttaacatcaaggcctgtggaaaccactttggaaaataatgaaggtggacaagagcaaggaccaagtgtggaaggtcttaatgtaccaacaaaggctactttagaggtatcctctatcataaaaaagaaaccaaatcaagctaaaaaaggccttggggccaaaaaaggaagtttgggagctcagaaactggcaaacacatgctttaatgaaattgaaaaacaagctcaagctgcggataaaatgaaggagcaggaagacctggccaaggtggtatctaaagaagaatcaattgtttcatcattacgattagcctataaggatcttgaaattcaaatgaagaaagacgaaaagatgaacattagtggcaaaaaaaatgttgactcagacagactcggcatgggatttggaaattgcagaagtgttatttcacattcagtgacttcagatatgcagaccatagagcaggaatcacccattatggcaaaaccaagaaaaaagtataatgatgacagtgacgattcatattttacttccagctcaaggtactttgacgagccagtggagttaaggagcagttctttctctagctgggatgacagttcagattcctattggaaaaaagagaccagcaaagatactgaaacagttctgaaaaccacaggctattcagacagacctactgctcgccgcaagccagattatgagccagttgaaaatacagatgaggcccagaagaagtttggcaatgtcaaggccatttcatcagatatgtattttggaagacaatcccaggctgattatgagaccagggcccgcctagagaggctgtcagcaagttcctccataagctcggctgatctgttcgaggagccgaggaagcagccagcagggaactacagcctgtccagtgtgctgcccaacgcccccgacatggcgcagttcaagcagggagtgagatcggttgctggaaaactctccgtctttgctaatggagtcgtgacttcaattcaggatcgctacggttcttaatactgaagtcatgatgtgtatttcctggagaaattcctctttaaatgaacaagtaaccacatctcaggcggcagtgaagtccagatagttttgcagattgttttgctactttttcatatggtatatgtttctgatttttaatatttcttttgagaaattctgagttctgatgtaggagctttcctgtgatttctgtttcacgttccttcctgtcacaccctcctttggcgtctctgtgtatatccttgctttattttcttggaacctttgatttcaacactgagggcctggagacctcggctcctcctgctcctgaaccaggaggcttcatgtgggggaggaggagaggtctccatgtgacacatgggctcagggctgccagaatcagcggatgctggatgggcctgcagaaacaacactcaccacacacacttccttcaaaagaccaaaagtgactggtgtctcgtgtgacagattgcttcatttatgtttctacatagtaaggtgactgccaaataatatttgaagtcatctgtctctttgtaaattattttatatgacctataaatttaaaaatgtttttcagtgagtgcttttaacaaacttaagcttctgccctgccaagggaattaatgttatcttgtgaaaggtgttgctgtttgaattgatgagaaatggaagatgagaactccctaagagttctcataataaatcatctcatcacaaatcaatacggtatacagagttaaagtggaatgaggtaagaagatacagctacagaaaatagttgcgtgtatgggagaacagtcattgtaattgggtagttttgttaataaatatttttaaatcttgcttttcagaaattaccgaatgtgtataaacaaataaagaaaaataatttagctgtgttttagacagcattagaatatattgttcagcacagtaaaatatatttgaaatttgataagccaaaaatgtggttttgaatgaatattttgtgaatctttcttaaaagctcaaaggcagaaaaaaatttgtgtcaaaatgttgaatttaatcataagtgaggaaacc

SEQ ID NO: 371523 - DNA, 2767 bp, Homo sapiens
cgcggctgaagcgagggcggggagggaaagcgagcggcgcctgcgccccggcggtggacgggcccggtcgtgggcggggattggggcggagcctgaccgttacgcgcagccccgcccccgcggcctcgtcgctcctgctgaggcggtagccgcttttcgtcgactcttaccggttggctgggccagctgcgccgcggctcacagctgacgatgggggaccccagcaagcaggacatcttgaccatcttcaagcgcctccgctcggtgcccactaacaaggtgtgttttgattgtggtgccaaaaatcccagctgggcaagcataacctatggagtgttcctttgcattgattgctcagggtcccaccggtcacttggtgttcacttgagttttattcgatctacagagttggattccaactggtcatggtttcagttgcgatgcatgcaagtcggaggaaacgctagtgcatcttccttttttcatcaacatgggtgttccaccaatgacaccaatgccaagtacaacagtcgtgctgctcagctctatagggagaaaatcaaatcgctcgcctctcaagcaacacggaagcatggcactgatctgtggcttgatagttgtgtggttccacctttgtcccctccaccaaaggaggaagatttttttgcctctcacgtttctcctgaggtgagtgacacagcgtgggcatcagcaatagcagaaccatcttctttaacatcaaggcctgtggaaaccactttggaaaataatgaaggtggacaagagcaaggaccaagtgtggaaggtcttaatgtaccaacaaaggctactttagaggtatcctctatcataaaaaagaaaccaaatcaagctaaaaaaggccttggggccaaaaaaggaagtttgggagctcagaaactggcaaacacatgctttaatgaaattgaaaaacaagctcaagctgcggataaaatgaaggagcaggaagacctggccaaggtggtatctaaagaagaatcaattgtttcatcattacgattagcctataaggatcttgaaattcaaatgaagaaagacgaaaagatgaacattagtggcaaaaaaaatgttgactcagacagactcggcatgggatttggaaattgcagaagtgttatttcacattcagtgacttcagatatgcagaccatagagcaggaatcacccattatggcaaaaccaagaaaaaagtataatgatgacagtgacgattcatattttacttccagctcaaggtactttgacgagccagtggagttaaggagcagttctttctctagctgggatgacagttcagattcctattggaaaaaagagaccagcaaagatactgaaacagttctgaaaaccacaggctattcagacagacctactgctcgccgcaagccagattatgagccagttgaaaatacagatgaggcccagaagaagtttggcaatgtcaaggccatttcatcagatatgtattttggaagacaatcccaggctgattatgagaccagggcccgcctagagaggctgtcagcaagttcctccataagctcggctgatctgttcgaggagccgaggaagcagccagcagggaactacagcctgtccagtgtgctgcccaacgcccccgacatggcgcagttcaagcagggagtgagatcggttgctggaaaactctccgtctttgctaatggagtcgtgacttcaattcaggatcgctacggttcttaatactgaagtcatgatgtgtatttcctggagaaattcctctttaaatgaacaagtaaccacatctcaggcggcagtgaagtccagatagttttgcagattgttttgctactttttcatatggtatatgtttctgatttttaatatttcttttgagaaattctgagttctgatgtaggagctttcctgtgatttctgtttcacgttccttcctgtcacaccctcctttggcgtctctgtgtatatccttgctttattttcttggaacctttgatttcaacactgagggcctggagacctcggctcctcctgctcctgaaccaggaggcttcatgtgggggaggaggagaggtctccatgtgacacatgggctcagggctgccagaatcagcggatgctggatgggcctgcagaaacaacactcaccacacacacttccttcaaaagaccaaaagtgactggtgtctcgtgtgacagattgcttcatttatgtttctacatagtaaggtgactgccaaataatatttgaagtcatctgtctctttgtaaattattttatatgacctataaatttaggaattaatgttatcttgtgaaaggtgttgctgtttgaattgatgagaaatggaagatgagaactccctaagagttctcataataaatcatctcatcacaaatcaatacggtatacagagttaaagtggaatgaggtaagaagatacagctacagaaaatagttgcgtgtatgggagaacagtcattgtaattgggtagttttgttaataaatatttttaaatcttgcttttcagaaattaccgaatgtgtataaacaaataaagaaaaataatttagctgtgttttagacagcattagaatatattgttcagcacagtaaaatatatttgaaatttgataagccaaaaatgtggttttgaatgaatattttgtgaatctttcttaaaagctcaaatttgtagacttctaaatagaataaacacttgcagcaga

SEQ ID NO: 371524 - DNA, 2784 bp, Homo sapiens
cgcggctgaagcgagggcggggagggaaagcgagcggcgcctgcgccccggcggtggacgggcccggtcgtgggcggggattggggcggagcctgaccgttacgcgcagccccgcccccgcggcctcgtcgctcctgctgaggcggtagccgcttttcgtcgactcttaccggttggctgggccagctgcgccgcggctcacagctgacgatgggggaccccagcaagcaggacatcttgaccatcttcaagcgcctccgctcggtgcccactaacaaggtgtgttttgattgtggtgccaaaaatcccagctgggcaagcataacctatggagtgttcctttgcattgattgctcagggtcccaccggtcacttggtgttcacttgagttttattcgatctacagagttggattccaactggtcatggtttcagttgcgatgcatgcaagtcggaggaaacgctagtgcatcttccttttttcatcaacatgggtgttccaccaatgacaccaatgccaagtacaacagtcgtgctgctcagctctatagggagaaaatcaaatcgctgtggcttgatagttgtgtggttccacctttgtcccctccaccaaaggaggaagatttttttgcctctcacgtttctcctgaggtgagtgacacagcgtgggcatcagcaatagcagaaccatcttctttaacatcaaggcctgtggaaaccactttggaaaataatgaaggtggacaagagcaaggaccaagtgtggaaggtcttaatgtaccaacaaaggctactttagaggtatcctctatcataaaaaagaaaccaaatcaagctaaaaaaggccttggggccaaaaaaggaagtttgggagctcagaaactggcaaacacatgctttaatgaaattgaaaaacaagctcaagctgcggataaaatgaaggagcaggaagacctggccaaggtggtatctaaagaagaatcaattgtttcatcattacgattagcctataaggatcttgaaattcaaatgaagaaagacgaaaagatgaacattagtggcaaaaaaaatgttgactcagacagactcggcatgggatttggaaattgcagaagtgttatttcacattcagtgacttcagatatgcagaccatagagcaggaatcacccattatggcaaaaccaagaaaaaagtataatgatgacagtgacgattcatattttacttccagctcaaggtactttgacgagccagtggagttaaggagcagttctttctctagctgggatgacagttcagattcctattggaaaaaagagaccagcaaagatactgaaacagttctgaaaaccacaggctattcagacagacctactgctcgccgcaagccagattatgagccagttgaaaatacagatgaggcccagaagaagtttggcaatgtcaaggccatttcatcagatatgtattttggaagacaatcccaggctgattatgagaccagggcccgcctagagaggctgtcagcaagttcctccataagctcggctgatctgttcgaggagccgaggaagcagccagcagggaactacagcctgtccagtgtgctgcccaacgcccccgacatggcgcagttcaagcagggagtgagatcggttgctggaaaactctccgtctttgctaatggagtcgtgacttcaattcaggatcgctacggttcttaatactgaagtcatgatgtgtatttcctggagaaattcctctttaaatgaacaagtaaccacatctcaggcggcagtgaagtccagatagttttgcagattgttttgctactttttcatatggtatatgtttctgatttttaatatttcttttgagaaattctgagttctgatgtaggagctttcctgtgatttctgtttcacgttccttcctgtcacaccctcctttggcgtctctgtgtatatccttgctttattttcttggaacctttgatttcaacactgagggcctggagacctcggctcctcctgctcctgaaccaggaggcttcatgtgggggaggaggagaggtctccatgtgacacatgggctcagggctgccagaatcagcggatgctggatgggcctgcagaaacaacactcaccacacacacttccttcaaaagaccaaaagtgactggtgtctcgtgtgacagattgcttcatttatgtttctacatagtaaggtgactgccaaataatatttgaagtcatctgtctctttgtaaattattttatatgacctataaatttaaaaatgtttttcagtgagtgcttttaacaaacttaagcttctgccctgccaagggaattaatgttatcttgtgaaaggtgttgctgtttgaattgatgagaaatggaagatgagaactccctaagagttctcataataaatcatctcatcacaaatcaatacggtatacagagttaaagtggaatgaggtaagaagatacagctacagaaaatagttgcgtgtatgggagaacagtcattgtaattgggtagttttgttaataaatatttttaaatcttgcttttcagaaattaccgaatgtgtataaacaaataaagaaaaataatttagctgtgttttagacagcattagaatatattgttcagcacagtaaaatatatttgaaatttgataagccaaaaatgtggttttgaatgaatattttgtgaatctttcttaaaagctcaaatttgtagacttctaaatagaataaacacttgcagcaga

SEQ ID NO: 371525 - DNA, 1657 bp, Homo sapiens
cgcggctgaagcgagggcggggagggaaagcgagcggcgcctgcgccccggcggtggacgggcccggtcgtgggcggggattggggcggagcctgaccgttacgcgcagccccgcccccgcggcctcgtcgctcctgctgaggcggtagccgcttttcgtcgactcttaccggttggctgggccagctgcgccgcggctcacagctgacgatgggggaccccagcaagcaggacatcttgaccatcttcaagcgcctccgctcggtgcccactaacaaggtgtgttttgattgtggtgccaaaaatcccagctgggcaagcataacctatggagtgttcctttgcattgattgctcagggtcccaccggtcacttggtgttcacttgagttttattcgatctacagagttggattccaactggtcatggtttcagttgcgatgcatgcaagtcggaggaaacgctagtgcatcttccttttttcatcaacatgggtgttccaccaatgacaccaatgccaagtacaacagtcgtgctgctcagctctatagggagaaaatcaaatcgctcgcctctcaagcaacacggaagcatggcactgatctgtggcttgatagttgtgtggttccacctttgtcccctccaccaaaggaggaagatttttttgcctctcacgtttctcctgaggtgagtgacacagcgtgggcatcagcaatagcagaaccatcttctttaacatcaaggcctgtggaaaccactttggaaaataatgaaggtggacaagagcaaggaccaagtgtggaaggtcttaatgtaccaacaaaggctactttagaggtatcctctatcataaaaaagaaaccaaatcaagctaaaaaaggccttggggccaaaaaaggaagtttgggagctcagaaactggcaaacacatgctttaatgaaattgaaaaacaagctcaagctgcggataaaatgaaggagcaggaagacctggccaaggtggtatctaaagaagaatcaattgtttcatcattacgattagcctataaggatcttgaaattcaaatgaagaaagacgaaaagatgaacattagtggcaaaaaaaatgttgactcagacagactcggcatgggatttggaaattgcagaagtgttatttcacattcagtgacttcagatatgcagaccatagagcaggaatcacccattatggcaaaaccaagaaaaaagtataatgatgacagtgacgattcatattttacttccagctcaaggtactttgacgagccagtggagttaaggagcagttctttctctagctgggatgacagttcagattcctattggaaaaaagagaccagcaaagatactgaaacagttctgaaaaccacaggctattcagacagacctactgctcgccgcaagccagattatgagccagttgaaaatacagatgaggcccagaagaagtttggcaatgtcaaggccatttcatcagatatgtattttggaagacaatcccaggctgattatgagaccagggcccgcctagagaggtatcctctatcataaaaaagaaaccaaatcaagctaaaacaggccttggggccaaaaaaggaagtttgggagctcagaaactggcaaaccatgcttttat

SEQ ID NO: 371526 - DNA, 2342 bp, Homo sapiens
cgcggctgaagcgagggcggggagggaaagcgagcggcgcctgcgccccggcggtggacgggcccggtcgtgggcggggattggggcggagcctgaccgttacgcgcagccccgcccccgcggcctcgtcgctcctgctgaggcggtagccgcttttcgtcgactcttaccggttggctgggccagctgcgccgcggctcacagctgacgatgggggaccccagcaagcaggacatcttgaccatcttcaagcgcctccgctcggtgcccactaacaaggtgtgttttgattgtggtgccaaaaatcccagctgggcaagcataacctatggagtgttcctttgcattgattgctcagggtcccaccggtcacttggtgttcacttgagttttattcgatctacagagttggattccaactggtcatggtttcagttgcgatgcatgcaagtcggaggaaacgctagtgcatcttccttttttcatcaacatgggtgttccaccaatgacaccaatgccaagtacaacagtcgtgctgctcagctctatagggagaaaatcaaatcgctcgcctctcaagcaacacggaagcatggcactgatctgtggcttgatagttgtgtggttccacctttgtcccctccaccaaaggaggaagatttttttgcctctcacgtttctcctgaggtgagtgacacagcgtgggcatcagcaatagcagaaccatcttctttaacatcaaggcctgtggaaaccactttggaaaataatgaaggtggacaagagcaaggaccaagtgtggaaggtcttaatgtaccaacaaaggctactttagaggtatcctctatcataaaaaagaaaccaaatcaagctaaaaaaggccttggggccaaaaaaggaagtttgggagctcagaaactggcaaacacatgctttaatgaaattgaaaaacaagctcaagctgcggataaaatgaaggagcaggaagacctggccaaggtggtatctaaagaagaatcaatgtaagtttaatttcattatattaatacattttcagggaataaaactattaactcaagattttgctttccaaatgccatgtatttttgtgtggggggggaagggagggtactgcaaaattcagttttatgaaaactgatattgcattggcatgtggattggaagggaaagagacgatgggggcagcaacactctgctgaggctgtaagggcagactggagtgacatcagtgagaagggaaagacagagatgcatggaggtgtttacacatgaaacatgcttcacattattagagttggggaaatgcaaatcaaggccacagtaagataccactgtgtactctctagggaagctataataaaaaaatcagtaacaggtgttggctaggatgtggagaaatttgaacccttgtacattgctgatggcaatgtgaaatggtgccactgttgtgaaaaacagtttggcagtccttcagaaagttaaatgtaaagtttccatgtgacccagcaaatctactcctaagtatatactcaagagaaattaaaacttacatctgtgcaaccacacacaaactcgtgcatgaatgttcatagtggcgttaatcctaatagccaaaaagtagaaataagctaaatgtctaccaactgataaatgagaaagaaaatgtggtatgtccatacaatggactattactcagccacaaaaaggaatgtagtcctgatattggccacaacatggataaaccttgaaaagtttatgctaagaaagaagccagtcataaaagatcacatgatatgattctgtctatatgcaatgtccagaataggcaaatccgtagagacagaaagcaacttactggttgccagggcctggggtgaggagagaatggagagtggctgctaatggtccaggcctgctttttggactgctgaaagtgttctggagttagtggtgatgatggcacagctttgtgaatgtgctgaaaccactgaatcatgcactttaacagggtgagttttacggtatgtgaattatatctgcataatgaaaaaagtatttataatctgaagccctgttggactctgtgactaaattctaaatacatgatggaagactatggctctggtcgtgtctccagaggttctgagcctggatcttggagagggagaaggaagagtttcagagaatgaagaaggtggaatgatcgtgtgtgtcgggggcctgcctgaagtggaggagttggaacgataatgtggagcaccttaaagtcaggctgtggttgtccacttacccaagagaaacagctccttcagcagtgctgt

SEQ ID NO: 371527 - DNA, 2230 bp, Homo sapiens
cctcgccactccagctgcgcctccggctgcagcgcacacgtctcctgcgcctcctcctccggagcgtcgctgtccgtcgggttcatccctcgcagcagtctccaggcgagagagggggccagagtgctcgcacttctcctaggggcaccatgcccaacgacgaggcattcagcaagccctctacaccgtcggaagcccctcacgcccccggggtaccgccgcagggcagagccgggggctttggcaaagcgtctggggcgctagtgggggcggccagcggctcgagcgccgggggcagcagcagaggaggcggctccggctccggggcgtcggacctgggtgccgggagcaagaagtccccgcggctgcccaagtgcgcacgctgcaggaaccacggctacgcctcgccgctcaagggccacaagcgcttctgcatgtggcgcgactgccagtgcaagaagtgcaacctgatcgccgagaggcagcgcgtgatggccgcgcaggtggccctgagaaggcagcaggcccaggaggaggaattgggtatcagccaccccatcccactgcccagtgcggccgagctgcttgtcaaaagagagaacaatggcagtaacccgtgcctcatgactgagtgcagtggcacctctcagccaccgccggccagtgtccccaccactgcagcttcagagggacgtatggtcatccaggatattcctgctgtcaccagcagagggcatgtggagaacacacctgacctggtttcagactccacctactacagcagcttctaccagccgtctctgtttccttattacaacaatctatacaactgcccgcagtactccatggccttggctgctgattctgcttctggggaggtgggaaatcccctcgggggatcccctgtgaagaacagccttcggggcctccccggaccttatgtgcctggtcagacaggaaaccagtggcagatgaagaacatggagaaccgccatgcaatgagctcccagtacaggatgcattcttactacccgcctccctcttacctgggccagagcgtgccccagttcttcacttttgaggatgctccctcttacccggaagccagggcgagcgtattctcgccgcccagcagtcaagattctggcttggtttccctctcgagcagctctcctattagtaacaagagcacaaaggcagtgcttgaatgtgagcctgcgtcggagcccagcagcttcacagtcactcccgtcatcgaggaggacgagtgagcagtgcctgctgccgatggcggttcacttggagtaacaggcttattccactttccatggggtttgttaatattttgcatggactcatactatcttaactgttgagaacgtatttggtttatattccttagagtttagtccagaggctgtaacacatttgtaatactttagggtccgtgactaccatctgcatggtttaagtgctttactcacggagtttaaataatagtgttcatttttttaatgacactggtttcatgtagttttcaagaaataaaagaattcattcaagtgaagccatttgtgtgcctctaaatgagtcatctaattagatgttacttttagttttaaaatgaaatcttaggtgccttaggggtttttttttttttttaagtattttttaaaaacctgcaaagatataaatttagccaagttacctgacgggtgagaagaaaagagcaggcaaaattagtgatttttttagaagtctgctaaatggatatattgggtgtgttgctgttggaaatagccccaccccatcctcccaatccaaaacgtaactgaaatataatcagaaacattaaagcctgtaaaaaaaaattgctgcgtttttggtaaagggtgtaatttgtaaacagtgcaatttaaagtgaccttagtgatgcagagttcctgagtggtgtttgtagaatgagtttatcatacattctttctactactggaaaaaaatggatgcagtctggactgttgtaaccttaggttgtaatctgatttggaaataagtacatctttaaaagttgctacagatttgagttcatgattttgttaaaaattgctatggagtactttgttatataacagaagccatcctgaaatgaaactagtctaaaaaaattcattgttctacttagttgcagctgtacctgaaataaaaatgttattgatgactgaaaaaaaaa

SEQ ID NO: 371528 - DNA, 1167 bp, Homo sapiens
aggggaggtgggtaagtatgaggaagagaagggagaacaaccaaaaggttatgtattctcgccgcccagcagtcaagattctggcttggtttccctctcgagcagctctcctattagtaacaagagcacaaaggcagtgcttgaatgtgagcctgcgtcggagcccagcagcttcacagtcactcccgtcatcgaggaggacgagtgagcagtgcctgctgccgatggcggttcacttggagtaacaggcttattccactttccatggggtttgttaatattttgcatggactcatactatcttaactgttgagaacgtatttggtttatattccttagagtttagtccagaggctgtaacacatttgtaatactttagggtccgtgactaccatctgcatggtttaagtgctttactcacggagtttaaataatagtgttcatttttttaatgacactggtttcatgtagttttcaagaaataaaagaattcattcaagtgaagccatttgtgtgcctctaaatgagtcatctaattagatgttacttttagttttaaaatgaaatcttaggtgccttaggggtttttttttttttttaagtattttttaaaaacctgcaaagatataaatttagccaagttacctgacgggtgagaagaaaagagcaggcaaaattagtgatttttttagaagtctgctaaatggatatattgggtgtgttgctgttggaaatagccccaccccatcctcccaatccaaaacgtaactgaaatataatcagaaacattaaagcctgtaaaaaaaaattgctgcgtttttggtaaagggtgtaatttgtaaacagtgcaatttaaagtgaccttagtgatgcagagttcctgagtggtgtttgtagaatgagtttatcatacattctttctactactggaaaaaaatggatgcagtctggactgttgtaaccttaggttgtaatctgatttggaaataagtacatctttaaaagttgctacagatttgagttcatgattttgttaaaaattgctatggagtactttgttatataacagaagccatcctgaaatgaaactagtctaaaaaaattcattgttctacttagttgcagctgtacctgaaataaaaatgttattgatgactgaaaaaaaaa

SEQ ID NO: 371529 - DNA, 1148 bp, Homo sapiens
ggagcagatggtgggggggtggggaacaaaaagacttgtttaacgccgccacgtcaagattctggcttggtttccctctcgagcagctctcctattagtaacaagagcacaaaggcagtgcttgaatgtgagcctgcgtcggagcccagcagcttcacagtcactcccgtcatcgaggaggacgagtgagcagtgcctgctgccgatggcggttcacttggagtaacaggcttattccactttccatggggtttgttaatattttgcatggactcatactatcttaactgttgagaacgtatttggtttatattccttagagtttagtccagaggctgtaacacatttgtaatactttagggtccgtgactaccatctgcatggtttaagtgctttactcacggagtttaaataatagtgttcatttttttaatgacactggtttcatgtagttttcaagaaataaaagaattcattcaagtgaagccatttgtgtgcctctaaatgagtcatctaattagatgttacttttagttttaaaatgaaatcttaggtgccttaggggtttttttttttttttaagtattttttaaaaacctgcaaagatataaatttagccaagttacctgacgggtgagaagaaaagagcaggcaaaattagtgatttttttagaagtctgctaaatggatatattgggtgtgttgctgttggaaatagccccaccccatcctcccaatccaaaacgtaactgaaatataatcagaaacattaaagcctgtaaaaaaaaattgctgcgtttttggtaaagggtgtaatttgtaaacagtgcaatttaaagtgaccttagtgatgcagagttcctgagtggtgtttgtagaatgagtttatcatacattctttctactactggaaaaaaatggatgcagtctggactgttgtaaccttaggttgtaatctgatttggaaataagtacatctttaaaagttgctacagatttgagttcatgattttgttaaaaattgctatggagtactttgttatataacagaagccatcctgaaatgaaactagtctaaaaaaattcattgttctacttagttgcagctgtacctgaaataaaaatgttattgatgactgaaaaaaaaa

SEQ ID NO: 371530 - DNA, 1722 bp, Homo sapiens
cctaaagaaaagtattaagtaaatagcagtacagatggcaaatggattgcacaatatatcctctggatccatagtgaccctgcagagataaacctgtgatggtcaaacaatgtgaaaactgctgtcagagacatgggcagggtgctcttgtttacagagaagaggtgcaaaaatcaacttgatggtagtgggaagatcaggaaatgcttcctgaaattgagtattaagaactaatagacattaggtggttgcagaataagttttgtttaggaaggacaagcagttgggtatgactggcttctaggttgtgtgttgtggagtgactggggataaaagcaggagcaagatcacaaaaggtcttctatgcttatattagggaagttggactttattctcaagctgaagggaagctgttgcatggttttaagcagtaaagtgatatgatcagagttttagaggatgccaagattgaaggcaagtctgaccagttaggagactgcttgttaaattagttcagaggagaaacagtgaaggcagtggcactgggcatgaagaagtatatgtgtgctaattttagatttcttagggaagcagaaatgacaagagttagtggtccattggacagaaatattgaaggagactggggagtctaggttgactcccagggtttaggtttgggcagtaaaatgacatgtagaacaattaactgataaacagcatacagaaagaggaaagaacttcatttcatatgtttgtttttgaggaaaagatgtttgtttttgaacttcctgattcagaggggcttgtgggacatcttggttaagatcctgtagtagttctagtagggtctagaagtcaagagatacaaccccgcctggaaggatttgggagtcttcagcatttggaattttggaagccattgtttactgcagtgcatatgagataatttaaactggtacatagataaacacttgaaaaaattttaatagataggaatttaatgtgtatgagaaacataacttgcacatctaacctttgataatcatggacattatcacttaggccaagtgagctcaataaaagggaaatattaactaaaaatatatgtgatacatggaaatggcaaaaatcacggtgaagctatgcaaacgatgcaagttcagaaagtgctgtgttaagtcatgggtgtggtggataaattcacccaaggagagagtaagagcgagaagaaaagagagttgacattgggtggcggggaatggagaagaagaacccatgaaggaaactgaggaagagcagccagacgaataggaggaaaaccaggagaagatggtctttggagtccaaatgaagagttctgaggaggaagtggtccacagcgtcaagtaagttgtaagctgaaaagtgctctttggatttagcaattaaggtagactatttagctggaagcatccaaacagtggattttaaaaatactcatctaacattaatgttaatgatagctggtatttatagcatttcccatatacctggtactcttctaagctctttacatgtattaacagattgatcaggtaggtagtattgttatccccatttgatatgcgaggaaacacagaggaagcacagagaggttaagtaacttgcccaagatcacacacccaaggaaacaagagagccaggactcaagcccagagtcttggctgcagagtccctgttctt

SEQ ID NO: 371531 - DNA, 483 bp, Homo sapiens
cctcgctaccatatggttggacgattcatcaaatgtattcgtcccagtaagcttgagatctttggtgacttttgaagggagtgaaaataccattttacatctttaatgcctttttcataattatgactttagatttctagaagctctcaatcactttgagaaagcaagaaccttgatttatcgtcttcctggagtgttaacttggcccacgagtaatgtgattattgaagagtctcagccacaaaaaataaagatgctgttagagaaatttgttgaagaatgcaagttccctccagtgccagatgccatttgttgctatcagaagtgccatggatattctaagatccagatatacataactgatccagactttaaggtaaataatgagtgtacagtgggacattaacttgcaaaatcatttcttaaaatgggctcaaaacaatctgtaattggaggcacccaagttctctggctagttagcag

SEQ ID NO: 371532 - DNA, 300 bp, Homo sapiens
atcaagttctgatgattctgtcatgcttcatttaaggagaaatgggaaagtggtttgaatgtttaagttttaacctttaaaatagtttcaggctgtcatttgtaaaatactcatatgtcttctgatctactggcaggtatccgtacttgaaaactggaaggagagtgaagtgtataagctacagatcatggagtcacaagcagaagcctttctgaagaagctggggctgattagccggtattgcagtttcgtgggtgttctcagcacgtcatttagaagataaagctaggaccatttgag

SEQ ID NO: 371533 - DNA, 9359 bp, Homo sapiens
  misc_feature (9128)..(9128): n is a, c, g, or t
  misc_feature (9192)..(9193): n is a, c, g, or t
  misc_feature (9246)..(9246): n is a, c, g, or t
  misc_feature (9253)..(9253): n is a, c, g, or t
  misc_feature (9291)..(9291): n is a, c, g, or t
  misc_feature (9327)..(9327): n is a, c, g, or t
cctaaagaaaagtattaagtaaatagcagtacagatggcaaatggattgcacaatatatcctctggatccatagtgaccctgcagagataaacctgtgatggtcaaacaatgtgaaaactgctgtcagagacatgggcagggtgctcttgtttacagagaagaggtgcaaaaatcaacttgatggtagtgggaagatcaggaaatgcttcctgaaattgagtattaagaactaatagacattaggtggttgcagaataagttttgtttaggaaggacaagcagttgggtatgactggcttctaggttgtgtgttgtggagtgactggggataaaagcaggagcaagatcacaaaaggtcttctatgcttatattagggaagttggactttattctcaagctgaagggaagctgttgcatggttttaagcagtaaagtgatatgatcagagttttagaggatgccaagattgaaggcaagtctgaccagttaggagactgcttgttaaattagttcagaggagaaacagtgaaggcagtggcactgggcatgaagaagtatatgtgtgctaattttagatttcttagggaagcagaaatgacaagagttagtggtccattggacagaaatattgaaggagactggggagtctaggttgactcccagggtttaggtttgggcagtaaaatgacatgtagaacaattaactgataaacagcatacagaaagaggaaagaacttcatttcatatgtttgtttttgaggaaaagatgtttgtttttgaacttcctgattcagaggggcttgtgggacatcttggttaagatcctgtagtagttctagtagggtctagaagtcaagagatacaaccccgcctggaaggatttgggagtcttcagcatttggaattttggaagccattgtttactgcagtgcatatgagataatttaaactggtacatagataaacacttgaaaaaattttaatagataggaatttaatgtgtatgagaaacataacttgcacatctaacctttgataatcatggacattatcacttaggccaagtgagctcaataaaagggaaatattaactaaaaatatatgtgatacatggaaatggcaaaaatcacggtgaagctatgcaaacgatgcaagttcagaaagtgctgtgttaagtcatgggtgtggtggataaattcacccaaggagagagtaagagcgagaagaaaagagagttgacattgggtggcggggaatggagaagaagaacccatgaaggaaactgaggaagagcagccagacgaataggaggaaaaccaggagaagatggtctttggagtccaaatgaagagttctgaggaggaagtggtccacagcgtcaatgtgcaccatggacaattttgctgagggagatttcactgtggcggattatgccttgttagaagattgccctcacgtggatgattgtgtctttgctgctgaatttatgagcaatgattatgttcgtgtgactcagctttactgtgatggggtgggtgtgcaatataaagattatatccaaagtgagaggaatttggaatttgacatctgcagtatatggtgtagtaaaccaatttctgtcctgcaagattattgcgatgccattaaaataaacatcttctggccacttctgtttcaacatcaaaacagttccgtaatatcacgattgcatccctgtgtggacgccaacaattcacgtgcttctgagataaatttgaagaaactacaacatcttgagttgatggaagatattgtggatttggcaaagaaagttgctaatgattcattccttattggaggcttattgagaattggttgtaaaatagaaaataaaatcttggcaatggaagaagctctgaattggataaaatatgcaggcgatgtaacaattctaactaaattaggatcaattgacaattgttggcctatgttaagtattttctttactgaatacaagtaccacataactaaaattgtaatggaagactgcaatttgcttgaagaacttaaaactcaaagttgtatggattgtatagaggaaggagaactaatgaaaatgaaaggaaatgaagagttttccaaagaaagatttgatatagctattatctattacaccagagccattgaatatagacctgaaaactaccttctttatggtaaccgagctctttgttttcttcgtactggacagtttagaaatgcactcggtgatggaaagagagccactattctgaagaacacttggccaaagggtcattatcgttattgtgatgctctttctatgctgggggaatatgactgggccctgcaagcaaacataaaagctcaaaaactctgtaaaaatgaccctgagggaatcaaggatctaattcagcagcatgtaaagttacaaaaacaaatagaagacctacaaggtcgaacagcaaataaggatccaattaaagccttttatgaaaacagggcctacacacctaggagtttatcagcacctatatttactacttcacttaactttgtggagaaggaaagagatttcagaaaaattaatcacgaaatggccaacggtggtaatcagaatctaaaggtggcggatgaggcgttgaaggtagatgattgtgactgtcatcctgaattttcaccaccatcaagtcagcctccaaaacataaaggaaaacaaaaatctcgaaacaatgaatcagaaaagttcagttctagttcaccattgactttaccagcagatttgaagaacatcttggagaaacagttttctaaatcttccagagctgcacaccaggattttgctaatataatgaaaatgctgagaagcttaattcaagatggctatatggccttattggagcagcgttgccgcagcgctgcacaggcctttacagagttgctgaacggtttagatcctcaaaaaataaagcaattgaacctggccatgattaactatgttttggtcgtctatggacttgccatttctctccttggaataggacagcctgaggaattatctgaagccgaaaaccagtttaagaggattattgaacactaccccagtgagggccttgattgcttggcctactgtggaattggaaaagtgtatttgaaaaaaaacagatttctagaagctctcaatcactttgagaaagcaagaaccttgatttatcgtcttcctggagtgttaacttggcccacgagtaatgtgattattgaagagtctcagccacaaaaaataaagatgctgttagagaaatttgttgaagaatgcaagttccctccagtgccagatgccatttgttgctatcagaagtgccatggatattctaagatccagatatacataactgatccagactttaagggttttatacgcatcagctgttgccagtactgtaaaatagaatttcacatgaattgctggaagaagttaaaaactacaacctttaatgataaaattgacaaggattttctacaaggaatatgtcttacccctgactgtgaaggtgtcatttctaagattatcatcttcagcagtggtggtgaagttaaatgtgaatttgaacacaaggtcataaaagaaaaggttcctccaagacctattctgaaacagaaatgttctagcctagagaaactaagactgaaagaagacaaaaaattgaagagaaagatccaaaaaaaagaagcaaaaaagttagcacaagaaagaatggaggaggacttaagagaaagtaatccacccaaaaatgaagagcagaaagaaactgtagacaatgttcagcgttgtcagttccttgatgacagaattctacagtgtataaagcagtatgctgacaagattaaatccggcatacagaatacagccatgcttctcaaagaattgctttcttggaaagttttgagcacagaagactatacaacctgtttttctagcagaaattttctaaatgaagcagtggactatgttattcgccacttgattcaagaaaataacagagtaaagacaagaatatttctgcatgttttgagtgagcttaaagaagtggagcccaaattagccgcctggatccaaaaacttaatagctttggcttagatgccacaggaactttcttttctcgttatggagcatctcttaaactgcttgattttagtatcatgactttcctctggaatgagaaatatggtcacaaactagactctatagaaggaaagcaacttgattatttctctgagccagcatcattgaaggaagcccgttgtttaatatggctgctagaagaacacagagacaagttcccagcattgcatagtgctttagatgaattctttgatataatggacagccgctgtactgtgttaaggaaacaagatagtggtgaagcaccgtttagttcaaccaaggtgaaaaacaaaagcaagaaaaagaagccaaaggattcaaagcctatgttagttgggtctggaacaacttcagtaacttcaaataatgagatcatcacttcaagtgaagaccatagcaatcgaaattcagattctgcaggcccatttgcagtgcctgaccatcttcggcaagatgtagaagaattcgaagctctctatgaccaacacagtaacgaatatgttgtccgcaataagaagctatgggacatgaacccaaaacaaaaatgttcaactctatatgattacttctctcagtttttggaggaacatggtcccttggacatgagtaacaagatgttctctgcagaatatgagtttttcccagaagaaactcgacagatactagaaaaagcaggaggtttaaaaccttttctcttgggatgccctcgttttgttgtgattgacaactgtattgcactgaagaaggttgcatcacggctcaagaaaaaaaggaagaagaaaaacattaaaacaaaagtagaagaaatttcaaaagcaggggagtatgtacgagttaaactacaactgaatccagctgctagggaatttaaaccagatgtaaagtctaaaccagtgtcagattcatcttcagcaccagcttttgaaaatgtgaaacccaaacctgtgtctgcaaattctcccaagccagcttgtgaagatgtgaaggccaaaccagtatccgacaattcttctagacaagtttctgaggatgggcaacccaaaggggtctcttctaattctcctaaaccaggctctgaggatgcaaattacaagcgagtctcctgtaattcccccaaaccggttcttgaggatgtgaaaccaacttattgggctcaatcccatttggtcacaggatactgtacgtatcttcctttccagagatttgatatcacccagacaccgccagcatacataaacgtgttaccaggtttgccccagtacaccagcatatatacacccttggccagcctttctcctgaatatcagctaccaagatcagtaccagtggtgccgtcttttgtagccaatgacagagcagataaaaatgctgctgcctattttgagggtcatcatttgaatgctgagaatgttgctggtcaccagattgcctctgaaacacagatccttgagggctctttgggaatatctgtaaagtcacactgcagcacaggtgatgctcatacagtcctgagtgagtctaacagaaatgatgagcactgtggaaattctaacaacaaatgtgaagtaattccagaaagcaccagtgcagtaacaaacattccacacgtgcagatggttgccatacaggtatcttggaacataatacaccaagaagtcaatactgagccatataatccttttgaggaacgacaaggggaaatttcacggattgaaaaggagcaccaagtattacaagaccaacttcaagaagtgtatgaaaattatgagcagataaaacttaagggcttagaagagaccagggacctggaagagaagttgaaaaggcacttagaagaaaacaagatctcaaagacggaattagattggttccttcaagatttggaaagagaaattaaaaaatggcaacaggaaaaaaaagaaatccaagaaagactaaaatcactgaagaagaaaattaaaaaggtttcaaatgccagtgaaatgtatacccagaaaaatgatggaaaggaaaaggaacatgaattacatctggatcagtcccttgaaatcagcaacacacttacaaatgagaaaatgaaaatagaagagtatataaagaaagggaaagaggattatgaagagagtcatcagagagctgtggctgcagaggtatccgtacttgaaaactggaaggagagtgaagtgtataagctacagatcatggagtcacaagcagaagcctttctgaagaagctggggctgattagccgtgatcctgcagcatatcctgacatggagtctgatatacgttcatgggaattgtttctttctaatgttacaaaagaaattgagaaagcaaagtctcagtttgaagaacaaattaaggcaattaaaaatggttctcggctcagtgaactttctaaagtgcagatttctgagctttcatttcctgcctgtaacacggttcatcccgagttactccctgagtcttcaggccacgatggccaagggcttgtgacttctgcaagcgacgtgactggaaaccacgcagcacttcacagggatcctagtgtgttctctgctggtgattccccaggggaggctccttctgcgctgttgccagggccaccccctggtcagcctgaagccactcagctgacagggccaaaacgggctggccaggcagctctgtcagaacgaagccctgtggctgatcggaagcagcctgttcctccaggacgtgctgcgcgttcaagccagtctccaaaaaagccgttcaatagtattattgagcacctgtcagtggtattcccatgttacaacagcactgagcttgctggttttattaaaaaagtgcgaagcaaaaacaagaactcactctcaggattgagtattgatgaaattgtccaaagagtgacagaacacattctagatgaacagaaaaagaaaaagccaaacccaggaaaggacaagaggacttatgagcccagctctgccacccccgtgaccaggtcctcccagggctcaccctcggtggttgttgcaccatcacccaaaaccaaggggcagaaagcagaagatgtccctgtgaggattgcactgggtgcaagttcctgtgaaatatgccacgaggtgttcaaatcaaaaaacgtgcgtgtgctcaaatgtgggcacaagtatcacaaagggtgctttaagcagtggcttaaagggcagagcgcttgcccggcctgccagggtcgtgatctcctgacagaagagtcaccttctggaagaggctggcccagtcagaatcaggagctgccttcctgctcttctaggtagtcacacttcactaaagtgtcatccaccagtgtgttgaatccgaagaatgacaattttctaccactggtgtaaaaaacaaacatttgaagacccttgtgcattgtgtgtcacaaagctaaatacatggaaatcgttaatatcgctgatattaagtaatttccccactctgagtgaatactttgatgattgccaacagtggctaataaaatgacggctaccacactcatgggtcactggggctgcgcagggctctttgaggtgggtggcttcttttggaaagtactatgaacgtctcgaagcagtattctagtgataagaattcttaacatagccaagcgccccacgtttgttccccacgtttgttccccttttctgtttgaaaaacctgttctggtagctccacaagagagatgatactgactttttaaattttttacaagagtctgtattcctgatatgcctatatttttcctcaaagattctgcattttaaggatgggcataagcaaactatattttaataatttatagttaatgttaaaatattggctgatttagaccaaaagattcaaatctcctctttgtgaaatcccatctgcatttgattttttattattttatgttcccccgttagattgttttaagtgtttgcttttcatcttttatagatgtaatctgattttcaaaaatcattaacactttttaattagtatcgactaagactttttccccctggaatcgaggctgtgtgtccgtcatcccagcccccggttggagcctgctctttgaactccgctgccttccttagcagcttctgtcctcttctgtgagtcagtcagcgagtgcttgggatccgcatccagccgtgctgagcacacaacaggctgtgtgtggaaatggccaccaccattctccttccccaccccaccacaaaaagagaagctgtgtctttagacaaccctgaggtatctgtgttacaatcgttctgtgtttgatatttgtgtaaagtatgcatgcagtcttgtactgtgacctaagaacaaaactgtaactgcattagaaaccatgaaaaaattagatattgttttgtgacttttagacagtggtaaatatagaaccatgaattctggtcacattccatttctctccaacatgaaggatcaaaaaatgtttttcaatgtgttctttgttccactggaaacttagagtcatgagtttatgagctgatttggtcaccttcctctgcctttgttcactgtgagttctgatgtcttagtgacttagttcttagaagctcacgccttagtttgaaacagattctccacggtggtccccaaaacactgtctgcatatccataagaattgagcgctatgggtgttaacgtgcatgaggatcagtttgcagcagcaagtacaaaaggagaagaggaacatccgttgaatgagtgtgttttgtacataacttcagatacttgtgaacatgccttatatttgtccaacaactgtcagaataaagaacattctaaaatgagaaaaaaaaaaaaaaaaaaaaaaaaaaaaaaaaaaaaaaccaacgccattgctcagctaacggccacgcttcaacctggtgatgccccggcatactttccagcatagagcgcggaataagcgcaatngcctgctctgcgatcacacaggccaacattccgtgataagactccatctcatggatagttcccnngagcgcaccgtcagcatgaaaccagctctcgaagtgcgacgatccgacaattngcgccgnaggccataaatgtacttgcataacctgactggcacggnttactggcccatatccttgggcgtgaccatcataanttccttccgtattacccgtattccctcgatgg

SEQ ID NO: 371534 - DNA, 9072 bp, Homo sapiens
ctgaactagttgccagtgatcttgaaacgtgacagtaaccaagagataaataggtgacaatgacaggaaaattagatgtagtaaaagagagtgtttgagagcagaagctatggcaactaaagactggatttgaatccttcctagcttggtgacatgagcaaattacttgatttaagtgagcattttcccatctgtacagtggagataacgataattgtgcctgctaagaagaattgctgtgaagattagtgaaataatgcatgtaaaacatttggtacagtatgtgacacatagtacaaatagtttgctaggaagattgttattattcttcacttgtgatattgtgaagttttcatacagcaaattggacatcatgagatggattgattaaataaatagatttgaacttcaaggactggtagtgttcttgctttggaaagaagaaacttggtttatcctaataatagtaggataataatggtgaagtgataggtacaagtaatagtgtttatgatgcgctggtgatgataggaaaagaaagccattatatgggcaagagctagaagtaataaaatggtgcatttttcagtgatgtttggcctatgtagctattctctgataactataaaaatccttattattgaagattcttcaggaaaaaaaaacccttagtctgaaactttagcaccaatcccccttgccccccattgaaatacgtatttttaaaacatggcttttgataatgtgagggttttttcctttttgcgatttagcagtgctgattgtgtattgcagtagttgtgagagcattagaagcagcagtcgataggaggatggaaggtctggatgccgccttggggagttaggagattggcagacttaccctgtaccactctagccctactcctttgcccaagacagaaacacactgagatggataggagaatatgagcagttgataggaaagttctcagtggagtcaggatttaggttaggccaggagattgagaatataacagtttgtgtatgatgaaatggcatatttcacagaatgcagtaaaagcaggtagggtacaagtgcagcaacaggaagatgtcttttcttcattcagcaaacacttatttgagagcttaccatgtgctaggcacatacaaagataaataagatgcccttgatgatcctctatttaaaggagacatgtaaacaggttaacttagagtagagatggtgaatatgtgaacctgaggaaaggaagaaatagattaaattatctggagagagaggaaaagtcagcagaatggggacgagaatctttcggagctcagtgttctgataggagttatttccttgggcataggttccaagtatttttctaatataccatagaagccaggaaaactttcttctgttatctcaaatgatttaattactgacttgagtttgtgttgtctccttagacttgtgcaccatggacaattttgctgagggagatttcactgtggcggattatgccttgttagaagattgccctcacgtggatgattgtgtctttgctgctgaatttatgagcaatgattatgttcgtgtgactcagctttactgtgatggggtgggtgtgcaatataaagattatatccaaagtgagaggaatttggaatttgacatctgcagtatatggtgtagtaaaccaatttctgtcctgcaagattattgcgatgccattaaaataaacatcttctggccacttctgtttcaacatcaaaacagttccgtaatatcacgattgcatccctgtgtggacgccaacaattcacgtgcttctgagataaatttgaagaaactacaacatcttgagttgatggaagatattgtggatttggcaaagaaagttgctaatgattcattccttattggaggcttattgagaattggttgtaaaatagaaaataaaatcttggcaatggaagaagctctgaattggataaaatatgcaggcgatgtaacaattctaactaaattaggatcaattgacaattgttggcctatgttaagtattttctttactgaatgaaggagaactaatgaaaatgaaaggaaatgaagagttttccaaagaaagatttgatatagctattatctattacaccagagccattgaatatagacctgaaaactaccttctttatggtaaccgagctctttgttttcttcgtactggacagtttagaaatgcactcggtgatggaaagagagccactattctgaagaacacttggccaaagggtcattatcgttattgtgatgctctttctatgctgggggaatatgactgggccctgcaagcaaacataaaagctcaaaaactctgtaaaaatgaccctgagggaatcaaggatctaattcagcagcatgtaaagttacaaaaacaaatagaagacctacaaggtcgaacagcaaataaggatccaattaaagccttttatgaaaacagggcctacacacctaggagtttatcagcacctatatttactacttcacttaactttgtggagaaggaaagagatttcagaaaaattaatcacgaaatggccaacggtggtaatcagaatctaaaggtggcggatgaggcgttgaaggtagatgattgtgactgtcatcctgaattttcaccaccatcaagtcagcctccaaaacataaaggaaaacaaaaatctcgaaacaatgaatcagaaaagttcagttctagttcaccattgactttaccagcagatttgaagaacatcttggagaaacagttttctaaatcttccagagctgcacaccaggattttgctaatataatgaaaatgctgagaagcttaattcaagatggctatatggccttattggagcagcgttgccgcagcgctgcacaggcctttacagagttgctgaacggtttagatcctcaaaaaataaagcaattgaacctggccatgattaactatgttttggtcgtctatggacttgccatttctctccttggaataggacagcctgaggaattatctgaagccgaaaaccagtttaagaggattattgaacactaccccagtgagggccttgattgcttggcctactgtggaattggaaaagtgtatttgaaaaaaaacagatttctagaagctctcaatcactttgagaaagcaagaaccttgatttatcgtcttcctggagtgttaacttggcccacgagtaatgtgattattgaagagtctcagccacaaaaaataaagatgctgttagagaaatttgttgaagaatgcaagttccctccagtgccagatgccatttgttgctatcagaagtgccatggatattctaagatccagatatacataactgatccagactttaagggttttatacgcatcagctgttgccagtactgtaaaatagaatttcacatgaattgctggaagaagttaaaaactacaacctttaatgataaaattgacaaggattttctacaaggaatatgtcttacccctgactgtgaaggtgtcatttctaagattatcatcttcagcagtggtggtgaagttaaatgtgaatttgaacacaaggtcataaaagaaaaggttcctccaagacctattctgaaacagaaatgttctagcctagagaaactaagactgaaagaagacaaaaaattgaagagaaagatccaaaaaaaagaagcaaaaaagttagcacaagaaagaatggaggaggacttaagagaaagtaatccacccaaaaatgaagagcagaaagaaactgtagacaatgttcagcgttgtcagttccttgatgacagaattctacagtgtataaagcagtatgctgacaagattaaatccggcatacagaatacagccatgcttctcaaagaattgctttcttggaaagttttgagcacagaagactatacaacctgtttttctagcagaaattttctaaatgaagcagtggactatgttattcgccacttgattcaagaaaataacagagtaaagacaagaatatttctgcatgttttgagtgagcttaaagaagtggagcccaaattagccgcctggatccaaaaacttaatagctttggcttagatgccacaggaactttcttttctcgttatggagcatctcttaaactgcttgattttagtatcatgactttcctctggaatgagaaatatggtcacaaactagactctatagaaggaaagcaacttgattatttctctgagccagcatcattgaaggaagcccgttgtttaatatggctgctagaagaacacagagacaagttcccagcattgcatagtgctttagatgaattctttgatataatggacagccgctgtactgtgttaaggaaacaagatagtggtgaagcaccgtttagttcaaccaaggtgaaaaacaaaagcaagaaaaagaagccaaaggattcaaagcctatgttagttgggtctggaacaacttcagtaacttcaaataatgagatcatcacttcaagtgaagaccatagcaatcgaaattcagattctgcaggcccatttgcagtgcctgaccatcttcggcaagatgtagaagaattcgaagctctctatgaccaacacagtaacgaatatgttgtccgcaataagaagctatgggacatgaacccaaaacaaaaatgttcaactctatatgattacttctctcagtttttggaggaacatggtcccttggacatgagtaacaagatgttctctgcagaatatgagtttttcccagaagaaactcgacagatactagaaaaagcaggaggtttaaaaccttttctcttgggatgccctcgttttgttgtgattgacaactgtattgcactgaagaaggttgcatcacggctcaagaaaaaaaggaagaagaaaaacattaaaacaaaagtagaagaaatttcaaaagcaggggagtatgtacgagttaaactacaactgaatccagctgctagggaatttaaaccagatgtaaagtctaaaccagtgtcagattcatcttcagcaccagcttttgaaaatgtgaaacccaaacctgtgtctgcaaattctcccaagccagcttgtgaagatgtgaaggccaaaccagtatccgacaattcttctagacaagtttctgaggatgggcaacccaaaggggtctcttctaattctcctaaaccaggctctgaggatgcaaattacaagcgagtctcctgtaattcccccaaaccggttcttgaggatgtgaaaccaacttattgggctcaatcccatttggtcacaggatactgtacgtatcttcctttccagagatttgatatcacccagacaccgccagcatacataaacgtgttaccaggtttgccccagtacaccagcatatatacacccttggccagcctttctcctgaatatcagctaccaagatcagtaccagtggtgccgtcttttgtagccaatgacagagcagataaaaatgctgctgcctattttgagggtcatcatttgaatgctgagaatgttgctggtcaccagattgcctctgaaacacagatccttgagggctctttgggaatatctgtaaagtcacactgcagcacaggtgatgctcatacagtcctgagtgagtctaacagaaatgatgagcactgtggaaattctaacaacaaatgtgaagtaattccagaaagcaccagtgcagtaacaaacattccacacgtgcagatggttgccatacaggtatcttggaacataatacaccaagaagtcaatactgagccatataatccttttgaggaacgacaaggggaaatttcacggattgaaaaggagcaccaagtattacaagaccaacttcaagaagtgtatgaaaattatgagcagataaaacttaagggcttagaagagaccagggacctggaagagaagttgaaaaggcacttagaagaaaacaagatctcaaagacggaattagattggttccttcaagatttggaaagagaaattaaaaaatggcaacaggaaaaaaaagaaatccaagaaagactaaaatcactgaagaagaaaattaaaaaggtttcaaatgccagtgaaatgtatacccagaaaaatgatggaaaggaaaaggaacatgaattacatctggatcagtcccttgaaatcagcaacacacttacaaatgagaaaatgaaaatagaagagtatataaagaaagggaaagaggattatgaagagagtcatcagagagctgtggctgcagaggtatccgtacttgaaaactggaaggagagtgaagtgtataagctacagatcatggagtcacaagcagaagcctttctgaagaagctggggctgattagccgtgatcctgcagcatatcctgacatggagtctgatatacgttcatgggaattgtttctttctaatgttacaaaagaaattgagaaagcaaagtctcagtttgaagaacaaattaaggcaattaaaaatggttctcggctcagtgaactttctaaagtgcagatttctgagctttcatttcctgcctgtaacacggttcatcccgagttactccctgagtcttcaggccacgatggccaagggcttgtgacttctgcaagcgacgtgactggaaaccacgcagcacttcacagggatcctagtgtgttctctgctggtgattccccaggggaggctccttctgcgctgttgccagggccaccccctggtcagcctgaagccactcagctgacagggccaaaacgggctggccaggcagctctgtcagaacgaagccctgtggctgatcggaagcagcctgttcctccaggacgtgctgcgcgttcaagccagtctccaaaaaagccgttcaatagtattattgagcacctgtcagtggtattcccatgttacaacagcactgagcttgctggttttattaaaaaagtgcgaagcaaaaacaagaactcactctcaggattgagtattgatgaaattgtccaaagagtgacagaacacattctagatgaacagaaaaagaaaaagccaaacccaggaaaggacaagaggacttatgagcccagctctgccacccccgtgaccaggtcctcccagggctcaccctcggtggttgttgcaccatcacccaaaaccaaggggcagaaagcagaagatgtccctgtgaggattgcactgggtgcaagttcctgtgaaatatgccacgaggtgttcaaatcaaaaaacgtgcgtgtgctcaaatgtgggcacaagtatcacaaagggtgctttaagcagtggcttaaagggcagagcgcttgcccggcctgccagggtcgtgatctcctgacagaagagtcaccttctggaagaggctggcccagtcagaatcaggagctgccttcctgctcttctaggtagtcacacttcactaaagtgtcatccaccagtgtgttgaatccgaagaatgacaattttctaccactggtgtaaaaaacaaacatttgaagacccttgtgcattgtgtgtcacaaagctaaatacatggaaatcgttaatatcgctgatattaagtaatttccccactctgagtgaatactttgatgattgccaacagtggctaataaaatgacggctaccacactcatgggtcactggggctgcgcagggctctttgaggtgggtggcttcttttggaaagtactatgaacgtctcgaagcagtattctagtgataagaattcttaacatagccaagcgccccacgtttgttccccacgtttgttccccttttctgtttgaaaaacctgttctggtagctccacaagagagatgatactgactttttaaattttttacaagagtctgtattcctgatatgcctatatttttcctcaaagattctgcattttaaggatgggcataagcaaactatattttaataatttatagttaatgttaaaatattggctgatttagaccaaaagattcaaatctcctctttgtgaaatcccatctgcatttgattttttattattttatgttcccccgttagattgttttaagtgtttgcttttcatcttttatagatgtaatctgattttcaaaaatcattaacactttttaattagtatcgactaagactttttccccctggaatcgaggctgtgtgtccgtcatcccagcccccggttggagcctgctctttgaactccgctgccttccttagcagcttctgtcctcttctgtgagtcagtcagcgagtgcttgggatccgcatccagccgtgctgagcacacaacaggctgtgtgtggaaatggccaccaccattctccttccccaccccaccacaaaaagagaagctgtgtctttagacaaccctgaggtatctgtgttacaatcgttctgtgtttgatatttgtgtaaagtatgcatgcagtcttgtactgtgacctaagaacaaaactgtaactgcattagaaaccatgaaaaaattagatattgttttgtgacttttagacagtggtaaatatagaaccatgaattctggtcacattccatttctctccaacatgaaggatcaaaaaatgtttttcaatgtgttctttgttccactggaaacttagagtcatgagtttatgagctgatttggtcaccttcctctgcctttgttcactgtgagttctgatgtcttagtgacttagttcttagaagctcacgccttagtttgaaacagattctccacggtggtccccaaaacactgtctgcatatccataagaattgagcgctatgggtgttaacgtgcatgaggatcagtttgcagcagcaagtacaaaaggagaagaggaacatccgttgaatgagtgtgttttgtacataacttcagatacttgtgaacatgccttatatttgtccaacaactgtcagaataaagaacattctaaaatgagaaaaaaaaaaaagattacaaaaatcaccaagctagacttcccaacaactgttctcacgaagcaataacaaacagaagggg

SEQ ID NO: 371535 - DNA, 8101 bp, Homo sapiens
  misc_feature (7870)..(7870): n is a, c, g, or t
  misc_feature (7934)..(7935): n is a, c, g, or t
  misc_feature (7988)..(7988): n is a, c, g, or t
  misc_feature (7995)..(7995): n is a, c, g, or t
  misc_feature (8033)..(8033): n is a, c, g, or t
  misc_feature (8069)..(8069): n is a, c, g, or t
cttcaacgccgccacccgctccctcccgccgtcggctgacgtggagggccggaggtggcggcggcggcggcggcggctgctgctgctgctgctgcccgcgtccgaggctcgcgggcggcgggcccggtgtgcaccatggacaattttgctgagggagatttcactgtggcggattatgccttgttagaagattgccctcacgtggatgattgtgtctttgctgctgaatttatgagcaatgattatgttcgtgtgactcagctttactgtgatggggtgggtgtgcaatataaagattatatccaaagtgagaggaatttggaatttgacatctgcagtatatggtgtagtaaaccaatttctgtcctgcaagattattgcgatgccattaaaataaacatcttctggccacttctgtttcaacatcaaaacagttccgtaatatcacgattgcatccctgtgtggacgccaacaattcacgtgcttctgagataaatttgaagaaactacaacatcttgagttgatggaagatattgtggatttggcaaagaaagttgctaatgattcattccttattggaggcttattgagaattggttgtaaaatagaaaataaaatcttggcaatggaagaagctctgaattggataaaatatgcaggcgatgtaacaattctaactaaattaggatcaattgacaattgttggcctatgttaagtattttctttactgaatacaagtaccacataactaaaattgtaatggaagactgcaatttgcttgaagaacttaaaactcaaagttgtatggattgtatagaggaaggagaactaatgaaaatgaaaggaaatgaagagttttccaaagaaagatttgatatagctattatctattacaccagagccattgaatatagacctgaaaactaccttctttatggtaaccgagctctttgttttcttcgtactggacagtttagaaatgcactcggtgatggaaagagagccactattctgaagaacacttggccaaagggtcattatcgttattgtgatgctctttctatgctgggggaatatgactgggccctgcaagcaaacataaaagctcaaaaactctgtaaaaatgaccctgagggaatcaaggatctaattcagcagcatgtaaagttacaaaaacaaatagaagacctacaaggtcgaacagcaaataaggatccaattaaagccttttatgaaaacagggcctacacacctaggagtttatcagcacctatatttactacttcacttaactttgtggagaaggaaagagatttcagaaaaattaatcacgaaatggccaacggtggtaatcagaatctaaaggtggcggatgaggcgttgaaggtagatgattgtgactgtcatcctgaattttcaccaccatcaagtcagcctccaaaacataaaggaaaacaaaaatctcgaaacaatgaatcagaaaagttcagttctagttcaccattgactttaccagcagatttgaagaacatcttggagaaacagttttctaaatcttccagagctgcacaccaggattttgctaatataatgaaaatgctgagaagcttaattcaagatggctatatggccttattggagcagcgttgccgcagcgctgcacaggcctttacagagttgctgaacggtttagatcctcaaaaaataaagcaattgaacctggccatgattaactatgttttggtcgtctatggacttgccatttctctccttggaataggacagcctgaggaattatctgaagccgaaaaccagtttaagaggattattgaacactaccccagtgagggccttgattgcttggcctactgtggaattggaaaagtgtatttgaaaaaaaacagatttctagaagctctcaatcactttgagaaagcaagaaccttgatttatcgtcttcctggagtgttaacttggcccacgagtaatgtgattattgaagagtctcagccacaaaaaataaagatgctgttagagaaatttgttgaagaatgcaagttccctccagtgccagatgccatttgttgctatcagaagtgccatggatattctaagatccagatatacataactgatccagactttaagggttttatacgcatcagctgttgccagtactgtaaaatagaatttcacatgaattgctggaagaagttaaaaactacaacctttaatgataaaattgacaaggattttctacaaggaatatgtcttacccctgactgtgaaggtgtcatttctaagattatcatcttcagcagtggtggtgaagttaaatgtgaatttgaacacaaggtcataaaagaaaaggttcctccaagacctattctgaaacagaaatgttctagcctagagaaactaagactgaaagaagacaaaaaattgaagagaaagatccaaaaaaaagaagcaaaaaagttagcacaagaaagaatggaggaggacttaagagaaagtaatccacccaaaaatgaagagcagaaagaaactgtagacaatgttcagcgttgtcagttccttgatgacagaattctacagtgtataaagcagtatgctgacaagattaaatccggcatacagaatacagccatgcttctcaaagaattgctttcttggaaagttttgagcacagaagactatacaacctgtttttctagcagaaattttctaaatgaagcagtggactatgttattcgccacttgattcaagaaaataacagagtaaagacaagaatatttctgcatgttttgagtgagcttaaagaagtggagcccaaattagccgcctggatccaaaaacttaatagctttggcttagatgccacaggaactttcttttctcgttatggagcatctcttaaactgcttgattttagtatcatgactttcctctggaatgagaaatatggtcacaaactagactctatagaaggaaagcaacttgattatttctctgagccagcatcattgaaggaagcccgttgtttaatatggctgctagaagaacacagagacaagttcccagcattgcatagtgctttagatgaattctttgatataatggacagccgctgtactgtgttaaggaaacaagatagtggtgaagcaccgtttagttcaaccaaggtgaaaaacaaaagcaagaaaaagaagccaaaggattcaaagcctatgttagttgggtctggaacaacttcagtaacttcaaataatgagatcatcacttcaagtgaagaccatagcaatcgaaattcagattctgcaggcccatttgcagtgcctgaccatcttcggcaagatgtagaagaattcgaagctctctatgaccaacacagtaacgaatatgttgtccgcaataagaagctatgggacatgaacccaaaacaaaaatgttcaactctatatgattacttctctcagtttttggaggaacatggtcccttggacatgagtaacaagatgttctctgcagaatatgagtttttcccagaagaaactcgacagatactagaaaaagcaggaggtttaaaaccttttctcttgggatgccctcgttttgttgtgattgacaactgtattgcactgaagaaggttgcatcacggctcaagaaaaaaaggaagaagaaaaacattaaaacaaaagtagaagaaatttcaaaagcaggggagtatgtacgagttaaactacaactgaatccagctgctagggaatttaaaccagatgtaaagtctaaaccagtgtcagattcatcttcagcaccagcttttgaaaatgtgaaacccaaacctgtgtctgcaaattctcccaagccagcttgtgaagatgtgaaggccaaaccagtatccgacaattcttctagacaagtttctgaggatgggcaacccaaaggggtctcttctaattctcctaaaccaggctctgaggatgcaaattacaagcgagtctcctgtaattcccccaaaccggttcttgaggatgtgaaaccaacttattgggctcaatcccatttggtcacaggatactgtacgtatcttcctttccagagatttgatatcacccagacaccgccagcatacataaacgtgttaccaggtttgccccagtacaccagcatatatacacccttggccagcctttctcctgaatatcagctaccaagatcagtaccagtggtgccgtcttttgtagccaatgacagagcagataaaaatgctgctgcctattttgagggtcatcatttgaatgctgagaatgttgctggtcaccagattgcctctgaaacacagatccttgagggctctttgggaatatctgtaaagtcacactgcagcacaggtgatgctcatacagtcctgagtgagtctaacagaaatgatgagcactgtggaaattctaacaacaaatgtgaagtaattccagaaagcaccagtgcagtaacaaacattccacacgtgcagatggttgccatacaggtatcttggaacataatacaccaagaagtcaatactgagccatataatccttttgaggaacgacaaggggaaatttcacggattgaaaaggagcaccaagtattacaagaccaacttcaagaagtgtatgaaaattatgagcagataaaacttaagggcttagaagagaccagggacctggaagagaagttgaaaaggcacttagaagaaaacaagatctcaaagacggaattagattggttccttcaagatttggaaagagaaattaaaaaatggcaacaggaaaaaaaagaaatccaagaaagactaaaatcactgaagaagaaaattaaaaaggtttcaaatgccagtgaaatgtatacccagaaaaatgatggaaaggaaaaggaacatgaattacatctggatcagtcccttgaaatcagcaacacacttacaaatgagaaaatgaaaatagaagagtatataaagaaagggaaagaggattatgaagagagtcatcagagagctgtggctgcagaggtatccgtacttgaaaactggaaggagagtgaagtgtataagctacagatcatggagtcacaagcagaagcctttctgaagaagctggggctgattagccgtgatcctgcagcatatcctgacatggagtctgatatacgttcatgggaattgtttctttctaatgttacaaaagaaattgagaaagcaaagtctcagtttgaagaacaaattaaggcaattaaaaatggttctcggctcagtgaactttctaaagtgcagatttctgagctttcatttcctgcctgtaacacggttcatcccgagttactccctgagtcttcaggccacgatggccaagggcttgtgacttctgcaagcgacgtgactggaaaccacgcagcacttcacagggatcctagtgtgttctctgctggtgattccccaggggaggctccttctgcgctgttgccagggccaccccctggtcagcctgaagccactcagctgacagggccaaaacgggctggccaggcagctctgtcagaacgaagccctgtggctgatcggaagcagcctgttcctccaggacgtgctgcgcgttcaagccagtctccaaaaaagccgttcaatagtattattgagcacctgtcagtggtattcccatgttacaacagcactgagcttgctggttttattaaaaaagtgcgaagcaaaaacaagaactcactctcaggattgagtattgatgaaattgtccaaagagtgacagaacacattctagatgaacagaaaaagaaaaagccaaacccaggaaaggacaagaggacttatgagcccagctctgccacccccgtgaccaggtcctcccagggctcaccctcggtggttgttgcaccatcacccaaaaccaaggggcagaaagcagaagatgtccctgtgaggattgcactgggtgcaagttcctgtgaaatatgccacgaggtgttcaaatcaaaaaacgtgcgtgtgctcaaatgtgggcacaagtatcacaaagggtgctttaagcagtggcttaaagggcagagcgcttgcccggcctgccagggtcgtgatctcctgacagaagagtcaccttctggaagaggctggcccagtcagaatcaggagctgccttcctgctcttctaggtagtcacacttcactaaagtgtcatccaccagtgtgttgaatccgaagaatgacaattttctaccactggtgtaaaaaacaaacatttgaagacccttgtgcattgtgtgtcacaaagctaaatacatggaaatcgttaatatcgctgatattaagtaatttccccactctgagtgaatactttgatgattgccaacagtggctaataaaatgacggctaccacactcatgggtcactggggctgcgcagggctctttgaggtgggtggcttcttttggaaagtactatgaacgtctcgaagcagtattctagtgataagaattcttaacatagccaagcgccccacgtttgttccccacgtttgttccccttttctgtttgaaaaacctgttctggtagctccacaagagagatgatactgactttttaaattttttacaagagtctgtattcctgatatgcctatatttttcctcaaagattctgcattttaaggatgggcataagcaaactatattttaataatttatagttaatgttaaaatattggctgatttagaccaaaagattcaaatctcctctttgtgaaatcccatctgcatttgattttttattattttatgttcccccgttagattgttttaagtgtttgcttttcatcttttatagatgtaatctgattttcaaaaatcattaacactttttaattagtatcgactaagactttttccccctggaatcgaggctgtgtgtccgtcatcccagcccccggttggagcctgctctttgaactccgctgccttccttagcagcttctgtcctcttctgtgagtcagtcagcgagtgcttgggatccgcatccagccgtgctgagcacacaacaggctgtgtgtggaaatggccaccaccattctccttccccaccccaccacaaaaagagaagctgtgtctttagacaaccctgaggtatctgtgttacaatcgttctgtgtttgatatttgtgtaaagtatgcatgcagtcttgtactgtgacctaagaacaaaactgtaactgcattagaaaccatgaaaaaattagatattgttttgtgacttttagacagtggtaaatatagaaccatgaattctggtcacattccatttctctccaacatgaaggatcaaaaaatgtttttcaatgtgttctttgttccactggaaacttagagtcatgagtttatgagctgatttggtcaccttcctctgcctttgttcactgtgagttctgatgtcttagtgacttagttcttagaagctcacgccttagtttgaaacagattctccacggtggtccccaaaacactgtctgcatatccataagaattgagcgctatgggtgttaacgtgcatgaggatcagtttgcagcagcaagtacaaaaggagaagaggaacatccgttgaatgagtgtgttttgtacataacttcagatacttgtgaacatgccttatatttgtccaacaactgtcagaataaagaacattctaaaatgagaaaaaaaaaaaaaaaaaaaaaaaaaaaaaaaaaaaaaaccaacgccattgctcagctaacggccacgcttcaacctggtgatgccccggcatactttccagcatagagcgcggaataagcgcaatngcctgctctgcgatcacacaggccaacattccgtgataagactccatctcatggatagttcccnngagcgcaccgtcagcatgaaaccagctctcgaagtgcgacgatccgacaattngcgccgnaggccataaatgtacttgcataacctgactggcacggnttactggcccatatccttgggcgtgaccatcataanttccttccgtattacccgtattccctcgatgg

SEQ ID NO: 371536 - DNA, 8100 bp, Homo sapiens
  misc_feature (7869)..(7869): n is a, c, g, or t
  misc_feature (7933)..(7934): n is a, c, g, or t
  misc_feature (7987)..(7987): n is a, c, g, or t
  misc_feature (7994)..(7994): n is a, c, g, or t
  misc_feature (8032)..(8032): n is a, c, g, or t
  misc_feature (8068)..(8068): n is a, c, g, or t
ccctgacatcttctccctgacaaaacgcacgtaccacaaaaacatctttactcagatagccctaaaccagaaaaccttcaatacacaatgtcaaaaatgaaaaattagcaaacctacttaccaccctgtgcaccatggacaattttgctgagggagatttcactgtggcggattatgccttgttagaagattgccctcacgtggatgattgtgtctttgctgctgaatttatgagcaatgattatgttcgtgtgactcagctttactgtgatggggtgggtgtgcaatataaagattatatccaaagtgagaggaatttggaatttgacatctgcagtatatggtgtagtaaaccaatttctgtcctgcaagattattgcgatgccattaaaataaacatcttctggccacttctgtttcaacatcaaaacagttccgtaatatcacgattgcatccctgtgtggacgccaacaattcacgtgcttctgagataaatttgaagaaactacaacatcttgagttgatggaagatattgtggatttggcaaagaaagttgctaatgattcattccttattggaggcttattgagaattggttgtaaaatagaaaataaaatcttggcaatggaagaagctctgaattggataaaatatgcaggcgatgtaacaattctaactaaattaggatcaattgacaattgttggcctatgttaagtattttctttactgaatacaagtaccacataactaaaattgtaatggaagactgcaatttgcttgaagaacttaaaactcaaagttgtatggattgtatagaggaaggagaactaatgaaaatgaaaggaaatgaagagttttccaaagaaagatttgatatagctattatctattacaccagagccattgaatatagacctgaaaactaccttctttatggtaaccgagctctttgttttcttcgtactggacagtttagaaatgcactcggtgatggaaagagagccactattctgaagaacacttggccaaagggtcattatcgttattgtgatgctctttctatgctgggggaatatgactgggccctgcaagcaaacataaaagctcaaaaactctgtaaaaatgaccctgagggaatcaaggatctaattcagcagcatgtaaagttacaaaaacaaatagaagacctacaaggtcgaacagcaaataaggatccaattaaagccttttatgaaaacagggcctacacacctaggagtttatcagcacctatatttactacttcacttaactttgtggagaaggaaagagatttcagaaaaattaatcacgaaatggccaacggtggtaatcagaatctaaaggtggcggatgaggcgttgaaggtagatgattgtgactgtcatcctgaattttcaccaccatcaagtcagcctccaaaacataaaggaaaacaaaaatctcgaaacaatgaatcagaaaagttcagttctagttcaccattgactttaccagcagatttgaagaacatcttggagaaacagttttctaaatcttccagagctgcacaccaggattttgctaatataatgaaaatgctgagaagcttaattcaagatggctatatggccttattggagcagcgttgccgcagcgctgcacaggcctttacagagttgctgaacggtttagatcctcaaaaaataaagcaattgaacctggccatgattaactatgttttggtcgtctatggacttgccatttctctccttggaataggacagcctgaggaattatctgaagccgaaaaccagtttaagaggattattgaacactaccccagtgagggccttgattgcttggcctactgtggaattggaaaagtgtatttgaaaaaaaacagatttctagaagctctcaatcactttgagaaagcaagaaccttgatttatcgtcttcctggagtgttaacttggcccacgagtaatgtgattattgaagagtctcagccacaaaaaataaagatgctgttagagaaatttgttgaagaatgcaagttccctccagtgccagatgccatttgttgctatcagaagtgccatggatattctaagatccagatatacataactgatccagactttaagggttttatacgcatcagctgttgccagtactgtaaaatagaatttcacatgaattgctggaagaagttaaaaactacaacctttaatgataaaattgacaaggattttctacaaggaatatgtcttacccctgactgtgaaggtgtcatttctaagattatcatcttcagcagtggtggtgaagttaaatgtgaatttgaacacaaggtcataaaagaaaaggttcctccaagacctattctgaaacagaaatgttctagcctagagaaactaagactgaaagaagacaaaaaattgaagagaaagatccaaaaaaaagaagcaaaaaagttagcacaagaaagaatggaggaggacttaagagaaagtaatccacccaaaaatgaagagcagaaagaaactgtagacaatgttcagcgttgtcagttccttgatgacagaattctacagtgtataaagcagtatgctgacaagattaaatccggcatacagaatacagccatgcttctcaaagaattgctttcttggaaagttttgagcacagaagactatacaacctgtttttctagcagaaattttctaaatgaagcagtggactatgttattcgccacttgattcaagaaaataacagagtaaagacaagaatatttctgcatgttttgagtgagcttaaagaagtggagcccaaattagccgcctggatccaaaaacttaatagctttggcttagatgccacaggaactttcttttctcgttatggagcatctcttaaactgcttgattttagtatcatgactttcctctggaatgagaaatatggtcacaaactagactctatagaaggaaagcaacttgattatttctctgagccagcatcattgaaggaagcccgttgtttaatatggctgctagaagaacacagagacaagttcccagcattgcatagtgctttagatgaattctttgatataatggacagccgctgtactgtgttaaggaaacaagatagtggtgaagcaccgtttagttcaaccaaggtgaaaaacaaaagcaagaaaaagaagccaaaggattcaaagcctatgttagttgggtctggaacaacttcagtaacttcaaataatgagatcatcacttcaagtgaagaccatagcaatcgaaattcagattctgcaggcccatttgcagtgcctgaccatcttcggcaagatgtagaagaattcgaagctctctatgaccaacacagtaacgaatatgttgtccgcaataagaagctatgggacatgaacccaaaacaaaaatgttcaactctatatgattacttctctcagtttttggaggaacatggtcccttggacatgagtaacaagatgttctctgcagaatatgagtttttcccagaagaaactcgacagatactagaaaaagcaggaggtttaaaaccttttctcttgggatgccctcgttttgttgtgattgacaactgtattgcactgaagaaggttgcatcacggctcaagaaaaaaaggaagaagaaaaacattaaaacaaaagtagaagaaatttcaaaagcaggggagtatgtacgagttaaactacaactgaatccagctgctagggaatttaaaccagatgtaaagtctaaaccagtgtcagattcatcttcagcaccagcttttgaaaatgtgaaacccaaacctgtgtctgcaaattctcccaagccagcttgtgaagatgtgaaggccaaaccagtatccgacaattcttctagacaagtttctgaggatgggcaacccaaaggggtctcttctaattctcctaaaccaggctctgaggatgcaaattacaagcgagtctcctgtaattcccccaaaccggttcttgaggatgtgaaaccaacttattgggctcaatcccatttggtcacaggatactgtacgtatcttcctttccagagatttgatatcacccagacaccgccagcatacataaacgtgttaccaggtttgccccagtacaccagcatatatacacccttggccagcctttctcctgaatatcagctaccaagatcagtaccagtggtgccgtcttttgtagccaatgacagagcagataaaaatgctgctgcctattttgagggtcatcatttgaatgctgagaatgttgctggtcaccagattgcctctgaaacacagatccttgagggctctttgggaatatctgtaaagtcacactgcagcacaggtgatgctcatacagtcctgagtgagtctaacagaaatgatgagcactgtggaaattctaacaacaaatgtgaagtaattccagaaagcaccagtgcagtaacaaacattccacacgtgcagatggttgccatacaggtatcttggaacataatacaccaagaagtcaatactgagccatataatccttttgaggaacgacaaggggaaatttcacggattgaaaaggagcaccaagtattacaagaccaacttcaagaagtgtatgaaaattatgagcagataaaacttaagggcttagaagagaccagggacctggaagagaagttgaaaaggcacttagaagaaaacaagatctcaaagacggaattagattggttccttcaagatttggaaagagaaattaaaaaatggcaacaggaaaaaaaagaaatccaagaaagactaaaatcactgaagaagaaaattaaaaaggtttcaaatgccagtgaaatgtatacccagaaaaatgatggaaaggaaaaggaacatgaattacatctggatcagtcccttgaaatcagcaacacacttacaaatgagaaaatgaaaatagaagagtatataaagaaagggaaagaggattatgaagagagtcatcagagagctgtggctgcagaggtatccgtacttgaaaactggaaggagagtgaagtgtataagctacagatcatggagtcacaagcagaagcctttctgaagaagctggggctgattagccgtgatcctgcagcatatcctgacatggagtctgatatacgttcatgggaattgtttctttctaatgttacaaaagaaattgagaaagcaaagtctcagtttgaagaacaaattaaggcaattaaaaatggttctcggctcagtgaactttctaaagtgcagatttctgagctttcatttcctgcctgtaacacggttcatcccgagttactccctgagtcttcaggccacgatggccaagggcttgtgacttctgcaagcgacgtgactggaaaccacgcagcacttcacagggatcctagtgtgttctctgctggtgattccccaggggaggctccttctgcgctgttgccagggccaccccctggtcagcctgaagccactcagctgacagggccaaaacgggctggccaggcagctctgtcagaacgaagccctgtggctgatcggaagcagcctgttcctccaggacgtgctgcgcgttcaagccagtctccaaaaaagccgttcaatagtattattgagcacctgtcagtggtattcccatgttacaacagcactgagcttgctggttttattaaaaaagtgcgaagcaaaaacaagaactcactctcaggattgagtattgatgaaattgtccaaagagtgacagaacacattctagatgaacagaaaaagaaaaagccaaacccaggaaaggacaagaggacttatgagcccagctctgccacccccgtgaccaggtcctcccagggctcaccctcggtggttgttgcaccatcacccaaaaccaaggggcagaaagcagaagatgtccctgtgaggattgcactgggtgcaagttcctgtgaaatatgccacgaggtgttcaaatcaaaaaacgtgcgtgtgctcaaatgtgggcacaagtatcacaaagggtgctttaagcagtggcttaaagggcagagcgcttgcccggcctgccagggtcgtgatctcctgacagaagagtcaccttctggaagaggctggcccagtcagaatcaggagctgccttcctgctcttctaggtagtcacacttcactaaagtgtcatccaccagtgtgttgaatccgaagaatgacaattttctaccactggtgtaaaaaacaaacatttgaagacccttgtgcattgtgtgtcacaaagctaaatacatggaaatcgttaatatcgctgatattaagtaatttccccactctgagtgaatactttgatgattgccaacagtggctaataaaatgacggctaccacactcatgggtcactggggctgcgcagggctctttgaggtgggtggcttcttttggaaagtactatgaacgtctcgaagcagtattctagtgataagaattcttaacatagccaagcgccccacgtttgttccccacgtttgttccccttttctgtttgaaaaacctgttctggtagctccacaagagagatgatactgactttttaaattttttacaagagtctgtattcctgatatgcctatatttttcctcaaagattctgcattttaaggatgggcataagcaaactatattttaataatttatagttaatgttaaaatattggctgatttagaccaaaagattcaaatctcctctttgtgaaatcccatctgcatttgattttttattattttatgttcccccgttagattgttttaagtgtttgcttttcatcttttatagatgtaatctgattttcaaaaatcattaacactttttaattagtatcgactaagactttttccccctggaatcgaggctgtgtgtccgtcatcccagcccccggttggagcctgctctttgaactccgctgccttccttagcagcttctgtcctcttctgtgagtcagtcagcgagtgcttgggatccgcatccagccgtgctgagcacacaacaggctgtgtgtggaaatggccaccaccattctccttccccaccccaccacaaaaagagaagctgtgtctttagacaaccctgaggtatctgtgttacaatcgttctgtgtttgatatttgtgtaaagtatgcatgcagtcttgtactgtgacctaagaacaaaactgtaactgcattagaaaccatgaaaaaattagatattgttttgtgacttttagacagtggtaaatatagaaccatgaattctggtcacattccatttctctccaacatgaaggatcaaaaaatgtttttcaatgtgttctttgttccactggaaacttagagtcatgagtttatgagctgatttggtcaccttcctctgcctttgttcactgtgagttctgatgtcttagtgacttagttcttagaagctcacgccttagtttgaaacagattctccacggtggtccccaaaacactgtctgcatatccataagaattgagcgctatgggtgttaacgtgcatgaggatcagtttgcagcagcaagtacaaaaggagaagaggaacatccgttgaatgagtgtgttttgtacataacttcagatacttgtgaacatgccttatatttgtccaacaactgtcagaataaagaacattctaaaatgagaaaaaaaaaaaaaaaaaaaaaaaaaaaaaaaaaaaaaaccaacgccattgctcagctaacggccacgcttcaacctggtgatgccccggcatactttccagcatagagcgcggaataagcgcaatngcctgctctgcgatcacacaggccaacattccgtgataagactccatctcatggatagttcccnngagcgcaccgtcagcatgaaaccagctctcgaagtgcgacgatccgacaattngcgccgnaggccataaatgtacttgcataacctgactggcacggnttactggcccatatccttgggcgtgaccatcataanttccttccgtattacccgtattccctcgatgg

SEQ ID NO: 371537 - DNA, 8831 bp, Homo sapiens
  misc_feature (8600)..(8600): n is a, c, g, or t
  misc_feature (8664)..(8665): n is a, c, g, or t
  misc_feature (8718)..(8718): n is a, c, g, or t
  misc_feature (8725)..(8725): n is a, c, g, or t
  misc_feature (8763)..(8763): n is a, c, g, or t
  misc_feature (8799)..(8799): n is a, c, g, or t
ctgaactagttgccagtgatcttgaaacgtgacagtaaccaagagataaataggtgacaatgacaggaaaattagatgtagtaaaagagagtgtttgagagcagaagctatggcaactaaagactggatttgaatccttcctagcttggtgacatgagcaaattacttgatttaagtgagcattttcccatctgtacagtggagataacgataattgtgcctgctaagaagaattgctgtgaagattagtgaaataatgcatgtaaaacatttggtacagtatgtgacacatagtacaaatagtttgctaggaagattgttattattcttcacttgtgatattgtgaagttttcatacagcaaattggacatcatgagatggattgattaaataaatagatttgaacttcaaggactggtagtgttcttgctttggaaagaagaaacttggtttatcctaataatagtaggataataatggtgaagtgataggtacaagtaatagtgtttatgatgcgctggtgatgataggaaaagaaagccattatatgggcaagagctagaagtaataaaatggtgcatttttcagtgatgtttggcctatgtagctattctctgataactataaaaatccttattattgaagattcttcaggaaaaaaaaacccttagtctgaaactttagcaccaatcccccttgccccccattgaaatacgtatttttaaaacatggcttttgataatgtgagggttttttcctttttgcgatttagcagtgctgattgtgtattgcagtagttgtgagagcattagaagcagcagtcgataggaggatggaaggtctggatgccgccttggggagttaggagattggcagacttaccctgtaccactctagccctactcctttgcccaagacagaaacacactgagatggataggagaatatgagcagttgataggaaagttctcagtggagtcaggatttaggttaggccaggagattgagaatataacagtttgtgtatgatgaaatggcatatttcacagaatgcagtaaaagcaggtagggtacaagtgcagcaacaggaagatgtcttttcttcattcagcaaacacttatttgagagcttaccatgtgctaggcacatacaaagataaataagatgcccttgatgatcctctatttaaaggagacatgtacaattcacgtgcttctgagataaatttgaagaaactacaacatcttgagttgatggaagatattgtggatttggcaaagaaagttgctaatgattcattccttattggaggcttattgagaattggttgtaaaatagaaaataaaatcttggcaatggaagaagctctgaattggataaaatatgcaggcgatgtaacaattctaactaaattaggatcaattgacaattgttggcctatgttaagtattttctttactgaatacaagtaccacataactaaaattgtaatggaagactgcaatttgcttgaagaacttaaaactcaaagttgtatggattgtatagaggaaggagaactaatgaaaatgaaaggaaatgaagagttttccaaagaaagatttgatatagctattatctattacaccagagccattgaatatagacctgaaaactaccttctttatggtaaccgagctctttgttttcttcgtactggacagtttagaaatgcactcggtgatggaaagagagccactattctgaagaacacttggccaaagggtcattatcgttattgtgatgctctttctatgctgggggaatatgactgggccctgcaagcaaacataaaagctcaaaaactctgtaaaaatgaccctgagggaatcaaggatctaattcagcagcatgtaaagttacaaaaacaaatagaagacctacaaggtcgaacagcaaataaggatccaattaaagccttttatgaaaacagggcctacacacctaggagtttatcagcacctatatttactacttcacttaactttgtggagaaggaaagagatttcagaaaaattaatcacgaaatggccaacggtggtaatcagaatctaaaggtggcggatgaggcgttgaaggtagatgattgtgactgtcatcctgaattttcaccaccatcaagtcagcctccaaaacataaaggaaaacaaaaatctcgaaacaatgaatcagaaaagttcagttctagttcaccattgactttaccagcagatttgaagaacatcttggagaaacagttttctaaatcttccagagctgcacaccaggattttgctaatataatgaaaatgctgagaagcttaattcaagatggctatatggccttattggagcagcgttgccgcagcgctgcacaggcctttacagagttgctgaacggtttagatcctcaaaaaataaagcaattgaacctggccatgattaactatgttttggtcgtctatggacttgccatttctctccttggaataggacagcctgaggaattatctgaagccgaaaaccagtttaagaggattattgaacactaccccagtgagggccttgattgcttggcctactgtggaattggaaaagtgtatttgaaaaaaaacagatttctagaagctctcaatcactttgagaaagcaagaaccttgatttatcgtcttcctggagtgttaacttggcccacgagtaatgtgattattgaagagtctcagccacaaaaaataaagatgctgttagagaaatttgttgaagaatgcaagttccctccagtgccagatgccatttgttgctatcagaagtgccatggatattctaagatccagatatacataactgatccagactttaagggttttatacgcatcagctgttgccagtactgtaaaatagaatttcacatgaattgctggaagaagttaaaaactacaacctttaatgataaaattgacaaggattttctacaaggaatatgtcttacccctgactgtgaaggtgtcatttctaagattatcatcttcagcagtggtggtgaagttaaatgtgaatttgaacacaaggtcataaaagaaaaggttcctccaagacctattctgaaacagaaatgttctagcctagagaaactaagactgaaagaagacaaaaaattgaagagaaagatccaaaaaaaagaagcaaaaaagttagcacaagaaagaatggaggaggacttaagagaaagtaatccacccaaaaatgaagagcagaaagaaactgtagacaatgttcagcgttgtcagttccttgatgacagaattctacagtgtataaagcagtatgctgacaagattaaatccggcatacagaatacagccatgcttctcaaagaattgctttcttggaaagttttgagcacagaagactatacaacctgtttttctagcagaaattttctaaatgaagcagtggactatgttattcgccacttgattcaagaaaataacagagtaaagacaagaatatttctgcatgttttgagtgagcttaaagaagtggagcccaaattagccgcctggatccaaaaacttaatagctttggcttagatgccacaggaactttcttttctcgttatggagcatctcttaaactgcttgattttagtatcatgactttcctctggaatgagaaatatggtcacaaactagactctatagaaggaaagcaacttgattatttctctgagccagcatcattgaaggaagcccgttgtttaatatggctgctagaagaacacagagacaagttcccagcattgcatagtgctttagatgaattctttgatataatggacagccgctgtactgtgttaaggaaacaagatagtggtgaagcaccgtttagttcaaccaaggtgaaaaacaaaagcaagaaaaagaagccaaaggattcaaagcctatgttagttgggtctggaacaacttcagtaacttcaaataatgagatcatcacttcaagtgaagaccatagcaatcgaaattcagattctgcaggcccatttgcagtgcctgaccatcttcggcaagatgtagaagaattcgaagctctctatgaccaacacagtaacgaatatgttgtccgcaataagaagctatgggacatgaacccaaaacaaaaatgttcaactctatatgattacttctctcagtttttggaggaacatggtcccttggacatgagtaacaagatgttctctgcagaatatgagtttttcccagaagaaactcgacagatactagaaaaagcaggaggtttaaaaccttttctcttgggatgccctcgttttgttgtgattgacaactgtattgcactgaagaaggttgcatcacggctcaagaaaaaaaggaagaagaaaaacattaaaacaaaagtagaagaaatttcaaaagcaggggagtatgtacgagttaaactacaactgaatccagctgctagggaatttaaaccagatgtaaagtctaaaccagtgtcagattcatcttcagcaccagcttttgaaaatgtgaaacccaaacctgtgtctgcaaattctcccaagccagcttgtgaagatgtgaaggccaaaccagtatccgacaattcttctagacaagtttctgaggatgggcaacccaaaggggtctcttctaattctcctaaaccaggctctgaggatgcaaattacaagcgagtctcctgtaattcccccaaaccggttcttgaggatgtgaaaccaacttattgggctcaatcccatttggtcacaggatactgtacgtatcttcctttccagagatttgatatcacccagacaccgccagcatacataaacgtgttaccaggtttgccccagtacaccagcatatatacacccttggccagcctttctcctgaatatcagctaccaagatcagtaccagtggtgccgtcttttgtagccaatgacagagcagataaaaatgctgctgcctattttgagggtcatcatttgaatgctgagaatgttgctggtcaccagattgcctctgaaacacagatccttgagggctctttgggaatatctgtaaagtcacactgcagcacaggtgatgctcatacagtcctgagtgagtctaacagaaatgatgagcactgtggaaattctaacaacaaatgtgaagtaattccagaaagcaccagtgcagtaacaaacattccacacgtgcagatggttgccatacaggtatcttggaacataatacaccaagaagtcaatactgagccatataatccttttgaggaacgacaaggggaaatttcacggattgaaaaggagcaccaagtattacaagaccaacttcaagaagtgtatgaaaattatgagcagataaaacttaagggcttagaagagaccagggacctggaagagaagttgaaaaggcacttagaagaaaacaagatctcaaagacggaattagattggttccttcaagatttggaaagagaaattaaaaaatggcaacaggaaaaaaaagaaatccaagaaagactaaaatcactgaagaagaaaattaaaaaggtttcaaatgccagtgaaatgtatacccagaaaaatgatggaaaggaaaaggaacatgaattacatctggatcagtcccttgaaatcagcaacacacttacaaatgagaaaatgaaaatagaagagtatataaagaaagggaaagaggattatgaagagagtcatcagagagctgtggctgcagaggtatccgtacttgaaaactggaaggagagtgaagtgtataagctacagatcatggagtcacaagcagaagcctttctgaagaagctggggctgattagccgtgatcctgcagcatatcctgacatggagtctgatatacgttcatgggaattgtttctttctaatgttacaaaagaaattgagaaagcaaagtctcagtttgaagaacaaattaaggcaattaaaaatggttctcggctcagtgaactttctaaagtgcagatttctgagctttcatttcctgcctgtaacacggttcatcccgagttactccctgagtcttcaggccacgatggccaagggcttgtgacttctgcaagcgacgtgactggaaaccacgcagcacttcacagggatcctagtgtgttctctgctggtgattccccaggggaggctccttctgcgctgttgccagggccaccccctggtcagcctgaagccactcagctgacagggccaaaacgggctggccaggcagctctgtcagaacgaagccctgtggctgatcggaagcagcctgttcctccaggacgtgctgcgcgttcaagccagtctccaaaaaagccgttcaatagtattattgagcacctgtcagtggtattcccatgttacaacagcactgagcttgctggttttattaaaaaagtgcgaagcaaaaacaagaactcactctcaggattgagtattgatgaaattgtccaaagagtgacagaacacattctagatgaacagaaaaagaaaaagccaaacccaggaaaggacaagaggacttatgagcccagctctgccacccccgtgaccaggtcctcccagggctcaccctcggtggttgttgcaccatcacccaaaaccaaggggcagaaagcagaagatgtccctgtgaggattgcactgggtgcaagttcctgtgaaatatgccacgaggtgttcaaatcaaaaaacgtgcgtgtgctcaaatgtgggcacaagtatcacaaagggtgctttaagcagtggcttaaagggcagagcgcttgcccggcctgccagggtcgtgatctcctgacagaagagtcaccttctggaagaggctggcccagtcagaatcaggagctgccttcctgctcttctaggtagtcacacttcactaaagtgtcatccaccagtgtgttgaatccgaagaatgacaattttctaccactggtgtaaaaaacaaacatttgaagacccttgtgcattgtgtgtcacaaagctaaatacatggaaatcgttaatatcgctgatattaagtaatttccccactctgagtgaatactttgatgattgccaacagtggctaataaaatgacggctaccacactcatgggtcactggggctgcgcagggctctttgaggtgggtggcttcttttggaaagtactatgaacgtctcgaagcagtattctagtgataagaattcttaacatagccaagcgccccacgtttgttccccacgtttgttccccttttctgtttgaaaaacctgttctggtagctccacaagagagatgatactgactttttaaattttttacaagagtctgtattcctgatatgcctatatttttcctcaaagattctgcattttaaggatgggcataagcaaactatattttaataatttatagttaatgttaaaatattggctgatttagaccaaaagattcaaatctcctctttgtgaaatcccatctgcatttgattttttattattttatgttcccccgttagattgttttaagtgtttgcttttcatcttttatagatgtaatctgattttcaaaaatcattaacactttttaattagtatcgactaagactttttccccctggaatcgaggctgtgtgtccgtcatcccagcccccggttggagcctgctctttgaactccgctgccttccttagcagcttctgtcctcttctgtgagtcagtcagcgagtgcttgggatccgcatccagccgtgctgagcacacaacaggctgtgtgtggaaatggccaccaccattctccttccccaccccaccacaaaaagagaagctgtgtctttagacaaccctgaggtatctgtgttacaatcgttctgtgtttgatatttgtgtaaagtatgcatgcagtcttgtactgtgacctaagaacaaaactgtaactgcattagaaaccatgaaaaaattagatattgttttgtgacttttagacagtggtaaatatagaaccatgaattctggtcacattccatttctctccaacatgaaggatcaaaaaatgtttttcaatgtgttctttgttccactggaaacttagagtcatgagtttatgagctgatttggtcaccttcctctgcctttgttcactgtgagttctgatgtcttagtgacttagttcttagaagctcacgccttagtttgaaacagattctccacggtggtccccaaaacactgtctgcatatccataagaattgagcgctatgggtgttaacgtgcatgaggatcagtttgcagcagcaagtacaaaaggagaagaggaacatccgttgaatgagtgtgttttgtacataacttcagatacttgtgaacatgccttatatttgtccaacaactgtcagaataaagaacattctaaaatgagaaaaaaaaaaaaaaaaaaaaaaaaaaaaaaaaaaaaaaccaacgccattgctcagctaacggccacgcttcaacctggtgatgccccggcatactttccagcatagagcgcggaataagcgcaatngcctgctctgcgatcacacaggccaacattccgtgataagactccatctcatggatagttcccnngagcgcaccgtcagcatgaaaccagctctcgaagtgcgacgatccgacaattngcgccgnaggccataaatgtacttgcataacctgactggcacggnttactggcccatatccttgggcgtgaccatcataanttccttccgtattacccgtattccctcgatgg

SEQ ID NO: 371538 - DNA, 7357 bp, Homo sapiens
  misc_feature (7126)..(7126): n is a, c, g, or t
  misc_feature (7190)..(7191): n is a, c, g, or t
  misc_feature (7244)..(7244): n is a, c, g, or t
  misc_feature (7251)..(7251): n is a, c, g, or t
  misc_feature (7289)..(7289): n is a, c, g, or t
  misc_feature (7325)..(7325): n is a, c, g, or t
cttcaacgccgccacccgctccctcccgccgtcggctgacgtggagggccggaggtggcggcggcggcggcggcggctgctgctgctgctgctgcccgcgtccgaggctcgcgggcggcgggcccgggtgagtgcacacccggcgcgctgccgggctcccggatgtgtcaccttgtcccgctgcagccgagatgccgggggagcggggccttccacaccccctccgtgggtgtgtgaaatgcactcggtgatggaaagagagccactattctgaagaacacttggccaaagggtcattatcgttattgtgatgctctttctatgctgggggaatatgactgggccctgcaagcaaacataaaagctcaaaaactctgtaaaaatgaccctgagggaatcaaggatctaattcagcagcatgtaaagttacaaaaacaaatagaagacctacaaggtcgaacagcaaataaggatccaattaaagccttttatgaaaacagggcctacacacctaggagtttatcagcacctatatttactacttcacttaactttgtggagaaggaaagagatttcagaaaaattaatcacgaaatggccaacggtggtaatcagaatctaaaggtggcggatgaggcgttgaaggtagatgattgtgactgtcatcctgaattttcaccaccatcaagtcagcctccaaaacataaaggaaaacaaaaatctcgaaacaatgaatcagaaaagttcagttctagttcaccattgactttaccagcagatttgaagaacatcttggagaaacagttttctaaatcttccagagctgcacaccaggattttgctaatataatgaaaatgctgagaagcttaattcaagatggctatatggccttattggagcagcgttgccgcagcgctgcacaggcctttacagagttgctgaacggtttagatcctcaaaaaataaagcaattgaacctggccatgattaactatgttttggtcgtctatggacttgccatttctctccttggaataggacagcctgaggaattatctgaagccgaaaaccagtttaagaggattattgaacactaccccagtgagggccttgattgcttggcctactgtggaattggaaaagtgtatttgaaaaaaaacagatttctagaagctctcaatcactttgagaaagcaagaaccttgatttatcgtcttcctggagtgttaacttggcccacgagtaatgtgattattgaagagtctcagccacaaaaaataaagatgctgttagagaaatttgttgaagaatgcaagttccctccagtgccagatgccatttgttgctatcagaagtgccatggatattctaagatccagatatacataactgatccagactttaagggttttatacgcatcagctgttgccagtactgtaaaatagaatttcacatgaattgctggaagaagttaaaaactacaacctttaatgataaaattgacaaggattttctacaaggaatatgtcttacccctgactgtgaaggtgtcatttctaagattatcatcttcagcagtggtggtgaagttaaatgtgaatttgaacacaaggtcataaaagaaaaggttcctccaagacctattctgaaacagaaatgttctagcctagagaaactaagactgaaagaagacaaaaaattgaagagaaagatccaaaaaaaagaagcaaaaaagttagcacaagaaagaatggaggaggacttaagagaaagtaatccacccaaaaatgaagagcagaaagaaactgtagacaatgttcagcgttgtcagttccttgatgacagaattctacagtgtataaagcagtatgctgacaagattaaatccggcatacagaatacagccatgcttctcaaagaattgctttcttggaaagttttgagcacagaagactatacaacctgtttttctagcagaaattttctaaatgaagcagtggactatgttattcgccacttgattcaagaaaataacagagtaaagacaagaatatttctgcatgttttgagtgagcttaaagaagtggagcccaaattagccgcctggatccaaaaacttaatagctttggcttagatgccacaggaactttcttttctcgttatggagcatctcttaaactgcttgattttagtatcatgactttcctctggaatgagaaatatggtcacaaactagactctatagaaggaaagcaacttgattatttctctgagccagcatcattgaaggaagcccgttgtttaatatggctgctagaagaacacagagacaagttcccagcattgcatagtgctttagatgaattctttgatataatggacagccgctgtactgtgttaaggaaacaagatagtggtgaagcaccgtttagttcaaccaaggtgaaaaacaaaagcaagaaaaagaagccaaaggattcaaagcctatgttagttgggtctggaacaacttcagtaacttcaaataatgagatcatcacttcaagtgaagaccatagcaatcgaaattcagattctgcaggcccatttgcagtgcctgaccatcttcggcaagatgtagaagaattcgaagctctctatgaccaacacagtaacgaatatgttgtccgcaataagaagctatgggacatgaacccaaaacaaaaatgttcaactctatatgattacttctctcagtttttggaggaacatggtcccttggacatgagtaacaagatgttctctgcagaatatgagtttttcccagaagaaactcgacagatactagaaaaagcaggaggtttaaaaccttttctcttgggatgccctcgttttgttgtgattgacaactgtattgcactgaagaaggttgcatcacggctcaagaaaaaaaggaagaagaaaaacattaaaacaaaagtagaagaaatttcaaaagcaggggagtatgtacgagttaaactacaactgaatccagctgctagggaatttaaaccagatgtaaagtctaaaccagtgtcagattcatcttcagcaccagcttttgaaaatgtgaaacccaaacctgtgtctgcaaattctcccaagccagcttgtgaagatgtgaaggccaaaccagtatccgacaattcttctagacaagtttctgaggatgggcaacccaaaggggtctcttctaattctcctaaaccaggctctgaggatgcaaattacaagcgagtctcctgtaattcccccaaaccggttcttgaggatgtgaaaccaacttattgggctcaatcccatttggtcacaggatactgtacgtatcttcctttccagagatttgatatcacccagacaccgccagcatacataaacgtgttaccaggtttgccccagtacaccagcatatatacacccttggccagcctttctcctgaatatcagctaccaagatcagtaccagtggtgccgtcttttgtagccaatgacagagcagataaaaatgctgctgcctattttgagggtcatcatttgaatgctgagaatgttgctggtcaccagattgcctctgaaacacagatccttgagggctctttgggaatatctgtaaagtcacactgcagcacaggtgatgctcatacagtcctgagtgagtctaacagaaatgatgagcactgtggaaattctaacaacaaatgtgaagtaattccagaaagcaccagtgcagtaacaaacattccacacgtgcagatggttgccatacaggtatcttggaacataatacaccaagaagtcaatactgagccatataatccttttgaggaacgacaaggggaaatttcacggattgaaaaggagcaccaagtattacaagaccaacttcaagaagtgtatgaaaattatgagcagataaaacttaagggcttagaagagaccagggacctggaagagaagttgaaaaggcacttagaagaaaacaagatctcaaagacggaattagattggttccttcaagatttggaaagagaaattaaaaaatggcaacaggaaaaaaaagaaatccaagaaagactaaaatcactgaagaagaaaattaaaaaggtttcaaatgccagtgaaatgtatacccagaaaaatgatggaaaggaaaaggaacatgaattacatctggatcagtcccttgaaatcagcaacacacttacaaatgagaaaatgaaaatagaagagtatataaagaaagggaaagaggattatgaagagagtcatcagagagctgtggctgcagaggtatccgtacttgaaaactggaaggagagtgaagtgtataagctacagatcatggagtcacaagcagaagcctttctgaagaagctggggctgattagccgtgatcctgcagcatatcctgacatggagtctgatatacgttcatgggaattgtttctttctaatgttacaaaagaaattgagaaagcaaagtctcagtttgaagaacaaattaaggcaattaaaaatggttctcggctcagtgaactttctaaagtgcagatttctgagctttcatttcctgcctgtaacacggttcatcccgagttactccctgagtcttcaggccacgatggccaagggcttgtgacttctgcaagcgacgtgactggaaaccacgcagcacttcacagggatcctagtgtgttctctgctggtgattccccaggggaggctccttctgcgctgttgccagggccaccccctggtcagcctgaagccactcagctgacagggccaaaacgggctggccaggcagctctgtcagaacgaagccctgtggctgatcggaagcagcctgttcctccaggacgtgctgcgcgttcaagccagtctccaaaaaagccgttcaatagtattattgagcacctgtcagtggtattcccatgttacaacagcactgagcttgctggttttattaaaaaagtgcgaagcaaaaacaagaactcactctcaggattgagtattgatgaaattgtccaaagagtgacagaacacattctagatgaacagaaaaagaaaaagccaaacccaggaaaggacaagaggacttatgagcccagctctgccacccccgtgaccaggtcctcccagggctcaccctcggtggttgttgcaccatcacccaaaaccaaggggcagaaagcagaagatgtccctgtgaggattgcactgggtgcaagttcctgtgaaatatgccacgaggtgttcaaatcaaaaaacgtgcgtgtgctcaaatgtgggcacaagtatcacaaagggtgctttaagcagtggcttaaagggcagagcgcttgcccggcctgccagggtcgtgatctcctgacagaagagtcaccttctggaagaggctggcccagtcagaatcaggagctgccttcctgctcttctaggtagtcacacttcactaaagtgtcatccaccagtgtgttgaatccgaagaatgacaattttctaccactggtgtaaaaaacaaacatttgaagacccttgtgcattgtgtgtcacaaagctaaatacatggaaatcgttaatatcgctgatattaagtaatttccccactctgagtgaatactttgatgattgccaacagtggctaataaaatgacggctaccacactcatgggtcactggggctgcgcagggctctttgaggtgggtggcttcttttggaaagtactatgaacgtctcgaagcagtattctagtgataagaattcttaacatagccaagcgccccacgtttgttccccacgtttgttccccttttctgtttgaaaaacctgttctggtagctccacaagagagatgatactgactttttaaattttttacaagagtctgtattcctgatatgcctatatttttcctcaaagattctgcattttaaggatgggcataagcaaactatattttaataatttatagttaatgttaaaatattggctgatttagaccaaaagattcaaatctcctctttgtgaaatcccatctgcatttgattttttattattttatgttcccccgttagattgttttaagtgtttgcttttcatcttttatagatgtaatctgattttcaaaaatcattaacactttttaattagtatcgactaagactttttccccctggaatcgaggctgtgtgtccgtcatcccagcccccggttggagcctgctctttgaactccgctgccttccttagcagcttctgtcctcttctgtgagtcagtcagcgagtgcttgggatccgcatccagccgtgctgagcacacaacaggctgtgtgtggaaatggccaccaccattctccttccccaccccaccacaaaaagagaagctgtgtctttagacaaccctgaggtatctgtgttacaatcgttctgtgtttgatatttgtgtaaagtatgcatgcagtcttgtactgtgacctaagaacaaaactgtaactgcattagaaaccatgaaaaaattagatattgttttgtgacttttagacagtggtaaatatagaaccatgaattctggtcacattccatttctctccaacatgaaggatcaaaaaatgtttttcaatgtgttctttgttccactggaaacttagagtcatgagtttatgagctgatttggtcaccttcctctgcctttgttcactgtgagttctgatgtcttagtgacttagttcttagaagctcacgccttagtttgaaacagattctccacggtggtccccaaaacactgtctgcatatccataagaattgagcgctatgggtgttaacgtgcatgaggatcagtttgcagcagcaagtacaaaaggagaagaggaacatccgttgaatgagtgtgttttgtacataacttcagatacttgtgaacatgccttatatttgtccaacaactgtcagaataaagaacattctaaaatgagaaaaaaaaaaaaaaaaaaaaaaaaaaaaaaaaaaaaaaccaacgccattgctcagctaacggccacgcttcaacctggtgatgccccggcatactttccagcatagagcgcggaataagcgcaatngcctgctctgcgatcacacaggccaacattccgtgataagactccatctcatggatagttcccnngagcgcaccgtcagcatgaaaccagctctcgaagtgcgacgatccgacaattngcgccgnaggccataaatgtacttgcataacctgactggcacggnttactggcccatatccttgggcgtgaccatcataanttccttccgtattacccgtattccctcgatgg

SEQ ID NO: 371539 - DNA, 6935 bp, Homo sapiens
  misc_feature (6704)..(6704): n is a, c, g, or t
  misc_feature (6768)..(6769): n is a, c, g, or t
  misc_feature (6822)..(6822): n is a, c, g, or t
  misc_feature (6829)..(6829): n is a, c, g, or t
  misc_feature (6867)..(6867): n is a, c, g, or t
  misc_feature (6903)..(6903): n is a, c, g, or t
ctatgtgtgtgtgtgtgtgatgacttttataggtcgaacagcaaataaggatccaattaaagccttttatgaaaacagggcctacacacctaggagtttatcagcacctatatttactacttcacttaactttgtggagaaggaaagagatttcagaaaaattaatcacgaaatggccaacggtggtaatcagaatctaaaggtggcggatgaggcgttgaaggtagatgattgtgactgtcatcctgaattttcaccaccatcaagtcagcctccaaaacataaaggaaaacaaaaatctcgaaacaatgaatcagaaaagttcagttctagttcaccattgactttaccagcagatttgaagaacatcttggagaaacagttttctaaatcttccagagctgcacaccaggattttgctaatataatgaaaatgctgagaagcttaattcaagatggctatatggccttattggagcagcgttgccgcagcgctgcacaggcctttacagagttgctgaacggtttagatcctcaaaaaataaagcaattgaacctggccatgattaactatgttttggtcgtctatggacttgccatttctctccttggaataggacagcctgaggaattatctgaagccgaaaaccagtttaagaggattattgaacactaccccagtgagggccttgattgcttggcctactgtggaattggaaaagtgtatttgaaaaaaaacagatttctagaagctctcaatcactttgagaaagcaagaaccttgatttatcgtcttcctggagtgttaacttggcccacgagtaatgtgattattgaagagtctcagccacaaaaaataaagatgctgttagagaaatttgttgaagaatgcaagttccctccagtgccagatgccatttgttgctatcagaagtgccatggatattctaagatccagatatacataactgatccagactttaagggttttatacgcatcagctgttgccagtactgtaaaatagaatttcacatgaattgctggaagaagttaaaaactacaacctttaatgataaaattgacaaggattttctacaaggaatatgtcttacccctgactgtgaaggtgtcatttctaagattatcatcttcagcagtggtggtgaagttaaatgtgaatttgaacacaaggtcataaaagaaaaggttcctccaagacctattctgaaacagaaatgttctagcctagagaaactaagactgaaagaagacaaaaaattgaagagaaagatccaaaaaaaagaagcaaaaaagttagcacaagaaagaatggaggaggacttaagagaaagtaatccacccaaaaatgaagagcagaaagaaactgtagacaatgttcagcgttgtcagttccttgatgacagaattctacagtgtataaagcagtatgctgacaagattaaatccggcatacagaatacagccatgcttctcaaagaattgctttcttggaaagttttgagcacagaagactatacaacctgtttttctagcagaaattttctaaatgaagcagtggactatgttattcgccacttgattcaagaaaataacagagtaaagacaagaatatttctgcatgttttgagtgagcttaaagaagtggagcccaaattagccgcctggatccaaaaacttaatagctttggcttagatgccacaggaactttcttttctcgttatggagcatctcttaaactgcttgattttagtatcatgactttcctctggaatgagaaatatggtcacaaactagactctatagaaggaaagcaacttgattatttctctgagccagcatcattgaaggaagcccgttgtttaatatggctgctagaagaacacagagacaagttcccagcattgcatagtgctttagatgaattctttgatataatggacagccgctgtactgtgttaaggaaacaagatagtggtgaagcaccgtttagttcaaccaaggtgaaaaacaaaagcaagaaaaagaagccaaaggattcaaagcctatgttagttgggtctggaacaacttcagtaacttcaaataatgagatcatcacttcaagtgaagaccatagcaatcgaaattcagattctgcaggcccatttgcagtgcctgaccatcttcggcaagatgtagaagaattcgaagctctctatgaccaacacagtaacgaatatgttgtccgcaataagaagctatgggacatgaacccaaaacaaaaatgttcaactctatatgattacttctctcagtttttggaggaacatggtcccttggacatgagtaacaagatgttctctgcagaatatgagtttttcccagaagaaactcgacagatactagaaaaagcaggaggtttaaaaccttttctcttgggatgccctcgttttgttgtgattgacaactgtattgcactgaagaaggttgcatcacggctcaagaaaaaaaggaagaagaaaaacattaaaacaaaagtagaagaaatttcaaaagcaggggagtatgtacgagttaaactacaactgaatccagctgctagggaatttaaaccagatgtaaagtctaaaccagtgtcagattcatcttcagcaccagcttttgaaaatgtgaaacccaaacctgtgtctgcaaattctcccaagccagcttgtgaagatgtgaaggccaaaccagtatccgacaattcttctagacaagtttctgaggatgggcaacccaaaggggtctcttctaattctcctaaaccaggctctgaggatgcaaattacaagcgagtctcctgtaattcccccaaaccggttcttgaggatgtgaaaccaacttattgggctcaatcccatttggtcacaggatactgtacgtatcttcctttccagagatttgatatcacccagacaccgccagcatacataaacgtgttaccaggtttgccccagtacaccagcatatatacacccttggccagcctttctcctgaatatcagctaccaagatcagtaccagtggtgccgtcttttgtagccaatgacagagcagataaaaatgctgctgcctattttgagggtcatcatttgaatgctgagaatgttgctggtcaccagattgcctctgaaacacagatccttgagggctctttgggaatatctgtaaagtcacactgcagcacaggtgatgctcatacagtcctgagtgagtctaacagaaatgatgagcactgtggaaattctaacaacaaatgtgaagtaattccagaaagcaccagtgcagtaacaaacattccacacgtgcagatggttgccatacaggtatcttggaacataatacaccaagaagtcaatactgagccatataatccttttgaggaacgacaaggggaaatttcacggattgaaaaggagcaccaagtattacaagaccaacttcaagaagtgtatgaaaattatgagcagataaaacttaagggcttagaagagaccagggacctggaagagaagttgaaaaggcacttagaagaaaacaagatctcaaagacggaattagattggttccttcaagatttggaaagagaaattaaaaaatggcaacaggaaaaaaaagaaatccaagaaagactaaaatcactgaagaagaaaattaaaaaggtttcaaatgccagtgaaatgtatacccagaaaaatgatggaaaggaaaaggaacatgaattacatctggatcagtcccttgaaatcagcaacacacttacaaatgagaaaatgaaaatagaagagtatataaagaaagggaaagaggattatgaagagagtcatcagagagctgtggctgcagaggtatccgtacttgaaaactggaaggagagtgaagtgtataagctacagatcatggagtcacaagcagaagcctttctgaagaagctggggctgattagccgtgatcctgcagcatatcctgacatggagtctgatatacgttcatgggaattgtttctttctaatgttacaaaagaaattgagaaagcaaagtctcagtttgaagaacaaattaaggcaattaaaaatggttctcggctcagtgaactttctaaagtgcagatttctgagctttcatttcctgcctgtaacacggttcatcccgagttactccctgagtcttcaggccacgatggccaagggcttgtgacttctgcaagcgacgtgactggaaaccacgcagcacttcacagggatcctagtgtgttctctgctggtgattccccaggggaggctccttctgcgctgttgccagggccaccccctggtcagcctgaagccactcagctgacagggccaaaacgggctggccaggcagctctgtcagaacgaagccctgtggctgatcggaagcagcctgttcctccaggacgtgctgcgcgttcaagccagtctccaaaaaagccgttcaatagtattattgagcacctgtcagtggtattcccatgttacaacagcactgagcttgctggttttattaaaaaagtgcgaagcaaaaacaagaactcactctcaggattgagtattgatgaaattgtccaaagagtgacagaacacattctagatgaacagaaaaagaaaaagccaaacccaggaaaggacaagaggacttatgagcccagctctgccacccccgtgaccaggtcctcccagggctcaccctcggtggttgttgcaccatcacccaaaaccaaggggcagaaagcagaagatgtccctgtgaggattgcactgggtgcaagttcctgtgaaatatgccacgaggtgttcaaatcaaaaaacgtgcgtgtgctcaaatgtgggcacaagtatcacaaagggtgctttaagcagtggcttaaagggcagagcgcttgcccggcctgccagggtcgtgatctcctgacagaagagtcaccttctggaagaggctggcccagtcagaatcaggagctgccttcctgctcttctaggtagtcacacttcactaaagtgtcatccaccagtgtgttgaatccgaagaatgacaattttctaccactggtgtaaaaaacaaacatttgaagacccttgtgcattgtgtgtcacaaagctaaatacatggaaatcgttaatatcgctgatattaagtaatttccccactctgagtgaatactttgatgattgccaacagtggctaataaaatgacggctaccacactcatgggtcactggggctgcgcagggctctttgaggtgggtggcttcttttggaaagtactatgaacgtctcgaagcagtattctagtgataagaattcttaacatagccaagcgccccacgtttgttccccacgtttgttccccttttctgtttgaaaaacctgttctggtagctccacaagagagatgatactgactttttaaattttttacaagagtctgtattcctgatatgcctatatttttcctcaaagattctgcattttaaggatgggcataagcaaactatattttaataatttatagttaatgttaaaatattggctgatttagaccaaaagattcaaatctcctctttgtgaaatcccatctgcatttgattttttattattttatgttcccccgttagattgttttaagtgtttgcttttcatcttttatagatgtaatctgattttcaaaaatcattaacactttttaattagtatcgactaagactttttccccctggaatcgaggctgtgtgtccgtcatcccagcccccggttggagcctgctctttgaactccgctgccttccttagcagcttctgtcctcttctgtgagtcagtcagcgagtgcttgggatccgcatccagccgtgctgagcacacaacaggctgtgtgtggaaatggccaccaccattctccttccccaccccaccacaaaaagagaagctgtgtctttagacaaccctgaggtatctgtgttacaatcgttctgtgtttgatatttgtgtaaagtatgcatgcagtcttgtactgtgacctaagaacaaaactgtaactgcattagaaaccatgaaaaaattagatattgttttgtgacttttagacagtggtaaatatagaaccatgaattctggtcacattccatttctctccaacatgaaggatcaaaaaatgtttttcaatgtgttctttgttccactggaaacttagagtcatgagtttatgagctgatttggtcaccttcctctgcctttgttcactgtgagttctgatgtcttagtgacttagttcttagaagctcacgccttagtttgaaacagattctccacggtggtccccaaaacactgtctgcatatccataagaattgagcgctatgggtgttaacgtgcatgaggatcagtttgcagcagcaagtacaaaaggagaagaggaacatccgttgaatgagtgtgttttgtacataacttcagatacttgtgaacatgccttatatttgtccaacaactgtcagaataaagaacattctaaaatgagaaaaaaaaaaaaaaaaaaaaaaaaaaaaaaaaaaaaaaccaacgccattgctcagctaacggccacgcttcaacctggtgatgccccggcatactttccagcatagagcgcggaataagcgcaatngcctgctctgcgatcacacaggccaacattccgtgataagactccatctcatggatagttcccnngagcgcaccgtcagcatgaaaccagctctcgaagtgcgacgatccgacaattngcgccgnaggccataaatgtacttgcataacctgactggcacggnttactggcccatatccttgggcgtgaccatcataanttccttccgtattacccgtattccctcgatgg

SEQ ID NO: 371540 - DNA, 6435 bp, Homo sapiens
  misc_feature (6204)..(6204): n is a, c, g, or t
  misc_feature (6268)..(6269): n is a, c, g, or t
  misc_feature (6322)..(6322): n is a, c, g, or t
  misc_feature (6329)..(6329): n is a, c, g, or t
  misc_feature (6367)..(6367): n is a, c, g, or t
  misc_feature (6403)..(6403): n is a, c, g, or t
gggcagaattatattcagatttttaactgaggcatttttattgacagcaattgaacctggccatgattaactatgttttggtcgtctatggacttgccatttctctccttggaataggacagcctgaggaattatctgaagccgaaaaccagtttaagaggattattgaacactaccccagtgagggccttgattgcttggcctactgtggaattggaaaagtgtatttgaaaaaaaacagatttctagaagctctcaatcactttgagaaagcaagaaccttgatttatcgtcttcctggagtgttaacttggcccacgagtaatgtgattattgaagagtctcagccacaaaaaataaagatgctgttagagaaatttgttgaagaatgcaagttccctccagtgccagatgccatttgttgctatcagaagtgccatggatattctaagatccagatatacataactgatccagactttaagggttttatacgcatcagctgttgccagtactgtaaaatagaatttcacatgaattgctggaagaagttaaaaactacaacctttaatgataaaattgacaaggattttctacaaggaatatgtcttacccctgactgtgaaggtgtcatttctaagattatcatcttcagcagtggtggtgaagttaaatgtgaatttgaacacaaggtcataaaagaaaaggttcctccaagacctattctgaaacagaaatgttctagcctagagaaactaagactgaaagaagacaaaaaattgaagagaaagatccaaaaaaaagaagcaaaaaagttagcacaagaaagaatggaggaggacttaagagaaagtaatccacccaaaaatgaagagcagaaagaaactgtagacaatgttcagcgttgtcagttccttgatgacagaattctacagtgtataaagcagtatgctgacaagattaaatccggcatacagaatacagccatgcttctcaaagaattgctttcttggaaagttttgagcacagaagactatacaacctgtttttctagcagaaattttctaaatgaagcagtggactatgttattcgccacttgattcaagaaaataacagagtaaagacaagaatatttctgcatgttttgagtgagcttaaagaagtggagcccaaattagccgcctggatccaaaaacttaatagctttggcttagatgccacaggaactttcttttctcgttatggagcatctcttaaactgcttgattttagtatcatgactttcctctggaatgagaaatatggtcacaaactagactctatagaaggaaagcaacttgattatttctctgagccagcatcattgaaggaagcccgttgtttaatatggctgctagaagaacacagagacaagttcccagcattgcatagtgctttagatgaattctttgatataatggacagccgctgtactgtgttaaggaaacaagatagtggtgaagcaccgtttagttcaaccaaggtgaaaaacaaaagcaagaaaaagaagccaaaggattcaaagcctatgttagttgggtctggaacaacttcagtaacttcaaataatgagatcatcacttcaagtgaagaccatagcaatcgaaattcagattctgcaggcccatttgcagtgcctgaccatcttcggcaagatgtagaagaattcgaagctctctatgaccaacacagtaacgaatatgttgtccgcaataagaagctatgggacatgaacccaaaacaaaaatgttcaactctatatgattacttctctcagtttttggaggaacatggtcccttggacatgagtaacaagatgttctctgcagaatatgagtttttcccagaagaaactcgacagatactagaaaaagcaggaggtttaaaaccttttctcttgggatgccctcgttttgttgtgattgacaactgtattgcactgaagaaggttgcatcacggctcaagaaaaaaaggaagaagaaaaacattaaaacaaaagtagaagaaatttcaaaagcaggggagtatgtacgagttaaactacaactgaatccagctgctagggaatttaaaccagatgtaaagtctaaaccagtgtcagattcatcttcagcaccagcttttgaaaatgtgaaacccaaacctgtgtctgcaaattctcccaagccagcttgtgaagatgtgaaggccaaaccagtatccgacaattcttctagacaagtttctgaggatgggcaacccaaaggggtctcttctaattctcctaaaccaggctctgaggatgcaaattacaagcgagtctcctgtaattcccccaaaccggttcttgaggatgtgaaaccaacttattgggctcaatcccatttggtcacaggatactgtacgtatcttcctttccagagatttgatatcacccagacaccgccagcatacataaacgtgttaccaggtttgccccagtacaccagcatatatacacccttggccagcctttctcctgaatatcagctaccaagatcagtaccagtggtgccgtcttttgtagccaatgacagagcagataaaaatgctgctgcctattttgagggtcatcatttgaatgctgagaatgttgctggtcaccagattgcctctgaaacacagatccttgagggctctttgggaatatctgtaaagtcacactgcagcacaggtgatgctcatacagtcctgagtgagtctaacagaaatgatgagcactgtggaaattctaacaacaaatgtgaagtaattccagaaagcaccagtgcagtaacaaacattccacacgtgcagatggttgccatacaggtatcttggaacataatacaccaagaagtcaatactgagccatataatccttttgaggaacgacaaggggaaatttcacggattgaaaaggagcaccaagtattacaagaccaacttcaagaagtgtatgaaaattatgagcagataaaacttaagggcttagaagagaccagggacctggaagagaagttgaaaaggcacttagaagaaaacaagatctcaaagacggaattagattggttccttcaagatttggaaagagaaattaaaaaatggcaacaggaaaaaaaagaaatccaagaaagactaaaatcactgaagaagaaaattaaaaaggtttcaaatgccagtgaaatgtatacccagaaaaatgatggaaaggaaaaggaacatgaattacatctggatcagtcccttgaaatcagcaacacacttacaaatgagaaaatgaaaatagaagagtatataaagaaagggaaagaggattatgaagagagtcatcagagagctgtggctgcagaggtatccgtacttgaaaactggaaggagagtgaagtgtataagctacagatcatggagtcacaagcagaagcctttctgaagaagctggggctgattagccgtgatcctgcagcatatcctgacatggagtctgatatacgttcatgggaattgtttctttctaatgttacaaaagaaattgagaaagcaaagtctcagtttgaagaacaaattaaggcaattaaaaatggttctcggctcagtgaactttctaaagtgcagatttctgagctttcatttcctgcctgtaacacggttcatcccgagttactccctgagtcttcaggccacgatggccaagggcttgtgacttctgcaagcgacgtgactggaaaccacgcagcacttcacagggatcctagtgtgttctctgctggtgattccccaggggaggctccttctgcgctgttgccagggccaccccctggtcagcctgaagccactcagctgacagggccaaaacgggctggccaggcagctctgtcagaacgaagccctgtggctgatcggaagcagcctgttcctccaggacgtgctgcgcgttcaagccagtctccaaaaaagccgttcaatagtattattgagcacctgtcagtggtattcccatgttacaacagcactgagcttgctggttttattaaaaaagtgcgaagcaaaaacaagaactcactctcaggattgagtattgatgaaattgtccaaagagtgacagaacacattctagatgaacagaaaaagaaaaagccaaacccaggaaaggacaagaggacttatgagcccagctctgccacccccgtgaccaggtcctcccagggctcaccctcggtggttgttgcaccatcacccaaaaccaaggggcagaaagcagaagatgtccctgtgaggattgcactgggtgcaagttcctgtgaaatatgccacgaggtgttcaaatcaaaaaacgtgcgtgtgctcaaatgtgggcacaagtatcacaaagggtgctttaagcagtggcttaaagggcagagcgcttgcccggcctgccagggtcgtgatctcctgacagaagagtcaccttctggaagaggctggcccagtcagaatcaggagctgccttcctgctcttctaggtagtcacacttcactaaagtgtcatccaccagtgtgttgaatccgaagaatgacaattttctaccactggtgtaaaaaacaaacatttgaagacccttgtgcattgtgtgtcacaaagctaaatacatggaaatcgttaatatcgctgatattaagtaatttccccactctgagtgaatactttgatgattgccaacagtggctaataaaatgacggctaccacactcatgggtcactggggctgcgcagggctctttgaggtgggtggcttcttttggaaagtactatgaacgtctcgaagcagtattctagtgataagaattcttaacatagccaagcgccccacgtttgttccccacgtttgttccccttttctgtttgaaaaacctgttctggtagctccacaagagagatgatactgactttttaaattttttacaagagtctgtattcctgatatgcctatatttttcctcaaagattctgcattttaaggatgggcataagcaaactatattttaataatttatagttaatgttaaaatattggctgatttagaccaaaagattcaaatctcctctttgtgaaatcccatctgcatttgattttttattattttatgttcccccgttagattgttttaagtgtttgcttttcatcttttatagatgtaatctgattttcaaaaatcattaacactttttaattagtatcgactaagactttttccccctggaatcgaggctgtgtgtccgtcatcccagcccccggttggagcctgctctttgaactccgctgccttccttagcagcttctgtcctcttctgtgagtcagtcagcgagtgcttgggatccgcatccagccgtgctgagcacacaacaggctgtgtgtggaaatggccaccaccattctccttccccaccccaccacaaaaagagaagctgtgtctttagacaaccctgaggtatctgtgttacaatcgttctgtgtttgatatttgtgtaaagtatgcatgcagtcttgtactgtgacctaagaacaaaactgtaactgcattagaaaccatgaaaaaattagatattgttttgtgacttttagacagtggtaaatatagaaccatgaattctggtcacattccatttctctccaacatgaaggatcaaaaaatgtttttcaatgtgttctttgttccactggaaacttagagtcatgagtttatgagctgatttggtcaccttcctctgcctttgttcactgtgagttctgatgtcttagtgacttagttcttagaagctcacgccttagtttgaaacagattctccacggtggtccccaaaacactgtctgcatatccataagaattgagcgctatgggtgttaacgtgcatgaggatcagtttgcagcagcaagtacaaaaggagaagaggaacatccgttgaatgagtgtgttttgtacataacttcagatacttgtgaacatgccttatatttgtccaacaactgtcagaataaagaacattctaaaatgagaaaaaaaaaaaaaaaaaaaaaaaaaaaaaaaaaaaaaaccaacgccattgctcagctaacggccacgcttcaacctggtgatgccccggcatactttccagcatagagcgcggaataagcgcaatngcctgctctgcgatcacacaggccaacattccgtgataagactccatctcatggatagttcccnngagcgcaccgtcagcatgaaaccagctctcgaagtgcgacgatccgacaattngcgccgnaggccataaatgtacttgcataacctgactggcacggnttactggcccatatccttgggcgtgaccatcataanttccttccgtattacccgtattccctcgatgg

SEQ ID NO: 371541 - DNA, 6326 bp, Homo sapiens
  misc_feature (6095)..(6095): n is a, c, g, or t
  misc_feature (6159)..(6160): n is a, c, g, or t
  misc_feature (6213)..(6213): n is a, c, g, or t
  misc_feature (6220)..(6220): n is a, c, g, or t
  misc_feature (6258)..(6258): n is a, c, g, or t
  misc_feature (6294)..(6294): n is a, c, g, or t
cctcgctaccatatggttggacgattcatcaaatgtattcgtcccagtaagcttgagatctttggtgacttttgaagggagtgaaaataccattttacatctttaatgcctttttcataattatgactttagatttctagaagctctcaatcactttgagaaagcaagaaccttgatttatcgtcttcctggagtgttaacttggcccacgagtaatgtgattattgaagagtctcagccacaaaaaataaagatgctgttagagaaatttgttgaagaatgcaagttccctccagtgccagatgccatttgttgctatcagaagtgccatggatattctaagatccagatatacataactgatccagactttaagggttttatacgcatcagctgttgccagtactgtaaaatagaatttcacatgaattgctggaagaagttaaaaactacaacctttaatgataaaattgacaaggattttctacaaggaatatgtcttacccctgactgtgaaggtgtcatttctaagattatcatcttcagcagtggtggtgaagttaaatgtgaatttgaacacaaggtcataaaagaaaaggttcctccaagacctattctgaaacagaaatgttctagcctagagaaactaagactgaaagaagacaaaaaattgaagagaaagatccaaaaaaaagaagcaaaaaagttagcacaagaaagaatggaggaggacttaagagaaagtaatccacccaaaaatgaagagcagaaagaaactgtagacaatgttcagcgttgtcagttccttgatgacagaattctacagtgtataaagcagtatgctgacaagattaaatccggcatacagaatacagccatgcttctcaaagaattgctttcttggaaagttttgagcacagaagactatacaacctgtttttctagcagaaattttctaaatgaagcagtggactatgttattcgccacttgattcaagaaaataacagagtaaagacaagaatatttctgcatgttttgagtgagcttaaagaagtggagcccaaattagccgcctggatccaaaaacttaatagctttggcttagatgccacaggaactttcttttctcgttatggagcatctcttaaactgcttgattttagtatcatgactttcctctggaatgagaaatatggtcacaaactagactctatagaaggaaagcaacttgattatttctctgagccagcatcattgaaggaagcccgttgtttaatatggctgctagaagaacacagagacaagttcccagcattgcatagtgctttagatgaattctttgatataatggacagccgctgtactgtgttaaggaaacaagatagtggtgaagcaccgtttagttcaaccaaggtgaaaaacaaaagcaagaaaaagaagccaaaggattcaaagcctatgttagttgggtctggaacaacttcagtaacttcaaataatgagatcatcacttcaagtgaagaccatagcaatcgaaattcagattctgcaggcccatttgcagtgcctgaccatcttcggcaagatgtagaagaattcgaagctctctatgaccaacacagtaacgaatatgttgtccgcaataagaagctatgggacatgaacccaaaacaaaaatgttcaactctatatgattacttctctcagtttttggaggaacatggtcccttggacatgagtaacaagatgttctctgcagaatatgagtttttcccagaagaaactcgacagatactagaaaaagcaggaggtttaaaaccttttctcttgggatgccctcgttttgttgtgattgacaactgtattgcactgaagaaggttgcatcacggctcaagaaaaaaaggaagaagaaaaacattaaaacaaaagtagaagaaatttcaaaagcaggggagtatgtacgagttaaactacaactgaatccagctgctagggaatttaaaccagatgtaaagtctaaaccagtgtcagattcatcttcagcaccagcttttgaaaatgtgaaacccaaacctgtgtctgcaaattctcccaagccagcttgtgaagatgtgaaggccaaaccagtatccgacaattcttctagacaagtttctgaggatgggcaacccaaaggggtctcttctaattctcctaaaccaggctctgaggatgcaaattacaagcgagtctcctgtaattcccccaaaccggttcttgaggatgtgaaaccaacttattgggctcaatcccatttggtcacaggatactgtacgtatcttcctttccagagatttgatatcacccagacaccgccagcatacataaacgtgttaccaggtttgccccagtacaccagcatatatacacccttggccagcctttctcctgaatatcagctaccaagatcagtaccagtggtgccgtcttttgtagccaatgacagagcagataaaaatgctgctgcctattttgagggtcatcatttgaatgctgagaatgttgctggtcaccagattgcctctgaaacacagatccttgagggctctttgggaatatctgtaaagtcacactgcagcacaggtgatgctcatacagtcctgagtgagtctaacagaaatgatgagcactgtggaaattctaacaacaaatgtgaagtaattccagaaagcaccagtgcagtaacaaacattccacacgtgcagatggttgccatacaggtatcttggaacataatacaccaagaagtcaatactgagccatataatccttttgaggaacgacaaggggaaatttcacggattgaaaaggagcaccaagtattacaagaccaacttcaagaagtgtatgaaaattatgagcagataaaacttaagggcttagaagagaccagggacctggaagagaagttgaaaaggcacttagaagaaaacaagatctcaaagacggaattagattggttccttcaagatttggaaagagaaattaaaaaatggcaacaggaaaaaaaagaaatccaagaaagactaaaatcactgaagaagaaaattaaaaaggtttcaaatgccagtgaaatgtatacccagaaaaatgatggaaaggaaaaggaacatgaattacatctggatcagtcccttgaaatcagcaacacacttacaaatgagaaaatgaaaatagaagagtatataaagaaagggaaagaggattatgaagagagtcatcagagagctgtggctgcagaggtatccgtacttgaaaactggaaggagagtgaagtgtataagctacagatcatggagtcacaagcagaagcctttctgaagaagctggggctgattagccgtgatcctgcagcatatcctgacatggagtctgatatacgttcatgggaattgtttctttctaatgttacaaaagaaattgagaaagcaaagtctcagtttgaagaacaaattaaggcaattaaaaatggttctcggctcagtgaactttctaaagtgcagatttctgagctttcatttcctgcctgtaacacggttcatcccgagttactccctgagtcttcaggccacgatggccaagggcttgtgacttctgcaagcgacgtgactggaaaccacgcagcacttcacagggatcctagtgtgttctctgctggtgattccccaggggaggctccttctgcgctgttgccagggccaccccctggtcagcctgaagccactcagctgacagggccaaaacgggctggccaggcagctctgtcagaacgaagccctgtggctgatcggaagcagcctgttcctccaggacgtgctgcgcgttcaagccagtctccaaaaaagccgttcaatagtattattgagcacctgtcagtggtattcccatgttacaacagcactgagcttgctggttttattaaaaaagtgcgaagcaaaaacaagaactcactctcaggattgagtattgatgaaattgtccaaagagtgacagaacacattctagatgaacagaaaaagaaaaagccaaacccaggaaaggacaagaggacttatgagcccagctctgccacccccgtgaccaggtcctcccagggctcaccctcggtggttgttgcaccatcacccaaaaccaaggggcagaaagcagaagatgtccctgtgaggattgcactgggtgcaagttcctgtgaaatatgccacgaggtgttcaaatcaaaaaacgtgcgtgtgctcaaatgtgggcacaagtatcacaaagggtgctttaagcagtggcttaaagggcagagcgcttgcccggcctgccagggtcgtgatctcctgacagaagagtcaccttctggaagaggctggcccagtcagaatcaggagctgccttcctgctcttctaggtagtcacacttcactaaagtgtcatccaccagtgtgttgaatccgaagaatgacaattttctaccactggtgtaaaaaacaaacatttgaagacccttgtgcattgtgtgtcacaaagctaaatacatggaaatcgttaatatcgctgatattaagtaatttccccactctgagtgaatactttgatgattgccaacagtggctaataaaatgacggctaccacactcatgggtcactggggctgcgcagggctctttgaggtgggtggcttcttttggaaagtactatgaacgtctcgaagcagtattctagtgataagaattcttaacatagccaagcgccccacgtttgttccccacgtttgttccccttttctgtttgaaaaacctgttctggtagctccacaagagagatgatactgactttttaaattttttacaagagtctgtattcctgatatgcctatatttttcctcaaagattctgcattttaaggatgggcataagcaaactatattttaataatttatagttaatgttaaaatattggctgatttagaccaaaagattcaaatctcctctttgtgaaatcccatctgcatttgattttttattattttatgttcccccgttagattgttttaagtgtttgcttttcatcttttatagatgtaatctgattttcaaaaatcattaacactttttaattagtatcgactaagactttttccccctggaatcgaggctgtgtgtccgtcatcccagcccccggttggagcctgctctttgaactccgctgccttccttagcagcttctgtcctcttctgtgagtcagtcagcgagtgcttgggatccgcatccagccgtgctgagcacacaacaggctgtgtgtggaaatggccaccaccattctccttccccaccccaccacaaaaagagaagctgtgtctttagacaaccctgaggtatctgtgttacaatcgttctgtgtttgatatttgtgtaaagtatgcatgcagtcttgtactgtgacctaagaacaaaactgtaactgcattagaaaccatgaaaaaattagatattgttttgtgacttttagacagtggtaaatatagaaccatgaattctggtcacattccatttctctccaacatgaaggatcaaaaaatgtttttcaatgtgttctttgttccactggaaacttagagtcatgagtttatgagctgatttggtcaccttcctctgcctttgttcactgtgagttctgatgtcttagtgacttagttcttagaagctcacgccttagtttgaaacagattctccacggtggtccccaaaacactgtctgcatatccataagaattgagcgctatgggtgttaacgtgcatgaggatcagtttgcagcagcaagtacaaaaggagaagaggaacatccgttgaatgagtgtgttttgtacataacttcagatacttgtgaacatgccttatatttgtccaacaactgtcagaataaagaacattctaaaatgagaaaaaaaaaaaaaaaaaaaaaaaaaaaaaaaaaaaaaaccaacgccattgctcagctaacggccacgcttcaacctggtgatgccccggcatactttccagcatagagcgcggaataagcgcaatngcctgctctgcgatcacacaggccaacattccgtgataagactccatctcatggatagttcccnngagcgcaccgtcagcatgaaaccagctctcgaagtgcgacgatccgacaattngcgccgnaggccataaatgtacttgcataacctgactggcacggnttactggcccatatccttgggcgtgaccatcataanttccttccgtattacccgtattccctcgatgg

SEQ ID NO: 371542 - DNA, 8778 bp, Homo sapiens
  misc_feature (8547)..(8547): n is a, c, g, or t
  misc_feature (8611)..(8612): n is a, c, g, or t
  misc_feature (8665)..(8665): n is a, c, g, or t
  misc_feature (8672)..(8672): n is a, c, g, or t
  misc_feature (8710)..(8710): n is a, c, g, or t
  misc_feature (8746)..(8746): n is a, c, g, or t
ctgaactagttgccagtgatcttgaaacgtgacagtaaccaagagataaataggtgacaatgacaggaaaattagatgtagtaaaagagagtgtttgagagcagaagctatggcaactaaagactggatttgaatccttcctagcttggtgacatgagcaaattacttgatttaagtgagcattttcccatctgtacagtggagataacgataattgtgcctgctaagaagaattgctgtgaagattagtgaaataatgcatgtaaaacatttggtacagtatgtgacacatagtacaaatagtttgctaggaagattgttattattcttcacttgtgatattgtgaagttttcatacagcaaattggacatcatgagatggattgattaaataaatagatttgaacttcaaggactggtagtgttcttgctttggaaagaagaaacttggtttatcctaataatagtaggataataatggtgaagtgataggtacaagtaatagtgtttatgatgcgctggtgatgataggaaaagaaagccattatatgggcaagagctagaagtaataaaatggtgcatttttcagtgatgtttggcctatgtagctattctctgataactataaaaatccttattattgaagattcttcaggaaaaaaaaacccttagtctgaaactttagcaccaatcccccttgccccccattgaaatacgtatttttaaaacatggcttttgataatgtgagggttttttcctttttgcgatttagcagtgctgattgtgtattgcagtagttgtgagagcattagaagcagcagtcgataggaggatggaaggtctggatgccgccttggggagttaggagattggcagacttaccctgtaccactctagccctactcctttgcccaagacagaaacacactgagatggataggagaatatgagcagttgataggaaagttctcagtggagtcaggatttaggttaggccaggagattgagaatataacagtttgtgtatgatgaaatggcatatttcacagaatgcagtaaaagcaggtagggtacaagtgcagcaacaggaagatgtcttttcttcattcagcaaacacttatttgagagcttaccatgtgctaggcacatacaaagataaataagatgcccttgatgatcctctatttaaaggagacatgtacaattcacgtgcttctgagataaatttgaagaaactacaacatcttgagttgatggaagatattgtggatttggcaaagaaagttgctaatgattcattccttattggaggcttattgagaattggttgtaaaatagaaaataaaatcttggcaatggaagaagctctgaattggataaaatatgcaggcgatgtaacaattctaactaaattaggatcaattgacaattgttggcctatgttaagtattttctttactgaatacaagtaccacataactaaaattgtaatggaagactgcaatttgcttgaagaacttaaaactcaaagttgtatggattgtatagaggaaggagaactaatgaaaatgaaaggaaatgaagagttttccaaagaaagatttgatatagctattatctattacaccagagccattgaatatagacctgaaaactaccttctttatggtaaccgagctctttgttttcttcgtactggacagtttagaaatgcactcggtgatggaaagagagccactattctgaagaacacttggccaaagggtcattatcgttattgtgatgctctttctatgctgggggaatatgactgggccctgcaagcaaacataaaagctcaaaaactctgtaaaaatgaccctgagggaatcaaggatctaattcagcagcatgtaaagttacaaaaacaaatagaagacctacaaggtcgaacagcaaataaggatccaattaaagccttttatgaaaacagggcctacacacctaggagtttatcagcacctatatttactacttcacttaactttgtggagaaggaaagagatttcagaaaaattaatcacgaaatggccaacggtggtaatcagaatctaaaggtggcggatgaggcgttgaaggtagatgattgtgactgtcatcctgaattttcaccaccatcaagtcagcctccaaaacataaaggaaaacaaaaatctcgaaacaatgaatcagaaaagttcagttctagttcaccattgactttaccagcagatttgaagaacatcttggagaaacagttttctaaatcttccagagctgcacaccaggattttgctaatataatgaaaatgctgagaagcttaattcaagatggctatatggccttattggagcagcgttgccgcagcgctgcacaggcctttacagagttgctgaacggtttagatcctcaaaaaataaagcaattgaacctggccatgattaactatgttttggtcgtctatggacttgccatttctctccttggaataggacagcctgaggaattatctgaagccgaaaaccagtttaagaggattattgaacactaccccagtgagggccttgattgcttggcctactgtggaattggaaaagtgtatttgaaaaaaaacagatttctagaagctctcaatcactttgagaaagcaagaaccttgatttatcgtcttcctggagtgttaacttggcccacgagtaatgtgattattgaagagtctcagccacaaaaaataaagatgctgttagagaaatttgttgaagaatgcaagttccctccagtgccagatgccatttgttgctatcagaagtgccatggatattctaagatccagatatacataactgatccagactttaagggttttatacgcatcagctgttgccagtactgtaaaatagaatttcacatgaattgctggaagaagttaaaaactacaacctttaatgataaaattgacaaggattttctacaaggaatatgtcttacccctgactgtgaaggtgtcatttctaagattatcatcttcagcagtggtggtgaagttaaatgtgaatttgaacacaaggtcataaaagaaaaggttcctccaagacctattctgaaacagaaatgttctagcctagagaaactaagactgaaagaagacaaaaaattgaagagaaagatccaaaaaaaagaagcaaaaaagttagcacaagaaagaatggaggaggacttaagagaaagtaatccacccaaaaatgaagagcagaaagaaactgtagacaatgttcagcgttgtcagttccttgatgacagaattctacagtgtataaagcagtatgctgacaagattaaatccggcatacagaatacagccatgcttctcaaagaattgctttcttggaaagttttgagcacagaagactatacaacctgtttttctagcagaaattttctaaatgaagcagtggactatgttattcgccacttgattcaagaaaataacagagtaaagacaagaatatttctgcatgttttgagtgagcttaaagaagtggagcccaaattagccgcctggatccaaaaacttaatagctttggcttagatgccacaggaactttcttttctcgttatggagcatctcttaaactgcttgattttagtatcatgactttcctctggaatgagaaatatggtcacaaactagactctatagaaggaaagcaacttgattatttctctgagccagcatcattgaaggaagcccgttgtttaatatggctgctagaagaacacagagacaagttcccagcattgcatagtgctttagatgaattctttgatataatggacagccgctgtactgtgttaaggaaacaagatagtggtgaagcaccgtttagttcaaccaaggtgaaaaacaaaagcaagaaaaagaagccaaaggattcaaagcctatgttagttgggtctggaacaacttcagtaacttcaaataatgagatcatcacttcaagtgaagaccatagcaatcgaaattcagattctgcaggcccatttgcagtgcctgaccatcttcggcaagatgtagaagaattcgaagctctctatgaccaacacagtaacgaatatgttgtccgcaataagaagctatgggacatgaacccaaaacaaaaatgttcaactctatatgattacttctctcagtttttggaggaacatggtcccttggacatgagtaacaagatgttctctgcagaatatgagtttttcccagaagaaactcgacagatactagaaaaagcaggaggtttaaaaccttttctcttgggatgccctcgttttgttgtgattgacaactgtattgcactgaagaaggttgcatcacggctcaagaaaaaaaggaagaagaaaaacattaaaacaaaagtagaagaaatttcaaaagcaggggagtatgtacgagttaaactacaactgaatccagctgctagggaatttaaaccagatgtaaagtctaaaccagtgtcagattcatcttcagcaccagcttttgaaaatgtgaaacccaaacctgtgtctgcaaattctcccaagccagcttgtgaagatgtgaaggccaaaccagtatccgacaattcttctagacaagtttctgaggatgggcaacccaaaggggtctcttctaattctcctaaaccaggctctgaggatgcaaattacaagcgagtctcctgtaattcccccaaaccggttcttgaggatgtgaaaccaacttattgggctcaatcccatttggtcacaggatactgtacgtatcttcctttccagagatttgatatcacccagacaccgccagcatacataaacgtgttaccaggtttgccccagtacaccagcatatatacacccttggccagcctttctcctgaatatcagctaccaagatcagtaccagtggtgccgtcttttgtagccaatgacagagcagattggtcaccagattgcctctgaaacacagatccttgagggctctttgggaatatctgtaaagtcacactgcagcacaggtgatgctcatacagtcctgagtgagtctaacagaaatgatgagcactgtggaaattctaacaacaaatgtgaagtaattccagaaagcaccagtgcagtaacaaacattccacacgtgcagatggttgccatacaggtatcttggaacataatacaccaagaagtcaatactgagccatataatccttttgaggaacgacaaggggaaatttcacggattgaaaaggagcaccaagtattacaagaccaacttcaagaagtgtatgaaaattatgagcagataaaacttaagggcttagaagagaccagggacctggaagagaagttgaaaaggcacttagaagaaaacaagatctcaaagacggaattagattggttccttcaagatttggaaagagaaattaaaaaatggcaacaggaaaaaaaagaaatccaagaaagactaaaatcactgaagaagaaaattaaaaaggtttcaaatgccagtgaaatgtatacccagaaaaatgatggaaaggaaaaggaacatgaattacatctggatcagtcccttgaaatcagcaacacacttacaaatgagaaaatgaaaatagaagagtatataaagaaagggaaagaggattatgaagagagtcatcagagagctgtggctgcagaggtatccgtacttgaaaactggaaggagagtgaagtgtataagctacagatcatggagtcacaagcagaagcctttctgaagaagctggggctgattagccgtgatcctgcagcatatcctgacatggagtctgatatacgttcatgggaattgtttctttctaatgttacaaaagaaattgagaaagcaaagtctcagtttgaagaacaaattaaggcaattaaaaatggttctcggctcagtgaactttctaaagtgcagatttctgagctttcatttcctgcctgtaacacggttcatcccgagttactccctgagtcttcaggccacgatggccaagggcttgtgacttctgcaagcgacgtgactggaaaccacgcagcacttcacagggatcctagtgtgttctctgctggtgattccccaggggaggctccttctgcgctgttgccagggccaccccctggtcagcctgaagccactcagctgacagggccaaaacgggctggccaggcagctctgtcagaacgaagccctgtggctgatcggaagcagcctgttcctccaggacgtgctgcgcgttcaagccagtctccaaaaaagccgttcaatagtattattgagcacctgtcagtggtattcccatgttacaacagcactgagcttgctggttttattaaaaaagtgcgaagcaaaaacaagaactcactctcaggattgagtattgatgaaattgtccaaagagtgacagaacacattctagatgaacagaaaaagaaaaagccaaacccaggaaaggacaagaggacttatgagcccagctctgccacccccgtgaccaggtcctcccagggctcaccctcggtggttgttgcaccatcacccaaaaccaaggggcagaaagcagaagatgtccctgtgaggattgcactgggtgcaagttcctgtgaaatatgccacgaggtgttcaaatcaaaaaacgtgcgtgtgctcaaatgtgggcacaagtatcacaaagggtgctttaagcagtggcttaaagggcagagcgcttgcccggcctgccagggtcgtgatctcctgacagaagagtcaccttctggaagaggctggcccagtcagaatcaggagctgccttcctgctcttctaggtagtcacacttcactaaagtgtcatccaccagtgtgttgaatccgaagaatgacaattttctaccactggtgtaaaaaacaaacatttgaagacccttgtgcattgtgtgtcacaaagctaaatacatggaaatcgttaatatcgctgatattaagtaatttccccactctgagtgaatactttgatgattgccaacagtggctaataaaatgacggctaccacactcatgggtcactggggctgcgcagggctctttgaggtgggtggcttcttttggaaagtactatgaacgtctcgaagcagtattctagtgataagaattcttaacatagccaagcgccccacgtttgttccccacgtttgttccccttttctgtttgaaaaacctgttctggtagctccacaagagagatgatactgactttttaaattttttacaagagtctgtattcctgatatgcctatatttttcctcaaagattctgcattttaaggatgggcataagcaaactatattttaataatttatagttaatgttaaaatattggctgatttagaccaaaagattcaaatctcctctttgtgaaatcccatctgcatttgattttttattattttatgttcccccgttagattgttttaagtgtttgcttttcatcttttatagatgtaatctgattttcaaaaatcattaacactttttaattagtatcgactaagactttttccccctggaatcgaggctgtgtgtccgtcatcccagcccccggttggagcctgctctttgaactccgctgccttccttagcagcttctgtcctcttctgtgagtcagtcagcgagtgcttgggatccgcatccagccgtgctgagcacacaacaggctgtgtgtggaaatggccaccaccattctccttccccaccccaccacaaaaagagaagctgtgtctttagacaaccctgaggtatctgtgttacaatcgttctgtgtttgatatttgtgtaaagtatgcatgcagtcttgtactgtgacctaagaacaaaactgtaactgcattagaaaccatgaaaaaattagatattgttttgtgacttttagacagtggtaaatatagaaccatgaattctggtcacattccatttctctccaacatgaaggatcaaaaaatgtttttcaatgtgttctttgttccactggaaacttagagtcatgagtttatgagctgatttggtcaccttcctctgcctttgttcactgtgagttctgatgtcttagtgacttagttcttagaagctcacgccttagtttgaaacagattctccacggtggtccccaaaacactgtctgcatatccataagaattgagcgctatgggtgttaacgtgcatgaggatcagtttgcagcagcaagtacaaaaggagaagaggaacatccgttgaatgagtgtgttttgtacataacttcagatacttgtgaacatgccttatatttgtccaacaactgtcagaataaagaacattctaaaatgagaaaaaaaaaaaaaaaaaaaaaaaaaaaaaaaaaaaaaaccaacgccattgctcagctaacggccacgcttcaacctggtgatgccccggcatactttccagcatagagcgcggaataagcgcaatngcctgctctgcgatcacacaggccaacattccgtgataagactccatctcatggatagttcccnngagcgcaccgtcagcatgaaaccagctctcgaagtgcgacgatccgacaattngcgccgnaggccataaatgtacttgcataacctgactggcacggnttactggcccatatccttgggcgtgaccatcataanttccttccgtattacccgtattccctcgatgg

SEQ ID NO: 371543 - DNA, 5106 bp, Homo sapiens
  misc_feature (4875)..(4875): n is a, c, g, or t
  misc_feature (4939)..(4940): n is a, c, g, or t
  misc_feature (4993)..(4993): n is a, c, g, or t
  misc_feature (5000)..(5000): n is a, c, g, or t
  misc_feature (5038)..(5038): n is a, c, g, or t
  misc_feature (5074)..(5074): n is a, c, g, or t
tgtgtcaaagccaaataaggaatagaacatggcctatgccagtagtatgaggcgttattttaaggctttagtgtactatatggaaatgtaaatatttagttttctcacaaaaccatctgtatattcctacagacagccgctgtactgtgttaaggaaacaagatagtggtgaagcaccgtttagttcaaccaaggtgaaaaacaaaagcaagaaaaagaagccaaaggattcaaagcctatgttagttgggtctggaacaacttcagtaacttcaaataatgagatcatcacttcaagtgaagaccatagcaatcgaaattcagattctgcaggcccatttgcagtgcctgaccatcttcggcaagatgtagaagaattcgaagctctctatgaccaacacagtaacgaatatgttgtccgcaataagaagctatgggacatgaacccaaaacaaaaatgttcaactctatatgattacttctctcagtttttggaggaacatggtcccttggacatgagtaacaagatgttctctgcagaatatgagtttttcccagaagaaactcgacagatactagaaaaagcaggaggtttaaaaccttttctcttgggatgccctcgttttgttgtgattgacaactgtattgcactgaagaaggttgcatcacggctcaagaaaaaaaggaagaagaaaaacattaaaacaaaagtagaagaaatttcaaaagcaggggagtatgtacgagttaaactacaactgaatccagctgctagggaatttaaaccagatgtaaagtctaaaccagtgtcagattcatcttcagcaccagcttttgaaaatgtgaaacccaaacctgtgtctgcaaattctcccaagccagcttgtgaagatgtgaaggccaaaccagtatccgacaattcttctagacaagtttctgaggatgggcaacccaaaggggtctcttctaattctcctaaaccaggctctgaggatgcaaattacaagcgagtctcctgtaattcccccaaaccggttcttgaggatgtgaaaccaacttattgggctcaatcccatttggtcacaggatactgtacgtatcttcctttccagagatttgatatcacccagacaccgccagcatacataaacgtgttaccaggtttgccccagtacaccagcatatatacacccttggccagcctttctcctgaatatcagctaccaagatcagtaccagtggtgccgtcttttgtagccaatgacagagcagataaaaatgctgctgcctattttgagggtcatcatttgaatgctgagaatgttgctggtcaccagattgcctctgaaacacagatccttgagggctctttgggaatatctgtaaagtcacactgcagcacaggtgatgctcatacagtcctgagtgagtctaacagaaatgatgagcactgtggaaattctaacaacaaatgtgaagtaattccagaaagcaccagtgcagtaacaaacattccacacgtgcagatggttgccatacaggtatcttggaacataatacaccaagaagtcaatactgagccatataatccttttgaggaacgacaaggggaaatttcacggattgaaaaggagcaccaagtattacaagaccaacttcaagaagtgtatgaaaattatgagcagataaaacttaagggcttagaagagaccagggacctggaagagaagttgaaaaggcacttagaagaaaacaagatctcaaagacggaattagattggttccttcaagatttggaaagagaaattaaaaaatggcaacaggaaaaaaaagaaatccaagaaagactaaaatcactgaagaagaaaattaaaaaggtttcaaatgccagtgaaatgtatacccagaaaaatgatggaaaggaaaaggaacatgaattacatctggatcagtcccttgaaatcagcaacacacttacaaatgagaaaatgaaaatagaagagtatataaagaaagggaaagaggattatgaagagagtcatcagagagctgtggctgcagaggtatccgtacttgaaaactggaaggagagtgaagtgtataagctacagatcatggagtcacaagcagaagcctttctgaagaagctggggctgattagccgtgatcctgcagcatatcctgacatggagtctgatatacgttcatgggaattgtttctttctaatgttacaaaagaaattgagaaagcaaagtctcagtttgaagaacaaattaaggcaattaaaaatggttctcggctcagtgaactttctaaagtgcagatttctgagctttcatttcctgcctgtaacacggttcatcccgagttactccctgagtcttcaggccacgatggccaagggcttgtgacttctgcaagcgacgtgactggaaaccacgcagcacttcacagggatcctagtgtgttctctgctggtgattccccaggggaggctccttctgcgctgttgccagggccaccccctggtcagcctgaagccactcagctgacagggccaaaacgggctggccaggcagctctgtcagaacgaagccctgtggctgatcggaagcagcctgttcctccaggacgtgctgcgcgttcaagccagtctccaaaaaagccgttcaatagtattattgagcacctgtcagtggtattcccatgttacaacagcactgagcttgctggttttattaaaaaagtgcgaagcaaaaacaagaactcactctcaggattgagtattgatgaaattgtccaaagagtgacagaacacattctagatgaacagaaaaagaaaaagccaaacccaggaaaggacaagaggacttatgagcccagctctgccacccccgtgaccaggtcctcccagggctcaccctcggtggttgttgcaccatcacccaaaaccaaggggcagaaagcagaagatgtccctgtgaggattgcactgggtgcaagttcctgtgaaatatgccacgaggtgttcaaatcaaaaaacgtgcgtgtgctcaaatgtgggcacaagtatcacaaagggtgctttaagcagtggcttaaagggcagagcgcttgcccggcctgccagggtcgtgatctcctgacagaagagtcaccttctggaagaggctggcccagtcagaatcaggagctgccttcctgctcttctaggtagtcacacttcactaaagtgtcatccaccagtgtgttgaatccgaagaatgacaattttctaccactggtgtaaaaaacaaacatttgaagacccttgtgcattgtgtgtcacaaagctaaatacatggaaatcgttaatatcgctgatattaagtaatttccccactctgagtgaatactttgatgattgccaacagtggctaataaaatgacggctaccacactcatgggtcactggggctgcgcagggctctttgaggtgggtggcttcttttggaaagtactatgaacgtctcgaagcagtattctagtgataagaattcttaacatagccaagcgccccacgtttgttccccacgtttgttccccttttctgtttgaaaaacctgttctggtagctccacaagagagatgatactgactttttaaattttttacaagagtctgtattcctgatatgcctatatttttcctcaaagattctgcattttaaggatgggcataagcaaactatattttaataatttatagttaatgttaaaatattggctgatttagaccaaaagattcaaatctcctctttgtgaaatcccatctgcatttgattttttattattttatgttcccccgttagattgttttaagtgtttgcttttcatcttttatagatgtaatctgattttcaaaaatcattaacactttttaattagtatcgactaagactttttccccctggaatcgaggctgtgtgtccgtcatcccagcccccggttggagcctgctctttgaactccgctgccttccttagcagcttctgtcctcttctgtgagtcagtcagcgagtgcttgggatccgcatccagccgtgctgagcacacaacaggctgtgtgtggaaatggccaccaccattctccttccccaccccaccacaaaaagagaagctgtgtctttagacaaccctgaggtatctgtgttacaatcgttctgtgtttgatatttgtgtaaagtatgcatgcagtcttgtactgtgacctaagaacaaaactgtaactgcattagaaaccatgaaaaaattagatattgttttgtgacttttagacagtggtaaatatagaaccatgaattctggtcacattccatttctctccaacatgaaggatcaaaaaatgtttttcaatgtgttctttgttccactggaaacttagagtcatgagtttatgagctgatttggtcaccttcctctgcctttgttcactgtgagttctgatgtcttagtgacttagttcttagaagctcacgccttagtttgaaacagattctccacggtggtccccaaaacactgtctgcatatccataagaattgagcgctatgggtgttaacgtgcatgaggatcagtttgcagcagcaagtacaaaaggagaagaggaacatccgttgaatgagtgtgttttgtacataacttcagatacttgtgaacatgccttatatttgtccaacaactgtcagaataaagaacattctaaaatgagaaaaaaaaaaaaaaaaaaaaaaaaaaaaaaaaaaaaaaccaacgccattgctcagctaacggccacgcttcaacctggtgatgccccggcatactttccagcatagagcgcggaataagcgcaatngcctgctctgcgatcacacaggccaacattccgtgataagactccatctcatggatagttcccnngagcgcaccgtcagcatgaaaccagctctcgaagtgcgacgatccgacaattngcgccgnaggccataaatgtacttgcataacctgactggcacggnttactggcccatatccttgggcgtgaccatcataanttccttccgtattacccgtattccctcgatgg

SEQ ID NO: 371544 - DNA, 8118 bp, Homo sapiens
  misc_feature (7887)..(7887): n is a, c, g, or t
  misc_feature (7951)..(7952): n is a, c, g, or t
  misc_feature (8005)..(8005): n is a, c, g, or t
  misc_feature (8012)..(8012): n is a, c, g, or t
  misc_feature (8050)..(8050): n is a, c, g, or t
  misc_feature (8086)..(8086): n is a, c, g, or t
ctgaactagttgccagtgatcttgaaacgtgacagtaaccaagagataaataggtgacaatgacaggaaaattagatgtagtaaaagagagtgtttgagagcagaagctatggcaactaaagactggatttgaatccttcctagcttggtgacatgagcaaattacttgatttaagtgagcattttcccatctgtacagtggagataacgataattgtgcctgctaagaagaattgctgtgaagattagtgaaataatgcatgtaaaacatttggtacagtatgtgacacatagtacaaatagtttgctaggaagattgttattattcttcacttgtgatattgtgaagttttcatacagcaaattggacatcatgagatggattgattaaataaatagatttgaacttcaaggactggtagtgttcttgctttggaaagaagaaacttggtttatcctaataatagtaggataataatggtgaagtgataggtacaagtaatagtgtttatgatgcgctggtgatgataggaaaagaaagccattatatgggcaagagctagaagtaataaaatggtgcatttttcagtgatgtttggcctatgtagctattctctgataactataaaaatccttattattgaagattcttcaggaaaaaaaaacccttagtctgaaactttagcaccaatcccccttgccccccattgaaatacgtatttttaaaacatggcttttgataatgtgagggttttttcctttttgcgatttagcagtgctgattgtgtattgcagtagttgtgagagcattagaagcagcagtcgataggaggatggaaggtctggatgccgccttggggagttaggagattggcagacttaccctgtaccactctagccctactcctttgcccaagacagaaacacactgagatggataggagaatatgagcagttgataggaaagttctcagtggagtcaggatttaggttaggccaggagattgagaatataacagtttgtgtatgatgaaatggcatatttcacagaatgcagtaaaagcaggtagggtacaagtgcagcaacaggaagatgtcttttcttcattcagcaaacacttatttgagagcttaccatgtgctaggcacatacaaagataaataagatgcccttgatgatcctctatttaaaggagacatgtacaattcacgtgcttctgagataaatttgaagaaactacaacatcttgagttgatggaagatattgtggatttggcaaagaaagttgctaatgattcattccttattggaggcttattgagaattggttgtaaaatagaaaataaaatcttggcaatggaagaagctctgaattggataaaatatgcaggcgatgtaacaattctaactaaattaggatcaattgacaattgttggcctatgttaagtattttctttactgaatacaagtaccacataactaaaattgtaatggaagactgcaatttgcttgaagaacttaaaactcaaagttgtatggattgtatagaggaaggagaactaatgaaaatgaaaggaaatgaagagttttccaaagaaagatttgatatagctattatctattacaccagagccattgaatatagacctgaaaactaccttctttatggtaaccgagctctttgttttcttcgtactggacagtttagaaatgcactcggtgatggaaagagagccactattctgaagaacacttggccaaagggtcattatcgttattgtgatgctctttctatgctgggggaatatgactgggccctgcaagcaaacataaaagctcaaaaactctgtaaaaatgaccctgagggaatcaaggatctaattcagcagcatgtaaagttacaaaaacaaatagaagacctacaaggtcgaacagcaaataaggatccaattaaagccttttatgaaaacagggcctacacacctaggagtttatcagcacctatatttactacttcacttaactttgtggagaaggaaagagatttcagaaaaattaatcacgaaatggccaacggtggtaatcagaatctaaaggtggcggatgaggcgttgaaggtagatgattgtgactgtcatcctgaattttcaccaccatcaagtcagcctccaaaacataaaggaaaacaaaaatctcgaaacaatgaatcagaaaagttcagttctagttcaccattgactttaccagcagatttgaagaacatcttggagaaacagttttctaaatcttccagagctgcacaccaggattttgctaatataatgaaaatgctgagaagcttaattcaagatggctatatggccttattggagcagcgttgccgcagcgctgcacaggcctttacagagttgctgaacggtttagatcctcaaaaaataaagcaattgaacctggccatgattaactatgttttggtcgtctatggacttgccatttctctccttggaataggacagcctgaggaattatctgaagccgaaaaccagtttaagaggattattgaacactaccccagtgagggccttgattgcttggcctactgtggaattggaaaagtgtatttgaaaaaaaacagatttctagaagctctcaatcactttgagaaagcaagaaccttgatttatcgtcttcctggagtgttaacttggcccacgagtaatgtgattattgaagagtctcagccacaaaaaataaagatgctgttagagaaatttgttgaagaatgcaagttccctccagtgccagatgccatttgttgctatcagaagtgccatggatattctaagatccagatatacataactgatccagactttaagggttttatacgcatcagctgttgccagtactgtaaaatagaatttcacatgaattgctggaagaagttaaaaactacaacctttaatgataaaattgacaaggattttctacaaggaatatgtcttacccctgactgtgaaggtgtcatttctaagattatcatcttcagcagtggtggtgaagttaaatgtgaatttgaacacaaggtcataaaagaaaaggttcctccaagacctattctgaaacagaaatgttctagcctagagaaactaagactgaaagaagacaaaaaattgaagagaaagatccaaaaaaaagaagcaaaaaagttagcacaagaaagaatggaggaggacttaagagaaagtaatccacccaaaaatgaagagcagaaagaaactgtagacaatgttcagcgttgtcagttccttgatgacagaattctacagtgtataaagcagtatgctgacaagattaaatccggcatacagaatacagccatgcttctcaaagaattgctttcttggaaagttttgagcacagaagactatacaacctgtttttctagcagaaattttctaaatgaagcagtggactatgttattcgccacttgattcaagaaaataacagagtaaagacaagaatatttctgcatgttttgagtgagcttaaagaagtggagcccaaattagccgcctggatccaaaaacttaatagctttggcttagatgccacaggaactttcttttctcgttatggagcatctcttaaactgcttgattttagtatcatgactttcctctggaatgagaaatatggtcacaaactagactctatagaaggaaagcaacttgattatttctctgagccagcatcattgaaggaagcccgttgtttaatatggctgctagaagaacacagagacaagttcccagcattgcatagtgctttagatgaattctttgatataatggacagccgctgtactgtgttaaggaaacaagatagtggtgaagcaccgtttagttcaaccaaggtgaaaaacaaaagcaagaaaaagaagccaaaggattcaaagcctatgttagttgggtctggaacaacttcagtaacttcaaataatgagatcatcacttcaagtgaagaccatagcaatcgaaattcagattctgcaggcccatttgcagtgcctgaccatcttcggcaagatgtagaagaattcgaagctctctatgaccaacacagtaacgaatatgttgtccgcaataagaagctatgggacatgaacccaaaacaaaaatgttcaactctatatgattacttctctcagtttttggaggaacatggtcccttggacatgagtaacaagatgttctctgcagaatatgagtttttcccagaagaaactcgacagatactagaaaaagcaggaggtttaaaaccttttctcttgggatgccctcgttttgttgtgattgacaactgtattgcactgaagaaggttgcatcacggctcaagaaaaaaaggaagaagaaaaacattaaaacaaaagtagaagaaatttcaaaagcaggggagtatgtacgagttaaactacaactgaatccagctgctagggaatttaaaccagatgtaaagtctaaaccagtgtcagattcatcttcagcaccagcttttgaaaatgtgaaacccaaacctgtgtctgcaaattctcccaagccagcttgtgaagatgtgaaggccaaaccagtatccgacaattcttctagacaagtttctgaggatgggcaacccaaaggggtctcttctaattctcctaaaccaggctctgaggatgcaaattacaagcgagtctcctgtaattcccccaaaccggttcttgaggatgtgaaaccaacttattgggctcaatcccatttggtcacaggatactgtacgtatcttcctttccagagatttgatatcacccagacaccgccagcatacataaacgtgttaccaggtttgccccagtacaccagcatatatacacccttggccagcctttctcctgaatatcagctaccaagatcagtaccagtggtgccgtcttttgtagccaatgacagagcagataaaaatgctgctgcctattttgagggtcatcatttgaatgctgagaatgttgctggtcaccagattgcctctgaaacacagatccttgagggctctttgggaatatctgtaaagtcacactgcagcacaggtgatgctcatacagtcctgagtgagtctaacagaaatgatgagcactgtggaaattctaacaacaaatgtgaagtaattccagaaagcaccagtgcagtaacaaacattccacacgtgcagatggttgccatacaggtatcttggaacataatacaccaagaagtcaatactgagccatataatccttttgaggaacgacaaggggaaatttcacggattgaaaaggagcaccaagtattacaagaccaacttcaagaagtgtatgaaaattatgagcagataaaacttaagggcttagaagagaccagggacctggaagagaagttgaaaaggcacttagaagaaaacaagatctcaaagacggaattagattggttccttcaagatttggaaagagaaattaaaaaatggcaacaggaaaaaaaagaaatccaagaaagactaaaatcactgaagaagaaaattaaaaaggtttcaaatgccagtgaaatgtatacccagaaaaatgatggaaaggaaaaggaacatgaattacatctggatcagtcccttgaaatcagcaacacacttacaaatgagaaaatgaaaatagaagagtatataaagaaagggaaagaggattatgaagagagtcatcagagagctgtggctgcagaggtatccgtacttgaaaactggaaggagagtgaagtgtataagctacagatcatggagtcacaagcagaagcctttctgaagaagctggggctgattagccgtgatcctgcagcatatcctgacatggagtctgatatacgttcatgggaattgtttctttctaatgttacaaaagaaattgagaaagcaaagtctcagtttgaagaacaaattaaggcaattaaaaatggttctcggctcagtgaactttctaaagtgcagatttctgagctttcatttcctgcctgtaacacggttcatcccgagttactccctgagtcttcaggccacgatggccaagggcttgtgacttctgcaagcgacgtgactggaaaccacgcagcacttcacagggatcctagtgtgttctctgctggtgattccccaggggaggctccttctgcgctgttgccagggccaccccctggtcagcctgaagccactcagctgacagggccaaaacgggctggccaggcagctctgtcagaacgaagccctgtggctgatcggaagcagcctgttcctccaggacgtgctgcgcgttcaagccagtctccaaaaaagccgttcaatagtattattgagcacctgtcagtggtattcccatgttacaacagcactgagcttgctggttttattaaaaaagtgcgaagcaaaaacaagaactcactctcaggattgagtattgatgaaattgtccaaagagtgacagaacacattctagatgaacagaaaaagaaaaagccaaacccaggaaaggacaagaggacttatgagcccagctctgccacccccgtgaccaggtcctcccagggctcaccctcggtggttgttgcaccatcacccaaaaccaaggggcagaaagcagaagatgtccctgtgaggattgcactgggtgcaagttcctgtgaaatatgccacgaggtgttcaaatcaaaaaacgtgcgtgtgctcaaatgtgggcacaagtatcacaaagggtgctttaagcagtggcttaaagggcagagcgcttgcccggcctgccagggtcgtgatctcctgacagaagagtcaccttctggaagaggctggcccagtcagaatcaggagctgccttcctgctcttctagtatcgactaagactttttccccctggaatcgaggctgtgtgtccgtcatcccagcccccggttggagcctgctctttgaactccgctgccttccttagcagcttctgtcctcttctgtgagtcagtcagcgagtgcttgggatccgcatccagccgtgctgagcacacaacaggctgtgtgtggaaatggccaccaccattctccttccccaccccaccacaaaaagagaagctgtgtctttagacaaccctgaggtatctgtgttacaatcgttctgtgtttgatatttgtgtaaagtatgcatgcagtcttgtactgtgacctaagaacaaaactgtaactgcattagaaaccatgaaaaaattagatattgttttgtgacttttagacagtggtaaatatagaaccatgaattctggtcacattccatttctctccaacatgaaggatcaaaaaatgtttttcaatgtgttctttgttccactggaaacttagagtcatgagtttatgagctgatttggtcaccttcctctgcctttgttcactgtgagttctgatgtcttagtgacttagttcttagaagctcacgccttagtttgaaacagattctccacggtggtccccaaaacactgtctgcatatccataagaattgagcgctatgggtgttaacgtgcatgaggatcagtttgcagcagcaagtacaaaaggagaagaggaacatccgttgaatgagtgtgttttgtacataacttcagatacttgtgaacatgccttatatttgtccaacaactgtcagaataaagaacattctaaaatgagaaaaaaaaaaaaaaaaaaaaaaaaaaaaaaaaaaaaaaccaacgccattgctcagctaacggccacgcttcaacctggtgatgccccggcatactttccagcatagagcgcggaataagcgcaatngcctgctctgcgatcacacaggccaacattccgtgataagactccatctcatggatagttcccnngagcgcaccgtcagcatgaaaccagctctcgaagtgcgacgatccgacaattngcgccgnaggccataaatgtacttgcataacctgactggcacggnttactggcccatatccttgggcgtgaccatcataanttccttccgtattacccgtattccctcgatgg

SEQ ID NO: 371545 - DNA, 3111 bp, Homo sapiens
  misc_feature (2880)..(2880): n is a, c, g, or t
  misc_feature (2944)..(2945): n is a, c, g, or t
  misc_feature (2998)..(2998): n is a, c, g, or t
  misc_feature (3005)..(3005): n is a, c, g, or t
  misc_feature (3043)..(3043): n is a, c, g, or t
  misc_feature (3079)..(3079): n is a, c, g, or t
cggcacgagtcggcacgagctcgtgccgggattatgaagagagtcatcagagagctgtggctgcagaggtatccgtacttgaaaactggaaggagagtgaagtgtataagctacagatcatggagtcacaagcagaagcctttctgaagaagctggggctgattagccgtgatcctgcagcatatcctgacatggagtctgatatacgttcatgggaattgtttctttctaatgttacaaaagaaattgagaaagcaaagtctcagtttgaagaacaaattaaggcaattaaaaatggttctcggctcagtgaactttctaaagtgcagatttctgagctttcatttcctgcctgtaacacggttcatcccgagttactccctgagtcttcaggccacgatggccaagggcttgtgacttctgcaagcgacgtgactggaaaccacgcagcacttcacagggatcctagtgtgttctctgctggtgattccccaggggaggctccttctgcgctgttgccagggccaccccctggtcagcctgaagccactcagctgacagggccaaaacgggctggccaggcagctctgtcagaacgaagccctgtggctgatcggaagcagcctgttcctccaggacgtgctgcgcgttcaagccagtctccaaaaaagccgttcaatagtattattgagcacctgtcagtggtattcccatgttacaacagcactgagcttgctggttttattaaaaaagtgcgaagcaaaaacaagaactcactctcaggattgagtattgatgaaattgtccaaagagtgacagaacacattctagatgaacagaaaaagaaaaagccaaacccaggaaaggacaagaggacttatgagcccagctctgccacccccgtgaccaggtcctcccagggctcaccctcggtggttgttgcaccatcacccaaaaccaaggggcagaaagcagaagatgtccctgtgaggattgcactgggtgcaagttcctgtgaaatatgccacgaggtgttcaaatcaaaaaacgtgcgtgtgctcaaatgtgggcacaagtatcacaaagggtgctttaagcagtggcttaaagggcagagcgcttgcccggcctgccagggtcgtgatctcctgacagaagagtcaccttctggaagaggctggcccagtcagaatcaggagctgccttcctgctcttctaggtagtcacacttcactaaagtgtcatccaccagtgtgttgaatccgaagaatgacaattttctaccactggtgtaaaaaacaaacatttgaagacccttgtgcattgtgtgtcacaaagctaaatacatggaaatcgttaatatcgctgatattaagtaatttccccactctgagtgaatactttgatgattgccaacagtggctaataaaatgacggctaccacactcatgggtcactggggctgcgcagggctctttgaggtgggtggcttcttttggaaagtactatgaacgtctcgaagcagtattctagtgataagaattcttaacatagccaagcgccccacgtttgttccccacgtttgttccccttttctgtttgaaaaacctgttctggtagctccacaagagagatgatactgactttttaaattttttacaagagtctgtattcctgatatgcctatatttttcctcaaagattctgcattttaaggatgggcataagcaaactatattttaataatttatagttaatgttaaaatattggctgatttagaccaaaagattcaaatctcctctttgtgaaatcccatctgcatttgattttttattattttatgttcccccgttagattgttttaagtgtttgcttttcatcttttatagatgtaatctgattttcaaaaatcattaacactttttaattagtatcgactaagactttttccccctggaatcgaggctgtgtgtccgtcatcccagcccccggttggagcctgctctttgaactccgctgccttccttagcagcttctgtcctcttctgtgagtcagtcagcgagtgcttgggatccgcatccagccgtgctgagcacacaacaggctgtgtgtggaaatggccaccaccattctccttccccaccccaccacaaaaagagaagctgtgtctttagacaaccctgaggtatctgtgttacaatcgttctgtgtttgatatttgtgtaaagtatgcatgcagtcttgtactgtgacctaagaacaaaactgtaactgcattagaaaccatgaaaaaattagatattgttttgtgacttttagacagtggtaaatatagaaccatgaattctggtcacattccatttctctccaacatgaaggatcaaaaaatgtttttcaatgtgttctttgttccactggaaacttagagtcatgagtttatgagctgatttggtcaccttcctctgcctttgttcactgtgagttctgatgtcttagtgacttagttcttagaagctcacgccttagtttgaaacagattctccacggtggtccccaaaacactgtctgcatatccataagaattgagcgctatgggtgttaacgtgcatgaggatcagtttgcagcagcaagtacaaaaggagaagaggaacatccgttgaatgagtgtgttttgtacataacttcagatacttgtgaacatgccttatatttgtccaacaactgtcagaataaagaacattctaaaatgagaaaaaaaaaaaaaaaaaaaaaaaaaaaaaaaaaaaaaaccaacgccattgctcagctaacggccacgcttcaacctggtgatgccccggcatactttccagcatagagcgcggaataagcgcaatngcctgctctgcgatcacacaggccaacattccgtgataagactccatctcatggatagttcccnngagcgcaccgtcagcatgaaaccagctctcgaagtgcgacgatccgacaattngcgccgnaggccataaatgtacttgcataacctgactggcacggnttactggcccatatccttgggcgtgaccatcataanttccttccgtattacccgtattccctcgatgg

SEQ ID NO: 371546 - DNA, 3179 bp, Homo sapiens
  misc_feature (2948)..(2948): n is a, c, g, or t
  misc_feature (3012)..(3013): n is a, c, g, or t
  misc_feature (3066)..(3066): n is a, c, g, or t
  misc_feature (3073)..(3073): n is a, c, g, or t
  misc_feature (3111)..(3111): n is a, c, g, or t
  misc_feature (3147)..(3147): n is a, c, g, or t
atcaagttctgatgattctgtcatgcttcatttaaggagaaatgggaaagtggtttgaatgtttaagttttaacctttaaaatagtttcaggctgtcatttgtaaaatactcatatgtcttctgatctactggcaggtatccgtacttgaaaactggaaggagagtgaagtgtataagctacagatcatggagtcacaagcagaagcctttctgaagaagctggggctgattagccgtgatcctgcagcatatcctgacatggagtctgatatacgttcatgggaattgtttctttctaatgttacaaaagaaattgagaaagcaaagtctcagtttgaagaacaaattaaggcaattaaaaatggttctcggctcagtgaactttctaaagtgcagatttctgagctttcatttcctgcctgtaacacggttcatcccgagttactccctgagtcttcaggccacgatggccaagggcttgtgacttctgcaagcgacgtgactggaaaccacgcagcacttcacagggatcctagtgtgttctctgctggtgattccccaggggaggctccttctgcgctgttgccagggccaccccctggtcagcctgaagccactcagctgacagggccaaaacgggctggccaggcagctctgtcagaacgaagccctgtggctgatcggaagcagcctgttcctccaggacgtgctgcgcgttcaagccagtctccaaaaaagccgttcaatagtattattgagcacctgtcagtggtattcccatgttacaacagcactgagcttgctggttttattaaaaaagtgcgaagcaaaaacaagaactcactctcaggattgagtattgatgaaattgtccaaagagtgacagaacacattctagatgaacagaaaaagaaaaagccaaacccaggaaaggacaagaggacttatgagcccagctctgccacccccgtgaccaggtcctcccagggctcaccctcggtggttgttgcaccatcacccaaaaccaaggggcagaaagcagaagatgtccctgtgaggattgcactgggtgcaagttcctgtgaaatatgccacgaggtgttcaaatcaaaaaacgtgcgtgtgctcaaatgtgggcacaagtatcacaaagggtgctttaagcagtggcttaaagggcagagcgcttgcccggcctgccagggtcgtgatctcctgacagaagagtcaccttctggaagaggctggcccagtcagaatcaggagctgccttcctgctcttctaggtagtcacacttcactaaagtgtcatccaccagtgtgttgaatccgaagaatgacaattttctaccactggtgtaaaaaacaaacatttgaagacccttgtgcattgtgtgtcacaaagctaaatacatggaaatcgttaatatcgctgatattaagtaatttccccactctgagtgaatactttgatgattgccaacagtggctaataaaatgacggctaccacactcatgggtcactggggctgcgcagggctctttgaggtgggtggcttcttttggaaagtactatgaacgtctcgaagcagtattctagtgataagaattcttaacatagccaagcgccccacgtttgttccccacgtttgttccccttttctgtttgaaaaacctgttctggtagctccacaagagagatgatactgactttttaaattttttacaagagtctgtattcctgatatgcctatatttttcctcaaagattctgcattttaaggatgggcataagcaaactatattttaataatttatagttaatgttaaaatattggctgatttagaccaaaagattcaaatctcctctttgtgaaatcccatctgcatttgattttttattattttatgttcccccgttagattgttttaagtgtttgcttttcatcttttatagatgtaatctgattttcaaaaatcattaacactttttaattagtatcgactaagactttttccccctggaatcgaggctgtgtgtccgtcatcccagcccccggttggagcctgctctttgaactccgctgccttccttagcagcttctgtcctcttctgtgagtcagtcagcgagtgcttgggatccgcatccagccgtgctgagcacacaacaggctgtgtgtggaaatggccaccaccattctccttccccaccccaccacaaaaagagaagctgtgtctttagacaaccctgaggtatctgtgttacaatcgttctgtgtttgatatttgtgtaaagtatgcatgcagtcttgtactgtgacctaagaacaaaactgtaactgcattagaaaccatgaaaaaattagatattgttttgtgacttttagacagtggtaaatatagaaccatgaattctggtcacattccatttctctccaacatgaaggatcaaaaaatgtttttcaatgtgttctttgttccactggaaacttagagtcatgagtttatgagctgatttggtcaccttcctctgcctttgttcactgtgagttctgatgtcttagtgacttagttcttagaagctcacgccttagtttgaaacagattctccacggtggtccccaaaacactgtctgcatatccataagaattgagcgctatgggtgttaacgtgcatgaggatcagtttgcagcagcaagtacaaaaggagaagaggaacatccgttgaatgagtgtgttttgtacataacttcagatacttgtgaacatgccttatatttgtccaacaactgtcagaataaagaacattctaaaatgagaaaaaaaaaaaaaaaaaaaaaaaaaaaaaaaaaaaaaaccaacgccattgctcagctaacggccacgcttcaacctggtgatgccccggcatactttccagcatagagcgcggaataagcgcaatngcctgctctgcgatcacacaggccaacattccgtgataagactccatctcatggatagttcccnngagcgcaccgtcagcatgaaaccagctctcgaagtgcgacgatccgacaattngcgccgnaggccataaatgtacttgcataacctgactggcacggnttactggcccatatccttgggcgtgaccatcataanttccttccgtattacccgtattccctcgatgg

SEQ ID NO: 371547 - DNA, 2087 bp, Homo sapiens
  misc_feature (1856)..(1856): n is a, c, g, or t
  misc_feature (1920)..(1921): n is a, c, g, or t
  misc_feature (1974)..(1974): n is a, c, g, or t
  misc_feature (1981)..(1981): n is a, c, g, or t
  misc_feature (2019)..(2019): n is a, c, g, or t
  misc_feature (2055)..(2055): n is a, c, g, or t
ccccccccccccccccgcccgaggaagagagcgaaggaggaaagacgggaagaaaaccgccctgtgctttaagcagtggcttaaagggcagagcgcttgcccggcctgccagggtcgtgatctcctgacagaagagtcaccttctggaagaggctggcccagtcagaatcaggagctgccttcctgctcttctaggtagtcacacttcactaaagtgtcatccaccagtgtgttgaatccgaagaatgacaattttctaccactggtgtaaaaaacaaacatttgaagacccttgtgcattgtgtgtcacaaagctaaatacatggaaatcgttaatatcgctgatattaagtaatttccccactctgagtgaatactttgatgattgccaacagtggctaataaaatgacggctaccacactcatgggtcactggggctgcgcagggctctttgaggtgggtggcttcttttggaaagtactatgaacgtctcgaagcagtattctagtgataagaattcttaacatagccaagcgccccacgtttgttccccacgtttgttccccttttctgtttgaaaaacctgttctggtagctccacaagagagatgatactgactttttaaattttttacaagagtctgtattcctgatatgcctatatttttcctcaaagattctgcattttaaggatgggcataagcaaactatattttaataatttatagttaatgttaaaatattggctgatttagaccaaaagattcaaatctcctctttgtgaaatcccatctgcatttgattttttattattttatgttcccccgttagattgttttaagtgtttgcttttcatcttttatagatgtaatctgattttcaaaaatcattaacactttttaattagtatcgactaagactttttccccctggaatcgaggctgtgtgtccgtcatcccagcccccggttggagcctgctctttgaactccgctgccttccttagcagcttctgtcctcttctgtgagtcagtcagcgagtgcttgggatccgcatccagccgtgctgagcacacaacaggctgtgtgtggaaatggccaccaccattctccttccccaccccaccacaaaaagagaagctgtgtctttagacaaccctgaggtatctgtgttacaatcgttctgtgtttgatatttgtgtaaagtatgcatgcagtcttgtactgtgacctaagaacaaaactgtaactgcattagaaaccatgaaaaaattagatattgttttgtgacttttagacagtggtaaatatagaaccatgaattctggtcacattccatttctctccaacatgaaggatcaaaaaatgtttttcaatgtgttctttgttccactggaaacttagagtcatgagtttatgagctgatttggtcaccttcctctgcctttgttcactgtgagttctgatgtcttagtgacttagttcttagaagctcacgccttagtttgaaacagattctccacggtggtccccaaaacactgtctgcatatccataagaattgagcgctatgggtgttaacgtgcatgaggatcagtttgcagcagcaagtacaaaaggagaagaggaacatccgttgaatgagtgtgttttgtacataacttcagatacttgtgaacatgccttatatttgtccaacaactgtcagaataaagaacattctaaaatgagaaaaaaaaaaaaaaaaaaaaaaaaaaaaaaaaaaaaaaccaacgccattgctcagctaacggccacgcttcaacctggtgatgccccggcatactttccagcatagagcgcggaataagcgcaatngcctgctctgcgatcacacaggccaacattccgtgataagactccatctcatggatagttcccnngagcgcaccgtcagcatgaaaccagctctcgaagtgcgacgatccgacaattngcgccgnaggccataaatgtacttgcataacctgactggcacggnttactggcccatatccttgggcgtgaccatcataanttccttccgtattacccgtattccctcgatgg

SEQ ID NO: 371548 - DNA, 6840 bp, Homo sapiens
  misc_feature (6609)..(6609): n is a, c, g, or t
  misc_feature (6673)..(6674): n is a, c, g, or t
  misc_feature (6727)..(6727): n is a, c, g, or t
  misc_feature (6734)..(6734): n is a, c, g, or t
  misc_feature (6772)..(6772): n is a, c, g, or t
  misc_feature (6808)..(6808): n is a, c, g, or t
ctgaactagttgccagtgatcttgaaacgtgacagtaaccaagagataaataggtgacaatgacaggaaaattagatgtagtaaaagagagtgtttgagagcagaagctatggcaactaaagactggatttgaatccttcctagcttggtgacatgagcaaattacttgatttaagtgagcattttcccatctgtacagtggagataacgataattgtgcctgctaagaagaattgctgtgaagattagtgaaataatgcatgtaaaacatttggtacagtatgtgacacatagtacaaatagtttgctaggaagattgttattattcttcacttgtgatattgtgaagttttcatacagcaaattggacatcatgagatggattgattaaataaatagatttgaacttcaaggactggtagtgttcttgctttggaaagaagaaacttggtttatcctaataatagtaggataataatggtgaagtgataggtacaagtaatagtgtttatgatgcgctggtgatgataggaaaagaaagccattatatgggcaagagctagaagtaataaaatggtgcatttttcagtgatgtttggcctatgtagctattctctgataactataaaaatccttattattgaagattcttcaggaaaaaaaaacccttagtctgaaactttagcaccaatcccccttgccccccattgaaatacgtatttttaaaacatggcttttgataatgtgagggttttttcctttttgcgatttagcagtgctgattgtgtattgcagtagttgtgagagcattagaagcagcagtcgataggaggatggaaggtctggatgccgccttggggagttaggagattggcagacttaccctgtaccactctagccctactcctttgcccaagacagaaacacactgagatggataggagaatatgagcagttgataggaaagttctcagtggagtcaggatttaggttaggccaggagattgagaatataacagtttgtgtatgatgaaatggcatatttcacagaatgcagtaaaagcaggtagggtacaagtgcagcaacaggaagatgtcttttcttcattcagcaaacacttatttgagagcttaccatgtgctaggcacatacaaagataaataagatgcccttgatgatcctctatttaaaggagacatgtacaattcacgtgcttctgagataaatttgaagaaactacaacatcttgagttgatggaagatattgtggatttggcaaagaaagttgctaatgattcattccttattggaggcttattgagaattggttgtaaaatagaaaataaaatcttggcaatggaagaagctctgaattggataaaatatgcaggcgatgtaacaattctaactaaattaggatcaattgacaattgttggcctatgttaagtattttctttactgaatacaagtaccacataactaaaattgtaatggaagactgcaatttgcttgaagaacttaaaactcaaagttgtatggattgtatagaggaaggagaactaatgaaaatgaaaggaaatgaagagttttccaaagaaagatttgatatagctattatctattacaccagagccattgaatatagacctgaaaactaccttctttatggtaaccgagctctttgttttcttcgtactggacagtttagaaatgcactcggtgatggaaagagagccactattctgaagaacacttggccaaagggtcattatcgttattgtgatgctctttctatgctgggggaatatgactgggccctgcaagcaaacataaaagctcaaaaactctgtaaaaatgaccctgagggaatcaaggatctaattcagcagcatgtaaagttacaaaaacaaatagaagacctacaaggtcgaacagcaaataaggatccaattaaagccttttatgaaaacagggcctacacacctaggagtttatcagcacctatatttactacttcacttaactttgtggagaaggaaagagatttcagaaaaattaatcacgaaatggccaacggtggtaatcagaatctaaaggtggcggatgaggcgttgaaggtagatgattgtgactgtcatcctgaattttcaccaccatcaagtcagcctccaaaacataaaggaaaacaaaaatctcgaaacaatgaatcagaaaagttcagttctagttcaccattgactttaccagcagatttgaagaacatcttggagaaacagttttctaaatcttccagagctgcacaccaggattttgctaatataatgaaaatgctgagaagcttaattcaagatggctatatggccttattggagcagcgttgccgcagcgctgcacaggcctttacagagttgctgaacggtttagatcctcaaaaaataaagcaattgaacctggccatgattaactatgttttggtcgtctatggacttgccatttctctccttggaataggacagcctgaggaattatctgaagccgaaaaccagtttaagaggattattgaacactaccccagtgagggccttgattgcttggcctactgtggaattggaaaagtgtatttgaaaaaaaacagatttctagaagctctcaatcactttgagaaagcaagaaccttgatttatcgtcttcctggagtgttaacttggcccacgagtaatgtgattattgaagagtctcagccacaaaaaataaagatgctgttagagaaatttgttgaagaatgcaagttccctccagtgccagatgccatttgttgctatcagaagtgccatggatattctaagatccagatatacataactgatccagactttaagggttttatacgcatcagctgttgccagtactgtaaaatagaatttcacatgaattgctggaagaagttaaaaactacaacctttaatgataaaattgacaaggattttctacaaggaatatgtcttacccctgactgtgaaggtgtcatttctaagattatcatcttcagcagtggtggtgaagttaaatgtgaatttgaacacaaggtcataaaagaaaaggttcctccaagacctattctgaaacagaaatgttctagcctagagaaactaagactgaaagaagacaaaaaattgaagagaaagatccaaaaaaaagaagcaaaaaagttagcacaagaaagaatggaggaggacttaagagaaagtaatccacccaaaaatgaagagcagaaagaaactgtagacaatgttcagcgttgtcagttccttgatgacagaattctacagtgtataaagcagtatgctgacaagattaaatccggcatacagaatacagccatgcttctcaaagaattgctttcttggaaagttttgagcacagaagactatacaacctgtttttctagcagaaattttctaaatgaagcagtggactatgttattcgccacttgattcaagaaaataacagagtaaagacaagaatatttctgcatgttttgagtgagcttaaagaagtggagcccaaattagccgcctggatccaaaaacttaatagctttggcttagatgccacaggaactttcttttctcgttatggagcatctcttaaactgcttgattttagtatcatgactttcctctggaatgagaaatatggtcacaaactagactctatagaaggaaagcaacttgattatttctctgagccagcatcattgaaggaagcccgttgtttaatatggctgctagaagaacacagagacaagttcccagcattgcatagtgctttagatgaattctttgatataatggacagccgctgtactgtgttaaggaaacaagatagtggtgaagcaccgtttagttcaaccaaggtgaaaaacaaaagcaagaaaaagaagccaaaggattcaaagcctatgttagttgggtctggaacaacttcagtaacttcaaataatgagatcatcacttcaagtgaagaccatagcaatcgaaattcagattctgcaggcccatttgcagtgcctgaccatcttcggcaagatgtagaagaattcgaagctctctatgaccaacacagtaacgaatatgttgtccgcaataagaagctatgggacatgaacccaaaacaaaaatgttcaactctatatgattacttctctcagtttttggaggaacatggtcccttggacatgagtaacaagatgttctctgcagaatatgagtttttcccagaagaaactcgacagatactagaaaaagcaggaggtttaaaaccttttctcttgggatgccctcgttttgttgtgattgacaactgtattgcactgaagaaggttgcatcacggctcaagaaaaaaaggaagaagaaaaacattaaaacaaaagtagaagaaatttcaaaagcaggggagtatgtacgagttaaactacaactgaatccagctgctagggaatttaaaccagatgtaaagtctaaaccagtgtcagattcatcttcagcaccagcttttgaaaatgtgaaacccaaacctgtgtctgcaaattctcccaagccagcttgtgaagatgtgaaggccaaaccagtatccgacaattcttctagacaagtttctgaggatgggcaacccaaaggggtctcttctaattctcctaaaccaggctctgaggatgcaaattacaagcgagtctcctgtaattcccccaaaccggttcttgaggatgtgaaaccaacttattgggctcaatcccatttggtcacaggatactgtacgtatcttcctttccagagatttgatatcacccagacaccgccagcatacataaacgtgttaccaggtttgccccagtacaccagcatatatacacccttggccagcctttctcctgaatatcagctaccaagatcagtaccagtggtgccgtcttttgtagccaatgacagagcagataaaaatgctgctgcctattttgagggtcatcatttgaatgctgagaatgttgctggtcaccagattgcctctgaaacacagatccttgagggctctttgggaatatctgtaaagtcacactgcagcacaggtgatgctcatacagtcctgagtgagtctaacagaaatgatgagcactgtggaaattctaacaacaaatgtgaagtaattccagaaagcaccagtgcagtaacaaacattccacacgtgcagatggttgccatacaggtatcttggaacataatacaccaagaagtcaatactgagccatataatccttttgaggaacgacaaggggaaatttcacggattgaaaaggagcaccaagtattacaagaccaacttcaagaagtgtatgaaaattatgagcagataaaacttaagggcttagaagagaccagggacctggaagagaagttgaaaaggcacttagaagaaaacaagatctcaaagacggaattagattggttccttcaagatttggaaagagaaattaaaaaatggcaacaggaaaaaaaagaaatccaagaaagactaaaatcactgaagaagaaaattaaaaaggtttcaaatgccagtgaaatgtatacccagaaaaatgatggaaaggaaaaggaacatgaattacatctggatcagtcccttgaaatcagcaacacacttacaaatgagaaaatgaaaatagaagagtatataaagaaagggaaagaggattatgaagagagtcatcagagagctgtggctgcagaggtatccgtacttgaaaactggaaggagagtgaagtgtataagctacagatcatggagtcacaagcagaagcctttctgaagaagctggggctgattagccgtgatcctgcagcatatcctgacatggagtctgatatacgttcatgggaattgtttctttctaatgttacaaaagaaattgagaaagcaaagtctcagtttgaagaacaaattaaggcaattaaaaatggttctcggctcagtgaactttctaaagtgcagatttctgagctttcatttcctgcctgtaacacggttcatcccgagttactccctgagtcttcaggccacgatggccaagggcttgtgacttctgcaagcgacgtgactggaaaccacgcagcacttcacagggatcctagtgtgttctctgctggtgattccccaggggaggctccttctgcgctgttgccagggccaccccctggtcagcctgaagccactcagctgacagggccaaaacgggctggccaggcagctctgtcagaacgaagccctgtggctgatcggaagcagcctgttcctccaggacgtgctgcgcgttcaagccagtctccaaaaaagccgttcaatagtattattgagcacctgtcagtggtattcccatgttacaacagtcactgagctgctggttttattaaaaaagtgcgaagcaaaaaaaaaaaaaaaaaaaaaaaaaaaaaaaaaaaaaaaaccaacgccattgctcagctaacggccacgcttcaacctggtgatgccccggcatactttccagcatagagcgcggaataagcgcaatngcctgctctgcgatcacacaggccaacattccgtgataagactccatctcatggatagttcccnngagcgcaccgtcagcatgaaaccagctctcgaagtgcgacgatccgacaattngcgccgnaggccataaatgtacttgcataacctgactggcacggnttactggcccatatccttgggcgtgaccatcataanttccttccgtattacccgtattccctcgatgg

SEQ ID NO: 371549 - DNA, 6058 bp, Homo sapiens
ctgaactagttgccagtgatcttgaaacgtgacagtaaccaagagataaataggtgacaatgacaggaaaattagatgtagtaaaagagagtgtttgagagcagaagctatggcaactaaagactggatttgaatccttcctagcttggtgacatgagcaaattacttgatttaagtgagcattttcccatctgtacagtggagataacgataattgtgcctgctaagaagaattgctgtgaagattagtgaaataatgcatgtaaaacatttggtacagtatgtgacacatagtacaaatagtttgctaggaagattgttattattcttcacttgtgatattgtgaagttttcatacagcaaattggacatcatgagatggattgattaaataaatagatttgaacttcaaggactggtagtgttcttgctttggaaagaagaaacttggtttatcctaataatagtaggataataatggtgaagtgataggtacaagtaatagtgtttatgatgcgctggtgatgataggaaaagaaagccattatatgggcaagagctagaagtaataaaatggtgcatttttcagtgatgtttggcctatgtagctattctctgataactataaaaatccttattattgaagattcttcaggaaaaaaaaacccttagtctgaaactttagcaccaatcccccttgccccccattgaaatacgtatttttaaaacatggcttttgataatgtgagggttttttcctttttgcgatttagcagtgctgattgtgtattgcagtagttgtgagagcattagaagcagcagtcgataggaggatggaaggtctggatgccgccttggggagttaggagattggcagacttaccctgtaccactctagccctactcctttgcccaagacagaaacacactgagatggataggagaatatgagcagttgataggaaagttctcagtggagtcaggatttaggttaggccaggagattgagaatataacagtttgtgtatgatgaaatggcatatttcacagaatgcagtaaaagcaggtagggtacaagtgcagcaacaggaagatgtcttttcttcattcagcaaacacttatttgagagcttaccatgtgctaggcacatacaaagataaataagatgcccttgatgatcctctatttaaaggagacatgtacaattcacgtgcttctgagataaatttgaagaaactacaacatcttgagttgatggaagatattgtggatttggcaaagaaagttgctaatgattcattccttattggaggcttattgagaattggttgtaaaatagaaaataaaatcttggcaatggaagaagctctgaattggataaaatatgcaggcgatgtaacaattctaactaaattaggatcaattgacaattgttggcctatgttaagtattttctttactgaatacaagtaccacataactaaaattgtaatggaagactgcaatttgcttgaagaacttaaaactcaaagttgtatggattgtatagaggaaggagaactaatgaaaatgaaaggaaatgaagagttttccaaagaaagatttgatatagctattatctattacaccagagccattgaatatagacctgaaaactaccttctttatggtaaccgagctctttgttttcttcgtactggacagtttagaaatgcactcggtgatggaaagagagccactattctgaagaacacttggccaaagggtcattatcgttattgtgatgctctttctatgctgggggaatatgactgggccctgcaagcaaacataaaagctcaaaaactctgtaaaaatgaccctgagggaatcaaggatctaattcagcagcatgtaaagttacaaaaacaaatagaagacctacaaggtcgaacagcaaataaggatccaattaaagccttttatgaaaacagggcctacacacctaggagtttatcagcacctatatttactacttcacttaactttgtggagaaggaaagagatttcagaaaaattaatcacgaaatggccaacggtggtaatcagaatctaaaggtggcggatgaggcgttgaaggtagatgattgtgactgtcatcctgaattttcaccaccatcaagtcagcctccaaaacataaaggaaaacaaaaatctcgaaacaatgaatcagaaaagttcagttctagttcaccattgactttaccagcagatttgaagaacatcttggagaaacagttttctaaatcttccagagctgcacaccaggattttgctaatataatgaaaatgctgagaagcttaattcaagatggctatatggccttattggagcagcgttgccgcagcgctgcacaggcctttacagagttgctgaacggtttagatcctcaaaaaataaagcaattgaacctggccatgattaactatgttttggtcgtctatggacttgccatttctctccttggaataggacagcctgaggaattatctgaagccgaaaaccagtttaagaggattattgaacactaccccagtgagggccttgattgcttggcctactgtggaattggaaaagtgtatttgaaaaaaaacagatttctagaagctctcaatcactttgagaaagcaagaaccttgatttatcgtcttcctggagtgttaacttggcccacgagtaatgtgattattgaagagtctcagccacaaaaaataaagatgctgttagagaaatttgttgaagaatgcaagttccctccagtgccagatgccatttgttgctatcagaagtgccatggatattctaagatccagatatacataactgatccagactttaagggttttatacgcatcagctgttgccagtactgtaaaatagaatttcacatgaattgctggaagaagttaaaaactacaacctttaatgataaaattgacaaggattttctacaaggaatatgtcttacccctgactgtgaaggtgtcatttctaagattatcatcttcagcagtggtggtgaagttaaatgtgaatttgaacacaaggtcataaaagaaaaggttcctccaagacctattctgaaacagaaatgttctagcctagagaaactaagactgaaagaagacaaaaaattgaagagaaagatccaaaaaaaagaagcaaaaaagttagcacaagaaagaatggaggaggacttaagagaaagtaatccacccaaaaatgaagagcagaaagaaactgtagacaatgttcagcgttgtcagttccttgatgacagaattctacagtgtataaagcagtatgctgacaagattaaatccggcatacagaatacagccatgcttctcaaagaattgctttcttggaaagttttgagcacagaagactatacaacctgtttttctagcagaaattttctaaatgaagcagtggactatgttattcgccacttgattcaagaaaataacagagtaaagacaagaatatttctgcatgttttgagtgagcttaaagaagtggagcccaaattagccgcctggatccaaaaacttaatagctttggcttagatgccacaggaactttcttttctcgttatggagcatctcttaaactgcttgattttagtatcatgactttcctctggaatgagaaatatggtcacaaactagactctatagaaggaaagcaacttgattatttctctgagccagcatcattgaaggaagcccgttgtttaatatggctgctagaagaacacagagacaagttcccagcattgcatagtgctttagatgaattctttgatataatggacagccgctgtactgtgttaaggaaacaagatagtggtgaagcaccgtttagttcaaccaaggtgaaaaacaaaagcaagaaaaagaagccaaaggattcaaagcctatgttagttgggtctggaacaacttcagtaacttcaaataatgagatcatcacttcaagtgaagaccatagcaatcgaaattcagattctgcaggcccatttgcagtgcctgaccatcttcggcaagatgtagaagaattcgaagctctctatgaccaacacagtaacgaatatgttgtccgcaataagaagctatgggacatgaacccaaaacaaaaatgttcaactctatatgattacttctctcagtttttggaggaacatggtcccttggacatgagtaacaagatgttctctgcagaatatgagtttttcccagaagaaactcgacagatactagaaaaagcaggaggtttaaaaccttttctcttgggatgccctcgttttgttgtgattgacaactgtattgcactgaagaaggttgcatcacggctcaagaaaaaaaggaagaagaaaaacattaaaacaaaagtagaagaaatttcaaaagcaggggagtatgtacgagttaaactacaactgaatccagctgctagggaatttaaaccagatgtaaagtctaaaccagtgtcagattcatcttcagcaccagcttttgaaaatgtgaaacccaaacctgtgtctgcaaattctcccaagccagcttgtgaagatgtgaaggccaaaccagtatccgacaattcttctagacaagtttctgaggatgggcaacccaaaggggtctcttctaattctcctaaaccaggctctgaggatgcaaattacaagcgagtctcctgtaattcccccaaaccggttcttgaggatgtgaaaccaacttattgggctcaatcccatttggtcacaggatactgtacgtatcttcctttccagagatttgatatcacccagacaccgccagcatacataaacgtgttaccaggtttgccccagtacaccagcatatatacacccttggccagcctttctcctgaatatcagctaccaagatcagtaccagtggtgccgtcttttgtagccaatgacagagcagataaaaatgctgctgcctattttgagggtcatcatttgaatgctgagaatgttgctggtcaccagattgcctctgaaacacagatccttgagggctctttgggaatatctgtaaagtcacactgcagcacaggtgatgctcatacagtcctgagtgagtctaacagaaatgatgagcactgtggaaattctaacaacaaatgtgaagtaattccagaaagcaccagtgcagtaacaaacattccacacgtgcagatggttgccatacaggtatcttggaacataatacaccaagaagtcaatactgagccatataatccttttgaggaacgacaaggggaaatttcacggattgaaaaggagcaccaagtattacaagaccaacttcaagaagtgtatgaaaattatgagcagataaaacttaagggcttagaagagaccagggacctggaagagaagttgaaaaggcacttagaagaaaacaagatctcaaagacggaattagattggttccttcaagatttggaaagagaaattaaaaaatggcaacaggaaaaaaaagaaatccaagaaagactaaaatcactgaagaagaaaattaaaaaggtttcaaatgccagtgaaatgtatacccagaaaaatgatggaaaggaaaaggaacatgaattacatctggatcagtcccttgaaatcagcaacacacttacaaatgagaaaatgaaaatagaagagtatataaagaaagggaaagaggattatgaagagagtcatcagagagctgtggctgcagaggtatccgtacttgaaaactggaaggagagtgaagtgtataagctacagatcatggagtcacaagcagaagcctttctgaagaagctggggctgattagccgtgatcctgcagcatatcctgacatggagtctgatatacgttcatgggaattgtttctttctaatgttacaaaagaaattgagaaagcaaagtctcagtttgaagaacaaattaaggcaattaaaaatggttctcggctcaggtggtgtggggtgccgagctcgaatgta

SEQ ID NO: 371550 - DNA, 3645 bp, Homo sapiens
ctgaactagttgccagtgatcttgaaacgtgacagtaaccaagagataaataggtgacaatgacaggaaaattagatgtagtaaaagagagtgtttgagagcagaagctatggcaactaaagactggatttgaatccttcctagcttggtgacatgagcaaattacttgatttaagtgagcattttcccatctgtacagtggagataacgataattgtgcctgctaagaagaattgctgtgaagattagtgaaataatgcatgtaaaacatttggtacagtatgtgacacatagtacaaatagtttgctaggaagattgttattattcttcacttgtgatattgtgaagttttcatacagcaaattggacatcatgagatggattgattaaataaatagatttgaacttcaaggactggtagtgttcttgctttggaaagaagaaacttggtttatcctaataatagtaggataataatggtgaagtgataggtacaagtaatagtgtttatgatgcgctggtgatgataggaaaagaaagccattatatgggcaagagctagaagtaataaaatggtgcatttttcagtgatgtttggcctatgtagctattctctgataactataaaaatccttattattgaagattcttcaggaaaaaaaaacccttagtctgaaactttagcaccaatcccccttgccccccattgaaatacgtatttttaaaacatggcttttgataatgtgagggttttttcctttttgcgatttagcagtgctgattgtgtattgcagtagttgtgagagcattagaagcagcagtcgataggaggatggaaggtctggatgccgccttggggagttaggagattggcagacttaccctgtaccactctagccctactcctttgcccaagacagaaacacactgagatggataggagaatatgagcagttgataggaaagttctcagtggagtcaggatttaggttaggccaggagattgagaatataacagtttgtgtatgatgaaatggcatatttcacagaatgcagtaaaagcaggtagggtacaagtgcagcaacaggaagatgtcttttcttcattcagcaaacacttatttgagagcttaccatgtgctaggcacatacaaagataaataagatgcccttgatgatcctctatttaaaggagacatgtacaattcacgtgcttctgagataaatttgaagaaactacaacatcttgagttgatggaagatattgtggatttggcaaagaaagttgctaatgattcattccttattggaggcttattgagaattggttgtaaaatagaaaataaaatcttggcaatggaagaagctctgaattggataaaatatgcaggcgatgtaacaattctaactaaattaggatcaattgacaattgttggcctatgttaagtattttctttactgaatacaagtaccacataactaaaattgtaatggaagactgcaatttgcttgaagaacttaaaactcaaagttgtatggattgtatagaggaaggagaactaatgaaaatgaaaggaaatgaagagttttccaaagaaagatttgatatagctattatctattacaccagagccattgaatatagacctgaaaactaccttctttatggtaaccgagctctttgttttcttcgtactggacagtttagaaatgcactcggtgatggaaagagagccactattctgaagaacacttggccaaagggtcattatcgttattgtgatgctctttctatgctgggggaatatgactgggccctgcaagcaaacataaaagctcaaaaactctgtaaaaatgaccctgagggaatcaaggatctaattcagcagcatgtaaagttacaaaaacaaatagaagacctacaaggtcgaacagcaaataaggatccaattaaagccttttatgaaaacagggcctacacacctaggagtttatcagcacctatatttactacttcacttaactttgtggagaaggaaagagatttcagaaaaattaatcacgaaatggccaacggtggtaatcagaatctaaaggtggcggatgaggcgttgaaggtagatgattgtgactgtcatcctgaattttcaccaccatcaagtcagcctccaaaacataaaggaaaacaaaaatctcgaaacaatgaatcagaaaagttcagttctagttcaccattgactttaccagcagatttgaagaacatcttggagaaacagttttctaaatcttccagagctgcacaccaggattttgctaatataatgaaaatgctgagaagcttaattcaagatggctatatggccttattggagcagcgttgccgcagcgctgcacaggcctttacagagttgctgaacggtttagatcctcaaaaaataaagcaattgaacctggccatgattaactatgttttggtcgtctatggacttgccatttctctccttggaataggacagcctgaggaattatctgaagccgaaaaccagtttaagaggattattgaacactaccccagtgagggccttgattgcttggcctactgtggaattggaaaagtgtatttgaaaaaaaacagatttctagaagctctcaatcactttgagaaagcaagaaccttgatttatcgtcttcctggagtgttaacttggcccacgagtaatgtgattattgaagagtctcagccacaaaaaataaagatgctgttagagaaatttgttgaagaatgcaagttccctccagtgccagatgccatttgttgctatcagaagtgccatggatattctaagatccagatatacataactgatccagactttaagggttttatacgcatcagctgttgccagtactgtaaaatagaatttcacatgaattgctggaagaagttaaaaactacaacctttaatgataaaattgacaaggattttctacaaggaatatgtcttacccctgactgtgaaggtgtcatttctaagattatcatcttcagcagtggtggtgaagttaaatgtgaatttgaacacaaggtcataaaagaaaaggttcctccaagacctattctgaaacagaaatgttctagcctagagaaactaagactgaaagaagacaaaaaattgaagagaaagatccaaaaaaaagaagcaaaaaagttagcacaagaaagaatggaggaggacttaagagaaagtaatccacccaaaaatgaagagcagaaagaaactgtagacaatgttcagcgttgtcagttccttgatgacagaattctacagtgtataaagcagtatgctgacaagattaaatccggcatacagaatacagccatgcttctcaaagaattgctttcttggaaagttttgagcacagaagactatacaacctgtttttctagcagaaattttctaaatgaagcagtggactatgttattcgccacttgattcaagaaaataacagagtaaagacaagaatatttctgcatgttttgagtgagcttaaagaagtggagcccaaattagccgcctggatccaaaaacttaatagctttggtatgtccctttatattccagagcaataaactttaatacg

SEQ ID NO: 371551 - DNA, 1835 bp, Homo sapiens
cttcaacgccgccacccgctccctcccgccgtcggctgacgtggagggccggaggtggcggcggcggcggcggcggctgctgctgctgctgctgcccgcgtccgaggctcgcgggcggcgggcccggtgtgcaccatggacaattttgctgagggagatttcactgtggcggattatgccttgttagaagattgccctcacgtggatgattgtgtctttgctgctgaatttatgagcaatgattatgttcgtgtgactcagctttactgtgatggggtgggtgtgcaatataaagattatatccaaagtgagaggaatttggaatttgacatctgcagtatatggtgtagtaaaccaatttctgtcctgcaagattattgcgatgccattaaaataaacatcttctggccacttctgtttcaacatcaaaacagttccgtaatatcacgattgcatccctgtgtggacgccaacaattcacgtgcttctgagataaatttgaagaaactacaacatcttgagttgatggaagatattgtggatttggcaaagaaagttgctaatgattcattccttattggaggcttattgagaattggttgtaaaatagaaaataaaatcttggcaatggaagaagctctgaattggataaaatatgcaggcgatgtaacaattctaactaaattaggatcaattgacaattgttggcctatgttaagtattttctttactgaatacaagtaccacataactaaaattgtaatggaagactgcaatttgcttgaagaacttaaaactcaaagttgtatggattgtatagaggaaggagaactaatgaaaatgaaaggaaatgaagagttttccaaagaaagatttgatatagctattatctattacaccagagccattgaatatagacctgaaaactaccttctttatggtaaccgagctctttgttttcttcgtactggacagtttagaaatgcactcggtgatggaaagagagccactattctgaagaacacttggccaaagggtcattatcgttattgtgatgctctttctatgctgggggaatatgactgggccctgcaagcaaacataaaagctcaaaaactctgtaaaaatgaccctgagggaatcaaggatctaattcagcagcatgtaaagttacaaaaacaaatagaagacctacaaggtcgaacagcaaataaggatccaattaaagccttttatgaaaacagggcctacacacctaggagtttatcagcacctatatttactacttcacttaactttgtggagaaggaaagagatttcagaaaaattaatcacgaaatggccaacggtggtaatcagaatctaaaggtggcggatgaggcgttgaaggtagatgattgtgactgtcatcctgaattttcaccaccatcaagtcagctctaaaacgtaaggcaaccacaaatctcgaaccactgactcacaaacagtgacgtctagttcacccattgagctcaacccagcagatgcgacgacatctggcagacacaggggtcgaaaatctccagagctgccacaggattgctaatataaggaacgcgcgaagctactcagaagctacctggcttctggcagaccgctgccgcagctgcacggcctccgaagtcgcacgtgacacccaaaaccaagagagccgcacgagcgcacctggcgacgccggactcccggacgacacggcatcgacgacaccgagcgccaccgcgcggggcagcgcagcccaccagtccgcacgccggacgcacaacaaccaccggggattgattgcggagcgccccccc

SEQ ID NO: 371552 - DNA, 1453 bp, Homo sapiens
cttcaacgccgccacccgctccctcccgccgtcggctgacgtggagggccggaggtggcggcggcggcggcggcggctgctgctgctgctgctgcccgcgtccgaggctcgcgggcggcgggcccggtgtgcaccatggacaattttgctgagggagatttcactgtggcggattatgccttgttagaagattgccctcacgtggatgattgtgtctttgctgctgaatttatgagcaatgattatgttcgtgtgactcagctttactgtgatggggtgggtgtgcaatataaagattatatccaaagtgagaggaatttggaatttgacatctgcagtatatggtgtagtaaaccaatttctgtcctgcaagattattgcgatgccattaaaataaacatcttctggccacttctgtttcaacatcaaaacagttccgtaatatcacgattgcatccctgtgtggacgccaacaattcacgtgcttctgagataaatttgaagaaactacaacatcttgagttgatggaagatattgtggatttggcaaagaaagttgctaatgattcattccttattggaggcttattgagaattggttgtaaaatagaaaataaaatcttggcaatggaagaagctctgaattggataaaatatgcaggcgatgtaacaattctaactaaattaggatcaattgacaattgttggcctatgttaagtattttctttactgaatacaagtaccacataactaaaattgtaatggaagactgcaatttgcttgaagaacttaaaactcaaagttgtatggattgtatagaggaaggagaactaatgaaaatgaaaggaaatgaagagttttccaaagaaagatttgatatagctattatctattacaccagagccattgaatatagacctgaaaactaccttctttatggtaaccgagctctttgttttcttcgtactggacagtttagaaatgcactcggtgatggaaagagagccactattctgaagaacacttggccaaagggtcattatcgttattgtgatgctctttctatgctgggggaatatgactgggccctgcaagcaaacataaaagctcaaaaactctgtaaaaatgaccctgagggaatcaaggatctaattcagcagcatgtaaagttacaaaaacaaatagaagacctacaaggtatttcacctaagattcttttggttacagtcttaattccctttcaaactttggagggtgggtttcttggattaacagaggaccacaaatcaatcctcagatgatttatccttattttatcatgttatcttggtcatggcacttgagtttttcatttctatctgtgtagagttacatgttatccattaagtaattataaatgatttgtactttttatttgaaacagacagcaaccaaattgttatttattcctct

SEQ ID NO: 371553 - DNA, 435 bp, Homo sapiens
tgtttaactactgaagtgatgtgtcttttcaccccatctgattataaactgagaacaggagttatctcctgtatctctctgtatctatggtagacctaaatcataatgatcactattataattgatctttaataatttaatttattatatatagaaaaatatcatcagtagcttcttttttggcttacccttttgtagttacacccacgtaccacatttctgcttctgttttcttactccaatttatattttaaaaatagttttactctcaggcttgtagatttttatgtacagattttaggaacaaatacttttgtgttcacaggtcagcctccaaaacataaaggaaaacaaaaatctcgaaacaatgaatcagaaaagttcaggtatgttttttctctaaggtatgtttttttccccttaatatactcttcc

SEQ ID NO: 371554 - DNA, 466 bp, Homo sapiens
tgttccagtttatccttatttatttataaaatatgagaattgttaaaaaaaaaaaaaagcttcaaaccaaaacctagagagcaatgtactaaagacagaagatggtcaagttgttggataactggttgcttccctcttgtcccctccccgccacccctgttattttcgcagccaaacccaggaaaggacaagaggacttatgagcccagctctgccacccccgtgaccaggtcctcccagggctcaccctcggtggttgttgcaccatcacccaaaaccaaggggcagaaagcagaagatgtccctgtgaggattgtatgtataactgtatagttttgttttttaatgaaaaacaagaagcaaacaaaatttttaatccatgatttagccccattcatttctagacctaatttatttgatcccaacattagaaactgaatttcaatgtacttgaatgtgtccagtt

SEQ ID NO: 371555 - DNA, 350 bp, Homo sapiens
gcagggatcgcgccactgccctccagcctgggcaacagagtgagacactgtctcaaaaaaaaaaaaaaagttatgctttttagatagttattgttgttatcagtggtcttcagattaattttatgtgcatttgtctttgtttctttgggttgggctgttggattaatattggcatgtaatatttcttagcagtagagaactttctgttgtcattcatcactcactctccctttcagcactgagcttgctggttttattaaaaaagtgcgaagcaaaaacaagaactcactctcaggattgagtattgatgaaattgtccaaagagtgacagaacacattctagatgaaca

SEQ ID NO: 371556 - DNA, 9349 bp, Homo sapiens
  misc_feature (9118)..(9118): n is a, c, g, or t
  misc_feature (9182)..(9183): n is a, c, g, or t
  misc_feature (9236)..(9236): n is a, c, g, or t
  misc_feature (9243)..(9243): n is a, c, g, or t
  misc_feature (9281)..(9281): n is a, c, g, or t
  misc_feature (9317)..(9317): n is a, c, g, or t
ctgaactagttgccagtgatcttgaaacgtgacagtaaccaagagataaataggtgacaatgacaggaaaattagatgtagtaaaagagagtgtttgagagcagaagctatggcaactaaagactggatttgaatccttcctagcttggtgacatgagcaaattacttgatttaagtgagcattttcccatctgtacagtggagataacgataattgtgcctgctaagaagaattgctgtgaagattagtgaaataatgcatgtaaaacatttggtacagtatgtgacacatagtacaaatagtttgctaggaagattgttattattcttcacttgtgatattgtgaagttttcatacagcaaattggacatcatgagatggattgattaaataaatagatttgaacttcaaggactggtagtgttcttgctttggaaagaagaaacttggtttatcctaataatagtaggataataatggtgaagtgataggtacaagtaatagtgtttatgatgcgctggtgatgataggaaaagaaagccattatatgggcaagagctagaagtaataaaatggtgcatttttcagtgatgtttggcctatgtagctattctctgataactataaaaatccttattattgaagattcttcaggaaaaaaaaacccttagtctgaaactttagcaccaatcccccttgccccccattgaaatacgtatttttaaaacatggcttttgataatgtgagggttttttcctttttgcgatttagcagtgctgattgtgtattgcagtagttgtgagagcattagaagcagcagtcgataggaggatggaaggtctggatgccgccttggggagttaggagattggcagacttaccctgtaccactctagccctactcctttgcccaagacagaaacacactgagatggataggagaatatgagcagttgataggaaagttctcagtggagtcaggatttaggttaggccaggagattgagaatataacagtttgtgtatgatgaaatggcatatttcacagaatgcagtaaaagcaggtagggtacaagtgcagcaacaggaagatgtcttttcttcattcagcaaacacttatttgagagcttaccatgtgctaggcacatacaaagataaataagatgcccttgatgatcctctatttaaaggagacatgtaaacaggttaacttagagtagagatggtgaatatgtgaacctgaggaaaggaagaaatagattaaattatctggagagagaggaaaagtcagcagaatggggacgagaatctttcggagctcagtgttctgataggagttatttccttgggcataggttccaagtatttttctaatataccatagaagccaggaaaactttcttctgttatctcaaatgatttaattactgacttgagtttgtgttgtctccttagacttgtgcaccatggacaattttgctgagggagatttcactgtggcggattatgccttgttagaagattgccctcacgtggatgattgtgtctttgctgctgaatttatgagcaatgattatgttcgtgtgactcagctttactgtgatggggtgggtgtgcaatataaagattatatccaaagtgagaggaatttggaatttgacatctgcagtatatggtgtagtaaaccaatttctgtcctgcaagattattgcgatgccattaaaataaacatcttctggccacttctgtttcaacatcaaaacagttccgtaatatcacgattgcatccctgtgtggacgccaacaattcacgtgcttctgagataaatttgaagaaactacaacatcttgagttgatggaagatattgtggatttggcaaagaaagttgctaatgattcattccttattggaggcttattgagaattggttgtaaaatagaaaataaaatcttggcaatggaagaagctctgaattggataaaatatgcaggcgatgtaacaattctaactaaattaggatcaattgacaattgttggcctatgttaagtattttctttactgaatgaaggagaactaatgaaaatgaaaggaaatgaagagttttccaaagaaagatttgatatagctattatctattacaccagagccattgaatatagacctgaaaactaccttctttatggtaaccgagctctttgttttcttcgtactggacagtttagaaatgcactcggtgatggaaagagagccactattctgaagaacacttggccaaagggtcattatcgttattgtgatgctctttctatgctgggggaatatgactgggccctgcaagcaaacataaaagctcaaaaactctgtaaaaatgaccctgagggaatcaaggatctaattcagcagcatgtaaagttacaaaaacaaatagaagacctacaaggtcgaacagcaaataaggatccaattaaagccttttatgaaaacagggcctacacacctaggagtttatcagcacctatatttactacttcacttaactttgtggagaaggaaagagatttcagaaaaattaatcacgaaatggccaacggtggtaatcagaatctaaaggtggcggatgaggcgttgaaggtagatgattgtgactgtcatcctgaattttcaccaccatcaagtcagcctccaaaacataaaggaaaacaaaaatctcgaaacaatgaatcagaaaagttcagttctagttcaccattgactttaccagcagatttgaagaacatcttggagaaacagttttctaaatcttccagagctgcacaccaggattttgctaatataatgaaaatgctgagaagcttaattcaagatggctatatggccttattggagcagcgttgccgcagcgctgcacaggcctttacagagttgctgaacggtttagatcctcaaaaaataaagcaattgaacctggccatgattaactatgttttggtcgtctatggacttgccatttctctccttggaataggacagcctgaggaattatctgaagccgaaaaccagtttaagaggattattgaacactaccccagtgagggccttgattgcttggcctactgtggaattggaaaagtgtatttgaaaaaaaacagatttctagaagctctcaatcactttgagaaagcaagaaccttgatttatcgtcttcctggagtgttaacttggcccacgagtaatgtgattattgaagagtctcagccacaaaaaataaagatgctgttagagaaatttgttgaagaatgcaagttccctccagtgccagatgccatttgttgctatcagaagtgccatggatattctaagatccagatatacataactgatccagactttaagggttttatacgcatcagctgttgccagtactgtaaaatagaatttcacatgaattgctggaagaagttaaaaactacaacctttaatgataaaattgacaaggattttctacaaggaatatgtcttacccctgactgtgaaggtgtcatttctaagattatcatcttcagcagtggtggtgaagttaaatgtgaatttgaacacaaggtcataaaagaaaaggttcctccaagacctattctgaaacagaaatgttctagcctagagaaactaagactgaaagaagacaaaaaattgaagagaaagatccaaaaaaaagaagcaaaaaagttagcacaagaaagaatggaggaggacttaagagaaagtaatccacccaaaaatgaagagcagaaagaaactgtagacaatgttcagcgttgtcagttccttgatgacagaattctacagtgtataaagcagtatgctgacaagattaaatccggcatacagaatacagccatgcttctcaaagaattgctttcttggaaagttttgagcacagaagactatacaacctgtttttctagcagaaattttctaaatgaagcagtggactatgttattcgccacttgattcaagaaaataacagagtaaagacaagaatatttctgcatgttttgagtgagcttaaagaagtggagcccaaattagccgcctggatccaaaaacttaatagctttggcttagatgccacaggaactttcttttctcgttatggagcatctcttaaactgcttgattttagtatcatgactttcctctggaatgagaaatatggtcacaaactagactctatagaaggaaagcaacttgattatttctctgagccagcatcattgaaggaagcccgttgtttaatatggctgctagaagaacacagagacaagttcccagcattgcatagtgctttagatgaattctttgatataatggacagccgctgtactgtgttaaggaaacaagatagtggtgaagcaccgtttagttcaaccaaggtgaaaaacaaaagcaagaaaaagaagccaaaggattcaaagcctatgttagttgggtctggaacaacttcagtaacttcaaataatgagatcatcacttcaagtgaagaccatagcaatcgaaattcagattctgcaggcccatttgcagtgcctgaccatcttcggcaagatgtagaagaattcgaagctctctatgaccaacacagtaacgaatatgttgtccgcaataagaagctatgggacatgaacccaaaacaaaaatgttcaactctatatgattacttctctcagtttttggaggaacatggtcccttggacatgagtaacaagatgttctctgcagaatatgagtttttcccagaagaaactcgacagatactagaaaaagcaggaggtttaaaaccttttctcttgggatgccctcgttttgttgtgattgacaactgtattgcactgaagaaggttgcatcacggctcaagaaaaaaaggaagaagaaaaacattaaaacaaaagtagaagaaatttcaaaagcaggggagtatgtacgagttaaactacaactgaatccagctgctagggaatttaaaccagatgtaaagtctaaaccagtgtcagattcatcttcagcaccagcttttgaaaatgtgaaacccaaacctgtgtctgcaaattctcccaagccagcttgtgaagatgtgaaggccaaaccagtatccgacaattcttctagacaagtttctgaggatgggcaacccaaaggggtctcttctaattctcctaaaccaggctctgaggatgcaaattacaagcgagtctcctgtaattcccccaaaccggttcttgaggatgtgaaaccaacttattgggctcaatcccatttggtcacaggatactgtacgtatcttcctttccagagatttgatatcacccagacaccgccagcatacataaacgtgttaccaggtttgccccagtacaccagcatatatacacccttggccagcctttctcctgaatatcagctaccaagatcagtaccagtggtgccgtcttttgtagccaatgacagagcagataaaaatgctgctgcctattttgagggtcatcatttgaatgctgagaatgttgctggtcaccagattgcctctgaaacacagatccttgagggctctttgggaatatctgtaaagtcacactgcagcacaggtgatgctcatacagtcctgagtgagtctaacagaaatgatgagcactgtggaaattctaacaacaaatgtgaagtaattccagaaagcaccagtgcagtaacaaacattccacacgtgcagatggttgccatacaggtatcttggaacataatacaccaagaagtcaatactgagccatataatccttttgaggaacgacaaggggaaatttcacggattgaaaaggagcaccaagtattacaagaccaacttcaagaagtgtatgaaaattatgagcagataaaacttaagggcttagaagagaccagggacctggaagagaagttgaaaaggcacttagaagaaaacaagatctcaaagacggaattagattggttccttcaagatttggaaagagaaattaaaaaatggcaacaggaaaaaaaagaaatccaagaaagactaaaatcactgaagaagaaaattaaaaaggtttcaaatgccagtgaaatgtatacccagaaaaatgatggaaaggaaaaggaacatgaattacatctggatcagtcccttgaaatcagcaacacacttacaaatgagaaaatgaaaatagaagagtatataaagaaagggaaagaggattatgaagagagtcatcagagagctgtggctgcagaggtatccgtacttgaaaactggaaggagagtgaagtgtataagctacagatcatggagtcacaagcagaagcctttctgaagaagctggggctgattagccgtgatcctgcagcatatcctgacatggagtctgatatacgttcatgggaattgtttctttctaatgttacaaaagaaattgagaaagcaaagtctcagtttgaagaacaaattaaggcaattaaaaatggttctcggctcagtgaactttctaaagtgcagatttctgagctttcatttcctgcctgtaacacggttcatcccgagttactccctgagtcttcaggccacgatggccaagggcttgtgacttctgcaagcgacgtgactggaaaccacgcagcacttcacagggatcctagtgtgttctctgctggtgattccccaggggaggctccttctgcgctgttgccagggccaccccctggtcagcctgaagccactcagctgacagggccaaaacgggctggccaggcagctctgtcagaacgaagccctgtggctgatcggaagcagcctgttcctccaggacgtgctgcgcgttcaagccagtctccaaaaaagccgttcaatagtattattgagcacctgtcagtggtattcccatgttacaacagcactgagcttgctggttttattaaaaaagtgcgaagcaaaaacaagaactcactctcaggattgagtattgatgaaattgtccaaagagtgacagaacacattctagatgaacagaaaaagaaaaagccaaacccaggaaaggacaagaggacttatgagcccagctctgccacccccgtgaccaggtcctcccagggctcaccctcggtggttgttgcaccatcacccaaaaccaaggggcagaaagcagaagatgtccctgtgaggattgcactgggtgcaagttcctgtgaaatatgccacgaggtgttcaaatcaaaaaacgtgcgtgtgctcaaatgtgggcacaagtatcacaaagggtgctttaagcagtggcttaaagggcagagcgcttgcccggcctgccagggtcgtgatctcctgacagaagagtcaccttctggaagaggctggcccagtcagaatcaggagctgccttcctgctcttctaggtagtcacacttcactaaagtgtcatccaccagtgtgttgaatccgaagaatgacaattttctaccactggtgtaaaaaacaaacatttgaagacccttgtgcattgtgtgtcacaaagctaaatacatggaaatcgttaatatcgctgatattaagtaatttccccactctgagtgaatactttgatgattgccaacagtggctaataaaatgacggctaccacactcatgggtcactggggctgcgcagggctctttgaggtgggtggcttcttttggaaagtactatgaacgtctcgaagcagtattctagtgataagaattcttaacatagccaagcgccccacgtttgttccccacgtttgttccccttttctgtttgaaaaacctgttctggtagctccacaagagagatgatactgactttttaaattttttacaagagtctgtattcctgatatgcctatatttttcctcaaagattctgcattttaaggatgggcataagcaaactatattttaataatttatagttaatgttaaaatattggctgatttagaccaaaagattcaaatctcctctttgtgaaatcccatctgcatttgattttttattattttatgttcccccgttagattgttttaagtgtttgcttttcatcttttatagatgtaatctgattttcaaaaatcattaacactttttaattagtatcgactaagactttttccccctggaatcgaggctgtgtgtccgtcatcccagcccccggttggagcctgctctttgaactccgctgccttccttagcagcttctgtcctcttctgtgagtcagtcagcgagtgcttgggatccgcatccagccgtgctgagcacacaacaggctgtgtgtggaaatggccaccaccattctccttccccaccccaccacaaaaagagaagctgtgtctttagacaaccctgaggtatctgtgttacaatcgttctgtgtttgatatttgtgtaaagtatgcatgcagtcttgtactgtgacctaagaacaaaactgtaactgcattagaaaccatgaaaaaattagatattgttttgtgacttttagacagtggtaaatatagaaccatgaattctggtcacattccatttctctccaacatgaaggatcaaaaaatgtttttcaatgtgttctttgttccactggaaacttagagtcatgagtttatgagctgatttggtcaccttcctctgcctttgttcactgtgagttctgatgtcttagtgacttagttcttagaagctcacgccttagtttgaaacagattctccacggtggtccccaaaacactgtctgcatatccataagaattgagcgctatgggtgttaacgtgcatgaggatcagtttgcagcagcaagtacaaaaggagaagaggaacatccgttgaatgagtgtgttttgtacataacttcagatacttgtgaacatgccttatatttgtccaacaactgtcagaataaagaacattctaaaatgagaaaaaaaaaaaaaaaaaaaaaaaaaaaaaaaaaaaaaaccaacgccattgctcagctaacggccacgcttcaacctggtgatgccccggcatactttccagcatagagcgcggaataagcgcaatngcctgctctgcgatcacacaggccaacattccgtgataagactccatctcatggatagttcccnngagcgcaccgtcagcatgaaaccagctctcgaagtgcgacgatccgacaattngcgccgnaggccataaatgtacttgcataacctgactggcacggnttactggcccatatccttgggcgtgaccatcataanttccttccgtattacccgtattccctcgatgg

SEQ ID NO: 371557 - DNA, 9435 bp, Homo sapiens
  misc_feature (9204)..(9204): n is a, c, g, or t
  misc_feature (9268)..(9269): n is a, c, g, or t
  misc_feature (9322)..(9322): n is a, c, g, or t
  misc_feature (9329)..(9329): n is a, c, g, or t
  misc_feature (9367)..(9367): n is a, c, g, or t
  misc_feature (9403)..(9403): n is a, c, g, or t
ctgaactagttgccagtgatcttgaaacgtgacagtaaccaagagataaataggtgacaatgacaggaaaattagatgtagtaaaagagagtgtttgagagcagaagctatggcaactaaagactggatttgaatccttcctagcttggtgacatgagcaaattacttgatttaagtgagcattttcccatctgtacagtggagataacgataattgtgcctgctaagaagaattgctgtgaagattagtgaaataatgcatgtaaaacatttggtacagtatgtgacacatagtacaaatagtttgctaggaagattgttattattcttcacttgtgatattgtgaagttttcatacagcaaattggacatcatgagatggattgattaaataaatagatttgaacttcaaggactggtagtgttcttgctttggaaagaagaaacttggtttatcctaataatagtaggataataatggtgaagtgataggtacaagtaatagtgtttatgatgcgctggtgatgataggaaaagaaagccattatatgggcaagagctagaagtaataaaatggtgcatttttcagtgatgtttggcctatgtagctattctctgataactataaaaatccttattattgaagattcttcaggaaaaaaaaacccttagtctgaaactttagcaccaatcccccttgccccccattgaaatacgtatttttaaaacatggcttttgataatgtgagggttttttcctttttgcgatttagcagtgctgattgtgtattgcagtagttgtgagagcattagaagcagcagtcgataggaggatggaaggtctggatgccgccttggggagttaggagattggcagacttaccctgtaccactctagccctactcctttgcccaagacagaaacacactgagatggataggagaatatgagcagttgataggaaagttctcagtggagtcaggatttaggttaggccaggagattgagaatataacagtttgtgtatgatgaaatggcatatttcacagaatgcagtaaaagcaggtagggtacaagtgcagcaacaggaagatgtcttttcttcattcagcaaacacttatttgagagcttaccatgtgctaggcacatacaaagataaataagatgcccttgatgatcctctatttaaaggagacatgtaaacaggttaacttagagtagagatggtgaatatgtgaacctgaggaaaggaagaaatagattaaattatctggagagagaggaaaagtcagcagaatggggacgagaatctttcggagctcagtgttctgataggagttatttccttgggcataggttccaagtatttttctaatataccatagaagccaggaaaactttcttctgttatctcaaatgatttaattactgacttgagtttgtgttgtctccttagacttgtgcaccatggacaattttgctgagggagatttcactgtggcggattatgccttgttagaagattgccctcacgtggatgattgtgtctttgctgctgaatttatgagcaatgattatgttcgtgtgactcagctttactgtgatggggtgggtgtgcaatataaagattatatccaaagtgagaggaatttggaatttgacatctgcagtatatggtgtagtaaaccaatttctgtcctgcaagattattgcgatgccattaaaataaacatcttctggccacttctgtttcaacatcaaaacagttccgtaatatcacgattgcatccctgtgtggacgccaacaattcacgtgcttctgagataaatttgaagaaactacaacatcttgagttgatggaagatattgtggatttggcaaagaaagttgctaatgattcattccttattggaggcttattgagaattggttgtaaaatagaaaataaaatcttggcaatggaagaagctctgaattggataaaatatgcaggcgatgtaacaattctaactaaattaggatcaattgacaattgttggcctatgttaagtattttctttactgaatacaagtaccacataactaaaattgtaatggaagactgcaatttgcttgaagaacttaaaactcaaagttgtatggattgtatagaggaaggagaactaatgaaaatgaaaggaaatgaagagttttccaaagaaagatttgatatagctattatctattacaccagagccattgaatatagacctgaaaactaccttctttatggtaaccgagctctttgttttcttcgtactggacagtttagaaatgcactcggtgatggaaagagagccactattctgaagaacacttggccaaagggtcattatcgttattgtgatgctctttctatgctgggggaatatgactgggccctgcaagcaaacataaaagctcaaaaactctgtaaaaatgaccctgagggaatcaaggatctaattcagcagcatgtaaagttacaaaaacaaatagaagacctacaaggtcgaacagcaaataaggatccaattaaagccttttatgaaaacagggcctacacacctaggagtttatcagcacctatatttactacttcacttaactttgtggagaaggaaagagatttcagaaaaattaatcacgaaatggccaacggtggtaatcagaatctaaaggtggcggatgaggcgttgaaggtagatgattgtgactgtcatcctgaattttcaccaccatcaagtcagcctccaaaacataaaggaaaacaaaaatctcgaaacaatgaatcagaaaagttcagttctagttcaccattgactttaccagcagatttgaagaacatcttggagaaacagttttctaaatcttccagagctgcacaccaggattttgctaatataatgaaaatgctgagaagcttaattcaagatggctatatggccttattggagcagcgttgccgcagcgctgcacaggcctttacagagttgctgaacggtttagatcctcaaaaaataaagcaattgaacctggccatgattaactatgttttggtcgtctatggacttgccatttctctccttggaataggacagcctgaggaattatctgaagccgaaaaccagtttaagaggattattgaacactaccccagtgagggccttgattgcttggcctactgtggaattggaaaagtgtatttgaaaaaaaacagatttctagaagctctcaatcactttgagaaagcaagaaccttgatttatcgtcttcctggagtgttaacttggcccacgagtaatgtgattattgaagagtctcagccacaaaaaataaagatgctgttagagaaatttgttgaagaatgcaagttccctccagtgccagatgccatttgttgctatcagaagtgccatggatattctaagatccagatatacataactgatccagactttaagggttttatacgcatcagctgttgccagtactgtaaaatagaatttcacatgaattgctggaagaagttaaaaactacaacctttaatgataaaattgacaaggattttctacaaggaatatgtcttacccctgactgtgaaggtgtcatttctaagattatcatcttcagcagtggtggtgaagttaaatgtgaatttgaacacaaggtcataaaagaaaaggttcctccaagacctattctgaaacagaaatgttctagcctagagaaactaagactgaaagaagacaaaaaattgaagagaaagatccaaaaaaaagaagcaaaaaagttagcacaagaaagaatggaggaggacttaagagaaagtaatccacccaaaaatgaagagcagaaagaaactgtagacaatgttcagcgttgtcagttccttgatgacagaattctacagtgtataaagcagtatgctgacaagattaaatccggcatacagaatacagccatgcttctcaaagaattgctttcttggaaagttttgagcacagaagactatacaacctgtttttctagcagaaattttctaaatgaagcagtggactatgttattcgccacttgattcaagaaaataacagagtaaagacaagaatatttctgcatgttttgagtgagcttaaagaagtggagcccaaattagccgcctggatccaaaaacttaatagctttggcttagatgccacaggaactttcttttctcgttatggagcatctcttaaactgcttgattttagtatcatgactttcctctggaatgagaaatatggtcacaaactagactctatagaaggaaagcaacttgattatttctctgagccagcatcattgaaggaagcccgttgtttaatatggctgctagaagaacacagagacaagttcccagcattgcatagtgctttagatgaattctttgatataatggacagccgctgtactgtgttaaggaaacaagatagtggtgaagcaccgtttagttcaaccaaggtgaaaaacaaaagcaagaaaaagaagccaaaggattcaaagcctatgttagttgggtctggaacaacttcagtaacttcaaataatgagatcatcacttcaagtgaagaccatagcaatcgaaattcagattctgcaggcccatttgcagtgcctgaccatcttcggcaagatgtagaagaattcgaagctctctatgaccaacacagtaacgaatatgttgtccgcaataagaagctatgggacatgaacccaaaacaaaaatgttcaactctatatgattacttctctcagtttttggaggaacatggtcccttggacatgagtaacaagatgttctctgcagaatatgagtttttcccagaagaaactcgacagatactagaaaaagcaggaggtttaaaaccttttctcttgggatgccctcgttttgttgtgattgacaactgtattgcactgaagaaggttgcatcacggctcaagaaaaaaaggaagaagaaaaacattaaaacaaaagtagaagaaatttcaaaagcaggggagtatgtacgagttaaactacaactgaatccagctgctagggaatttaaaccagatgtaaagtctaaaccagtgtcagattcatcttcagcaccagcttttgaaaatgtgaaacccaaacctgtgtctgcaaattctcccaagccagcttgtgaagatgtgaaggccaaaccagtatccgacaattcttctagacaagtttctgaggatgggcaacccaaaggggtctcttctaattctcctaaaccaggctctgaggatgcaaattacaagcgagtctcctgtaattcccccaaaccggttcttgaggatgtgaaaccaacttattgggctcaatcccatttggtcacaggatactgtacgtatcttcctttccagagatttgatatcacccagacaccgccagcatacataaacgtgttaccaggtttgccccagtacaccagcatatatacacccttggccagcctttctcctgaatatcagctaccaagatcagtaccagtggtgccgtcttttgtagccaatgacagagcagataaaaatgctgctgcctattttgagggtcatcatttgaatgctgagaatgttgctggtcaccagattgcctctgaaacacagatccttgagggctctttgggaatatctgtaaagtcacactgcagcacaggtgatgctcatacagtcctgagtgagtctaacagaaatgatgagcactgtggaaattctaacaacaaatgtgaagtaattccagaaagcaccagtgcagtaacaaacattccacacgtgcagatggttgccatacaggtatcttggaacataatacaccaagaagtcaatactgagccatataatccttttgaggaacgacaaggggaaatttcacggattgaaaaggagcaccaagtattacaagaccaacttcaagaagtgtatgaaaattatgagcagataaaacttaagggcttagaagagaccagggacctggaagagaagttgaaaaggcacttagaagaaaacaagatctcaaagacggaattagattggttccttcaagatttggaaagagaaattaaaaaatggcaacaggaaaaaaaagaaatccaagaaagactaaaatcactgaagaagaaaattaaaaaggtttcaaatgccagtgaaatgtatacccagaaaaatgatggaaaggaaaaggaacatgaattacatctggatcagtcccttgaaatcagcaacacacttacaaatgagaaaatgaaaatagaagagtatataaagaaagggaaagaggattatgaagagagtcatcagagagctgtggctgcagaggtatccgtacttgaaaactggaaggagagtgaagtgtataagctacagatcatggagtcacaagcagaagcctttctgaagaagctggggctgattagccgtgatcctgcagcatatcctgacatggagtctgatatacgttcatgggaattgtttctttctaatgttacaaaagaaattgagaaagcaaagtctcagtttgaagaacaaattaaggcaattaaaaatggttctcggctcagtgaactttctaaagtgcagatttctgagctttcatttcctgcctgtaacacggttcatcccgagttactccctgagtcttcaggccacgatggccaagggcttgtgacttctgcaagcgacgtgactggaaaccacgcagcacttcacagggatcctagtgtgttctctgctggtgattccccaggggaggctccttctgcgctgttgccagggccaccccctggtcagcctgaagccactcagctgacagggccaaaacgggctggccaggcagctctgtcagaacgaagccctgtggctgatcggaagcagcctgttcctccaggacgtgctgcgcgttcaagccagtctccaaaaaagccgttcaatagtattattgagcacctgtcagtggtattcccatgttacaacagcactgagcttgctggttttattaaaaaagtgcgaagcaaaaacaagaactcactctcaggattgagtattgatgaaattgtccaaagagtgacagaacacattctagatgaacagaaaaagaaaaagccaaacccaggaaaggacaagaggacttatgagcccagctctgccacccccgtgaccaggtcctcccagggctcaccctcggtggttgttgcaccatcacccaaaaccaaggggcagaaagcagaagatgtccctgtgaggattgcactgggtgcaagttcctgtgaaatatgccacgaggtgttcaaatcaaaaaacgtgcgtgtgctcaaatgtgggcacaagtatcacaaagggtgctttaagcagtggcttaaagggcagagcgcttgcccggcctgccagggtcgtgatctcctgacagaagagtcaccttctggaagaggctggcccagtcagaatcaggagctgccttcctgctcttctaggtagtcacacttcactaaagtgtcatccaccagtgtgttgaatccgaagaatgacaattttctaccactggtgtaaaaaacaaacatttgaagacccttgtgcattgtgtgtcacaaagctaaatacatggaaatcgttaatatcgctgatattaagtaatttccccactctgagtgaatactttgatgattgccaacagtggctaataaaatgacggctaccacactcatgggtcactggggctgcgcagggctctttgaggtgggtggcttcttttggaaagtactatgaacgtctcgaagcagtattctagtgataagaattcttaacatagccaagcgccccacgtttgttccccacgtttgttccccttttctgtttgaaaaacctgttctggtagctccacaagagagatgatactgactttttaaattttttacaagagtctgtattcctgatatgcctatatttttcctcaaagattctgcattttaaggatgggcataagcaaactatattttaataatttatagttaatgttaaaatattggctgatttagaccaaaagattcaaatctcctctttgtgaaatcccatctgcatttgattttttattattttatgttcccccgttagattgttttaagtgtttgcttttcatcttttatagatgtaatctgattttcaaaaatcattaacactttttaattagtatcgactaagactttttccccctggaatcgaggctgtgtgtccgtcatcccagcccccggttggagcctgctctttgaactccgctgccttccttagcagcttctgtcctcttctgtgagtcagtcagcgagtgcttgggatccgcatccagccgtgctgagcacacaacaggctgtgtgtggaaatggccaccaccattctccttccccaccccaccacaaaaagagaagctgtgtctttagacaaccctgaggtatctgtgttacaatcgttctgtgtttgatatttgtgtaaagtatgcatgcagtcttgtactgtgacctaagaacaaaactgtaactgcattagaaaccatgaaaaaattagatattgttttgtgacttttagacagtggtaaatatagaaccatgaattctggtcacattccatttctctccaacatgaaggatcaaaaaatgtttttcaatgtgttctttgttccactggaaacttagagtcatgagtttatgagctgatttggtcaccttcctctgcctttgttcactgtgagttctgatgtcttagtgacttagttcttagaagctcacgccttagtttgaaacagattctccacggtggtccccaaaacactgtctgcatatccataagaattgagcgctatgggtgttaacgtgcatgaggatcagtttgcagcagcaagtacaaaaggagaagaggaacatccgttgaatgagtgtgttttgtacataacttcagatacttgtgaacatgccttatatttgtccaacaactgtcagaataaagaacattctaaaatgagaaaaaaaaaaaaaaaaaaaaaaaaaaaaaaaaaaaaaaccaacgccattgctcagctaacggccacgcttcaacctggtgatgccccggcatactttccagcatagagcgcggaataagcgcaatngcctgctctgcgatcacacaggccaacattccgtgataagactccatctcatggatagttcccnngagcgcaccgtcagcatgaaaccagctctcgaagtgcgacgatccgacaattngcgccgnaggccataaatgtacttgcataacctgactggcacggnttactggcccatatccttgggcgtgaccatcataanttccttccgtattacccgtattccctcgatgg

SEQ ID NO: 371558 - DNA, 9046 bp, Homo sapiens
ctgaactagttgccagtgatcttgaaacgtgacagtaaccaagagataaataggtgacaatgacaggaaaattagatgtagtaaaagagagtgtttgagagcagaagctatggcaactaaagactggatttgaatccttcctagcttggtgacatgagcaaattacttgatttaagtgagcattttcccatctgtacagtggagataacgataattgtgcctgctaagaagaattgctgtgaagattagtgaaataatgcatgtaaaacatttggtacagtatgtgacacatagtacaaatagtttgctaggaagattgttattattcttcacttgtgatattgtgaagttttcatacagcaaattggacatcatgagatggattgattaaataaatagatttgaacttcaaggactggtagtgttcttgctttggaaagaagaaacttggtttatcctaataatagtaggataataatggtgaagtgataggtacaagtaatagtgtttatgatgcgctggtgatgataggaaaagaaagccattatatgggcaagagctagaagtaataaaatggtgcatttttcagtgatgtttggcctatgtagctattctctgataactataaaaatccttattattgaagattcttcaggaaaaaaaaacccttagtctgaaactttagcaccaatcccccttgccccccattgaaatacgtatttttaaaacatggcttttgataatgtgagggttttttcctttttgcgatttagcagtgctgattgtgtattgcagtagttgtgagagcattagaagcagcagtcgataggaggatggaaggtctggatgccgccttggggagttaggagattggcagacttaccctgtaccactctagccctactcctttgcccaagacagaaacacactgagatggataggagaatatgagcagttgataggaaagttctcagtggagtcaggatttaggttaggccaggagattgagaatataacagtttgtgtatgatgaaatggcatatttcacagaatgcagtaaaagcaggtagggtacaagtgcagcaacaggaagatgtcttttcttcattcagcaaacacttatttgagagcttaccatgtgctaggcacatacaaagataaataagatgcccttgatgatcctctatttaaaggagacatgtaaacaggttaacttagagtagagatggtgaatatgtgaacctgaggaaaggaagaaatagattaaattatctggagagagaggaaaagtcagcagaatggggacgagaatctttcggagctcagtgttctgataggagttatttccttgggcataggttccaagtatttttctaatataccatagaagccaggaaaactttcttctgttatctcaaatgatttaattactgacttgagtttgtgttgtctccttagacttgtgcaccatggacaattttgctgagggagatttcactgtggcggattatgccttgttagaagattgccctcacgtggatgattgtgtctttgctgctgaatttatgagcaatgattatgttcgtgtgactcagctttactgtgatggggtgggtgtgcaatataaagattatatccaaagtgagaggaatttggaatttgacatctgcagtatatggtgtagtaaaccaatttctgtcctgcaagattattgcgatgccattaaaataaacatcttctggccacttctgtttcaacatcaaaacagttccgtaatatcacgattgcatccctgtgtggacgccaacaattcacgtgcttctgagataaatttgaagaaactacaacatcttgagttgatggaagatattgtggatttggcaaagaaagttgctaatgattcattccttattggaggcttattgagaattggttgtaaaatagaaaataaaatcttggcaatggaagaagctctgaattggataaaatatgcaggcgatgtaacaattctaactaaattaggatcaattgacaattgttggcctatgttaagtattttctttactgaatgaaggagaactaatgaaaatgaaaggaaatgaagagttttccaaagaaagatttgatatagctattatctattacaccagagccattgaatatagacctgaaaactaccttctttatggtaaccgagctctttgttttcttcgtactggacagtttagaaatgcactcggtgatggaaagagagccactattctgaagaacacttggccaaagggtcattatcgttattgtgatgctctttctatgctgggggaatatgactgggccctgcaagcaaacataaaagctcaaaaactctgtaaaaatgaccctgagggaatcaaggatctaattcagcagcatgtaaagttacaaaaacaaatagaagacctacaaggtcgaacagcaaataaggatccaattaaagccttttatgaaaacagggcctacacacctaggagtttatcagcacctatatttactacttcacttaactttgtggagaaggaaagagatttcagaaaaattaatcacgaaatggccaacggtggtaatcagaatctaaaggtggcggatgaggcgttgaaggtagatgattgtgactgtcatcctgaattttcaccaccatcaagtcagcctccaaaacataaaggaaaacaaaaatctcgaaacaatgaatcagaaaagttcagttctagttcaccattgactttaccagcagatttgaagaacatcttggagaaacagttttctaaatcttccagagctgcacaccaggattttgctaatataatgaaaatgctgagaagcttaattcaagatggctatatggccttattggagcagcgttgccgcagcgctgcacaggcctttacagagttgctgaacggtttagatcctcaaaaaataaagcaattgaacctggccatgattaactatgttttggtcgtctatggacttgccatttctctccttggaataggacagcctgaggaattatctgaagccgaaaaccagtttaagaggattattgaacactaccccagtgagggccttgattgcttggcctactgtggaattggaaaagtgtatttgaaaaaaaacagatttctagaagctctcaatcactttgagaaagcaagaaccttgatttatcgtcttcctggagtgttaacttggcccacgagtaatgtgattattgaagagtctcagccacaaaaaataaagatgctgttagagaaatttgttgaagaatgcaagttccctccagtgccagatgccatttgttgctatcagaagtgccatggatattctaagatccagatatacataactgatccagactttaagggttttatacgcatcagctgttgccagtactgtaaaatagaatttcacatgaattgctggaagaagttaaaaactacaacctttaatgataaaattgacaaggattttctacaaggaatatgtcttacccctgactgtgaaggtgtcatttctaagattatcatcttcagcagtggtggtgaagttaaatgtgaatttgaacacaaggtcataaaagaaaaggttcctccaagacctattctgaaacagaaatgttctagcctagagaaactaagactgaaagaagacaaaaaattgaagagaaagatccaaaaaaaagaagcaaaaaagttagcacaagaaagaatggaggaggacttaagagaaagtaatccacccaaaaatgaagagcagaaagaaactgtagacaatgttcagcgttgtcagttccttgatgacagaattctacagtgtataaagcagtatgctgacaagattaaatccggcatacagaatacagccatgcttctcaaagaattgctttcttggaaagttttgagcacagaagactatacaacctgtttttctagcagaaattttctaaatgaagcagtggactatgttattcgccacttgattcaagaaaataacagagtaaagacaagaatatttctgcatgttttgagtgagcttaaagaagtggagcccaaattagccgcctggatccaaaaacttaatagctttggcttagatgccacaggaactttcttttctcgttatggagcatctcttaaactgcttgattttagtatcatgactttcctctggaatgagaaatatggtcacaaactagactctatagaaggaaagcaacttgattatttctctgagccagcatcattgaaggaagcccgttgtttaatatggctgctagaagaacacagagacaagttcccagcattgcatagtgctttagatgaattctttgatataatggacagccgctgtactgtgttaaggaaacaagatagtggtgaagcaccgtttagttcaaccaaggtgaaaaacaaaagcaagaaaaagaagccaaaggattcaaagcctatgttagttgggtctggaacaacttcagtaacttcaaataatgagatcatcacttcaagtgaagaccatagcaatcgaaattcagattctgcaggcccatttgcagtgcctgaccatcttcggcaagatgtagaagaattcgaagctctctatgaccaacacagtaacgaatatgttgtccgcaataagaagctatgggacatgaacccaaaacaaaaatgttcaactctatatgattacttctctcagtttttggaggaacatggtcccttggacatgagtaacaagatgttctctgcagaatatgagtttttcccagaagaaactcgacagatactagaaaaagcaggaggtttaaaaccttttctcttgggatgccctcgttttgttgtgattgacaactgtattgcactgaagaaggttgcatcacggctcaagaaaaaaaggaagaagaaaaacattaaaacaaaagtagaagaaatttcaaaagcaggggagtatgtacgagttaaactacaactgaatccagctgctagggaatttaaaccagatgtaaagtctaaaccagtgtcagattcatcttcagcaccagcttttgaaaatgtgaaacccaaacctgtgtctgcaaattctcccaagccagcttgtgaagatgtgaaggccaaaccagtatccgacaattcttctagacaagtttctgaggatgggcaacccaaaggggtctcttctaattctcctaaaccaggctctgaggatgcaaattacaagcgagtctcctgtaattcccccaaaccggttcttgaggatgtgaaaccaacttattgggctcaatcccatttggtcacaggatactgtacgtatcttcctttccagagatttgatatcacccagacaccgccagcatacataaacgtgttaccaggtttgccccagtacaccagcatatatacacccttggccagcctttctcctgaatatcagctaccaagatcagtaccagtggtgccgtcttttgtagccaatgacagagcagataaaaatgctgctgcctattttgagggtcatcatttgaatgctgagaatgttgctggtcaccagattgcctctgaaacacagatccttgagggctctttgggaatatctgtaaagtcacactgcagcacaggtgatgctcatacagtcctgagtgagtctaacagaaatgatgagcactgtggaaattctaacaacaaatgtgaagtaattccagaaagcaccagtgcagtaacaaacattccacacgtgcagatggttgccatacaggtatcttggaacataatacaccaagaagtcaatactgagccatataatccttttgaggaacgacaaggggaaatttcacggattgaaaaggagcaccaagtattacaagaccaacttcaagaagtgtatgaaaattatgagcagataaaacttaagggcttagaagagaccagggacctggaagagaagttgaaaaggcacttagaagaaaacaagatctcaaagacggaattagattggttccttcaagatttggaaagagaaattaaaaaatggcaacaggaaaaaaaagaaatccaagaaagactaaaatcactgaagaagaaaattaaaaaggtttcaaatgccagtgaaatgtatacccagaaaaatgatggaaaggaaaaggaacatgaattacatctggatcagtcccttgaaatcagcaacacacttacaaatgagaaaatgaaaatagaagagtatataaagaaagggaaagaggattatgaagagagtcatcagagagctgtggctgcagaggtatccgtacttgaaaactggaaggagagtgaagtgtataagctacagatcatggagtcacaagcagaagcctttctgaagaagctggggctgattagccgtgatcctgcagcatatcctgacatggagtctgatatacgttcatgggaattgtttctttctaatgttacaaaagaaattgagaaagcaaagtctcagtttgaagaacaaattaaggcaattaaaaatggttctcggctcagtgaactttctaaagtgcagatttctgagctttcatttcctgcctgtaacacggttcatcccgagttactccctgagtcttcaggccacgatggccaagggcttgtgacttctgcaagcgacgtgactggaaaccacgcagcacttcacagggatcctagtgtgttctctgctggtgattccccaggggaggctccttctgcgctgttgccagggccaccccctggtcagcctgaagccactcagctgacagggccaaaacgggctggccaggcagctctgtcagaacgaagccctgtggctgatcggaagcagcctgttcctccaggacgtgctgcgcgttcaagccagtctccaaaaaagccgttcaatagtattattgagcacctgtcagtggtattcccatgttacaacagcactgagcttgctggttttattaaaaaagtgcgaagcaaaaacaagaactcactctcaggattgagtattgatgaaattgtccaaagagtgacagaacacattctagatgaacagaaaaagaaaaagccaaacccaggaaaggacaagaggacttatgagcccagctctgccacccccgtgaccaggtcctcccagggctcaccctcggtggttgttgcaccatcacccaaaaccaaggggcagaaagcagaagatgtccctgtgaggattgcactgggtgcaagttcctgtgaaatatgccacgaggtgttcaaatcaaaaaacgtgcgtgtgctcaaatgtgggcacaagtatcacaaagggtgctttaagcagtggcttaaagggcagagcgcttgcccggcctgccagggtcgtgatctcctgacagaagagtcaccttctggaagaggctggcccagtcagaatcaggagctgccttcctgctcttctaggtagtcacacttcactaaagtgtcatccaccagtgtgttgaatccgaagaatgacaattttctaccactggtgtaaaaaacaaacatttgaagacccttgtgcattgtgtgtcacaaagctaaatacatggaaatcgttaatatcgctgatattaagtaatttccccactctgagtgaatactttgatgattgccaacagtggctaataaaatgacggctaccacactcatgggtcactggggctgcgcagggctctttgaggtgggtggcttcttttggaaagtactatgaacgtctcgaagcagtattctagtgataagaattcttaacatagccaagcgccccacgtttgttccccacgtttgttccccttttctgtttgaaaaacctgttctggtagctccacaagagagatgatactgactttttaaattttttacaagagtctgtattcctgatatgcctatatttttcctcaaagattctgcattttaaggatgggcataagcaaactatattttaataatttatagttaatgttaaaatattggctgatttagaccaaaagattcaaatctcctctttgtgaaatcccatctgcatttgattttttattattttatgttcccccgttagattgttttaagtgtttgcttttcatcttttatagatgtaatctgattttcaaaaatcattaacactttttaattagtatcgactaagactttttccccctggaatcgaggctgtgtgtccgtcatcccagcccccggttggagcctgctctttgaactccgctgccttccttagcagcttctgtcctcttctgtgagtcagtcagcgagtgcttgggatccgcatccagccgtgctgagcacacaacaggctgtgtgtggaaatggccaccaccattctccttccccaccccaccacaaaaagagaagctgtgtctttagacaaccctgaggtatctgtgttacaatcgttctgtgtttgatatttgtgtaaagtatgcatgcagtcttgtactgtgacctaagaacaaaactgtaactgcattagaaaccatgaaaaaattagatattgttttgtgacttttagacagtggtaaatatagaaccatgaattctggtcacattccatttctctccaacatgaaggatcaaaaaatgtttttcaatgtgttctttgttccactggaaacttagagtcatgagtttatgagctgatttggtcaccttcctctgcctttgttcactgtgagttctgatgtcttagtgacttagttcttagaagctcacgccttagtttgaaacagattctccacggtggtccccaaaacactgtctgcatatccataagaattgagcgctatgggtgttaacgtgcatgaggatcagtttgcagcagcaagtacaaaaggagaagaggaacatccgttgaatgagtgtgttttgtacataacttcagatacttgtgaacatgccttatatttgtccaacaactgtcagaataaagaacattctaaaatgagaaaaaaacaattataaaattctctttaatcaataaaaaccaacgccattgttat

SEQ ID NO: 371559 - DNA, 7773 bp, Homo sapiens
  misc_feature (205)..(205): n is a, c, g, or t
  misc_feature (231)..(231): n is a, c, g, or t
  misc_feature (7542)..(7542): n is a, c, g, or t
  misc_feature (7606)..(7607): n is a, c, g, or t
  misc_feature (7660)..(7660): n is a, c, g, or t
  misc_feature (7667)..(7667): n is a, c, g, or t
  misc_feature (7705)..(7705): n is a, c, g, or t
  misc_feature (7741)..(7741): n is a, c, g, or t
tacatttggaaagtcttactgacatgcagaaatagtacagaaaaacatacaaataggaatgttattggctgggcatggtggctcacacctgtaatcccagcactttgggaggccaaggcgggtggatcacaaggtcaggagatcgagaccatcgtggctaacatggtgaaaccctgtgcctactaaaaattcaaaaaattagccnggtgtactggcatgtgctgtaatccnagctacttgggaggctgaggcaggagaatcacttgaacccgggagcaaaggttgcagtgagccaagatcacgccactgcactccagcctgggcgacagagcgagactctgtctcaaaaaaaacaaaagaatgctatgcataggtacaatgtcgaaatgtgcaagaaatacttcagaaatattaaaagtagttattcctgggtagttgtgattgtgactctgggtgactttttccctttgttttatttttctgtattttccaaatttcctataatggacatatattatatggattttttttaattaaaattatcttttgactagataatatacatggaaaattcacaaagtacacatatgcaagatataatacttttactataaaagagtgaaaatttttaaatacttgtttttccttttagaaatgcactcggtgatggaaagagagccactattctgaagaacacttggccaaagggtcattatcgttattgtgatgctctttctatgctgggggaatatgactgggccctgcaagcaaacataaaagctcaaaaactctgtaaaaatgaccctgagggaatcaaggatctaattcagcagcatgtaaagttacaaaaacaaatagaagacctacaaggtcgaacagcaaataaggatccaattaaagccttttatgaaaacagggcctacacacctaggagtttatcagcacctatatttactacttcacttaactttgtggagaaggaaagagatttcagaaaaattaatcacgaaatggccaacggtggtaatcagaatctaaaggtggcggatgaggcgttgaaggtagatgattgtgactgtcatcctgaattttcaccaccatcaagtcagcctccaaaacataaaggaaaacaaaaatctcgaaacaatgaatcagaaaagttcagttctagttcaccattgactttaccagcagatttgaagaacatcttggagaaacagttttctaaatcttccagagctgcacaccaggattttgctaatataatgaaaatgctgagaagcttaattcaagatggctatatggccttattggagcagcgttgccgcagcgctgcacaggcctttacagagttgctgaacggtttagatcctcaaaaaataaagcaattgaacctggccatgattaactatgttttggtcgtctatggacttgccatttctctccttggaataggacagcctgaggaattatctgaagccgaaaaccagtttaagaggattattgaacactaccccagtgagggccttgattgcttggcctactgtggaattggaaaagtgtatttgaaaaaaaacagatttctagaagctctcaatcactttgagaaagcaagaaccttgatttatcgtcttcctggagtgttaacttggcccacgagtaatgtgattattgaagagtctcagccacaaaaaataaagatgctgttagagaaatttgttgaagaatgcaagttccctccagtgccagatgccatttgttgctatcagaagtgccatggatattctaagatccagatatacataactgatccagactttaagggttttatacgcatcagctgttgccagtactgtaaaatagaatttcacatgaattgctggaagaagttaaaaactacaacctttaatgataaaattgacaaggattttctacaaggaatatgtcttacccctgactgtgaaggtgtcatttctaagattatcatcttcagcagtggtggtgaagttaaatgtgaatttgaacacaaggtcataaaagaaaaggttcctccaagacctattctgaaacagaaatgttctagcctagagaaactaagactgaaagaagacaaaaaattgaagagaaagatccaaaaaaaagaagcaaaaaagttagcacaagaaagaatggaggaggacttaagagaaagtaatccacccaaaaatgaagagcagaaagaaactgtagacaatgttcagcgttgtcagttccttgatgacagaattctacagtgtataaagcagtatgctgacaagattaaatccggcatacagaatacagccatgcttctcaaagaattgctttcttggaaagttttgagcacagaagactatacaacctgtttttctagcagaaattttctaaatgaagcagtggactatgttattcgccacttgattcaagaaaataacagagtaaagacaagaatatttctgcatgttttgagtgagcttaaagaagtggagcccaaattagccgcctggatccaaaaacttaatagctttggcttagatgccacaggaactttcttttctcgttatggagcatctcttaaactgcttgattttagtatcatgactttcctctggaatgagaaatatggtcacaaactagactctatagaaggaaagcaacttgattatttctctgagccagcatcattgaaggaagcccgttgtttaatatggctgctagaagaacacagagacaagttcccagcattgcatagtgctttagatgaattctttgatataatggacagccgctgtactgtgttaaggaaacaagatagtggtgaagcaccgtttagttcaaccaaggtgaaaaacaaaagcaagaaaaagaagccaaaggattcaaagcctatgttagttgggtctggaacaacttcagtaacttcaaataatgagatcatcacttcaagtgaagaccatagcaatcgaaattcagattctgcaggcccatttgcagtgcctgaccatcttcggcaagatgtagaagaattcgaagctctctatgaccaacacagtaacgaatatgttgtccgcaataagaagctatgggacatgaacccaaaacaaaaatgttcaactctatatgattacttctctcagtttttggaggaacatggtcccttggacatgagtaacaagatgttctctgcagaatatgagtttttcccagaagaaactcgacagatactagaaaaagcaggaggtttaaaaccttttctcttgggatgccctcgttttgttgtgattgacaactgtattgcactgaagaaggttgcatcacggctcaagaaaaaaaggaagaagaaaaacattaaaacaaaagtagaagaaatttcaaaagcaggggagtatgtacgagttaaactacaactgaatccagctgctagggaatttaaaccagatgtaaagtctaaaccagtgtcagattcatcttcagcaccagcttttgaaaatgtgaaacccaaacctgtgtctgcaaattctcccaagccagcttgtgaagatgtgaaggccaaaccagtatccgacaattcttctagacaagtttctgaggatgggcaacccaaaggggtctcttctaattctcctaaaccaggctctgaggatgcaaattacaagcgagtctcctgtaattcccccaaaccggttcttgaggatgtgaaaccaacttattgggctcaatcccatttggtcacaggatactgtacgtatcttcctttccagagatttgatatcacccagacaccgccagcatacataaacgtgttaccaggtttgccccagtacaccagcatatatacacccttggccagcctttctcctgaatatcagctaccaagatcagtaccagtggtgccgtcttttgtagccaatgacagagcagataaaaatgctgctgcctattttgagggtcatcatttgaatgctgagaatgttgctggtcaccagattgcctctgaaacacagatccttgagggctctttgggaatatctgtaaagtcacactgcagcacaggtgatgctcatacagtcctgagtgagtctaacagaaatgatgagcactgtggaaattctaacaacaaatgtgaagtaattccagaaagcaccagtgcagtaacaaacattccacacgtgcagatggttgccatacaggtatcttggaacataatacaccaagaagtcaatactgagccatataatccttttgaggaacgacaaggggaaatttcacggattgaaaaggagcaccaagtattacaagaccaacttcaagaagtgtatgaaaattatgagcagataaaacttaagggcttagaagagaccagggacctggaagagaagttgaaaaggcacttagaagaaaacaagatctcaaagacggaattagattggttccttcaagatttggaaagagaaattaaaaaatggcaacaggaaaaaaaagaaatccaagaaagactaaaatcactgaagaagaaaattaaaaaggtttcaaatgccagtgaaatgtatacccagaaaaatgatggaaaggaaaaggaacatgaattacatctggatcagtcccttgaaatcagcaacacacttacaaatgagaaaatgaaaatagaagagtatataaagaaagggaaagaggattatgaagagagtcatcagagagctgtggctgcagaggtatccgtacttgaaaactggaaggagagtgaagtgtataagctacagatcatggagtcacaagcagaagcctttctgaagaagctggggctgattagccgtgatcctgcagcatatcctgacatggagtctgatatacgttcatgggaattgtttctttctaatgttacaaaagaaattgagaaagcaaagtctcagtttgaagaacaaattaaggcaattaaaaatggttctcggctcagtgaactttctaaagtgcagatttctgagctttcatttcctgcctgtaacacggttcatcccgagttactccctgagtcttcaggccacgatggccaagggcttgtgacttctgcaagcgacgtgactggaaaccacgcagcacttcacagggatcctagtgtgttctctgctggtgattccccaggggaggctccttctgcgctgttgccagggccaccccctggtcagcctgaagccactcagctgacagggccaaaacgggctggccaggcagctctgtcagaacgaagccctgtggctgatcggaagcagcctgttcctccaggacgtgctgcgcgttcaagccagtctccaaaaaagccgttcaatagtattattgagcacctgtcagtggtattcccatgttacaacagcactgagcttgctggttttattaaaaaagtgcgaagcaaaaacaagaactcactctcaggattgagtattgatgaaattgtccaaagagtgacagaacacattctagatgaacagaaaaagaaaaagccaaacccaggaaaggacaagaggacttatgagcccagctctgccacccccgtgaccaggtcctcccagggctcaccctcggtggttgttgcaccatcacccaaaaccaaggggcagaaagcagaagatgtccctgtgaggattgcactgggtgcaagttcctgtgaaatatgccacgaggtgttcaaatcaaaaaacgtgcgtgtgctcaaatgtgggcacaagtatcacaaagggtgctttaagcagtggcttaaagggcagagcgcttgcccggcctgccagggtcgtgatctcctgacagaagagtcaccttctggaagaggctggcccagtcagaatcaggagctgccttcctgctcttctaggtagtcacacttcactaaagtgtcatccaccagtgtgttgaatccgaagaatgacaattttctaccactggtgtaaaaaacaaacatttgaagacccttgtgcattgtgtgtcacaaagctaaatacatggaaatcgttaatatcgctgatattaagtaatttccccactctgagtgaatactttgatgattgccaacagtggctaataaaatgacggctaccacactcatgggtcactggggctgcgcagggctctttgaggtgggtggcttcttttggaaagtactatgaacgtctcgaagcagtattctagtgataagaattcttaacatagccaagcgccccacgtttgttccccacgtttgttccccttttctgtttgaaaaacctgttctggtagctccacaagagagatgatactgactttttaaattttttacaagagtctgtattcctgatatgcctatatttttcctcaaagattctgcattttaaggatgggcataagcaaactatattttaataatttatagttaatgttaaaatattggctgatttagaccaaaagattcaaatctcctctttgtgaaatcccatctgcatttgattttttattattttatgttcccccgttagattgttttaagtgtttgcttttcatcttttatagatgtaatctgattttcaaaaatcattaacactttttaattagtatcgactaagactttttccccctggaatcgaggctgtgtgtccgtcatcccagcccccggttggagcctgctctttgaactccgctgccttccttagcagcttctgtcctcttctgtgagtcagtcagcgagtgcttgggatccgcatccagccgtgctgagcacacaacaggctgtgtgtggaaatggccaccaccattctccttccccaccccaccacaaaaagagaagctgtgtctttagacaaccctgaggtatctgtgttacaatcgttctgtgtttgatatttgtgtaaagtatgcatgcagtcttgtactgtgacctaagaacaaaactgtaactgcattagaaaccatgaaaaaattagatattgttttgtgacttttagacagtggtaaatatagaaccatgaattctggtcacattccatttctctccaacatgaaggatcaaaaaatgtttttcaatgtgttctttgttccactggaaacttagagtcatgagtttatgagctgatttggtcaccttcctctgcctttgttcactgtgagttctgatgtcttagtgacttagttcttagaagctcacgccttagtttgaaacagattctccacggtggtccccaaaacactgtctgcatatccataagaattgagcgctatgggtgttaacgtgcatgaggatcagtttgcagcagcaagtacaaaaggagaagaggaacatccgttgaatgagtgtgttttgtacataacttcagatacttgtgaacatgccttatatttgtccaacaactgtcagaataaagaacattctaaaatgagaaaaaaaaaaaaaaaaaaaaaaaaaaaaaaaaaaaaaaccaacgccattgctcagctaacggccacgcttcaacctggtgatgccccggcatactttccagcatagagcgcggaataagcgcaatngcctgctctgcgatcacacaggccaacattccgtgataagactccatctcatggatagttcccnngagcgcaccgtcagcatgaaaccagctctcgaagtgcgacgatccgacaattngcgccgnaggccataaatgtacttgcataacctgactggcacggnttactggcccatatccttgggcgtgaccatcataanttccttccgtattacccgtattccctcgatgg

SEQ ID NO: 371560 - DNA, 8729 bp, Homo sapiens
  misc_feature (8498)..(8498): n is a, c, g, or t
  misc_feature (8562)..(8563): n is a, c, g, or t
  misc_feature (8616)..(8616): n is a, c, g, or t
  misc_feature (8623)..(8623): n is a, c, g, or t
  misc_feature (8661)..(8661): n is a, c, g, or t
  misc_feature (8697)..(8697): n is a, c, g, or t
ctgaactagttgccagtgatcttgaaacgtgacagtaaccaagagataaataggtgacaatgacaggaaaattagatgtagtaaaagagagtgtttgagagcagaagctatggcaactaaagactggatttgaatccttcctagcttggtgacatgagcaaattacttgatttaagtgagcattttcccatctgtacagtggagataacgataattgtgcctgctaagaagaattgctgtgaagattagtgaaataatgcatgtaaaacatttggtacagtatgtgacacatagtacaaatagtttgctaggaagattgttattattcttcacttgtgatattgtgaagttttcatacagcaaattggacatcatgagatggattgattaaataaatagatttgaacttcaaggactggtagtgttcttgctttggaaagaagaaacttggtttatcctaataatagtaggataataatggtgaagtgataggtacaagtaatagtgtttatgatgcgctggtgatgataggaaaagaaagccattatatgggcaagagctagaagtaataaaatggtgcatttttcagtgatgtttggcctatgtagctattctctgataactataaaaatccttattattgaagattcttcaggaaaaaaaaacccttagtctgaaactttagcaccaatcccccttgccccccattgaaatacgtatttttaaaacatggcttttgataatgtgagggttttttcctttttgcgatttagcagtgctgattgtgtattgcagtagttgtgagagcattagaagcagcagtcgataggaggatggaaggtctggatgccgccttggggagttaggagattggcagacttaccctgtaccactctagccctactcctttgcccaagacagaaacacactgagatggataggagaatatgagcagttgataggaaagttctcagtggagtcaggatttaggttaggccaggagattgagaatataacagtttgtgtatgatgaaatggcatatttcacagaatgcagtaaaagcaggtagggtacaagtgcagcaacaggaagatgtcttttcttcattcagcaaacacttatttgagagcttaccatgtgctaggcacatacaaagataaataagatgcccttgatgatcctctatttaaaggagacatgtacaattcacgtgcttctgagataaatttgaagaaactacaacatcttgagttgatggaagatattgtggatttggcaaagaaagttgctaatgattcattccttattggaggcttattgagaattggttgtaaaatagaaaataaaatcttggcaatggaagaagctctgaattggataaaatatgcaggcgatgtaacaattctaactaaattaggatcaattgacaattgttggcctatgttaagtattttctttactgaatacaagtaccacataactaaaattgtaatggaagactgcaatttgcttgaagaacttaaaactcaaagttgtatggattgtatagaggaaggagaactaatgaaaatgaaaggaaatgaagagttttccaaagaaagatttgatatagctattatctattacaccagagccattgaatatagacctgaaaactaccttctttatggtaaccgagctctttgttttcttcgtactggacagtttagaaatgcactcggtgatggaaagagagccactattctgaagaacacttggccaaagggtcattatcgttattgtgatgctctttctatgctgggggaatatgactgggccctgcaagcaaacataaaagctcaaaaactctgtaaaaatgaccctgagggaatcaaggatctaattcagcagcatgtaaagttacaaaaacaaatagaagacctacaaggtcgaacagcaaataaggatccaattaaagccttttatgaaaacagggcctacacacctaggagtttatcagcacctatatttactacttcacttaactttgtggagaaggaaagagatttcagaaaaattaatcacgaaatggccaacggtggtaatcagaatctaaaggtggcggatgaggcgttgaaggtagatgattgtgactgtcatcctgaattttcaccaccatcaagtcagcctccaaaacataaaggaaaacaaaaatctcgaaacaatgaatcagaaaagttcagttctagttcaccattgactttaccagcagatttgaagaacatcttggagaaacagttttctaaatcttccagagctgcacaccaggattttgctaatataatgaaaatgctgagaagcttaattcaagatggctatatggccttattggagcagcgttgccgcagcgctgcacaggcctttacagagttgctgaacggtttagatcctcaaaaaataaagcaattgaacctggccatgattaactatgttttggtcgtctatggacttgccatttctctccttggaataggacagcctgaggaattatctgaagccgaaaaccagtttaagaggattattgaacactaccccagtgagggccttgattgcttggcctactgtggaattggaaaagtgtatttgaaaaaaaacagatttctagaagctctcaatcactttgagaaagcaagaaccttgatttatcgtcttcctggagtgttaacttggcccacgagtaatgtgattattgaagagtctcagccacaaaaaataaagatgctgttagagaaatttgttgaagaatgcaagttccctccagtgccagatgccatttgttgctatcagaagtgccatggatattctaagatccagatatacataactgatccagactttaaggattttctacaaggaatatgtcttacccctgactgtgaaggtgtcatttctaagattatcatcttcagcagtggtggtgaagttaaatgtgaatttgaacacaaggtcataaaagaaaaggttcctccaagacctattctgaaacagaaatgttctagcctagagaaactaagactgaaagaagacaaaaaattgaagagaaagatccaaaaaaaagaagcaaaaaagttagcacaagaaagaatggaggaggacttaagagaaagtaatccacccaaaaatgaagagcagaaagaaactgtagacaatgttcagcgttgtcagttccttgatgacagaattctacagtgtataaagcagtatgctgacaagattaaatccggcatacagaatacagccatgcttctcaaagaattgctttcttggaaagttttgagcacagaagactatacaacctgtttttctagcagaaattttctaaatgaagcagtggactatgttattcgccacttgattcaagaaaataacagagtaaagacaagaatatttctgcatgttttgagtgagcttaaagaagtggagcccaaattagccgcctggatccaaaaacttaatagctttggcttagatgccacaggaactttcttttctcgttatggagcatctcttaaactgcttgattttagtatcatgactttcctctggaatgagaaatatggtcacaaactagactctatagaaggaaagcaacttgattatttctctgagccagcatcattgaaggaagcccgttgtttaatatggctgctagaagaacacagagacaagttcccagcattgcatagtgctttagatgaattctttgatataatggacagccgctgtactgtgttaaggaaacaagatagtggtgaagcaccgtttagttcaaccaaggtgaaaaacaaaagcaagaaaaagaagccaaaggattcaaagcctatgttagttgggtctggaacaacttcagtaacttcaaataatgagatcatcacttcaagtgaagaccatagcaatcgaaattcagattctgcaggcccatttgcagtgcctgaccatcttcggcaagatgtagaagaattcgaagctctctatgaccaacacagtaacgaatatgttgtccgcaataagaagctatgggacatgaacccaaaacaaaaatgttcaactctatatgattacttctctcagtttttggaggaacatggtcccttggacatgagtaacaagatgttctctgcagaatatgagtttttcccagaagaaactcgacagatactagaaaaagcaggaggtttaaaaccttttctcttgggatgccctcgttttgttgtgattgacaactgtattgcactgaagaaggttgcatcacggctcaagaaaaaaaggaagaagaaaaacattaaaacaaaagtagaagaaatttcaaaagcaggggagtatgtacgagttaaactacaactgaatccagctgctagggaatttaaaccagatgtaaagtctaaaccagtgtcagattcatcttcagcaccagcttttgaaaatgtgaaacccaaacctgtgtctgcaaattctcccaagccagcttgtgaagatgtgaaggccaaaccagtatccgacaattcttctagacaagtttctgaggatgggcaacccaaaggggtctcttctaattctcctaaaccaggctctgaggatgcaaattacaagcgagtctcctgtaattcccccaaaccggttcttgaggatgtgaaaccaacttattgggctcaatcccatttggtcacaggatactgtacgtatcttcctttccagagatttgatatcacccagacaccgccagcatacataaacgtgttaccaggtttgccccagtacaccagcatatatacacccttggccagcctttctcctgaatatcagctaccaagatcagtaccagtggtgccgtcttttgtagccaatgacagagcagataaaaatgctgctgcctattttgagggtcatcatttgaatgctgagaatgttgctggtcaccagattgcctctgaaacacagatccttgagggctctttgggaatatctgtaaagtcacactgcagcacaggtgatgctcatacagtcctgagtgagtctaacagaaatgatgagcactgtggaaattctaacaacaaatgtgaagtaattccagaaagcaccagtgcagtaacaaacattccacacgtgcagatggttgccatacaggtatcttggaacataatacaccaagaagtcaatactgagccatataatccttttgaggaacgacaaggggaaatttcacggattgaaaaggagcaccaagtattacaagaccaacttcaagaagtgtatgaaaattatgagcagataaaacttaagggcttagaagagaccagggacctggaagagaagttgaaaaggcacttagaagaaaacaagatctcaaagacggaattagattggttccttcaagatttggaaagagaaattaaaaaatggcaacaggaaaaaaaagaaatccaagaaagactaaaatcactgaagaagaaaattaaaaaggtttcaaatgccagtgaaatgtatacccagaaaaatgatggaaaggaaaaggaacatgaattacatctggatcagtcccttgaaatcagcaacacacttacaaatgagaaaatgaaaatagaagagtatataaagaaagggaaagaggattatgaagagagtcatcagagagctgtggctgcagaggtatccgtacttgaaaactggaaggagagtgaagtgtataagctacagatcatggagtcacaagcagaagcctttctgaagaagctggggctgattagccgtgatcctgcagcatatcctgacatggagtctgatatacgttcatgggaattgtttctttctaatgttacaaaagaaattgagaaagcaaagtctcagtttgaagaacaaattaaggcaattaaaaatggttctcggctcagtgaactttctaaagtgcagatttctgagctttcatttcctgcctgtaacacggttcatcccgagttactccctgagtcttcaggccacgatggccaagggcttgtgacttctgcaagcgacgtgactggaaaccacgcagcacttcacagggatcctagtgtgttctctgctggtgattccccaggggaggctccttctgcgctgttgccagggccaccccctggtcagcctgaagccactcagctgacagggccaaaacgggctggccaggcagctctgtcagaacgaagccctgtggctgatcggaagcagcctgttcctccaggacgtgctgcgcgttcaagccagtctccaaaaaagccgttcaatagtattattgagcacctgtcagtggtattcccatgttacaacagcactgagcttgctggttttattaaaaaagtgcgaagcaaaaacaagaactcactctcaggattgagtattgatgaaattgtccaaagagtgacagaacacattctagatgaacagaaaaagaaaaagccaaacccaggaaaggacaagaggacttatgagcccagctctgccacccccgtgaccaggtcctcccagggctcaccctcggtggttgttgcaccatcacccaaaaccaaggggcagaaagcagaagatgtccctgtgaggattgcactgggtgcaagttcctgtgaaatatgccacgaggtgttcaaatcaaaaaacgtgcgtgtgctcaaatgtgggcacaagtatcacaaagggtgctttaagcagtggcttaaagggcagagcgcttgcccggcctgccagggtcgtgatctcctgacagaagagtcaccttctggaagaggctggcccagtcagaatcaggagctgccttcctgctcttctaggtagtcacacttcactaaagtgtcatccaccagtgtgttgaatccgaagaatgacaattttctaccactggtgtaaaaaacaaacatttgaagacccttgtgcattgtgtgtcacaaagctaaatacatggaaatcgttaatatcgctgatattaagtaatttccccactctgagtgaatactttgatgattgccaacagtggctaataaaatgacggctaccacactcatgggtcactggggctgcgcagggctctttgaggtgggtggcttcttttggaaagtactatgaacgtctcgaagcagtattctagtgataagaattcttaacatagccaagcgccccacgtttgttccccacgtttgttccccttttctgtttgaaaaacctgttctggtagctccacaagagagatgatactgactttttaaattttttacaagagtctgtattcctgatatgcctatatttttcctcaaagattctgcattttaaggatgggcataagcaaactatattttaataatttatagttaatgttaaaatattggctgatttagaccaaaagattcaaatctcctctttgtgaaatcccatctgcatttgattttttattattttatgttcccccgttagattgttttaagtgtttgcttttcatcttttatagatgtaatctgattttcaaaaatcattaacactttttaattagtatcgactaagactttttccccctggaatcgaggctgtgtgtccgtcatcccagcccccggttggagcctgctctttgaactccgctgccttccttagcagcttctgtcctcttctgtgagtcagtcagcgagtgcttgggatccgcatccagccgtgctgagcacacaacaggctgtgtgtggaaatggccaccaccattctccttccccaccccaccacaaaaagagaagctgtgtctttagacaaccctgaggtatctgtgttacaatcgttctgtgtttgatatttgtgtaaagtatgcatgcagtcttgtactgtgacctaagaacaaaactgtaactgcattagaaaccatgaaaaaattagatattgttttgtgacttttagacagtggtaaatatagaaccatgaattctggtcacattccatttctctccaacatgaaggatcaaaaaatgtttttcaatgtgttctttgttccactggaaacttagagtcatgagtttatgagctgatttggtcaccttcctctgcctttgttcactgtgagttctgatgtcttagtgacttagttcttagaagctcacgccttagtttgaaacagattctccacggtggtccccaaaacactgtctgcatatccataagaattgagcgctatgggtgttaacgtgcatgaggatcagtttgcagcagcaagtacaaaaggagaagaggaacatccgttgaatgagtgtgttttgtacataacttcagatacttgtgaacatgccttatatttgtccaacaactgtcagaataaagaacattctaaaatgagaaaaaaaaaaaaaaaaaaaaaaaaaaaaaaaaaaaaaaccaacgccattgctcagctaacggccacgcttcaacctggtgatgccccggcatactttccagcatagagcgcggaataagcgcaatngcctgctctgcgatcacacaggccaacattccgtgataagactccatctcatggatagttcccnngagcgcaccgtcagcatgaaaccagctctcgaagtgcgacgatccgacaattngcgccgnaggccataaatgtacttgcataacctgactggcacggnttactggcccatatccttgggcgtgaccatcataanttccttccgtattacccgtattccctcgatgg

SEQ ID NO: 371561 - DNA, 8766 bp, Homo sapiens
  misc_feature (8535)..(8535): n is a, c, g, or t
  misc_feature (8599)..(8600): n is a, c, g, or t
  misc_feature (8653)..(8653): n is a, c, g, or t
  misc_feature (8660)..(8660): n is a, c, g, or t
  misc_feature (8698)..(8698): n is a, c, g, or t
  misc_feature (8734)..(8734): n is a, c, g, or t
ctgaactagttgccagtgatcttgaaacgtgacagtaaccaagagataaataggtgacaatgacaggaaaattagatgtagtaaaagagagtgtttgagagcagaagctatggcaactaaagactggatttgaatccttcctagcttggtgacatgagcaaattacttgatttaagtgagcattttcccatctgtacagtggagataacgataattgtgcctgctaagaagaattgctgtgaagattagtgaaataatgcatgtaaaacatttggtacagtatgtgacacatagtacaaatagtttgctaggaagattgttattattcttcacttgtgatattgtgaagttttcatacagcaaattggacatcatgagatggattgattaaataaatagatttgaacttcaaggactggtagtgttcttgctttggaaagaagaaacttggtttatcctaataatagtaggataataatggtgaagtgataggtacaagtaatagtgtttatgatgcgctggtgatgataggaaaagaaagccattatatgggcaagagctagaagtaataaaatggtgcatttttcagtgatgtttggcctatgtagctattctctgataactataaaaatccttattattgaagattcttcaggaaaaaaaaacccttagtctgaaactttagcaccaatcccccttgccccccattgaaatacgtatttttaaaacatggcttttgataatgtgagggttttttcctttttgcgatttagcagtgctgattgtgtattgcagtagttgtgagagcattagaagcagcagtcgataggaggatggaaggtctggatgccgccttggggagttaggagattggcagacttaccctgtaccactctagccctactcctttgcccaagacagaaacacactgagatggataggagaatatgagcagttgataggaaagttctcagtggagtcaggatttaggttaggccaggagattgagaatataacagtttgtgtatgatgaaatggcatatttcacagaatgcagtaaaagcaggtagggtacaagtgcagcaacaggaagatgtcttttcttcattcagcaaacacttatttgagagcttaccatgtgctaggcacatacaaagataaataagatgcccttgatgatcctctatttaaaggagacatgtacaattcacgtgcttctgagataaatttgaagaaactacaacatcttgagttgatggaagatattgtggatttggcaaagaaagttgctaatgattcattccttattggaggcttattgagaattggttgtaaaatagaaaataaaatcttggcaatggaagaagctctgaattggataaaatatgcaggcgatgtaacaattctaactaaattaggatcaattgacaattgttggcctatgttaagtattttctttactgaatacaagtaccacataactaaaattgtaatggaagactgcaatttgcttgaagaacttaaaactcaaagttgtatggattgtatagaggaaggagaactaatgaaaatgaaaggaaatgaagagttttccaaagaaagatttgatatagctattatctattacaccagagccattgaatatagacctgaaaactaccttctttatggtaaccgagctctttgttttcttcgtactggacagtttagaaatgcactcggtgatggaaagagagccactattctgaagaacacttggccaaagggtcattatcgttattgtgatgctctttctatgctgggggaatatgactgggccctgcaagcaaacataaaagctcaaaaactctgtaaaaatgaccctgagggaatcaaggatctaattcagcagcatgtaaagttacaaaaacaaatagaagacctacaaggtcgaacagcaaataaggatccaattaaagccttttatgaaaacagggcctacacacctaggagtttatcagcacctatatttactacttcacttaactttgtggagaaggaaagagatttcagaaaaattaatcacgaaatggccaacggtggtaatcagaatctaaaggtggcggatgaggcgttgaaggtagatgattgtgactgtcatcctgaattttcaccaccatcaagtcagcctccaaaacataaaggaaaacaaaaatctcgaaacaatgaatcagaaaagttcagttctagttcaccattgactttaccagcagatttgaagaacatcttggagaaacagttttctaaatcttccagagctgcacaccaggattttgctaatataatgaaaatgctgagaagcttaattcaagatggctatatggccttattggagcagcgttgccgcagcgctgcacaggcctttacagagttgctgaacggtttagatcctcaaaaaataaagcaattgaacctggccatgattaactatgttttggtcgtctatggacttgccatttctctccttggaataggacagcctgaggaattatctgaagccgaaaaccagtttaagaggattattgaacactaccccagtgagggccttgattgcttggcctactgtggaattggaaaagtgtatttgaaaaaaaacagatttctagaagctctcaatcactttgagaaagcaagaaccttgatttatcgtcttcctggagtgttaacttggcccacgagtaatgtgattattgaagagtctcagccacaaaaaataaagatgctgttagagaaatttgttgaagaatgcaagttccctccagtgccagatgccatttgttgctatcagaagtgccatggatattctaagatccagatatacataactgatccagactttaagggttttatacgcatcagctgttgccagtactgtaaaatagaatttcacatgaattgctggaagaagttaaaaactacaacctttaatgataaaattgacaaggattttctacaaggaatatgtcttacccctgactgtgaaggtgtcatttctaagattatcatcttcagcagtggtggtgaagttaaatgtgaacctagagaaactaagactgaaagaagacaaaaaattgaagagaaagatccaaaaaaaagaagcaaaaaagttagcacaagaaagaatggaggaggacttaagagaaagtaatccacccaaaaatgaagagcagaaagaaactgtagacaatgttcagcgttgtcagttccttgatgacagaattctacagtgtataaagcagtatgctgacaagattaaatccggcatacagaatacagccatgcttctcaaagaattgctttcttggaaagttttgagcacagaagactatacaacctgtttttctagcagaaattttctaaatgaagcagtggactatgttattcgccacttgattcaagaaaataacagagtaaagacaagaatatttctgcatgttttgagtgagcttaaagaagtggagcccaaattagccgcctggatccaaaaacttaatagctttggcttagatgccacaggaactttcttttctcgttatggagcatctcttaaactgcttgattttagtatcatgactttcctctggaatgagaaatatggtcacaaactagactctatagaaggaaagcaacttgattatttctctgagccagcatcattgaaggaagcccgttgtttaatatggctgctagaagaacacagagacaagttcccagcattgcatagtgctttagatgaattctttgatataatggacagccgctgtactgtgttaaggaaacaagatagtggtgaagcaccgtttagttcaaccaaggtgaaaaacaaaagcaagaaaaagaagccaaaggattcaaagcctatgttagttgggtctggaacaacttcagtaacttcaaataatgagatcatcacttcaagtgaagaccatagcaatcgaaattcagattctgcaggcccatttgcagtgcctgaccatcttcggcaagatgtagaagaattcgaagctctctatgaccaacacagtaacgaatatgttgtccgcaataagaagctatgggacatgaacccaaaacaaaaatgttcaactctatatgattacttctctcagtttttggaggaacatggtcccttggacatgagtaacaagatgttctctgcagaatatgagtttttcccagaagaaactcgacagatactagaaaaagcaggaggtttaaaaccttttctcttgggatgccctcgttttgttgtgattgacaactgtattgcactgaagaaggttgcatcacggctcaagaaaaaaaggaagaagaaaaacattaaaacaaaagtagaagaaatttcaaaagcaggggagtatgtacgagttaaactacaactgaatccagctgctagggaatttaaaccagatgtaaagtctaaaccagtgtcagattcatcttcagcaccagcttttgaaaatgtgaaacccaaacctgtgtctgcaaattctcccaagccagcttgtgaagatgtgaaggccaaaccagtatccgacaattcttctagacaagtttctgaggatgggcaacccaaaggggtctcttctaattctcctaaaccaggctctgaggatgcaaattacaagcgagtctcctgtaattcccccaaaccggttcttgaggatgtgaaaccaacttattgggctcaatcccatttggtcacaggatactgtacgtatcttcctttccagagatttgatatcacccagacaccgccagcatacataaacgtgttaccaggtttgccccagtacaccagcatatatacacccttggccagcctttctcctgaatatcagctaccaagatcagtaccagtggtgccgtcttttgtagccaatgacagagcagataaaaatgctgctgcctattttgagggtcatcatttgaatgctgagaatgttgctggtcaccagattgcctctgaaacacagatccttgagggctctttgggaatatctgtaaagtcacactgcagcacaggtgatgctcatacagtcctgagtgagtctaacagaaatgatgagcactgtggaaattctaacaacaaatgtgaagtaattccagaaagcaccagtgcagtaacaaacattccacacgtgcagatggttgccatacaggtatcttggaacataatacaccaagaagtcaatactgagccatataatccttttgaggaacgacaaggggaaatttcacggattgaaaaggagcaccaagtattacaagaccaacttcaagaagtgtatgaaaattatgagcagataaaacttaagggcttagaagagaccagggacctggaagagaagttgaaaaggcacttagaagaaaacaagatctcaaagacggaattagattggttccttcaagatttggaaagagaaattaaaaaatggcaacaggaaaaaaaagaaatccaagaaagactaaaatcactgaagaagaaaattaaaaaggtttcaaatgccagtgaaatgtatacccagaaaaatgatggaaaggaaaaggaacatgaattacatctggatcagtcccttgaaatcagcaacacacttacaaatgagaaaatgaaaatagaagagtatataaagaaagggaaagaggattatgaagagagtcatcagagagctgtggctgcagaggtatccgtacttgaaaactggaaggagagtgaagtgtataagctacagatcatggagtcacaagcagaagcctttctgaagaagctggggctgattagccgtgatcctgcagcatatcctgacatggagtctgatatacgttcatgggaattgtttctttctaatgttacaaaagaaattgagaaagcaaagtctcagtttgaagaacaaattaaggcaattaaaaatggttctcggctcagtgaactttctaaagtgcagatttctgagctttcatttcctgcctgtaacacggttcatcccgagttactccctgagtcttcaggccacgatggccaagggcttgtgacttctgcaagcgacgtgactggaaaccacgcagcacttcacagggatcctagtgtgttctctgctggtgattccccaggggaggctccttctgcgctgttgccagggccaccccctggtcagcctgaagccactcagctgacagggccaaaacgggctggccaggcagctctgtcagaacgaagccctgtggctgatcggaagcagcctgttcctccaggacgtgctgcgcgttcaagccagtctccaaaaaagccgttcaatagtattattgagcacctgtcagtggtattcccatgttacaacagcactgagcttgctggttttattaaaaaagtgcgaagcaaaaacaagaactcactctcaggattgagtattgatgaaattgtccaaagagtgacagaacacattctagatgaacagaaaaagaaaaagccaaacccaggaaaggacaagaggacttatgagcccagctctgccacccccgtgaccaggtcctcccagggctcaccctcggtggttgttgcaccatcacccaaaaccaaggggcagaaagcagaagatgtccctgtgaggattgcactgggtgcaagttcctgtgaaatatgccacgaggtgttcaaatcaaaaaacgtgcgtgtgctcaaatgtgggcacaagtatcacaaagggtgctttaagcagtggcttaaagggcagagcgcttgcccggcctgccagggtcgtgatctcctgacagaagagtcaccttctggaagaggctggcccagtcagaatcaggagctgccttcctgctcttctaggtagtcacacttcactaaagtgtcatccaccagtgtgttgaatccgaagaatgacaattttctaccactggtgtaaaaaacaaacatttgaagacccttgtgcattgtgtgtcacaaagctaaatacatggaaatcgttaatatcgctgatattaagtaatttccccactctgagtgaatactttgatgattgccaacagtggctaataaaatgacggctaccacactcatgggtcactggggctgcgcagggctctttgaggtgggtggcttcttttggaaagtactatgaacgtctcgaagcagtattctagtgataagaattcttaacatagccaagcgccccacgtttgttccccacgtttgttccccttttctgtttgaaaaacctgttctggtagctccacaagagagatgatactgactttttaaattttttacaagagtctgtattcctgatatgcctatatttttcctcaaagattctgcattttaaggatgggcataagcaaactatattttaataatttatagttaatgttaaaatattggctgatttagaccaaaagattcaaatctcctctttgtgaaatcccatctgcatttgattttttattattttatgttcccccgttagattgttttaagtgtttgcttttcatcttttatagatgtaatctgattttcaaaaatcattaacactttttaattagtatcgactaagactttttccccctggaatcgaggctgtgtgtccgtcatcccagcccccggttggagcctgctctttgaactccgctgccttccttagcagcttctgtcctcttctgtgagtcagtcagcgagtgcttgggatccgcatccagccgtgctgagcacacaacaggctgtgtgtggaaatggccaccaccattctccttccccaccccaccacaaaaagagaagctgtgtctttagacaaccctgaggtatctgtgttacaatcgttctgtgtttgatatttgtgtaaagtatgcatgcagtcttgtactgtgacctaagaacaaaactgtaactgcattagaaaccatgaaaaaattagatattgttttgtgacttttagacagtggtaaatatagaaccatgaattctggtcacattccatttctctccaacatgaaggatcaaaaaatgtttttcaatgtgttctttgttccactggaaacttagagtcatgagtttatgagctgatttggtcaccttcctctgcctttgttcactgtgagttctgatgtcttagtgacttagttcttagaagctcacgccttagtttgaaacagattctccacggtggtccccaaaacactgtctgcatatccataagaattgagcgctatgggtgttaacgtgcatgaggatcagtttgcagcagcaagtacaaaaggagaagaggaacatccgttgaatgagtgtgttttgtacataacttcagatacttgtgaacatgccttatatttgtccaacaactgtcagaataaagaacattctaaaatgagaaaaaaaaaaaaaaaaaaaaaaaaaaaaaaaaaaaaaaccaacgccattgctcagctaacggccacgcttcaacctggtgatgccccggcatactttccagcatagagcgcggaataagcgcaatngcctgctctgcgatcacacaggccaacattccgtgataagactccatctcatggatagttcccnngagcgcaccgtcagcatgaaaccagctctcgaagtgcgacgatccgacaattngcgccgnaggccataaatgtacttgcataacctgactggcacggnttactggcccatatccttgggcgtgaccatcataanttccttccgtattacccgtattccctcgatgg

SEQ ID NO: 371562 - DNA, 8885 bp, Homo sapiens
  misc_feature (8654)..(8654): n is a, c, g, or t
  misc_feature (8718)..(8719): n is a, c, g, or t
  misc_feature (8772)..(8772): n is a, c, g, or t
  misc_feature (8779)..(8779): n is a, c, g, or t
  misc_feature (8817)..(8817): n is a, c, g, or t
  misc_feature (8853)..(8853): n is a, c, g, or t
ctgaactagttgccagtgatcttgaaacgtgacagtaaccaagagataaataggtgacaatgacaggaaaattagatgtagtaaaagagagtgtttgagagcagaagctatggcaactaaagactggatttgaatccttcctagcttggtgacatgagcaaattacttgatttaagtgagcattttcccatctgtacagtggagataacgataattgtgcctgctaagaagaattgctgtgaagattagtgaaataatgcatgtaaaacatttggtacagtatgtgacacatagtacaaatagtttgctaggaagattgttattattcttcacttgtgatattgtgaagttttcatacagcaaattggacatcatgagatggattgattaaataaatagatttgaacttcaaggactggtagtgttcttgctttggaaagaagaaacttggtttatcctaataatagtaggataataatggtgaagtgataggtacaagtaatagtgtttatgatgcgctggtgatgataggaaaagaaagccattatatgggcaagagctagaagtaataaaatggtgcatttttcagtgatgtttggcctatgtagctattctctgataactataaaaatccttattattgaagattcttcaggaaaaaaaaacccttagtctgaaactttagcaccaatcccccttgccccccattgaaatacgtatttttaaaacatggcttttgataatgtgagggttttttcctttttgcgatttagcagtgctgattgtgtattgcagtagttgtgagagcattagaagcagcagtcgataggaggatggaaggtctggatgccgccttggggagttaggagattggcagacttaccctgtaccactctagccctactcctttgcccaagacagaaacacactgagatggataggagaatatgagcagttgataggaaagttctcagtggagtcaggatttaggttaggccaggagattgagaatataacagtttgtgtatgatgaaatggcatatttcacagaatgcagtaaaagcaggtagggtacaagtgcagcaacaggaagatgtcttttcttcattcagcaaacacttatttgagagcttaccatgtgctaggcacatacaaagataaataagatgcccttgatgatcctctatttaaaggagacatgtacaattcacgtgcttctgagataaatttgaagaaactacaacatcttgagttgatggaagatattgtggatttggcaaagaaagttgctaatgattcattccttattggaggcttattgagaattggttgtaaaatagaaaataaaatcttggcaatggaagaagctctgaattggataaaatatgcaggcgatgtaacaattctaactaaattaggatcaattgacaattgttggcctatgttaagtattttctttactgaatacaagtaccacataactaaaattgtaatggaagactgcaatttgcttgaagaacttaaaactcaaagttgtatggattgtatagaggaaggagaactaatgaaaatgaaaggaaatgaagagttttccaaagaaagatttgatatagctattatctattacaccagagccattgaatatagacctgaaaactaccttctttatggtaaccgagctctttgttttcttcgtactggacagtttagaaatgcactcggtgatggaaagagagccactattctgaagaacacttggccaaagggtcattatcgttattgtgatgctctttctatgctgggggaatatgactgggccctgcaagcaaacataaaagctcaaaaactctgtaaaaatgaccctgagggaatcaaggatctaattcagcagcatgtaaagttacaaaaacaaatagaagacctacaaggtcgaacagcaaataaggatccaattaaagccttttatgaaaacagggcctacacacctaggagtttatcagcacctatatttactacttcacttaactttgtggagaaggaaagagatttcagaaaaattaatcacgaaatggccaacggtggtaatcagaatctaaaggtggcggatgaggcgttgaaggtagatgattgtgactgtcatcctgaattttcaccaccatcaagtcagcctccaaaacataaaggaaaacaaaaatctcgaaacaatgaatcagaaaagttcagttctagttcaccattgactttaccagcagatttgaagaacatcttggagaaacagttttctaaatcttccagagctgcacaccaggattttgctaatataatgaaaatgctgagaagcttaattcaagatggctatatggccttattggagcagcgttgccgcagcgctgcacaggcctttacagagttgctgaacggtttagatcctcaaaaaataaagcaattgaacctggccatgattaactatgttttggtcgtctatggacttgccatttctctccttggaataggacagcctgaggaattatctgaagccgaaaaccagtttaagaggattattgaacactaccccagtgagggccttgattgcttggcctactgtggaattggaaaagtgtatttgaaaaaaaacagatttctagaagctctcaatcactttgagaaagcaagaaccttgatttatcgtcttcctggagtgttaacttggcccacgagtaatgtgattattgaagagtctcagccacaaaaaataaagatgctgttagagaaatttgttgaagaatgcaagttccctccagtgccagatgccatttgttgctatcagaagtgccatggatattctaagatccagatatacataactgatccagactttaagggttttatacgcatcagctgttgccagtactgtaaaatagaatttcacatgaattgctggaagaagttaaaaactacaacctttaatgataaaattgacaaggattttctacaaggaatatgtcttacccctgactgtgaaggtgtcatttctaagattatcatcttcagcagtggtggtgaagttaaatgtgaatttgaacacaaggtcataaaagaaaaggttcctccaagacctattctgaaacagaaatgttctagcctagagaaactaagactgaaagaagacaaaaaattgaagagaaagatccaaaaaaaagaagcaaaaaagttagcacaagaaagaatggaggaggacttaagagaaagtaatccacccaaaaatgaagagcagaaagaaactgtagacaatgttcagcgttgtcagttccttgatgacagaattctacagtgtataaagcagtatgctgacaagattaaatccggcatacagaatacagccatgcttctcaaagaattgctttcttggaaagttttgagcacagaagactatacaacctgtttttctagcagaaattttctaaatgaagcagtggactatgttattcgccacttgattcaagaaaataacagagtaaagacaagaatatttctgcatgttttgagtgagcttaaagaagtggagcccaaattagccgcctggatccaaaaacttaatagctttggcttagatgccacaggaactttcttttctcgttatggagcatctcttaaactgcttgattttagtatcatgactttcctctggaatgagaaatatggtcacaaactagactctatagaaggaaagcaacttgattatttctctgagccagcatcattgaaggaagcccgttgtttaatatggctgctagaagaacacagagacaagttcccagcattgcatagtgctttagatgaattctttgatataatggatattttcacagcatcatgggaaagattgcatgttacactgacagaatctattaacagccgctgtactgtgttaaggaaacaagatagtggtgaagcaccgtttagttcaaccaaggtgaaaaacaaaagcaagaaaaagaagccaaaggattcaaagcctatgttagttgggtctggaacaacttcagtaacttcaaataatgagatcatcacttcaagtgaagaccatagcaatcgaaattcagattctgcaggcccatttgcagtgcctgaccatcttcggcaagatgtagaagaattcgaagctctctatgaccaacacagtaacgaatatgttgtccgcaataagaagctatgggacatgaacccaaaacaaaaatgttcaactctatatgattacttctctcagtttttggaggaacatggtcccttggacatgagtaacaagatgttctctgcagaatatgagtttttcccagaagaaactcgacagatactagaaaaagcaggaggtttaaaaccttttctcttgggatgccctcgttttgttgtgattgacaactgtattgcactgaagaaggttgcatcacggctcaagaaaaaaaggaagaagaaaaacattaaaacaaaagtagaagaaatttcaaaagcaggggagtatgtacgagttaaactacaactgaatccagctgctagggaatttaaaccagatgtaaagtctaaaccagtgtcagattcatcttcagcaccagcttttgaaaatgtgaaacccaaacctgtgtctgcaaattctcccaagccagcttgtgaagatgtgaaggccaaaccagtatccgacaattcttctagacaagtttctgaggatgggcaacccaaaggggtctcttctaattctcctaaaccaggctctgaggatgcaaattacaagcgagtctcctgtaattcccccaaaccggttcttgaggatgtgaaaccaacttattgggctcaatcccatttggtcacaggatactgtacgtatcttcctttccagagatttgatatcacccagacaccgccagcatacataaacgtgttaccaggtttgccccagtacaccagcatatatacacccttggccagcctttctcctgaatatcagctaccaagatcagtaccagtggtgccgtcttttgtagccaatgacagagcagataaaaatgctgctgcctattttgagggtcatcatttgaatgctgagaatgttgctggtcaccagattgcctctgaaacacagatccttgagggctctttgggaatatctgtaaagtcacactgcagcacaggtgatgctcatacagtcctgagtgagtctaacagaaatgatgagcactgtggaaattctaacaacaaatgtgaagtaattccagaaagcaccagtgcagtaacaaacattccacacgtgcagatggttgccatacaggtatcttggaacataatacaccaagaagtcaatactgagccatataatccttttgaggaacgacaaggggaaatttcacggattgaaaaggagcaccaagtattacaagaccaacttcaagaagtgtatgaaaattatgagcagataaaacttaagggcttagaagagaccagggacctggaagagaagttgaaaaggcacttagaagaaaacaagatctcaaagacggaattagattggttccttcaagatttggaaagagaaattaaaaaatggcaacaggaaaaaaaagaaatccaagaaagactaaaatcactgaagaagaaaattaaaaaggtttcaaatgccagtgaaatgtatacccagaaaaatgatggaaaggaaaaggaacatgaattacatctggatcagtcccttgaaatcagcaacacacttacaaatgagaaaatgaaaatagaagagtatataaagaaagggaaagaggattatgaagagagtcatcagagagctgtggctgcagaggtatccgtacttgaaaactggaaggagagtgaagtgtataagctacagatcatggagtcacaagcagaagcctttctgaagaagctggggctgattagccgtgatcctgcagcatatcctgacatggagtctgatatacgttcatgggaattgtttctttctaatgttacaaaagaaattgagaaagcaaagtctcagtttgaagaacaaattaaggcaattaaaaatggttctcggctcagtgaactttctaaagtgcagatttctgagctttcatttcctgcctgtaacacggttcatcccgagttactccctgagtcttcaggccacgatggccaagggcttgtgacttctgcaagcgacgtgactggaaaccacgcagcacttcacagggatcctagtgtgttctctgctggtgattccccaggggaggctccttctgcgctgttgccagggccaccccctggtcagcctgaagccactcagctgacagggccaaaacgggctggccaggcagctctgtcagaacgaagccctgtggctgatcggaagcagcctgttcctccaggacgtgctgcgcgttcaagccagtctccaaaaaagccgttcaatagtattattgagcacctgtcagtggtattcccatgttacaacagcactgagcttgctggttttattaaaaaagtgcgaagcaaaaacaagaactcactctcaggattgagtattgatgaaattgtccaaagagtgacagaacacattctagatgaacagaaaaagaaaaagccaaacccaggaaaggacaagaggacttatgagcccagctctgccacccccgtgaccaggtcctcccagggctcaccctcggtggttgttgcaccatcacccaaaaccaaggggcagaaagcagaagatgtccctgtgaggattgcactgggtgcaagttcctgtgaaatatgccacgaggtgttcaaatcaaaaaacgtgcgtgtgctcaaatgtgggcacaagtatcacaaagggtgctttaagcagtggcttaaagggcagagcgcttgcccggcctgccagggtcgtgatctcctgacagaagagtcaccttctggaagaggctggcccagtcagaatcaggagctgccttcctgctcttctaggtagtcacacttcactaaagtgtcatccaccagtgtgttgaatccgaagaatgacaattttctaccactggtgtaaaaaacaaacatttgaagacccttgtgcattgtgtgtcacaaagctaaatacatggaaatcgttaatatcgctgatattaagtaatttccccactctgagtgaatactttgatgattgccaacagtggctaataaaatgacggctaccacactcatgggtcactggggctgcgcagggctctttgaggtgggtggcttcttttggaaagtactatgaacgtctcgaagcagtattctagtgataagaattcttaacatagccaagcgccccacgtttgttccccacgtttgttccccttttctgtttgaaaaacctgttctggtagctccacaagagagatgatactgactttttaaattttttacaagagtctgtattcctgatatgcctatatttttcctcaaagattctgcattttaaggatgggcataagcaaactatattttaataatttatagttaatgttaaaatattggctgatttagaccaaaagattcaaatctcctctttgtgaaatcccatctgcatttgattttttattattttatgttcccccgttagattgttttaagtgtttgcttttcatcttttatagatgtaatctgattttcaaaaatcattaacactttttaattagtatcgactaagactttttccccctggaatcgaggctgtgtgtccgtcatcccagcccccggttggagcctgctctttgaactccgctgccttccttagcagcttctgtcctcttctgtgagtcagtcagcgagtgcttgggatccgcatccagccgtgctgagcacacaacaggctgtgtgtggaaatggccaccaccattctccttccccaccccaccacaaaaagagaagctgtgtctttagacaaccctgaggtatctgtgttacaatcgttctgtgtttgatatttgtgtaaagtatgcatgcagtcttgtactgtgacctaagaacaaaactgtaactgcattagaaaccatgaaaaaattagatattgttttgtgacttttagacagtggtaaatatagaaccatgaattctggtcacattccatttctctccaacatgaaggatcaaaaaatgtttttcaatgtgttctttgttccactggaaacttagagtcatgagtttatgagctgatttggtcaccttcctctgcctttgttcactgtgagttctgatgtcttagtgacttagttcttagaagctcacgccttagtttgaaacagattctccacggtggtccccaaaacactgtctgcatatccataagaattgagcgctatgggtgttaacgtgcatgaggatcagtttgcagcagcaagtacaaaaggagaagaggaacatccgttgaatgagtgtgttttgtacataacttcagatacttgtgaacatgccttatatttgtccaacaactgtcagaataaagaacattctaaaatgagaaaaaaaaaaaaaaaaaaaaaaaaaaaaaaaaaaaaaaccaacgccattgctcagctaacggccacgcttcaacctggtgatgccccggcatactttccagcatagagcgcggaataagcgcaatngcctgctctgcgatcacacaggccaacattccgtgataagactccatctcatggatagttcccnngagcgcaccgtcagcatgaaaccagctctcgaagtgcgacgatccgacaattngcgccgnaggccataaatgtacttgcataacctgactggcacggnttactggcccatatccttgggcgtgaccatcataanttccttccgtattacccgtattccctcgatgg

SEQ ID NO: 371563 - DNA, 7248 bp, Homo sapiens
  misc_feature (7017)..(7017): n is a, c, g, or t
  misc_feature (7081)..(7082): n is a, c, g, or t
  misc_feature (7135)..(7135): n is a, c, g, or t
  misc_feature (7142)..(7142): n is a, c, g, or t
  misc_feature (7180)..(7180): n is a, c, g, or t
  misc_feature (7216)..(7216): n is a, c, g, or t
cttcaacgccgccacccgctccctcccgccgtcggctgacgtggagggccggaggtggcggcggcggcggcggcggctgctgctgctgctgctgcccgcgtccgaggctcgcgggcggcgggcccggaaatgcactcggtgatggaaagagagccactattctgaagaacacttggccaaagggtcattatcgttattgtgatgctctttctatgctgggggaatatgactgggccctgcaagcaaacataaaagctcaaaaactctgtaaaaatgaccctgagggaatcaaggatctaattcagcagcatgtaaagttacaaaaacaaatagaagacctacaaggtcgaacagcaaataaggatccaattaaagccttttatgaaaacagggcctacacacctaggagtttatcagcacctatatttactacttcacttaactttgtggagaaggaaagagatttcagaaaaattaatcacgaaatggccaacggtggtaatcagaatctaaaggtggcggatgaggcgttgaaggtagatgattgtgactgtcatcctgaattttcaccaccatcaagtcagcctccaaaacataaaggaaaacaaaaatctcgaaacaatgaatcagaaaagttcagttctagttcaccattgactttaccagcagatttgaagaacatcttggagaaacagttttctaaatcttccagagctgcacaccaggattttgctaatataatgaaaatgctgagaagcttaattcaagatggctatatggccttattggagcagcgttgccgcagcgctgcacaggcctttacagagttgctgaacggtttagatcctcaaaaaataaagcaattgaacctggccatgattaactatgttttggtcgtctatggacttgccatttctctccttggaataggacagcctgaggaattatctgaagccgaaaaccagtttaagaggattattgaacactaccccagtgagggccttgattgcttggcctactgtggaattggaaaagtgtatttgaaaaaaaacagatttctagaagctctcaatcactttgagaaagcaagaaccttgatttatcgtcttcctggagtgttaacttggcccacgagtaatgtgattattgaagagtctcagccacaaaaaataaagatgctgttagagaaatttgttgaagaatgcaagttccctccagtgccagatgccatttgttgctatcagaagtgccatggatattctaagatccagatatacataactgatccagactttaagggttttatacgcatcagctgttgccagtactgtaaaatagaatttcacatgaattgctggaagaagttaaaaactacaacctttaatgataaaattgacaaggattttctacaaggaatatgtcttacccctgactgtgaaggtgtcatttctaagattatcatcttcagcagtggtggtgaagttaaatgtgaatttgaacacaaggtcataaaagaaaaggttcctccaagacctattctgaaacagaaatgttctagcctagagaaactaagactgaaagaagacaaaaaattgaagagaaagatccaaaaaaaagaagcaaaaaagttagcacaagaaagaatggaggaggacttaagagaaagtaatccacccaaaaatgaagagcagaaagaaactgtagacaatgttcagcgttgtcagttccttgatgacagaattctacagtgtataaagcagtatgctgacaagattaaatccggcatacagaatacagccatgcttctcaaagaattgctttcttggaaagttttgagcacagaagactatacaacctgtttttctagcagaaattttctaaatgaagcagtggactatgttattcgccacttgattcaagaaaataacagagtaaagacaagaatatttctgcatgttttgagtgagcttaaagaagtggagcccaaattagccgcctggatccaaaaacttaatagctttggcttagatgccacaggaactttcttttctcgttatggagcatctcttaaactgcttgattttagtatcatgactttcctctggaatgagaaatatggtcacaaactagactctatagaaggaaagcaacttgattatttctctgagccagcatcattgaaggaagcccgttgtttaatatggctgctagaagaacacagagacaagttcccagcattgcatagtgctttagatgaattctttgatataatggacagccgctgtactgtgttaaggaaacaagatagtggtgaagcaccgtttagttcaaccaaggtgaaaaacaaaagcaagaaaaagaagccaaaggattcaaagcctatgttagttgggtctggaacaacttcagtaacttcaaataatgagatcatcacttcaagtgaagaccatagcaatcgaaattcagattctgcaggcccatttgcagtgcctgaccatcttcggcaagatgtagaagaattcgaagctctctatgaccaacacagtaacgaatatgttgtccgcaataagaagctatgggacatgaacccaaaacaaaaatgttcaactctatatgattacttctctcagtttttggaggaacatggtcccttggacatgagtaacaagatgttctctgcagaatatgagtttttcccagaagaaactcgacagatactagaaaaagcaggaggtttaaaaccttttctcttgggatgccctcgttttgttgtgattgacaactgtattgcactgaagaaggttgcatcacggctcaagaaaaaaaggaagaagaaaaacattaaaacaaaagtagaagaaatttcaaaagcaggggagtatgtacgagttaaactacaactgaatccagctgctagggaatttaaaccagatgtaaagtctaaaccagtgtcagattcatcttcagcaccagcttttgaaaatgtgaaacccaaacctgtgtctgcaaattctcccaagccagcttgtgaagatgtgaaggccaaaccagtatccgacaattcttctagacaagtttctgaggatgggcaacccaaaggggtctcttctaattctcctaaaccaggctctgaggatgcaaattacaagcgagtctcctgtaattcccccaaaccggttcttgaggatgtgaaaccaacttattgggctcaatcccatttggtcacaggatactgtacgtatcttcctttccagagatttgatatcacccagacaccgccagcatacataaacgtgttaccaggtttgccccagtacaccagcatatatacacccttggccagcctttctcctgaatatcagctaccaagatcagtaccagtggtgccgtcttttgtagccaatgacagagcagataaaaatgctgctgcctattttgagggtcatcatttgaatgctgagaatgttgctggtcaccagattgcctctgaaacacagatccttgagggctctttgggaatatctgtaaagtcacactgcagcacaggtgatgctcatacagtcctgagtgagtctaacagaaatgatgagcactgtggaaattctaacaacaaatgtgaagtaattccagaaagcaccagtgcagtaacaaacattccacacgtgcagatggttgccatacaggtatcttggaacataatacaccaagaagtcaatactgagccatataatccttttgaggaacgacaaggggaaatttcacggattgaaaaggagcaccaagtattacaagaccaacttcaagaagtgtatgaaaattatgagcagataaaacttaagggcttagaagagaccagggacctggaagagaagttgaaaaggcacttagaagaaaacaagatctcaaagacggaattagattggttccttcaagatttggaaagagaaattaaaaaatggcaacaggaaaaaaaagaaatccaagaaagactaaaatcactgaagaagaaaattaaaaaggtttcaaatgccagtgaaatgtatacccagaaaaatgatggaaaggaaaaggaacatgaattacatctggatcagtcccttgaaatcagcaacacacttacaaatgagaaaatgaaaatagaagagtatataaagaaagggaaagaggattatgaagagagtcatcagagagctgtggctgcagaggtatccgtacttgaaaactggaaggagagtgaagtgtataagctacagatcatggagtcacaagcagaagcctttctgaagaagctggggctgattagccgtgatcctgcagcatatcctgacatggagtctgatatacgttcatgggaattgtttctttctaatgttacaaaagaaattgagaaagcaaagtctcagtttgaagaacaaattaaggcaattaaaaatggttctcggctcagtgaactttctaaagtgcagatttctgagctttcatttcctgcctgtaacacggttcatcccgagttactccctgagtcttcaggccacgatggccaagggcttgtgacttctgcaagcgacgtgactggaaaccacgcagcacttcacagggatcctagtgtgttctctgctggtgattccccaggggaggctccttctgcgctgttgccagggccaccccctggtcagcctgaagccactcagctgacagggccaaaacgggctggccaggcagctctgtcagaacgaagccctgtggctgatcggaagcagcctgttcctccaggacgtgctgcgcgttcaagccagtctccaaaaaagccgttcaatagtattattgagcacctgtcagtggtattcccatgttacaacagcactgagcttgctggttttattaaaaaagtgcgaagcaaaaacaagaactcactctcaggattgagtattgatgaaattgtccaaagagtgacagaacacattctagatgaacagaaaaagaaaaagccaaacccaggaaaggacaagaggacttatgagcccagctctgccacccccgtgaccaggtcctcccagggctcaccctcggtggttgttgcaccatcacccaaaaccaaggggcagaaagcagaagatgtccctgtgaggattgcactgggtgcaagttcctgtgaaatatgccacgaggtgttcaaatcaaaaaacgtgcgtgtgctcaaatgtgggcacaagtatcacaaagggtgctttaagcagtggcttaaagggcagagcgcttgcccggcctgccagggtcgtgatctcctgacagaagagtcaccttctggaagaggctggcccagtcagaatcaggagctgccttcctgctcttctaggtagtcacacttcactaaagtgtcatccaccagtgtgttgaatccgaagaatgacaattttctaccactggtgtaaaaaacaaacatttgaagacccttgtgcattgtgtgtcacaaagctaaatacatggaaatcgttaatatcgctgatattaagtaatttccccactctgagtgaatactttgatgattgccaacagtggctaataaaatgacggctaccacactcatgggtcactggggctgcgcagggctctttgaggtgggtggcttcttttggaaagtactatgaacgtctcgaagcagtattctagtgataagaattcttaacatagccaagcgccccacgtttgttccccacgtttgttccccttttctgtttgaaaaacctgttctggtagctccacaagagagatgatactgactttttaaattttttacaagagtctgtattcctgatatgcctatatttttcctcaaagattctgcattttaaggatgggcataagcaaactatattttaataatttatagttaatgttaaaatattggctgatttagaccaaaagattcaaatctcctctttgtgaaatcccatctgcatttgattttttattattttatgttcccccgttagattgttttaagtgtttgcttttcatcttttatagatgtaatctgattttcaaaaatcattaacactttttaattagtatcgactaagactttttccccctggaatcgaggctgtgtgtccgtcatcccagcccccggttggagcctgctctttgaactccgctgccttccttagcagcttctgtcctcttctgtgagtcagtcagcgagtgcttgggatccgcatccagccgtgctgagcacacaacaggctgtgtgtggaaatggccaccaccattctccttccccaccccaccacaaaaagagaagctgtgtctttagacaaccctgaggtatctgtgttacaatcgttctgtgtttgatatttgtgtaaagtatgcatgcagtcttgtactgtgacctaagaacaaaactgtaactgcattagaaaccatgaaaaaattagatattgttttgtgacttttagacagtggtaaatatagaaccatgaattctggtcacattccatttctctccaacatgaaggatcaaaaaatgtttttcaatgtgttctttgttccactggaaacttagagtcatgagtttatgagctgatttggtcaccttcctctgcctttgttcactgtgagttctgatgtcttagtgacttagttcttagaagctcacgccttagtttgaaacagattctccacggtggtccccaaaacactgtctgcatatccataagaattgagcgctatgggtgttaacgtgcatgaggatcagtttgcagcagcaagtacaaaaggagaagaggaacatccgttgaatgagtgtgttttgtacataacttcagatacttgtgaacatgccttatatttgtccaacaactgtcagaataaagaacattctaaaatgagaaaaaaaaaaaaaaaaaaaaaaaaaaaaaaaaaaaaaaccaacgccattgctcagctaacggccacgcttcaacctggtgatgccccggcatactttccagcatagagcgcggaataagcgcaatngcctgctctgcgatcacacaggccaacattccgtgataagactccatctcatggatagttcccnngagcgcaccgtcagcatgaaaccagctctcgaagtgcgacgatccgacaattngcgccgnaggccataaatgtacttgcataacctgactggcacggnttactggcccatatccttgggcgtgaccatcataanttccttccgtattacccgtattccctcgatgg

SEQ ID NO: 371564 - DNA, 7354 bp, Homo sapiens
  misc_feature (7123)..(7123): n is a, c, g, or t
  misc_feature (7187)..(7188): n is a, c, g, or t
  misc_feature (7241)..(7241): n is a, c, g, or t
  misc_feature (7248)..(7248): n is a, c, g, or t
  misc_feature (7286)..(7286): n is a, c, g, or t
  misc_feature (7322)..(7322): n is a, c, g, or t
cttcaacgccgccacccgctccctcccgccgtcggctgacgtggagggccggaggtggcggcggcggcggcggcggctgctgctgctgctgctgcccgcgtccgaggctcgcgggcggcgggcccggaaatgcactcggtgatggaaagagagccactattctgaagaacacttggccaaagccaggagctgcacttagagataacaatgaaaagctgagtgaaggggagacggctggatggaagatctagcctgagcacatcccccatctgtctgcactcttcggagggtcattatcgttattgtgatgctctttctatgctgggggaatatgactgggccctgcaagcaaacataaaagctcaaaaactctgtaaaaatgaccctgagggaatcaaggatctaattcagcagcatgtaaagttacaaaaacaaatagaagacctacaaggtcgaacagcaaataaggatccaattaaagccttttatgaaaacagggcctacacacctaggagtttatcagcacctatatttactacttcacttaactttgtggagaaggaaagagatttcagaaaaattaatcacgaaatggccaacggtggtaatcagaatctaaaggtggcggatgaggcgttgaaggtagatgattgtgactgtcatcctgaattttcaccaccatcaagtcagcctccaaaacataaaggaaaacaaaaatctcgaaacaatgaatcagaaaagttcagttctagttcaccattgactttaccagcagatttgaagaacatcttggagaaacagttttctaaatcttccagagctgcacaccaggattttgctaatataatgaaaatgctgagaagcttaattcaagatggctatatggccttattggagcagcgttgccgcagcgctgcacaggcctttacagagttgctgaacggtttagatcctcaaaaaataaagcaattgaacctggccatgattaactatgttttggtcgtctatggacttgccatttctctccttggaataggacagcctgaggaattatctgaagccgaaaaccagtttaagaggattattgaacactaccccagtgagggccttgattgcttggcctactgtggaattggaaaagtgtatttgaaaaaaaacagatttctagaagctctcaatcactttgagaaagcaagaaccttgatttatcgtcttcctggagtgttaacttggcccacgagtaatgtgattattgaagagtctcagccacaaaaaataaagatgctgttagagaaatttgttgaagaatgcaagttccctccagtgccagatgccatttgttgctatcagaagtgccatggatattctaagatccagatatacataactgatccagactttaagggttttatacgcatcagctgttgccagtactgtaaaatagaatttcacatgaattgctggaagaagttaaaaactacaacctttaatgataaaattgacaaggattttctacaaggaatatgtcttacccctgactgtgaaggtgtcatttctaagattatcatcttcagcagtggtggtgaagttaaatgtgaatttgaacacaaggtcataaaagaaaaggttcctccaagacctattctgaaacagaaatgttctagcctagagaaactaagactgaaagaagacaaaaaattgaagagaaagatccaaaaaaaagaagcaaaaaagttagcacaagaaagaatggaggaggacttaagagaaagtaatccacccaaaaatgaagagcagaaagaaactgtagacaatgttcagcgttgtcagttccttgatgacagaattctacagtgtataaagcagtatgctgacaagattaaatccggcatacagaatacagccatgcttctcaaagaattgctttcttggaaagttttgagcacagaagactatacaacctgtttttctagcagaaattttctaaatgaagcagtggactatgttattcgccacttgattcaagaaaataacagagtaaagacaagaatatttctgcatgttttgagtgagcttaaagaagtggagcccaaattagccgcctggatccaaaaacttaatagctttggcttagatgccacaggaactttcttttctcgttatggagcatctcttaaactgcttgattttagtatcatgactttcctctggaatgagaaatatggtcacaaactagactctatagaaggaaagcaacttgattatttctctgagccagcatcattgaaggaagcccgttgtttaatatggctgctagaagaacacagagacaagttcccagcattgcatagtgctttagatgaattctttgatataatggacagccgctgtactgtgttaaggaaacaagatagtggtgaagcaccgtttagttcaaccaaggtgaaaaacaaaagcaagaaaaagaagccaaaggattcaaagcctatgttagttgggtctggaacaacttcagtaacttcaaataatgagatcatcacttcaagtgaagaccatagcaatcgaaattcagattctgcaggcccatttgcagtgcctgaccatcttcggcaagatgtagaagaattcgaagctctctatgaccaacacagtaacgaatatgttgtccgcaataagaagctatgggacatgaacccaaaacaaaaatgttcaactctatatgattacttctctcagtttttggaggaacatggtcccttggacatgagtaacaagatgttctctgcagaatatgagtttttcccagaagaaactcgacagatactagaaaaagcaggaggtttaaaaccttttctcttgggatgccctcgttttgttgtgattgacaactgtattgcactgaagaaggttgcatcacggctcaagaaaaaaaggaagaagaaaaacattaaaacaaaagtagaagaaatttcaaaagcaggggagtatgtacgagttaaactacaactgaatccagctgctagggaatttaaaccagatgtaaagtctaaaccagtgtcagattcatcttcagcaccagcttttgaaaatgtgaaacccaaacctgtgtctgcaaattctcccaagccagcttgtgaagatgtgaaggccaaaccagtatccgacaattcttctagacaagtttctgaggatgggcaacccaaaggggtctcttctaattctcctaaaccaggctctgaggatgcaaattacaagcgagtctcctgtaattcccccaaaccggttcttgaggatgtgaaaccaacttattgggctcaatcccatttggtcacaggatactgtacgtatcttcctttccagagatttgatatcacccagacaccgccagcatacataaacgtgttaccaggtttgccccagtacaccagcatatatacacccttggccagcctttctcctgaatatcagctaccaagatcagtaccagtggtgccgtcttttgtagccaatgacagagcagataaaaatgctgctgcctattttgagggtcatcatttgaatgctgagaatgttgctggtcaccagattgcctctgaaacacagatccttgagggctctttgggaatatctgtaaagtcacactgcagcacaggtgatgctcatacagtcctgagtgagtctaacagaaatgatgagcactgtggaaattctaacaacaaatgtgaagtaattccagaaagcaccagtgcagtaacaaacattccacacgtgcagatggttgccatacaggtatcttggaacataatacaccaagaagtcaatactgagccatataatccttttgaggaacgacaaggggaaatttcacggattgaaaaggagcaccaagtattacaagaccaacttcaagaagtgtatgaaaattatgagcagataaaacttaagggcttagaagagaccagggacctggaagagaagttgaaaaggcacttagaagaaaacaagatctcaaagacggaattagattggttccttcaagatttggaaagagaaattaaaaaatggcaacaggaaaaaaaagaaatccaagaaagactaaaatcactgaagaagaaaattaaaaaggtttcaaatgccagtgaaatgtatacccagaaaaatgatggaaaggaaaaggaacatgaattacatctggatcagtcccttgaaatcagcaacacacttacaaatgagaaaatgaaaatagaagagtatataaagaaagggaaagaggattatgaagagagtcatcagagagctgtggctgcagaggtatccgtacttgaaaactggaaggagagtgaagtgtataagctacagatcatggagtcacaagcagaagcctttctgaagaagctggggctgattagccgtgatcctgcagcatatcctgacatggagtctgatatacgttcatgggaattgtttctttctaatgttacaaaagaaattgagaaagcaaagtctcagtttgaagaacaaattaaggcaattaaaaatggttctcggctcagtgaactttctaaagtgcagatttctgagctttcatttcctgcctgtaacacggttcatcccgagttactccctgagtcttcaggccacgatggccaagggcttgtgacttctgcaagcgacgtgactggaaaccacgcagcacttcacagggatcctagtgtgttctctgctggtgattccccaggggaggctccttctgcgctgttgccagggccaccccctggtcagcctgaagccactcagctgacagggccaaaacgggctggccaggcagctctgtcagaacgaagccctgtggctgatcggaagcagcctgttcctccaggacgtgctgcgcgttcaagccagtctccaaaaaagccgttcaatagtattattgagcacctgtcagtggtattcccatgttacaacagcactgagcttgctggttttattaaaaaagtgcgaagcaaaaacaagaactcactctcaggattgagtattgatgaaattgtccaaagagtgacagaacacattctagatgaacagaaaaagaaaaagccaaacccaggaaaggacaagaggacttatgagcccagctctgccacccccgtgaccaggtcctcccagggctcaccctcggtggttgttgcaccatcacccaaaaccaaggggcagaaagcagaagatgtccctgtgaggattgcactgggtgcaagttcctgtgaaatatgccacgaggtgttcaaatcaaaaaacgtgcgtgtgctcaaatgtgggcacaagtatcacaaagggtgctttaagcagtggcttaaagggcagagcgcttgcccggcctgccagggtcgtgatctcctgacagaagagtcaccttctggaagaggctggcccagtcagaatcaggagctgccttcctgctcttctaggtagtcacacttcactaaagtgtcatccaccagtgtgttgaatccgaagaatgacaattttctaccactggtgtaaaaaacaaacatttgaagacccttgtgcattgtgtgtcacaaagctaaatacatggaaatcgttaatatcgctgatattaagtaatttccccactctgagtgaatactttgatgattgccaacagtggctaataaaatgacggctaccacactcatgggtcactggggctgcgcagggctctttgaggtgggtggcttcttttggaaagtactatgaacgtctcgaagcagtattctagtgataagaattcttaacatagccaagcgccccacgtttgttccccacgtttgttccccttttctgtttgaaaaacctgttctggtagctccacaagagagatgatactgactttttaaattttttacaagagtctgtattcctgatatgcctatatttttcctcaaagattctgcattttaaggatgggcataagcaaactatattttaataatttatagttaatgttaaaatattggctgatttagaccaaaagattcaaatctcctctttgtgaaatcccatctgcatttgattttttattattttatgttcccccgttagattgttttaagtgtttgcttttcatcttttatagatgtaatctgattttcaaaaatcattaacactttttaattagtatcgactaagactttttccccctggaatcgaggctgtgtgtccgtcatcccagcccccggttggagcctgctctttgaactccgctgccttccttagcagcttctgtcctcttctgtgagtcagtcagcgagtgcttgggatccgcatccagccgtgctgagcacacaacaggctgtgtgtggaaatggccaccaccattctccttccccaccccaccacaaaaagagaagctgtgtctttagacaaccctgaggtatctgtgttacaatcgttctgtgtttgatatttgtgtaaagtatgcatgcagtcttgtactgtgacctaagaacaaaactgtaactgcattagaaaccatgaaaaaattagatattgttttgtgacttttagacagtggtaaatatagaaccatgaattctggtcacattccatttctctccaacatgaaggatcaaaaaatgtttttcaatgtgttctttgttccactggaaacttagagtcatgagtttatgagctgatttggtcaccttcctctgcctttgttcactgtgagttctgatgtcttagtgacttagttcttagaagctcacgccttagtttgaaacagattctccacggtggtccccaaaacactgtctgcatatccataagaattgagcgctatgggtgttaacgtgcatgaggatcagtttgcagcagcaagtacaaaaggagaagaggaacatccgttgaatgagtgtgttttgtacataacttcagatacttgtgaacatgccttatatttgtccaacaactgtcagaataaagaacattctaaaatgagaaaaaaaaaaaaaaaaaaaaaaaaaaaaaaaaaaaaaaccaacgccattgctcagctaacggccacgcttcaacctggtgatgccccggcatactttccagcatagagcgcggaataagcgcaatngcctgctctgcgatcacacaggccaacattccgtgataagactccatctcatggatagttcccnngagcgcaccgtcagcatgaaaccagctctcgaagtgcgacgatccgacaattngcgccgnaggccataaatgtacttgcataacctgactggcacggnttactggcccatatccttgggcgtgaccatcataanttccttccgtattacccgtattccctcgatgg

SEQ ID NO: 371565 - DNA, 6783 bp, Homo sapiens
  misc_feature (6552)..(6552): n is a, c, g, or t
  misc_feature (6616)..(6617): n is a, c, g, or t
  misc_feature (6670)..(6670): n is a, c, g, or t
  misc_feature (6677)..(6677): n is a, c, g, or t
  misc_feature (6715)..(6715): n is a, c, g, or t
  misc_feature (6751)..(6751): n is a, c, g, or t
tttattcataatagccaaaaactttgaaataatccaaatgaccatccacagtagatacatacattatgatataatcgtgtaatgaaataagccactgtgcctggccctattttttctttatatgagtagaacttttattttaaaatgatttttaaaaatgctttttttcttttagttctagttcaccattgactttaccagcagatttgaagaacatcttggagaaacagttttctaaatcttccagagctgcacaccaggattttgctaatataatgaaaatgctgagaagcttaattcaagatggctatatggccttattggagcagcgttgccgcagcgctgcacaggcctttacagagttgctgaacggtttagatcctcaaaaaataaagcaattgaacctggccatgattaactatgttttggtcgtctatggacttgccatttctctccttggaataggacagcctgaggaattatctgaagccgaaaaccagtttaagaggattattgaacactaccccagtgagggccttgattgcttggcctactgtggaattggaaaagtgtatttgaaaaaaaacagatttctagaagctctcaatcactttgagaaagcaagaaccttgatttatcgtcttcctggagtgttaacttggcccacgagtaatgtgattattgaagagtctcagccacaaaaaataaagatgctgttagagaaatttgttgaagaatgcaagttccctccagtgccagatgccatttgttgctatcagaagtgccatggatattctaagatccagatatacataactgatccagactttaagggttttatacgcatcagctgttgccagtactgtaaaatagaatttcacatgaattgctggaagaagttaaaaactacaacctttaatgataaaattgacaaggattttctacaaggaatatgtcttacccctgactgtgaaggtgtcatttctaagattatcatcttcagcagtggtggtgaagttaaatgtgaatttgaacacaaggtcataaaagaaaaggttcctccaagacctattctgaaacagaaatgttctagcctagagaaactaagactgaaagaagacaaaaaattgaagagaaagatccaaaaaaaagaagcaaaaaagttagcacaagaaagaatggaggaggacttaagagaaagtaatccacccaaaaatgaagagcagaaagaaactgtagacaatgttcagcgttgtcagttccttgatgacagaattctacagtgtataaagcagtatgctgacaagattaaatccggcatacagaatacagccatgcttctcaaagaattgctttcttggaaagttttgagcacagaagactatacaacctgtttttctagcagaaattttctaaatgaagcagtggactatgttattcgccacttgattcaagaaaataacagagtaaagacaagaatatttctgcatgttttgagtgagcttaaagaagtggagcccaaattagccgcctggatccaaaaacttaatagctttggcttagatgccacaggaactttcttttctcgttatggagcatctcttaaactgcttgattttagtatcatgactttcctctggaatgagaaatatggtcacaaactagactctatagaaggaaagcaacttgattatttctctgagccagcatcattgaaggaagcccgttgtttaatatggctgctagaagaacacagagacaagttcccagcattgcatagtgctttagatgaattctttgatataatggacagccgctgtactgtgttaaggaaacaagatagtggtgaagcaccgtttagttcaaccaaggtgaaaaacaaaagcaagaaaaagaagccaaaggattcaaagcctatgttagttgggtctggaacaacttcagtaacttcaaataatgagatcatcacttcaagtgaagaccatagcaatcgaaattcagattctgcaggcccatttgcagtgcctgaccatcttcggcaagatgtagaagaattcgaagctctctatgaccaacacagtaacgaatatgttgtccgcaataagaagctatgggacatgaacccaaaacaaaaatgttcaactctatatgattacttctctcagtttttggaggaacatggtcccttggacatgagtaacaagatgttctctgcagaatatgagtttttcccagaagaaactcgacagatactagaaaaagcaggaggtttaaaaccttttctcttgggatgccctcgttttgttgtgattgacaactgtattgcactgaagaaggttgcatcacggctcaagaaaaaaaggaagaagaaaaacattaaaacaaaagtagaagaaatttcaaaagcaggggagtatgtacgagttaaactacaactgaatccagctgctagggaatttaaaccagatgtaaagtctaaaccagtgtcagattcatcttcagcaccagcttttgaaaatgtgaaacccaaacctgtgtctgcaaattctcccaagccagcttgtgaagatgtgaaggccaaaccagtatccgacaattcttctagacaagtttctgaggatgggcaacccaaaggggtctcttctaattctcctaaaccaggctctgaggatgcaaattacaagcgagtctcctgtaattcccccaaaccggttcttgaggatgtgaaaccaacttattgggctcaatcccatttggtcacaggatactgtacgtatcttcctttccagagatttgatatcacccagacaccgccagcatacataaacgtgttaccaggtttgccccagtacaccagcatatatacacccttggccagcctttctcctgaatatcagctaccaagatcagtaccagtggtgccgtcttttgtagccaatgacagagcagataaaaatgctgctgcctattttgagggtcatcatttgaatgctgagaatgttgctggtcaccagattgcctctgaaacacagatccttgagggctctttgggaatatctgtaaagtcacactgcagcacaggtgatgctcatacagtcctgagtgagtctaacagaaatgatgagcactgtggaaattctaacaacaaatgtgaagtaattccagaaagcaccagtgcagtaacaaacattccacacgtgcagatggttgccatacaggtatcttggaacataatacaccaagaagtcaatactgagccatataatccttttgaggaacgacaaggggaaatttcacggattgaaaaggagcaccaagtattacaagaccaacttcaagaagtgtatgaaaattatgagcagataaaacttaagggcttagaagagaccagggacctggaagagaagttgaaaaggcacttagaagaaaacaagatctcaaagacggaattagattggttccttcaagatttggaaagagaaattaaaaaatggcaacaggaaaaaaaagaaatccaagaaagactaaaatcactgaagaagaaaattaaaaaggtttcaaatgccagtgaaatgtatacccagaaaaatgatggaaaggaaaaggaacatgaattacatctggatcagtcccttgaaatcagcaacacacttacaaatgagaaaatgaaaatagaagagtatataaagaaagggaaagaggattatgaagagagtcatcagagagctgtggctgcagaggtatccgtacttgaaaactggaaggagagtgaagtgtataagctacagatcatggagtcacaagcagaagcctttctgaagaagctggggctgattagccgtgatcctgcagcatatcctgacatggagtctgatatacgttcatgggaattgtttctttctaatgttacaaaagaaattgagaaagcaaagtctcagtttgaagaacaaattaaggcaattaaaaatggttctcggctcagtgaactttctaaagtgcagatttctgagctttcatttcctgcctgtaacacggttcatcccgagttactccctgagtcttcaggccacgatggccaagggcttgtgacttctgcaagcgacgtgactggaaaccacgcagcacttcacagggatcctagtgtgttctctgctggtgattccccaggggaggctccttctgcgctgttgccagggccaccccctggtcagcctgaagccactcagctgacagggccaaaacgggctggccaggcagctctgtcagaacgaagccctgtggctgatcggaagcagcctgttcctccaggacgtgctgcgcgttcaagccagtctccaaaaaagccgttcaatagtattattgagcacctgtcagtggtattcccatgttacaacagcactgagcttgctggttttattaaaaaagtgcgaagcaaaaacaagaactcactctcaggattgagtattgatgaaattgtccaaagagtgacagaacacattctagatgaacagaaaaagaaaaagccaaacccaggaaaggacaagaggacttatgagcccagctctgccacccccgtgaccaggtcctcccagggctcaccctcggtggttgttgcaccatcacccaaaaccaaggggcagaaagcagaagatgtccctgtgaggattgcactgggtgcaagttcctgtgaaatatgccacgaggtgttcaaatcaaaaaacgtgcgtgtgctcaaatgtgggcacaagtatcacaaagggtgctttaagcagtggcttaaagggcagagcgcttgcccggcctgccagggtcgtgatctcctgacagaagagtcaccttctggaagaggctggcccagtcagaatcaggagctgccttcctgctcttctaggtagtcacacttcactaaagtgtcatccaccagtgtgttgaatccgaagaatgacaattttctaccactggtgtaaaaaacaaacatttgaagacccttgtgcattgtgtgtcacaaagctaaatacatggaaatcgttaatatcgctgatattaagtaatttccccactctgagtgaatactttgatgattgccaacagtggctaataaaatgacggctaccacactcatgggtcactggggctgcgcagggctctttgaggtgggtggcttcttttggaaagtactatgaacgtctcgaagcagtattctagtgataagaattcttaacatagccaagcgccccacgtttgttccccacgtttgttccccttttctgtttgaaaaacctgttctggtagctccacaagagagatgatactgactttttaaattttttacaagagtctgtattcctgatatgcctatatttttcctcaaagattctgcattttaaggatgggcataagcaaactatattttaataatttatagttaatgttaaaatattggctgatttagaccaaaagattcaaatctcctctttgtgaaatcccatctgcatttgattttttattattttatgttcccccgttagattgttttaagtgtttgcttttcatcttttatagatgtaatctgattttcaaaaatcattaacactttttaattagtatcgactaagactttttccccctggaatcgaggctgtgtgtccgtcatcccagcccccggttggagcctgctctttgaactccgctgccttccttagcagcttctgtcctcttctgtgagtcagtcagcgagtgcttgggatccgcatccagccgtgctgagcacacaacaggctgtgtgtggaaatggccaccaccattctccttccccaccccaccacaaaaagagaagctgtgtctttagacaaccctgaggtatctgtgttacaatcgttctgtgtttgatatttgtgtaaagtatgcatgcagtcttgtactgtgacctaagaacaaaactgtaactgcattagaaaccatgaaaaaattagatattgttttgtgacttttagacagtggtaaatatagaaccatgaattctggtcacattccatttctctccaacatgaaggatcaaaaaatgtttttcaatgtgttctttgttccactggaaacttagagtcatgagtttatgagctgatttggtcaccttcctctgcctttgttcactgtgagttctgatgtcttagtgacttagttcttagaagctcacgccttagtttgaaacagattctccacggtggtccccaaaacactgtctgcatatccataagaattgagcgctatgggtgttaacgtgcatgaggatcagtttgcagcagcaagtacaaaaggagaagaggaacatccgttgaatgagtgtgttttgtacataacttcagatacttgtgaacatgccttatatttgtccaacaactgtcagaataaagaacattctaaaatgagaaaaaaaaaaaaaaaaaaaaaaaaaaaaaaaaaaaaaaccaacgccattgctcagctaacggccacgcttcaacctggtgatgccccggcatactttccagcatagagcgcggaataagcgcaatngcctgctctgcgatcacacaggccaacattccgtgataagactccatctcatggatagttcccnngagcgcaccgtcagcatgaaaccagctctcgaagtgcgacgatccgacaattngcgccgnaggccataaatgtacttgcataacctgactggcacggnttactggcccatatccttgggcgtgaccatcataanttccttccgtattacccgtattccctcgatgg

SEQ ID NO: 371566 - DNA, 6155 bp, Homo sapiens
  misc_feature (5924)..(5924): n is a, c, g, or t
  misc_feature (5988)..(5989): n is a, c, g, or t
  misc_feature (6042)..(6042): n is a, c, g, or t
  misc_feature (6049)..(6049): n is a, c, g, or t
  misc_feature (6087)..(6087): n is a, c, g, or t
  misc_feature (6123)..(6123): n is a, c, g, or t
tgtgaccaagaaaaagcaaaagaaaagatgaacagaattatttgttggagagaattcattgtaaccagatcaaccaaattatagtgttgtgggttattattgagatgtgaaaattatattttactatgggacctttcttagaaatgagagtttacatgaattattttgcagagtaatttgtactatttctgtttaccctatgaagtaacttagatacatgaaagtgacatctatacaatctgtagactgcatccttagacatcacctaatcattgaggtttttgttttcatgaaacaagtacccttattttgacaatactgacagtttcttacattgaatggaagatgtaggccgggctctgattaaaaaaggaaaacttctaatatattgcttggaagatggtttctacgatagtcaaaggaaaacagttcattgagttgtcactaattgtaaatgtttatcagcctagagaaactaagactgaaagaagacaaaaaattgaagagaaagatccaaaaaaaagaagcaaaaaagttagcacaagaaagaatggaggaggacttaagagaaagtaatccacccaaaaatgaagagcagaaagaaactgtagacaatgttcagcgttgtcagttccttgatgacagaattctacagtgtataaagcagtatgctgacaagattaaatccggcatacagaatacagccatgcttctcaaagaattgctttcttggaaagttttgagcacagaagactatacaacctgtttttctagcagaaattttctaaatgaagcagtggactatgttattcgccacttgattcaagaaaataacagagtaaagacaagaatatttctgcatgttttgagtgagcttaaagaagtggagcccaaattagccgcctggatccaaaaacttaatagctttggcttagatgccacaggaactttcttttctcgttatggagcatctcttaaactgcttgattttagtatcatgactttcctctggaatgagaaatatggtcacaaactagactctatagaaggaaagcaacttgattatttctctgagccagcatcattgaaggaagcccgttgtttaatatggctgctagaagaacacagagacaagttcccagcattgcatagtgctttagatgaattctttgatataatggacagccgctgtactgtgttaaggaaacaagatagtggtgaagcaccgtttagttcaaccaaggtgaaaaacaaaagcaagaaaaagaagccaaaggattcaaagcctatgttagttgggtctggaacaacttcagtaacttcaaataatgagatcatcacttcaagtgaagaccatagcaatcgaaattcagattctgcaggcccatttgcagtgcctgaccatcttcggcaagatgtagaagaattcgaagctctctatgaccaacacagtaacgaatatgttgtccgcaataagaagctatgggacatgaacccaaaacaaaaatgttcaactctatatgattacttctctcagtttttggaggaacatggtcccttggacatgagtaacaagatgttctctgcagaatatgagtttttcccagaagaaactcgacagatactagaaaaagcaggaggtttaaaaccttttctcttgggatgccctcgttttgttgtgattgacaactgtattgcactgaagaaggttgcatcacggctcaagaaaaaaaggaagaagaaaaacattaaaacaaaagtagaagaaatttcaaaagcaggggagtatgtacgagttaaactacaactgaatccagctgctagggaatttaaaccagatgtaaagtctaaaccagtgtcagattcatcttcagcaccagcttttgaaaatgtgaaacccaaacctgtgtctgcaaattctcccaagccagcttgtgaagatgtgaaggccaaaccagtatccgacaattcttctagacaagtttctgaggatgggcaacccaaaggggtctcttctaattctcctaaaccaggctctgaggatgcaaattacaagcgagtctcctgtaattcccccaaaccggttcttgaggatgtgaaaccaacttattgggctcaatcccatttggtcacaggatactgtacgtatcttcctttccagagatttgatatcacccagacaccgccagcatacataaacgtgttaccaggtttgccccagtacaccagcatatatacacccttggccagcctttctcctgaatatcagctaccaagatcagtaccagtggtgccgtcttttgtagccaatgacagagcagataaaaatgctgctgcctattttgagggtcatcatttgaatgctgagaatgttgctggtcaccagattgcctctgaaacacagatccttgagggctctttgggaatatctgtaaagtcacactgcagcacaggtgatgctcatacagtcctgagtgagtctaacagaaatgatgagcactgtggaaattctaacaacaaatgtgaagtaattccagaaagcaccagtgcagtaacaaacattccacacgtgcagatggttgccatacaggtatcttggaacataatacaccaagaagtcaatactgagccatataatccttttgaggaacgacaaggggaaatttcacggattgaaaaggagcaccaagtattacaagaccaacttcaagaagtgtatgaaaattatgagcagataaaacttaagggcttagaagagaccagggacctggaagagaagttgaaaaggcacttagaagaaaacaagatctcaaagacggaattagattggttccttcaagatttggaaagagaaattaaaaaatggcaacaggaaaaaaaagaaatccaagaaagactaaaatcactgaagaagaaaattaaaaaggtttcaaatgccagtgaaatgtatacccagaaaaatgatggaaaggaaaaggaacatgaattacatctggatcagtcccttgaaatcagcaacacacttacaaatgagaaaatgaaaatagaagagtatataaagaaagggaaagaggattatgaagagagtcatcagagagctgtggctgcagaggtatccgtacttgaaaactggaaggagagtgaagtgtataagctacagatcatggagtcacaagcagaagcctttctgaagaagctggggctgattagccgtgatcctgcagcatatcctgacatggagtctgatatacgttcatgggaattgtttctttctaatgttacaaaagaaattgagaaagcaaagtctcagtttgaagaacaaattaaggcaattaaaaatggttctcggctcagtgaactttctaaagtgcagatttctgagctttcatttcctgcctgtaacacggttcatcccgagttactccctgagtcttcaggccacgatggccaagggcttgtgacttctgcaagcgacgtgactggaaaccacgcagcacttcacagggatcctagtgtgttctctgctggtgattccccaggggaggctccttctgcgctgttgccagggccaccccctggtcagcctgaagccactcagctgacagggccaaaacgggctggccaggcagctctgtcagaacgaagccctgtggctgatcggaagcagcctgttcctccaggacgtgctgcgcgttcaagccagtctccaaaaaagccgttcaatagtattattgagcacctgtcagtggtattcccatgttacaacagcactgagcttgctggttttattaaaaaagtgcgaagcaaaaacaagaactcactctcaggattgagtattgatgaaattgtccaaagagtgacagaacacattctagatgaacagaaaaagaaaaagccaaacccaggaaaggacaagaggacttatgagcccagctctgccacccccgtgaccaggtcctcccagggctcaccctcggtggttgttgcaccatcacccaaaaccaaggggcagaaagcagaagatgtccctgtgaggattgcactgggtgcaagttcctgtgaaatatgccacgaggtgttcaaatcaaaaaacgtgcgtgtgctcaaatgtgggcacaagtatcacaaagggtgctttaagcagtggcttaaagggcagagcgcttgcccggcctgccagggtcgtgatctcctgacagaagagtcaccttctggaagaggctggcccagtcagaatcaggagctgccttcctgctcttctaggtagtcacacttcactaaagtgtcatccaccagtgtgttgaatccgaagaatgacaattttctaccactggtgtaaaaaacaaacatttgaagacccttgtgcattgtgtgtcacaaagctaaatacatggaaatcgttaatatcgctgatattaagtaatttccccactctgagtgaatactttgatgattgccaacagtggctaataaaatgacggctaccacactcatgggtcactggggctgcgcagggctctttgaggtgggtggcttcttttggaaagtactatgaacgtctcgaagcagtattctagtgataagaattcttaacatagccaagcgccccacgtttgttccccacgtttgttccccttttctgtttgaaaaacctgttctggtagctccacaagagagatgatactgactttttaaattttttacaagagtctgtattcctgatatgcctatatttttcctcaaagattctgcattttaaggatgggcataagcaaactatattttaataatttatagttaatgttaaaatattggctgatttagaccaaaagattcaaatctcctctttgtgaaatcccatctgcatttgattttttattattttatgttcccccgttagattgttttaagtgtttgcttttcatcttttatagatgtaatctgattttcaaaaatcattaacactttttaattagtatcgactaagactttttccccctggaatcgaggctgtgtgtccgtcatcccagcccccggttggagcctgctctttgaactccgctgccttccttagcagcttctgtcctcttctgtgagtcagtcagcgagtgcttgggatccgcatccagccgtgctgagcacacaacaggctgtgtgtggaaatggccaccaccattctccttccccaccccaccacaaaaagagaagctgtgtctttagacaaccctgaggtatctgtgttacaatcgttctgtgtttgatatttgtgtaaagtatgcatgcagtcttgtactgtgacctaagaacaaaactgtaactgcattagaaaccatgaaaaaattagatattgttttgtgacttttagacagtggtaaatatagaaccatgaattctggtcacattccatttctctccaacatgaaggatcaaaaaatgtttttcaatgtgttctttgttccactggaaacttagagtcatgagtttatgagctgatttggtcaccttcctctgcctttgttcactgtgagttctgatgtcttagtgacttagttcttagaagctcacgccttagtttgaaacagattctccacggtggtccccaaaacactgtctgcatatccataagaattgagcgctatgggtgttaacgtgcatgaggatcagtttgcagcagcaagtacaaaaggagaagaggaacatccgttgaatgagtgtgttttgtacataacttcagatacttgtgaacatgccttatatttgtccaacaactgtcagaataaagaacattctaaaatgagaaaaaaaaaaaaaaaaaaaaaaaaaaaaaaaaaaaaaaccaacgccattgctcagctaacggccacgcttcaacctggtgatgccccggcatactttccagcatagagcgcggaataagcgcaatngcctgctctgcgatcacacaggccaacattccgtgataagactccatctcatggatagttcccnngagcgcaccgtcagcatgaaaccagctctcgaagtgcgacgatccgacaattngcgccgnaggccataaatgtacttgcataacctgactggcacggnttactggcccatatccttgggcgtgaccatcataanttccttccgtattacccgtattccctcgatgg

SEQ ID NO: 371567 - DNA, 8818 bp, Homo sapiens
  misc_feature (8587)..(8587): n is a, c, g, or t
  misc_feature (8651)..(8652): n is a, c, g, or t
  misc_feature (8705)..(8705): n is a, c, g, or t
  misc_feature (8712)..(8712): n is a, c, g, or t
  misc_feature (8750)..(8750): n is a, c, g, or t
  misc_feature (8786)..(8786): n is a, c, g, or t
ctgaactagttgccagtgatcttgaaacgtgacagtaaccaagagataaataggtgacaatgacaggaaaattagatgtagtaaaagagagtgtttgagagcagaagctatggcaactaaagactggatttgaatccttcctagcttggtgacatgagcaaattacttgatttaagtgagcattttcccatctgtacagtggagataacgataattgtgcctgctaagaagaattgctgtgaagattagtgaaataatgcatgtaaaacatttggtacagtatgtgacacatagtacaaatagtttgctaggaagattgttattattcttcacttgtgatattgtgaagttttcatacagcaaattggacatcatgagatggattgattaaataaatagatttgaacttcaaggactggtagtgttcttgctttggaaagaagaaacttggtttatcctaataatagtaggataataatggtgaagtgataggtacaagtaatagtgtttatgatgcgctggtgatgataggaaaagaaagccattatatgggcaagagctagaagtaataaaatggtgcatttttcagtgatgtttggcctatgtagctattctctgataactataaaaatccttattattgaagattcttcaggaaaaaaaaacccttagtctgaaactttagcaccaatcccccttgccccccattgaaatacgtatttttaaaacatggcttttgataatgtgagggttttttcctttttgcgatttagcagtgctgattgtgtattgcagtagttgtgagagcattagaagcagcagtcgataggaggatggaaggtctggatgccgccttggggagttaggagattggcagacttaccctgtaccactctagccctactcctttgcccaagacagaaacacactgagatggataggagaatatgagcagttgataggaaagttctcagtggagtcaggatttaggttaggccaggagattgagaatataacagtttgtgtatgatgaaatggcatatttcacagaatgcagtaaaagcaggtagggtacaagtgcagcaacaggaagatgtcttttcttcattcagcaaacacttatttgagagcttaccatgtgctaggcacatacaaagataaataagatgcccttgatgatcctctatttaaaggagacatgtacaattcacgtgcttctgagataaatttgaagaaactacaacatcttgagttgatggaagatattgtggatttggcaaagaaagttgctaatgattcattccttattggaggcttattgagaattggttgtaaaatagaaaataaaatcttggcaatggaagaagctctgaattggataaaatatgcaggcgatgtaacaattctaactaaattaggatcaattgacaattgttggcctatgttaagtattttctttactgaatacaagtaccacataactaaaattgtaatggaagactgcaatttgcttgaagaacttaaaactcaaagttgtatggattgtatagaggaaggagaactaatgaaaatgaaaggaaatgaagagttttccaaagaaagatttgatatagctattatctattacaccagagccattgaatatagacctgaaaactaccttctttatggtaaccgagctctttgttttcttcgtactggacagtttagaaatgcactcggtgatggaaagagagccactattctgaagaacacttggccaaagggtcattatcgttattgtgatgctctttctatgctgggggaatatgactgggccctgcaagcaaacataaaagctcaaaaactctgtaaaaatgaccctgagggaatcaaggatctaattcagcagcatgtaaagttacaaaaacaaatagaagacctacaaggtcgaacagcaaataaggatccaattaaagccttttatgaaaacagggcctacacacctaggagtttatcagcacctatatttactacttcacttaactttgtggagaaggaaagagatttcagaaaaattaatcacgaaatggccaacggtggtaatcagaatctaaaggtggcggatgaggcgttgaaggtagatgattgtgactgtcatcctgaattttcaccaccatcaagtcagcctccaaaacataaaggaaaacaaaaatctcgaaacaatgaatcagaaaagttcagttctagttcaccattgactttaccagcagatttgaagaacatcttggagaaacagttttctaaatcttccagagctgcacaccaggattttgctaatataatgaaaatgctgagaagcttaattcaagatggctatatggccttattggagcagcgttgccgcagcgctgcacaggcctttacagagttgctgaacggtttagatcctcaaaaaataaagcaattgaacctggccatgattaactatgttttggtcgtctatggacttgccatttctctccttggaataggacagcctgaggaattatctgaagccgaaaaccagtttaagaggattattgaacactaccccagtgagggccttgattgcttggcctactgtggaattggaaaagtgtatttgaaaaaaaacagatttctagaagctctcaatcactttgagaaagcaagaaccttgatttatcgtcttcctggagtgttaacttggcccacgagtaatgtgattattgaagagtctcagccacaaaaaataaagatgctgttagagaaatttgttgaagaatgcaagttccctccagtgccagatgccatttgttgctatcagaagtgccatggatattctaagatccagatatacataactgatccagactttaagggttttatacgcatcagctgttgccagtactgtaaaatagaatttcacatgaattgctggaagaagttaaaaactacaacctttaatgataaaattgacaaggattttctacaaggaatatgtcttacccctgactgtgaaggtgtcatttctaagattatcatcttcagcagtggtggtgaagttaaatgtgaatttgaacacaaggtcataaaagaaaaggttcctccaagacctattctgaaacagaaatgttctagcctagagaaactaagactgaaagaagacaaaaaattgaagagaaagatccaaaaaaaagaagcaaaaaagttagcacaagaaagaatggaggaggacttaagagaaagtaatccacccaaaaatgaagagcagaaagaaactgtagacaatgttcagcgttgtcagttccttgatgacagaattctacagtgtataaagcagtatgctgacaagattaaatccggcatacagaatacagccatgcttctcaaagaattgctttcttggaaagttttgagcacagaagactatacaacctgtttttctagcagaaattttctaaatgaagcagtggactatgttattcgccacttgattcaagaaaataacagagtaaagacaagaatatttctgcatgttttgagtgagcttaaagaagtggagcccaaattagccgcctggatccaaaaacttaatagctttggcttagatgccacaggaactttcttttctcgttatggagcatctcttaaactgcttgattttagtatcatgactttcctctggaatgagaaatatggtcacaaactagactctatagaaggaaagcaacttgattatttctctgagccagcatcattgaaggaagcccgttgtttaatatggctgctagaagaacacagagacaagttcccagcattgcatagtgctttagatgaattctttgatataatggacagccgctgtactgtgttaaggaaacaagatagtggtgaagcaccgtttagttcaaccaaggtgaaaaacaaaagcaagaaaaagaagccaaaggattcaaagcctatgttagttgggtctggaacaacttcagtaacttcaaataatgagatcatcacttcaagtgaagaccatagcaatcgaaattcagattctgcaggcccatttgcagtgcctgaccatcttcggcaagatgtagaagaattcgaagctctctatgaccaacacagtaacgaatatgttgtccgcaataagaagctatgggacatgaacccaaaacaaaaatgttcaactctatatgattacttctctcagtttttggaggaacatggtcccttggacatgagtaacaagatgttctctgcagaatatgagtttttcccagaagaaactcgacagatactagaaaaagcaggaggtttaaaaccttttctcttgggatgccctcgttttgttgtgattgacaactgtattgcactgaagaaggttgcatcacggctcaagaaaaaaaggaagaagaaaaacattaaaacaaaagtagaagaaatttcaaaagcaggggagtatgtacgagttaaactacaactgaatccagctgctagggaatttaaaccagatgtaaagtctaaaccagtgtcagattcatcttcagcaccagcttttgaaaatgtgaaacccaaacctgtgtctgcaaattctcccaagccagcttgtgaagatgtgaaggccaaaccagtatccgacaattcttctagacaagtttctgaggatgggcaacccaaaggggtctcttctaattctcctaaaccaggctctgaggatgcaaattacaagcgagtctcctgtaattcccccaaaccggttcttgaggatgtgaaaccaacttattgggctcaatcccatttggtcacaggatactgtacgtatcttcctttccagagatttgatatcacccagacaccgccagcatacataaacgtgttaccaggtttgccccagtacaccagcatatatacacccttggccagcctttctcctgaatatcagctaccaagatcagtaccagtggtgccgtcttttgtagccaatgacagagcagataaaaatgctgctgcctattttgagggtcatcatttgaatgctgagaatgttgctggtcaccagattgcctctgaaacacagatccttgagggctctttgggaatatctgtaaagtcacactgcagcacaggtgatgctcatacagtcctgagtgagtctaacagaaatgatgagcactgtggaaattctaacaacaaatgtgaagtaattccagaaagcaccagtgcagtaacaaacattccacacgtgcagatggttgccatacaggtatcttggaacataatacaccaagaagtcaatactgagccatataatccttttgaggaacgacaaggggaaatttcacggattgaaaaggagcaccaagtattacaagaccaacttcaagaagtgtatgaaaattatgagcagataaaacttaagggcttagaagagaccagggacctggaagagaagttgaaaaggcacttagaagaaaacaagatctcaaagacggaattagattggttccttcaagatttggaaagagaaattaaaaaatggcaacaggaaaaaaaagaaatccaagaaagactaaaatcactgaagaagaaaattaaaaaggtttcaaatgccagtgaaatgtatacccagaaaaatgatggaaaggaaaaggaacatgaattacatctggatcagtcccttgaaatcagcaacacacttacaaatgagaaaatgaaaatagaagagtatataaagaaagggaaagaggattatgaagagagtcatcagagagctgtggctgcagaggtatccgtacttgaaaactggaaggagagtgaagtgtataagctacagatcatggagtcacaagcagaagcctttctgaagaagctggggctgattagccgtgatcctgcagcatatcctgacatggagtctgatatacgttcatgggaattgtttctttctaatgttacaaaagaaattgagaaagcaaagtctcagtttgaagaacaaattaaggcaattaaaaatggttctcggctcagtgaactttctaaagtgcagatttctgagctttcatttcctgcctgtaacacggttcatcccgagttactccctgagtcttcaggccacgatggccaagggcttgtgacttctgcaagcgacgtgactggaaaccacgcagcacttcacagggatcctagtgtgttctctgctggtgattccccaggggaggctccttctgcgctgttgccagggccaccccctggtcagcctgaagccactcagctgacagggccaaaacgggctggccaggcagctctgtcagaacgaagccctgtggctgatcggaagcagcctgttcctccaggacgtgctgcgcgttcaagccagtctccaaaaaagccgttcaatagtattattgagcacctgtcagtggtattcccatgttacaacagcactgagcttgctggttttattaaaaaagtgcgaagcaaaaacaagaactcactctcaggattgagtattgatgaaattgtccaaagagtgacagaacacattctagatgaacagaaaaagaaaaagccaaacccaggaaaggacaagaggacttatgagcccagctctgccacccccgtgaccaggtcctcccagggctcaccctcggtggttgttgcaccatcacccaaaaccaaggggcagaaagcagaagatgtccctgtgaggattgcactgggtgcaagttcctgtgaaatatgccacgaggtgttcaaatcaaaaaacgtgcgtgtgctcaaatgtgggcacaagtatcacaaagggtgctttaagcagtggcttaaagggcagagcgcttgcccggcctgccagggtcgtgatctcctgacagaagagtcaccttctggaagaggctggcccagtcagaatcaggagctgccttcctgctcttctaggtagtcacacttcactaaagtgtcatccaccagtgtgttgaatccgaagaatgacaattttctaccactggtgtaaaaaacaaacatttgaagacccttgtgcattgtgtgtcacaaagctaaatacatggaaatcgttaatatcgctgatattaagtaatttccccactctgagtgaatactttgatgattgccaacagtggctaataaaatgacggctaccacactcatgggtcactggggctgcgcagggctctttgaggtgggtggcttcttttggaaagtactatgaacgtctcgaagcagtattctagtgataagaattcttaacatagccaagcgccccacgtttgttccccttttctgtttgaaaaacctgttctggtagctccacaagagagatgatactgactttttaaattttttacaagagtctgtattcctgatatgcctatatttttcctcaaagattctgcattttaaggatgggcataagcaaactatattttaataatttatagttaatgttaaaatattggctgatttagaccaaaagattcaaatctcctctttgtgaaatcccatctgcatttgattttttattattttatgttcccccgttagattgttttaagtgtttgcttttcatcttttatagatgtaatctgattttcaaaaatcattaacactttttaattagtatcgactaagactttttccccctggaatcgaggctgtgtgtccgtcatcccagcccccggttggagcctgctctttgaactccgctgccttccttagcagcttctgtcctcttctgtgagtcagtcagcgagtgcttgggatccgcatccagccgtgctgagcacacaacaggctgtgtgtggaaatggccaccaccattctccttccccaccccaccacaaaaagagaagctgtgtctttagacaaccctgaggtatctgtgttacaatcgttctgtgtttgatatttgtgtaaagtatgcatgcagtcttgtactgtgacctaagaacaaaactgtaactgcattagaaaccatgaaaaaattagatattgttttgtgacttttagacagtggtaaatatagaaccatgaattctggtcacattccatttctctccaacatgaaggatcaaaaaatgtttttcaatgtgttctttgttccactggaaacttagagtcatgagtttatgagctgatttggtcaccttcctctgcctttgttcactgtgagttctgatgtcttagtgacttagttcttagaagctcacgccttagtttgaaacagattctccacggtggtccccaaaacactgtctgcatatccataagaattgagcgctatgggtgttaacgtgcatgaggatcagtttgcagcagcaagtacaaaaggagaagaggaacatccgttgaatgagtgtgttttgtacataacttcagatacttgtgaacatgccttatatttgtccaacaactgtcagaataaagaacattctaaaatgagaaaaaaaaaaaaaaaaaaaaaaaaaaaaaaaaaaaaaaccaacgccattgctcagctaacggccacgcttcaacctggtgatgccccggcatactttccagcatagagcgcggaataagcgcaatngcctgctctgcgatcacacaggccaacattccgtgataagactccatctcatggatagttcccnngagcgcaccgtcagcatgaaaccagctctcgaagtgcgacgatccgacaattngcgccgnaggccataaatgtacttgcataacctgactggcacggnttactggcccatatccttgggcgtgaccatcataanttccttccgtattacccgtattccctcgatgg

SEQ ID NO: 371568 - DNA, 8630 bp, Homo sapiens
ctgaactagttgccagtgatcttgaaacgtgacagtaaccaagagataaataggtgacaatgacaggaaaattagatgtagtaaaagagagtgtttgagagcagaagctatggcaactaaagactggatttgaatccttcctagcttggtgacatgagcaaattacttgatttaagtgagcattttcccatctgtacagtggagataacgataattgtgcctgctaagaagaattgctgtgaagattagtgaaataatgcatgtaaaacatttggtacagtatgtgacacatagtacaaatagtttgctaggaagattgttattattcttcacttgtgatattgtgaagttttcatacagcaaattggacatcatgagatggattgattaaataaatagatttgaacttcaaggactggtagtgttcttgctttggaaagaagaaacttggtttatcctaataatagtaggataataatggtgaagtgataggtacaagtaatagtgtttatgatgcgctggtgatgataggaaaagaaagccattatatgggcaagagctagaagtaataaaatggtgcatttttcagtgatgtttggcctatgtagctattctctgataactataaaaatccttattattgaagattcttcaggaaaaaaaaacccttagtctgaaactttagcaccaatcccccttgccccccattgaaatacgtatttttaaaacatggcttttgataatgtgagggttttttcctttttgcgatttagcagtgctgattgtgtattgcagtagttgtgagagcattagaagcagcagtcgataggaggatggaaggtctggatgccgccttggggagttaggagattggcagacttaccctgtaccactctagccctactcctttgcccaagacagaaacacactgagatggataggagaatatgagcagttgataggaaagttctcagtggagtcaggatttaggttaggccaggagattgagaatataacagtttgtgtatgatgaaatggcatatttcacagaatgcagtaaaagcaggtagggtacaagtgcagcaacaggaagatgtcttttcttcattcagcaaacacttatttgagagcttaccatgtgctaggcacatacaaagataaataagatgcccttgatgatcctctatttaaaggagacatgtacaattcacgtgcttctgagataaatttgaagaaactacaacatcttgagttgatggaagatattgtggatttggcaaagaaagttgctaatgattcattccttattggaggcttattgagaattggttgtaaaatagaaaataaaatcttggcaatggaagaagctctgaattggataaaatatgcaggcgatgtaacaattctaactaaattaggatcaattgacaattgttggcctatgttaagtattttctttactgaatacaagtaccacataactaaaattgtaatggaagactgcaatttgcttgaagaacttaaaactcaaagttgtatggattgtatagaggaaggagaactaatgaaaatgaaaggaaatgaagagttttccaaagaaagatttgatatagctattatctattacaccagagccattgaatatagacctgaaaactaccttctttatggtaaccgagctctttgttttcttcgtactggacagtttagaaatgcactcggtgatggaaagagagccactattctgaagaacacttggccaaagggtcattatcgttattgtgatgctctttctatgctgggggaatatgactgggccctgcaagcaaacataaaagctcaaaaactctgtaaaaatgaccctgagggaatcaaggatctaattcagcagcatgtaaagttacaaaaacaaatagaagacctacaaggtcgaacagcaaataaggatccaattaaagccttttatgaaaacagggcctacacacctaggagtttatcagcacctatatttactacttcacttaactttgtggagaaggaaagagatttcagaaaaattaatcacgaaatggccaacggtggtaatcagaatctaaaggtggcggatgaggcgttgaaggtagatgattgtgactgtcatcctgaattttcaccaccatcaagtcagcctccaaaacataaaggaaaacaaaaatctcgaaacaatgaatcagaaaagttcagttctagttcaccattgactttaccagcagatttgaagaacatcttggagaaacagttttctaaatcttccagagctgcacaccaggattttgctaatataatgaaaatgctgagaagcttaattcaagatggctatatggccttattggagcagcgttgccgcagcgctgcacaggcctttacagagttgctgaacggtttagatcctcaaaaaataaagcaattgaacctggccatgattaactatgttttggtcgtctatggacttgccatttctctccttggaataggacagcctgaggaattatctgaagccgaaaaccagtttaagaggattattgaacactaccccagtgagggccttgattgcttggcctactgtggaattggaaaagtgtatttgaaaaaaaacagatttctagaagctctcaatcactttgagaaagcaagaaccttgatttatcgtcttcctggagtgttaacttggcccacgagtaatgtgattattgaagagtctcagccacaaaaaataaagatgctgttagagaaatttgttgaagaatgcaagttccctccagtgccagatgccatttgttgctatcagaagtgccatggatattctaagatccagatatacataactgatccagactttaagggttttatacgcatcagctgttgccagtactgtaaaatagaatttcacatgaattgctggaagaagttaaaaactacaacctttaatgataaaattgacaaggattttctacaaggaatatgtcttacccctgactgtgaaggtgtcatttctaagattatcatcttcagcagtggtggtgaagttaaatgtgaatttgaacacaaggtcataaaagaaaaggttcctccaagacctattctgaaacagaaatgttctagcctagagaaactaagactgaaagaagacaaaaaattgaagagaaagatccaaaaaaaagaagcaaaaaagttagcacaagaaagaatggaggaggacttaagagaaagtaatccacccaaaaatgaagagcagaaagaaactgtagacaatgttcagcgttgtcagttccttgatgacagaattctacagtgtataaagcagtatgctgacaagattaaatccggcatacagaatacagccatgcttctcaaagaattgctttcttggaaagttttgagcacagaagactatacaacctgtttttctagcagaaattttctaaatgaagcagtggactatgttattcgccacttgattcaagaaaataacagagtaaagacaagaatatttctgcatgttttgagtgagcttaaagaagtggagcccaaattagccgcctggatccaaaaacttaatagctttggcttagatgccacaggaactttcttttctcgttatggagcatctcttaaactgcttgattttagtatcatgactttcctctggaatgagaaatatggtcacaaactagactctatagaaggaaagcaacttgattatttctctgagccagcatcattgaaggaagcccgttgtttaatatggctgctagaagaacacagagacaagttcccagcattgcatagtgctttagatgaattctttgatataatggacagccgctgtactgtgttaaggaaacaagatagtggtgaagcaccgtttagttcaaccaaggtgaaaaacaaaagcaagaaaaagaagccaaaggattcaaagcctatgttagttgggtctggaacaacttcagtaacttcaaataatgagatcatcacttcaagtgaagaccatagcaatcgaaattcagattctgcaggcccatttgcagtgcctgaccatcttcggcaagatgtagaagaattcgaagctctctatgaccaacacagtaacgaatatgttgtccgcaataagaagctatgggacatgaacccaaaacaaaaatgttcaactctatatgattacttctctcagtttttggaggaacatggtcccttggacatgagtaacaagatgttctctgcagaatatgagtttttcccagaagaaactcgacagatactagaaaaagcaggaggtttaaaaccttttctcttgggatgccctcgttttgttgtgattgacaactgtattgcactgaagaaggttgcatcacggctcaagaaaaaaaggaagaagaaaaacattaaaacaaaagtagaagaaatttcaaaagcaggggagtatgtacgagttaaactacaactgaatccagctgctagggaatttaaaccagatgtaaagtctaaaccagtgtcagattcatcttcagcaccagcttttgaaaatgtgaaacccaaacctgtgtctgcaaattctcccaagccagcttgtgaagatgtgaaggccaaaccagtatccgacaattcttctagacaagtttctgaggatgggcaacccaaaggggtctcttctaattctcctaaaccaggctctgaggatgcaaattacaagcgagtctcctgtaattcccccaaaccggttcttgaggatgtgaaaccaacttattgggctcaatcccatttggtcacaggatactgtacgtatcttcctttccagagatttgatatcacccagacaccgccagcatacataaacgtgttaccaggtttgccccagtacaccagcatatatacacccttggccagcctttctcctgaatatcagctaccaagatcagtaccagtggtgccgtcttttgtagccaatgacagagcagataaaaatgctgctgcctattttgagggtcatcatttgaatgctgagaatgttgctggtcaccagattgcctctgaaacacagatccttgagggctctttgggaatatctgtaaagtcacactgcagcacaggtgatgctcatacagtcctgagtgagtctaacagaaatgatgagcactgtggaaattctaacaacaaatgtgaagtaattccagaaagcaccagtgcagtaacaaacattccacacgtgcagatggttgccatacaggtatcttggaacataatacaccaagaagtcaatactgagccatataatccttttgaggaacgacaaggggaaatttcacggattgaaaaggagcaccaagtattacaagaccaacttcaagaagtgtatgaaaattatgagcagataaaacttaagggcttagaagagaccagggacctggaagagaagttgaaaaggcacttagaagaaaacaagatctcaaagacggaattagattggttccttcaagatttggaaagagaaattaaaaaatggcaacaggaaaaaaaagaaatccaagaaagactaaaatcactgaagaagaaaattaaaaaggtttcaaatgccagtgaaatgtatacccagaaaaatgatggaaaggaaaaggaacatgaattacatctggatcagtcccttgaaatcagcaacacacttacaaatgagaaaatgaaaatagaagagtatataaagaaagggaaagaggattatgaagagagtcatcagagagctgtggctgcagaggtatccgtacttgaaaactggaaggagagtgaagtgtataagctacagatcatggagtcacaagcagaagcctttctgaagaagctggggctgattagccgtgatcctgcagcatatcctgacatggagtctgatatacgttcatgggaattgtttctttctaatgttacaaaagaaattgagaaagcaaagtctcagtttgaagaacaaattaaggcaattaaaaatggttctcggctcagtgaactttctaaagtgcagatttctgagctttcatttcctgcctgtaacacggttcatcccgagttactccctgagtcttcaggccacgatggccaagggcttgtgacttctgcaagcgacgtgactggaaaccacgcagcacttcacagggatcctagtgtgttctctgctggtgattccccaggggaggctccttctgcgctgttgccagggccaccccctggtcagcctgaagccactcagctgacagggccaaaacgggctggccaggcagctctgtcagaacgaagccctgtggctgatcggaagcagcctgttcctccaggacgtgctgcgcgttcaagccagtctccaaaaaagccgttcaatagtattattgagcacctgtcagtggtattcccatgttacaacagcactgagcttgctggttttattaaaaaagtgcgaagcaaaaacaagaactcactctcaggattgagtattgatgaaattgtccaaagagtgacagaacacattctagatgaacagaaaaagaaaaagccaaacccaggaaaggacaagaggacttatgagcccagctctgccacccccgtgaccaggtcctcccagggctcaccctcggtggttgttgcaccatcacccaaaaccaaggggcagaaagcagaagatgtccctgtgaggattgcactgggtgcaagttcctgtgaaatatgccacgaggtgttcaaatcaaaaaacgtgcgtgtgctcaaatgtgggcacaagtatcacaaagggtgctttaagcagtggcttaaagggcagagcgcttgcccggcctgccagggtcgtgatctcctgacagaagagtcaccttctggaagaggctggcccagtcagaatcaggagctgccttcctgctcttctaggtagtcacacttcactaaagtgtcatccaccagtgtgttgaatccgaagaatgacaattttctaccactggtgtaaaaaacaaacatttgaagacccttgtgcattgtgtgtcacaaagctaaatacatggaaatcgttaatatcgctgatattaagtaatttccccactctgagtgaatactttgatgattgccaacagtggctaataaaatgacggctaccacactcatgggtcactggggctgcgcagggctctttgaggtgggtggcttcttttggaaagtactatgaacgtctcgaagcagtattctagtgataagaattcttaacatagccaagcgccccacgtttgttccccacgtttgttccccttttctgtttgaaaaacctgttctggtagctccacaagagagatgatactgactttttaaattttttacaagagtctgtattcctgatatgcctatatttttcctcaaagattctgcattttaaggatgggcataagcaaactatattttaataatttatagttaatgttaaaatattggctgatttagaccaaaagattcaaatctcctctttgtgaaatcccatctgcatttgattttttattattttatgttcccccgttagattgttttaagtgtttgcttttcatcttttatagatgtaatctgattttcaaaaatcattaacactttttaattagtatcgactaagactttttccccctggaatcgaggctgtgtgtccgtcatcccagcccccggttggagcctgctctttgaactccgctgccttccttagcagcttctgtcctcttctgtgagtcagtcagcgagtgcttgggatccgcatccagccgtgctgagcacacaacaggctgtgtgtggaaatggccaccaccattctccttccccaccccaccacaaaaagagaagctgtgtctttagacaaccctgaggtatctgtgttacaatcgttctgtgtttgatatttgtgtaaagtatgcatgcagtcttgtactgtgacctaagaacaaaactgtaactgcattagaaaccatgaaaaaattagatattgttttgtgacttttagacagtggtaaatatagaaccatgaattctggtcacattccatttctctccaacatgaaggatcaaaaaatgtttttcaatgtgttctttgttccactggaaacttagagtcatgagtttatgagctgatttggtcaccttcctctgcctttgttcactgtgagttctgatgtcttagtgacttagttcttagaagctcacgccttagtttgaaacagattctccacggtggtccccaaaacactgtctgcatatccataagaattgagcgctatgggtgttaacgtgcatgaggatcagtttgcagcagcaagtacaaaaggagaagaggaacatccgttgaatgagtgtgttttgtacataacttcagatacttgtgaacatgccttatatttgtccaacaactgtcagtaagacctcttcctggaacaacaacacaaaaaaaagcgcgggcaagaaaccctgaggcacttcgctcactttggaaagccaagagagtaaaaaggcgacaagggacaatcggttgagacccgggggaggaccacaaacaagaaaatagtgcggtggtcataataaaaaatatgacacaa

SEQ ID NO: 371569 - DNA, 8514 bp, Homo sapiens
ctgaactagttgccagtgatcttgaaacgtgacagtaaccaagagataaataggtgacaatgacaggaaaattagatgtagtaaaagagagtgtttgagagcagaagctatggcaactaaagactggatttgaatccttcctagcttggtgacatgagcaaattacttgatttaagtgagcattttcccatctgtacagtggagataacgataattgtgcctgctaagaagaattgctgtgaagattagtgaaataatgcatgtaaaacatttggtacagtatgtgacacatagtacaaatagtttgctaggaagattgttattattcttcacttgtgatattgtgaagttttcatacagcaaattggacatcatgagatggattgattaaataaatagatttgaacttcaaggactggtagtgttcttgctttggaaagaagaaacttggtttatcctaataatagtaggataataatggtgaagtgataggtacaagtaatagtgtttatgatgcgctggtgatgataggaaaagaaagccattatatgggcaagagctagaagtaataaaatggtgcatttttcagtgatgtttggcctatgtagctattctctgataactataaaaatccttattattgaagattcttcaggaaaaaaaaacccttagtctgaaactttagcaccaatcccccttgccccccattgaaatacgtatttttaaaacatggcttttgataatgtgagggttttttcctttttgcgatttagcagtgctgattgtgtattgcagtagttgtgagagcattagaagcagcagtcgataggaggatggaaggtctggatgccgccttggggagttaggagattggcagacttaccctgtaccactctagccctactcctttgcccaagacagaaacacactgagatggataggagaatatgagcagttgataggaaagttctcagtggagtcaggatttaggttaggccaggagattgagaatataacagtttgtgtatgatgaaatggcatatttcacagaatgcagtaaaagcaggtagggtacaagtgcagcaacaggaagatgtcttttcttcattcagcaaacacttatttgagagcttaccatgtgctaggcacatacaaagataaataagatgcccttgatgatcctctatttaaaggagacatgtacaattcacgtgcttctgagataaatttgaagaaactacaacatcttgagttgatggaagatattgtggatttggcaaagaaagttgctaatgattcattccttattggaggcttattgagaattggttgtaaaatagaaaataaaatcttggcaatggaagaagctctgaattggataaaatatgcaggcgatgtaacaattctaactaaattaggatcaattgacaattgttggcctatgttaagtattttctttactgaatacaagtaccacataactaaaattgtaatggaagactgcaatttgcttgaagaacttaaaactcaaagttgtatggattgtatagaggaaggagaactaatgaaaatgaaaggaaatgaagagttttccaaagaaagatttgatatagctattatctattacaccagagccattgaatatagacctgaaaactaccttctttatggtaaccgagctctttgttttcttcgtactggacagtttagaaatgcactcggtgatggaaagagagccactattctgaagaacacttggccaaagggtcattatcgttattgtgatgctctttctatgctgggggaatatgactgggccctgcaagcaaacataaaagctcaaaaactctgtaaaaatgaccctgagggaatcaaggatctaattcagcagcatgtaaagttacaaaaacaaatagaagacctacaaggtcgaacagcaaataaggatccaattaaagccttttatgaaaacagggcctacacacctaggagtttatcagcacctatatttactacttcacttaactttgtggagaaggaaagagatttcagaaaaattaatcacgaaatggccaacggtggtaatcagaatctaaaggtggcggatgaggcgttgaaggtagatgattgtgactgtcatcctgaattttcaccaccatcaagtcagcctccaaaacataaaggaaaacaaaaatctcgaaacaatgaatcagaaaagttcagttctagttcaccattgactttaccagcagatttgaagaacatcttggagaaacagttttctaaatcttccagagctgcacaccaggattttgctaatataatgaaaatgctgagaagcttaattcaagatggctatatggccttattggagcagcgttgccgcagcgctgcacaggcctttacagagttgctgaacggtttagatcctcaaaaaataaagcaattgaacctggccatgattaactatgttttggtcgtctatggacttgccatttctctccttggaataggacagcctgaggaattatctgaagccgaaaaccagtttaagaggattattgaacactaccccagtgagggccttgattgcttggcctactgtggaattggaaaagtgtatttgaaaaaaaacagatttctagaagctctcaatcactttgagaaagcaagaaccttgatttatcgtcttcctggagtgttaacttggcccacgagtaatgtgattattgaagagtctcagccacaaaaaataaagatgctgttagagaaatttgttgaagaatgcaagttccctccagtgccagatgccatttgttgctatcagaagtgccatggatattctaagatccagatatacataactgatccagactttaagggttttatacgcatcagctgttgccagtactgtaaaatagaatttcacatgaattgctggaagaagttaaaaactacaacctttaatgataaaattgacaaggattttctacaaggaatatgtcttacccctgactgtgaaggtgtcatttctaagattatcatcttcagcagtggtggtgaagttaaatgtgaatttgaacacaaggtcataaaagaaaaggttcctccaagacctattctgaaacagaaatgttctagcctagagaaactaagactgaaagaagacaaaaaattgaagagaaagatccaaaaaaaagaagcaaaaaagttagcacaagaaagaatggaggaggacttaagagaaagtaatccacccaaaaatgaagagcagaaagaaactgtagacaatgttcagcgttgtcagttccttgatgacagaattctacagtgtataaagcagtatgctgacaagattaaatccggcatacagaatacagccatgcttctcaaagaattgctttcttggaaagttttgagcacagaagactatacaacctgtttttctagcagaaattttctaaatgaagcagtggactatgttattcgccacttgattcaagaaaataacagagtaaagacaagaatatttctgcatgttttgagtgagcttaaagaagtggagcccaaattagccgcctggatccaaaaacttaatagctttggcttagatgccacaggaactttcttttctcgttatggagcatctcttaaactgcttgattttagtatcatgactttcctctggaatgagaaatatggtcacaaactagactctatagaaggaaagcaacttgattatttctctgagccagcatcattgaaggaagcccgttgtttaatatggctgctagaagaacacagagacaagttcccagcattgcatagtgctttagatgaattctttgatataatggacagccgctgtactgtgttaaggaaacaagatagtggtgaagcaccgtttagttcaaccaaggtgaaaaacaaaagcaagaaaaagaagccaaaggattcaaagcctatgttagttgggtctggaacaacttcagtaacttcaaataatgagatcatcacttcaagtgaagaccatagcaatcgaaattcagattctgcaggcccatttgcagtgcctgaccatcttcggcaagatgtagaagaattcgaagctctctatgaccaacacagtaacgaatatgttgtccgcaataagaagctatgggacatgaacccaaaacaaaaatgttcaactctatatgattacttctctcagtttttggaggaacatggtcccttggacatgagtaacaagatgttctctgcagaatatgagtttttcccagaagaaactcgacagatactagaaaaagcaggaggtttaaaaccttttctcttgggatgccctcgttttgttgtgattgacaactgtattgcactgaagaaggttgcatcacggctcaagaaaaaaaggaagaagaaaaacattaaaacaaaagtagaagaaatttcaaaagcaggggagtatgtacgagttaaactacaactgaatccagctgctagggaatttaaaccagatgtaaagtctaaaccagtgtcagattcatcttcagcaccagcttttgaaaatgtgaaacccaaacctgtgtctgcaaattctcccaagccagcttgtgaagatgtgaaggccaaaccagtatccgacaattcttctagacaagtttctgaggatgggcaacccaaaggggtctcttctaattctcctaaaccaggctctgaggatgcaaattacaagcgagtctcctgtaattcccccaaaccggttcttgaggatgtgaaaccaacttattgggctcaatcccatttggtcacaggatactgtacgtatcttcctttccagagatttgatatcacccagacaccgccagcatacataaacgtgttaccaggtttgccccagtacaccagcatatatacacccttggccagcctttctcctgaatatcagctaccaagatcagtaccagtggtgccgtcttttgtagccaatgacagagcagataaaaatgctgctgcctattttgagggtcatcatttgaatgctgagaatgttgctggtcaccagattgcctctgaaacacagatccttgagggctctttgggaatatctgtaaagtcacactgcagcacaggtgatgctcatacagtcctgagtgagtctaacagaaatgatgagcactgtggaaattctaacaacaaatgtgaagtaattccagaaagcaccagtgcagtaacaaacattccacacgtgcagatggttgccatacaggtatcttggaacataatacaccaagaagtcaatactgagccatataatccttttgaggaacgacaaggggaaatttcacggattgaaaaggagcaccaagtattacaagaccaacttcaagaagtgtatgaaaattatgagcagataaaacttaagggcttagaagagaccagggacctggaagagaagttgaaaaggcacttagaagaaaacaagatctcaaagacggaattagattggttccttcaagatttggaaagagaaattaaaaaatggcaacaggaaaaaaaagaaatccaagaaagactaaaatcactgaagaagaaaattaaaaaggtttcaaatgccagtgaaatgtatacccagaaaaatgatggaaaggaaaaggaacatgaattacatctggatcagtcccttgaaatcagcaacacacttacaaatgagaaaatgaaaatagaagagtatataaagaaagggaaagaggattatgaagagagtcatcagagagctgtggctgcagaggtatccgtacttgaaaactggaaggagagtgaagtgtataagctacagatcatggagtcacaagcagaagcctttctgaagaagctggggctgattagccgtgatcctgcagcatatcctgacatggagtctgatatacgttcatgggaattgtttctttctaatgttacaaaagaaattgagaaagcaaagtctcagtttgaagaacaaattaaggcaattaaaaatggttctcggctcagtgaactttctaaagtgcagatttctgagctttcatttcctgcctgtaacacggttcatcccgagttactccctgagtcttcaggccacgatggccaagggcttgtgacttctgcaagcgacgtgactggaaaccacgcagcacttcacagggatcctagtgtgttctctgctggtgattccccaggggaggctccttctgcgctgttgccagggccaccccctggtcagcctgaagccactcagctgacagggccaaaacgggctggccaggcagctctgtcagaacgaagccctgtggctgatcggaagcagcctgttcctccaggacgtgctgcgcgttcaagccagtctccaaaaaagccgttcaatagtattattgagcacctgtcagtggtattcccatgttacaacagcactgagcttgctggttttattaaaaaagtgcgaagcaaaaacaagaactcactctcaggattgagtattgatgaaattgtccaaagagtgacagaacacattctagatgaacagaaaaagaaaaagccaaacccaggaaaggacaagaggacttatgagcccagctctgccacccccgtgaccaggtcctcccagggctcaccctcggtggttgttgcaccatcacccaaaaccaaggggcagaaagcagaagatgtccctgtgaggattgcactgggtgcaagttcctgtgaaatatgccacgaggtgttcaaatcaaaaaacgtgcgtgtgctcaaatgtgggcacaagtatcacaaagggtgctttaagcagtggcttaaagggcagagcgcttgcccggcctgccagggtcgtgatctcctgacagaagagtcaccttctggaagaggctggcccagtcagaatcaggagctgccttcctgctcttctaggtagtcacacttcactaaagtgtcatccaccagtgtgttgaatccgaagaatgacaattttctaccactggtgtaaaaaacaaacatttgaagacccttgtgcattgtgtgtcacaaagctaaatacatggaaatcgttaatatcgctgatattaagtaatttccccactctgagtgaatactttgatgattgccaacagtggctaataaaatgacggctaccacactcatgggtcactggggctgcgcagggctctttgaggtgggtggcttcttttggaaagtactatgaacgtctcgaagcagtattctagtgataagaattcttaacatagccaagcgccccacgtttgttccccacgtttgttccccttttctgtttgaaaaacctgttctggtagctccacaagagagatgatactgactttttaaattttttacaagagtctgtattcctgatatgcctatatttttcctcaaagattctgcattttaaggatgggcataagcaaactatattttaataatttatagttaatgttaaaatattggctgatttagaccaaaagattcaaatctcctctttgtgaaatcccatctgcatttgattttttattattttatgttcccccgttagattgttttaagtgtttgcttttcatcttttatagatgtaatctgattttcaaaaatcattaacactttttaattagtatcgactaagactttttccccctggaatcgaggctgtgtgtccgtcatcccagcccccggttggagcctgctctttgaactccgctgccttccttagcagcttctgtcctcttctgtgagtcagtcagcgagtgcttgggatccgcatccagccgtgctgagcacacaacaggctgtgtgtggaaatggccaccaccattctccttccccaccccaccacaaaaagagaagctgtgtctttagacaaccctgaggtatctgtgttacaatcgttctgtgtttgatatttgtgtaaagtatgcatgcagtcttgtactgtgacctaagaacaaaactgtaactgcattagaaaccatgaaaaaattagatattgttttgtgacttttagacagtggtaaatatagaaccatgaattctggtcacattccatttctctccaacatgaaggatcaaaaaatgtttttcaatgtgttctttgttccactggaaacttagagtcatgagtttatgagctgatttggtcaccttcctctgcctttgttcactgtgagttctgatgtcttagtgacttagttcttagaagctcacgccttagtttgaaacagattctccacggtggtccccaaaacactgtctgcatatccataagaattgagcgctatgggtgttaacgtgcatgaggatcagtttgcagcagcaagtacaaaaggagaagaggaacatccgttgaatgagtgtgttttgtacataacttcagatacttgtgaacatgccttatatttgtccaacaactgtcagtgtgggctatcggaagagttcttaaatggtctccctccagctcatgttgcccatattctaatg

SEQ ID NO: 371570 - DNA, 3742 bp, Homo sapiens
  misc_feature (3511)..(3511): n is a, c, g, or t
  misc_feature (3575)..(3576): n is a, c, g, or t
  misc_feature (3629)..(3629): n is a, c, g, or t
  misc_feature (3636)..(3636): n is a, c, g, or t
  misc_feature (3674)..(3674): n is a, c, g, or t
  misc_feature (3710)..(3710): n is a, c, g, or t
aatgaccagcaagaggattacatttatatttataaaagcaaacaaaaactattggccttgccaactaaaacatgcatacactccctgtagattagagaatcatttaggctggagagtaagtgtgaacacttctgggcacgtcggagtggttcttcggggtgtcttactgtaatcaggtacacgtagcgggtaggatgtggctgtctggtgtgacttggtgtcccaggcttggctggggggcatagtctgccacagggcgccagcttgggagtgtgttccactgaacttaggtcattgtttaagctatggcaccgtcacaattctagcctttcagtctcttttgttaaaaagtatattttgccatttatttaagtactttctaaatgtttttagatctcaaagacggaattagattggttccttcaagatttggaaagagaaattaaaaaatggcaacaggaaaaaaaagaaatccaagaaagactaaaatcactgaagaagaaaattaaaaaggtttcaaatgccagtgaaatgtatacccagaaaaatgatggaaaggaaaaggaacatgaattacatctggatcagtcccttgaaatcagcaacacacttacaaatgagaaaatgaaaatagaagagtatataaagaaagggaaagaggattatgaagagagtcatcagagagctgtggctgcagaggtatccgtacttgaaaactggaaggagagtgaagtgtataagctacagatcatggagtcacaagcagaagcctttctgaagaagctggggctgattagccgtgatcctgcagcatatcctgacatggagtctgatatacgttcatgggaattgtttctttctaatgttacaaaagaaattgagaaagcaaagtctcagtttgaagaacaaattaaggcaattaaaaatggttctcggctcagtgaactttctaaagtgcagatttctgagctttcatttcctgcctgtaacacggttcatcccgagttactccctgagtcttcaggccacgatggccaagggcttgtgacttctgcaagcgacgtgactggaaaccacgcagcacttcacagggatcctagtgtgttctctgctggtgattccccaggggaggctccttctgcgctgttgccagggccaccccctggtcagcctgaagccactcagctgacagggccaaaacgggctggccaggcagctctgtcagaacgaagccctgtggctgatcggaagcagcctgttcctccaggacgtgctgcgcgttcaagccagtctccaaaaaagccgttcaatagtattattgagcacctgtcagtggtattcccatgttacaacagcactgagcttgctggttttattaaaaaagtgcgaagcaaaaacaagaactcactctcaggattgagtattgatgaaattgtccaaagagtgacagaacacattctagatgaacagaaaaagaaaaagccaaacccaggaaaggacaagaggacttatgagcccagctctgccacccccgtgaccaggtcctcccagggctcaccctcggtggttgttgcaccatcacccaaaaccaaggggcagaaagcagaagatgtccctgtgaggattgcactgggtgcaagttcctgtgaaatatgccacgaggtgttcaaatcaaaaaacgtgcgtgtgctcaaatgtgggcacaagtatcacaaagggtgctttaagcagtggcttaaagggcagagcgcttgcccggcctgccagggtcgtgatctcctgacagaagagtcaccttctggaagaggctggcccagtcagaatcaggagctgccttcctgctcttctaggtagtcacacttcactaaagtgtcatccaccagtgtgttgaatccgaagaatgacaattttctaccactggtgtaaaaaacaaacatttgaagacccttgtgcattgtgtgtcacaaagctaaatacatggaaatcgttaatatcgctgatattaagtaatttccccactctgagtgaatactttgatgattgccaacagtggctaataaaatgacggctaccacactcatgggtcactggggctgcgcagggctctttgaggtgggtggcttcttttggaaagtactatgaacgtctcgaagcagtattctagtgataagaattcttaacatagccaagcgccccacgtttgttccccacgtttgttccccttttctgtttgaaaaacctgttctggtagctccacaagagagatgatactgactttttaaattttttacaagagtctgtattcctgatatgcctatatttttcctcaaagattctgcattttaaggatgggcataagcaaactatattttaataatttatagttaatgttaaaatattggctgatttagaccaaaagattcaaatctcctctttgtgaaatcccatctgcatttgattttttattattttatgttcccccgttagattgttttaagtgtttgcttttcatcttttatagatgtaatctgattttcaaaaatcattaacactttttaattagtatcgactaagactttttccccctggaatcgaggctgtgtgtccgtcatcccagcccccggttggagcctgctctttgaactccgctgccttccttagcagcttctgtcctcttctgtgagtcagtcagcgagtgcttgggatccgcatccagccgtgctgagcacacaacaggctgtgtgtggaaatggccaccaccattctccttccccaccccaccacaaaaagagaagctgtgtctttagacaaccctgaggtatctgtgttacaatcgttctgtgtttgatatttgtgtaaagtatgcatgcagtcttgtactgtgacctaagaacaaaactgtaactgcattagaaaccatgaaaaaattagatattgttttgtgacttttagacagtggtaaatatagaaccatgaattctggtcacattccatttctctccaacatgaaggatcaaaaaatgtttttcaatgtgttctttgttccactggaaacttagagtcatgagtttatgagctgatttggtcaccttcctctgcctttgttcactgtgagttctgatgtcttagtgacttagttcttagaagctcacgccttagtttgaaacagattctccacggtggtccccaaaacactgtctgcatatccataagaattgagcgctatgggtgttaacgtgcatgaggatcagtttgcagcagcaagtacaaaaggagaagaggaacatccgttgaatgagtgtgttttgtacataacttcagatacttgtgaacatgccttatatttgtccaacaactgtcagaataaagaacattctaaaatgagaaaaaaaaaaaaaaaaaaaaaaaaaaaaaaaaaaaaaaccaacgccattgctcagctaacggccacgcttcaacctggtgatgccccggcatactttccagcatagagcgcggaataagcgcaatngcctgctctgcgatcacacaggccaacattccgtgataagactccatctcatggatagttcccnngagcgcaccgtcagcatgaaaccagctctcgaagtgcgacgatccgacaattngcgccgnaggccataaatgtacttgcataacctgactggcacggnttactggcccatatccttgggcgtgaccatcataanttccttccgtattacccgtattccctcgatgg

SEQ ID NO: 371571 - DNA, 3037 bp, Homo sapiens
  misc_feature (2806)..(2806): n is a, c, g, or t
  misc_feature (2870)..(2871): n is a, c, g, or t
  misc_feature (2924)..(2924): n is a, c, g, or t
  misc_feature (2931)..(2931): n is a, c, g, or t
  misc_feature (2969)..(2969): n is a, c, g, or t
  misc_feature (3005)..(3005): n is a, c, g, or t
ggagtgtagtggcgtgatctcggctcactgcaagctctgcctcccgagttcacgccattctcctgccttagcctcctgagtagctgagactacagtgatcctgcagcatatcctgacatggagtctgatatacgttcatgggaattgtttctttctaatgttacaaaagaaattgagaaagcaaagtctcagtttgaagaacaaattaaggcaattaaaaatggttctcggctcagtgaactttctaaagtgcagatttctgagctttcatttcctgcctgtaacacggttcatcccgagttactccctgagtcttcaggccacgatggccaagggcttgtgacttctgcaagcgacgtgactggaaaccacgcagcacttcacagggatcctagtgtgttctctgctggtgattccccaggggaggctccttctgcgctgttgccagggccaccccctggtcagcctgaagccactcagctgacagggccaaaacgggctggccaggcagctctgtcagaacgaagccctgtggctgatcggaagcagcctgttcctccaggacgtgctgcgcgttcaagccagtctccaaaaaagccgttcaatagtattattgagcacctgtcagtggtattcccatgttacaacagcactgagcttgctggttttattaaaaaagtgcgaagcaaaaacaagaactcactctcaggattgagtattgatgaaattgtccaaagagtgacagaacacattctagatgaacagaaaaagaaaaagccaaacccaggaaaggacaagaggacttatgagcccagctctgccacccccgtgaccaggtcctcccagggctcaccctcggtggttgttgcaccatcacccaaaaccaaggggcagaaagcagaagatgtccctgtgaggattgcactgggtgcaagttcctgtgaaatatgccacgaggtgttcaaatcaaaaaacgtgcgtgtgctcaaatgtgggcacaagtatcacaaagggtgctttaagcagtggcttaaagggcagagcgcttgcccggcctgccagggtcgtgatctcctgacagaagagtcaccttctggaagaggctggcccagtcagaatcaggagctgccttcctgctcttctaggtagtcacacttcactaaagtgtcatccaccagtgtgttgaatccgaagaatgacaattttctaccactggtgtaaaaaacaaacatttgaagacccttgtgcattgtgtgtcacaaagctaaatacatggaaatcgttaatatcgctgatattaagtaatttccccactctgagtgaatactttgatgattgccaacagtggctaataaaatgacggctaccacactcatgggtcactggggctgcgcagggctctttgaggtgggtggcttcttttggaaagtactatgaacgtctcgaagcagtattctagtgataagaattcttaacatagccaagcgccccacgtttgttccccacgtttgttccccttttctgtttgaaaaacctgttctggtagctccacaagagagatgatactgactttttaaattttttacaagagtctgtattcctgatatgcctatatttttcctcaaagattctgcattttaaggatgggcataagcaaactatattttaataatttatagttaatgttaaaatattggctgatttagaccaaaagattcaaatctcctctttgtgaaatcccatctgcatttgattttttattattttatgttcccccgttagattgttttaagtgtttgcttttcatcttttatagatgtaatctgattttcaaaaatcattaacactttttaattagtatcgactaagactttttccccctggaatcgaggctgtgtgtccgtcatcccagcccccggttggagcctgctctttgaactccgctgccttccttagcagcttctgtcctcttctgtgagtcagtcagcgagtgcttgggatccgcatccagccgtgctgagcacacaacaggctgtgtgtggaaatggccaccaccattctccttccccaccccaccacaaaaagagaagctgtgtctttagacaaccctgaggtatctgtgttacaatcgttctgtgtttgatatttgtgtaaagtatgcatgcagtcttgtactgtgacctaagaacaaaactgtaactgcattagaaaccatgaaaaaattagatattgttttgtgacttttagacagtggtaaatatagaaccatgaattctggtcacattccatttctctccaacatgaaggatcaaaaaatgtttttcaatgtgttctttgttccactggaaacttagagtcatgagtttatgagctgatttggtcaccttcctctgcctttgttcactgtgagttctgatgtcttagtgacttagttcttagaagctcacgccttagtttgaaacagattctccacggtggtccccaaaacactgtctgcatatccataagaattgagcgctatgggtgttaacgtgcatgaggatcagtttgcagcagcaagtacaaaaggagaagaggaacatccgttgaatgagtgtgttttgtacataacttcagatacttgtgaacatgccttatatttgtccaacaactgtcagaataaagaacattctaaaatgagaaaaaaaaaaaaaaaaaaaaaaaaaaaaaaaaaaaaaaccaacgccattgctcagctaacggccacgcttcaacctggtgatgccccggcatactttccagcatagagcgcggaataagcgcaatngcctgctctgcgatcacacaggccaacattccgtgataagactccatctcatggatagttcccnngagcgcaccgtcagcatgaaaccagctctcgaagtgcgacgatccgacaattngcgccgnaggccataaatgtacttgcataacctgactggcacggnttactggcccatatccttgggcgtgaccatcataanttccttccgtattacccgtattccctcgatgg

SEQ ID NO: 371572 - DNA, 3047 bp, Homo sapiens
  misc_feature (2816)..(2816): n is a, c, g, or t
  misc_feature (2880)..(2881): n is a, c, g, or t
  misc_feature (2934)..(2934): n is a, c, g, or t
  misc_feature (2941)..(2941): n is a, c, g, or t
  misc_feature (2979)..(2979): n is a, c, g, or t
  misc_feature (3015)..(3015): n is a, c, g, or t
cgcgttaccccagtgcctgtgttcaagtcacccctattttactccataatggccccaaagcatgggagtaatgatgctggtcaatcagatatgccatagagaagcaatatattgcttcctttaagtgaaaagctgaaagttctcaacccaataaggaaagagaaaagatcgtatcctgaggttgctaagatctatggtcagaacaaatctacccatgatattgtgaagaaggaaaaagaaattcatgtgccatgctgctcaggagaccaggccccatgtgtccacgtgggagttgagggttcatcccgagttactccctgagtcttcaggccacgatggccaagggcttgtgacttctgcaagcgacgtgactggaaaccacgcagcacttcacagggatcctagtgtgttctctgctggtgattccccaggggaggctccttctgcgctgttgccagggccaccccctggtcagcctgaagccactcagctgacagggccaaaacgggctggccaggcagctctgtcagaacgaagccctgtggctgatcggaagcagcctgttcctccaggacgtgctgcgcgttcaagccagtctccaaaaaagccgttcaatagtattattgagcacctgtcagtggtattcccatgttacaacagcactgagcttgctggttttattaaaaaagtgcgaagcaaaaacaagaactcactctcaggattgagtattgatgaaattgtccaaagagtgacagaacacattctagatgaacagaaaaagaaaaagccaaacccaggaaaggacaagaggacttatgagcccagctctgccacccccgtgaccaggtcctcccagggctcaccctcggtggttgttgcaccatcacccaaaaccaaggggcagaaagcagaagatgtccctgtgaggattgcactgggtgcaagttcctgtgaaatatgccacgaggtgttcaaatcaaaaaacgtgcgtgtgctcaaatgtgggcacaagtatcacaaagggtgctttaagcagtggcttaaagggcagagcgcttgcccggcctgccagggtcgtgatctcctgacagaagagtcaccttctggaagaggctggcccagtcagaatcaggagctgccttcctgctcttctaggtagtcacacttcactaaagtgtcatccaccagtgtgttgaatccgaagaatgacaattttctaccactggtgtaaaaaacaaacatttgaagacccttgtgcattgtgtgtcacaaagctaaatacatggaaatcgttaatatcgctgatattaagtaatttccccactctgagtgaatactttgatgattgccaacagtggctaataaaatgacggctaccacactcatgggtcactggggctgcgcagggctctttgaggtgggtggcttcttttggaaagtactatgaacgtctcgaagcagtattctagtgataagaattcttaacatagccaagcgccccacgtttgttccccacgtttgttccccttttctgtttgaaaaacctgttctggtagctccacaagagagatgatactgactttttaaattttttacaagagtctgtattcctgatatgcctatatttttcctcaaagattctgcattttaaggatgggcataagcaaactatattttaataatttatagttaatgttaaaatattggctgatttagaccaaaagattcaaatctcctctttgtgaaatcccatctgcatttgattttttattattttatgttcccccgttagattgttttaagtgtttgcttttcatcttttatagatgtaatctgattttcaaaaatcattaacactttttaattagtatcgactaagactttttccccctggaatcgaggctgtgtgtccgtcatcccagcccccggttggagcctgctctttgaactccgctgccttccttagcagcttctgtcctcttctgtgagtcagtcagcgagtgcttgggatccgcatccagccgtgctgagcacacaacaggctgtgtgtggaaatggccaccaccattctccttccccaccccaccacaaaaagagaagctgtgtctttagacaaccctgaggtatctgtgttacaatcgttctgtgtttgatatttgtgtaaagtatgcatgcagtcttgtactgtgacctaagaacaaaactgtaactgcattagaaaccatgaaaaaattagatattgttttgtgacttttagacagtggtaaatatagaaccatgaattctggtcacattccatttctctccaacatgaaggatcaaaaaatgtttttcaatgtgttctttgttccactggaaacttagagtcatgagtttatgagctgatttggtcaccttcctctgcctttgttcactgtgagttctgatgtcttagtgacttagttcttagaagctcacgccttagtttgaaacagattctccacggtggtccccaaaacactgtctgcatatccataagaattgagcgctatgggtgttaacgtgcatgaggatcagtttgcagcagcaagtacaaaaggagaagaggaacatccgttgaatgagtgtgttttgtacataacttcagatacttgtgaacatgccttatatttgtccaacaactgtcagaataaagaacattctaaaatgagaaaaaaaaaaaaaaaaaaaaaaaaaaaaaaaaaaaaaaccaacgccattgctcagctaacggccacgcttcaacctggtgatgccccggcatactttccagcatagagcgcggaataagcgcaatngcctgctctgcgatcacacaggccaacattccgtgataagactccatctcatggatagttcccnngagcgcaccgtcagcatgaaaccagctctcgaagtgcgacgatccgacaattngcgccgnaggccataaatgtacttgcataacctgactggcacggnttactggcccatatccttgggcgtgaccatcataanttccttccgtattacccgtattccctcgatgg

SEQ ID NO: 371573 - DNA, 5919 bp, Homo sapiens
ctgaactagttgccagtgatcttgaaacgtgacagtaaccaagagataaataggtgacaatgacaggaaaattagatgtagtaaaagagagtgtttgagagcagaagctatggcaactaaagactggatttgaatccttcctagcttggtgacatgagcaaattacttgatttaagtgagcattttcccatctgtacagtggagataacgataattgtgcctgctaagaagaattgctgtgaagattagtgaaataatgcatgtaaaacatttggtacagtatgtgacacatagtacaaatagtttgctaggaagattgttattattcttcacttgtgatattgtgaagttttcatacagcaaattggacatcatgagatggattgattaaataaatagatttgaacttcaaggactggtagtgttcttgctttggaaagaagaaacttggtttatcctaataatagtaggataataatggtgaagtgataggtacaagtaatagtgtttatgatgcgctggtgatgataggaaaagaaagccattatatgggcaagagctagaagtaataaaatggtgcatttttcagtgatgtttggcctatgtagctattctctgataactataaaaatccttattattgaagattcttcaggaaaaaaaaacccttagtctgaaactttagcaccaatcccccttgccccccattgaaatacgtatttttaaaacatggcttttgataatgtgagggttttttcctttttgcgatttagcagtgctgattgtgtattgcagtagttgtgagagcattagaagcagcagtcgataggaggatggaaggtctggatgccgccttggggagttaggagattggcagacttaccctgtaccactctagccctactcctttgcccaagacagaaacacactgagatggataggagaatatgagcagttgataggaaagttctcagtggagtcaggatttaggttaggccaggagattgagaatataacagtttgtgtatgatgaaatggcatatttcacagaatgcagtaaaagcaggtagggtacaagtgcagcaacaggaagatgtcttttcttcattcagcaaacacttatttgagagcttaccatgtgctaggcacatacaaagataaataagatgcccttgatgatcctctatttaaaggagacatgtacaattcacgtgcttctgagataaatttgaagaaactacaacatcttgagttgatggaagatattgtggatttggcaaagaaagttgctaatgattcattccttattggaggcttattgagaattggttgtaaaatagaaaataaaatcttggcaatggaagaagctctgaattggataaaatatgcaggcgatgtaacaattctaactaaattaggatcaattgacaattgttggcctatgttaagtattttctttactgaatacaagtaccacataactaaaattgtaatggaagactgcaatttgcttgaagaacttaaaactcaaagttgtatggattgtatagaggaaggagaactaatgaaaatgaaaggaaatgaagagttttccaaagaaagatttgatatagctattatctattacaccagagccattgaatatagacctgaaaactaccttctttatggtaaccgagctctttgttttcttcgtactggacagtttagaaatgcactcggtgatggaaagagagccactattctgaagaacacttggccaaagggtcattatcgttattgtgatgctctttctatgctgggggaatatgactgggccctgcaagcaaacataaaagctcaaaaactctgtaaaaatgaccctgagggaatcaaggatctaattcagcagcatgtaaagttacaaaaacaaatagaagacctacaaggtcgaacagcaaataaggatccaattaaagccttttatgaaaacagggcctacacacctaggagtttatcagcacctatatttactacttcacttaactttgtggagaaggaaagagatttcagaaaaattaatcacgaaatggccaacggtggtaatcagaatctaaaggtggcggatgaggcgttgaaggtagatgattgtgactgtcatcctgaattttcaccaccatcaagtcagcctccaaaacataaaggaaaacaaaaatctcgaaacaatgaatcagaaaagttcagttctagttcaccattgactttaccagcagatttgaagaacatcttggagaaacagttttctaaatcttccagagctgcacaccaggattttgctaatataatgaaaatgctgagaagcttaattcaagatggctatatggccttattggagcagcgttgccgcagcgctgcacaggcctttacagagttgctgaacggtttagatcctcaaaaaataaagcaattgaacctggccatgattaactatgttttggtcgtctatggacttgccatttctctccttggaataggacagcctgaggaattatctgaagccgaaaaccagtttaagaggattattgaacactaccccagtgagggccttgattgcttggcctactgtggaattggaaaagtgtatttgaaaaaaaacagatttctagaagctctcaatcactttgagaaagcaagaaccttgatttatcgtcttcctggagtgttaacttggcccacgagtaatgtgattattgaagagtctcagccacaaaaaataaagatgctgttagagaaatttgttgaagaatgcaagttccctccagtgccagatgccatttgttgctatcagaagtgccatggatattctaagatccagatatacataactgatccagactttaagggttttatacgcatcagctgttgccagtactgtaaaatagaatttcacatgaattgctggaagaagttaaaaactacaacctttaatgataaaattgacaaggattttctacaaggaatatgtcttacccctgactgtgaaggtgtcatttctaagattatcatcttcagcagtggtggtgaagttaaatgtgaatttgaacacaaggtcataaaagaaaaggttcctccaagacctattctgaaacagaaatgttctagcctagagaaactaagactgaaagaagacaaaaaattgaagagaaagatccaaaaaaaagaagcaaaaaagttagcacaagaaagaatggaggaggacttaagagaaagtaatccacccaaaaatgaagagcagaaagaaactgtagacaatgttcagcgttgtcagttccttgatgacagaattctacagtgtataaagcagtatgctgacaagattaaatccggcatacagaatacagccatgcttctcaaagaattgctttcttggaaagttttgagcacagaagactatacaacctgtttttctagcagaaattttctaaatgaagcagtggactatgttattcgccacttgattcaagaaaataacagagtaaagacaagaatatttctgcatgttttgagtgagcttaaagaagtggagcccaaattagccgcctggatccaaaaacttaatagctttggcttagatgccacaggaactttcttttctcgttatggagcatctcttaaactgcttgattttagtatcatgactttcctctggaatgagaaatatggtcacaaactagactctatagaaggaaagcaacttgattatttctctgagccagcatcattgaaggaagcccgttgtttaatatggctgctagaagaacacagagacaagttcccagcattgcatagtgctttagatgaattctttgatataatggacagccgctgtactgtgttaaggaaacaagatagtggtgaagcaccgtttagttcaaccaaggtgaaaaacaaaagcaagaaaaagaagccaaaggattcaaagcctatgttagttgggtctggaacaacttcagtaacttcaaataatgagatcatcacttcaagtgaagaccatagcaatcgaaattcagattctgcaggcccatttgcagtgcctgaccatcttcggcaagatgtagaagaattcgaagctctctatgaccaacacagtaacgaatatgttgtccgcaataagaagctatgggacatgaacccaaaacaaaaatgttcaactctatatgattacttctctcagtttttggaggaacatggtcccttggacatgagtaacaagatgttctctgcagaatatgagtttttcccagaagaaactcgacagatactagaaaaagcaggaggtttaaaaccttttctcttgggatgccctcgttttgttgtgattgacaactgtattgcactgaagaaggttgcatcacggctcaagaaaaaaaggaagaagaaaaacattaaaacaaaagtagaagaaatttcaaaagcaggggagtatgtacgagttaaactacaactgaatccagctgctagggaatttaaaccagatgtaaagtctaaaccagtgtcagattcatcttcagcaccagcttttgaaaatgtgaaacccaaacctgtgtctgcaaattctcccaagccagcttgtgaagatgtgaaggccaaaccagtatccgacaattcttctagacaagtttctgaggatgggcaacccaaaggggtctcttctaattctcctaaaccaggctctgaggatgcaaattacaagcgagtctcctgtaattcccccaaaccggttcttgaggatgtgaaaccaacttattgggctcaatcccatttggtcacaggatactgtacgtatcttcctttccagagatttgatatcacccagacaccgccagcatacataaacgtgttaccaggtttgccccagtacaccagcatatatacacccttggccagcctttctcctgaatatcagctaccaagatcagtaccagtggtgccgtcttttgtagccaatgacagagcagataaaaatgctgctgcctattttgagggtcatcatttgaatgctgagaatgttgctggtcaccagattgcctctgaaacacagatccttgagggctctttgggaatatctgtaaagtcacactgcagcacaggtgatgctcatacagtcctgagtgagtctaacagaaatgatgagcactgtggaaattctaacaacaaatgtgaagtaattccagaaagcaccagtgcagtaacaaacattccacacgtgcagatggttgccatacaggtatcttggaacataatacaccaagaagtcaatactgagccatataatccttttgaggaacgacaaggggaaatttcacggattgaaaaggagcaccaagtattacaagaccaacttcaagaagtgtatgaaaattatgagcagataaaacttaagggcttagaagagaccagggacctggaagagaagttgaaaaggcacttagaagaaaacaagatctcaaagacggaattagattggttccttcaagatttggaaagagaaattaaaaaatggcaacaggaaaaaaaagaaatccaagaaagactaaaatcactgaagaagaaaattaaaaaggtttcaaatgccagtgaaatgtatacccagaaaaatgatggaaaggaaaaggaacatgaattacatctggatcagtcccttgaaatcaggcaaattaagcttaaatttatttttaatatattttaatacttttaatgccaggagtacaagcacagtagactttgaaatatattgttgcttgtctatttcttttaaataattatgtttctgttttctttatttctatttctgttgcattttaaaaattaatttataaatatattctttgaatatttaaatatttttattttacaagatttctgcatttatttcccatt

SEQ ID NO: 371574 - DNA, 3394 bp, Homo sapiens
ctgaactagttgccagtgatcttgaaacgtgacagtaaccaagagataaataggtgacaatgacaggaaaattagatgtagtaaaagagagtgtttgagagcagaagctatggcaactaaagactggatttgaatccttcctagcttggtgacatgagcaaattacttgatttaagtgagcattttcccatctgtacagtggagataacgataattgtgcctgctaagaagaattgctgtgaagattagtgaaataatgcatgtaaaacatttggtacagtatgtgacacatagtacaaatagtttgctaggaagattgttattattcttcacttgtgatattgtgaagttttcatacagcaaattggacatcatgagatggattgattaaataaatagatttgaacttcaaggactggtagtgttcttgctttggaaagaagaaacttggtttatcctaataatagtaggataataatggtgaagtgataggtacaagtaatagtgtttatgatgcgctggtgatgataggaaaagaaagccattatatgggcaagagctagaagtaataaaatggtgcatttttcagtgatgtttggcctatgtagctattctctgataactataaaaatccttattattgaagattcttcaggaaaaaaaaacccttagtctgaaactttagcaccaatcccccttgccccccattgaaatacgtatttttaaaacatggcttttgataatgtgagggttttttcctttttgcgatttagcagtgctgattgtgtattgcagtagttgtgagagcattagaagcagcagtcgataggaggatggaaggtctggatgccgccttggggagttaggagattggcagacttaccctgtaccactctagccctactcctttgcccaagacagaaacacactgagatggataggagaatatgagcagttgataggaaagttctcagtggagtcaggatttaggttaggccaggagattgagaatataacagtttgtgtatgatgaaatggcatatttcacagaatgcagtaaaagcaggtagggtacaagtgcagcaacaggaagatgtcttttcttcattcagcaaacacttatttgagagcttaccatgtgctaggcacatacaaagataaataagatgcccttgatgatcctctatttaaaggagacatgtacaattcacgtgcttctgagataaatttgaagaaactacaacatcttgagttgatggaagatattgtggatttggcaaagaaagttgctaatgattcattccttattggaggcttattgagaattggttgtaaaatagaaaataaaatcttggcaatggaagaagctctgaattggataaaatatgcaggcgatgtaacaattctaactaaattaggatcaattgacaattgttggcctatgttaagtattttctttactgaatacaagtaccacataactaaaattgtaatggaagactgcaatttgcttgaagaacttaaaactcaaagttgtatggattgtatagaggaaggagaactaatgaaaatgaaaggaaatgaagagttttccaaagaaagatttgatatagctattatctattacaccagagccattgaatatagacctgaaaactaccttctttatggtaaccgagctctttgttttcttcgtactggacagtttagaaatgcactcggtgatggaaagagagccactattctgaagaacacttggccaaagggtcattatcgttattgtgatgctctttctatgctgggggaatatgactgggccctgcaagcaaacataaaagctcaaaaactctgtaaaaatgaccctgagggaatcaaggatctaattcagcagcatgtaaagttacaaaaacaaatagaagacctacaaggtcgaacagcaaataaggatccaattaaagccttttatgaaaacagggcctacacacctaggagtttatcagcacctatatttactacttcacttaactttgtggagaaggaaagagatttcagaaaaattaatcacgaaatggccaacggtggtaatcagaatctaaaggtggcggatgaggcgttgaaggtagatgattgtgactgtcatcctgaattttcaccaccatcaagtcagcctccaaaacataaaggaaaacaaaaatctcgaaacaatgaatcagaaaagttcagttctagttcaccattgactttaccagcagatttgaagaacatcttggagaaacagttttctaaatcttccagagctgcacaccaggattttgctaatataatgaaaatgctgagaagcttaattcaagatggctatatggccttattggagcagcgttgccgcagcgctgcacaggcctttacagagttgctgaacggtttagatcctcaaaaaataaagcaattgaacctggccatgattaactatgttttggtcgtctatggacttgccatttctctccttggaataggacagcctgaggaattatctgaagccgaaaaccagtttaagaggattattgaacactaccccagtgagggccttgattgcttggcctactgtggaattggaaaagtgtatttgaaaaaaaacagatttctagaagctctcaatcactttgagaaagcaagaaccttgatttatcgtcttcctggagtgttaacttggcccacgagtaatgtgattattgaagagtctcagccacaaaaaataaagatgctgttagagaaatttgttgaagaatgcaagttccctccagtgccagatgccatttgttgctatcagaagtgccatggatattctaagatccagatatacataactgatccagactttaaggattttctacaaggaatatgtcttacccctgactgtgaaggtgtcatttctaagattatcatcttcagcagtggtggtgaagttaaatgtgaatttgaacacaaggtcataaaagaaaaggttcctccaagacctattctgaaacagaaatgttctagcctagagaaactaagactgaaagaagacaaaaaattgaagagaaagatccaaaaaaaagaagcaaaaaagttagcacaagaaagaatggaggaggacttaagagaaagtaatccacccaaaaatgaagagcagaaagaaactgtagacaatgttcagcgttgtcagttccttgatgacagaattctacagtgtataaagcagtatgctgacaagattaaatccggcatacagaatacagccatgcttctcaaagaattgctttcttggaagttggccagagactatcaccgtttctaggcgaattcttatggcgggctgtttgcctgttcgaattcggtgacgatttgcgggggc

SEQ ID NO: 371575 - DNA, 1436 bp, Homo sapiens
cttcaacgccgccacccgctccctcccgccgtcggctgacgtggagggccggaggtggcggcggcggcggcggcggctgctgctgctgctgctgcccgcgtccgaggctcgcgggcggcgggcccggtgtgcaccatggacaattttgctgagggagatttcactgtggcggattatgccttgttagaagattgccctcacgtggatgattgtgtctttgctgctgaatttatgagcaatgattatgttcgtgtgactcagctttactgtgatggggtgggtgtgcaatataaagattatatccaaagtgagaggaatttggaatttgacatctgcagtatatggtgtagtaaaccaatttctgtcctgcaagattattgcgatgccattaaaataaacatcttctggccacttctgtttcaacatcaaaacagttccgtaatatcacgattgcatccctgtgtggacgccaacaattcacgtgcttctgagataaatttgaagaaactacaacatcttgagttgatggaagatattgtggatttggcaaagaaagttgctaatgattcattccttattggaggcttattgagaattggttgtaaaatagaaaataaaatcttggcaatggaagaagctctgaattggataaaatatgcaggcgatgtaacaattctaactaaattaggatcaattgacaattgttggcctatgttaagtattttctttactgaatacaagtaccacataactaaaattgtaatggaagactgcaatttgcttgaagaacttaaaactcaaagttgtatggattgtatagaggaaggagaactaatgaaaatgaaaggaaatgaagagttttccaaagaaagatttgatatagctattatctattacaccagagccattgaatatagacctgaaaactaccttctttatggtaaccgagctctttgttttcttcgtactggacagtttagaacacattctcatggtagaaaatttggaaaatacaagagtttaaaaagaagaaaataaaaatcaccagtaatccaaccaccttggagaataccgctgtattaacgttatgcagcttttagatggcttaagccgtggataaaccgaggctatctagactagaggaatggatgggcttgacacagtcttccatcaataccactgtcctcaacgggttctgacaagaaatgagctgcacatgtctttaggttattgctactggctaggtccagaattgcatttattttgtgctgtttgaaggtgaatttgtatgctttcaagatcagatgaataggttggcaacttggctagcctcttgtgaaaattgaggtgcctgtctgaaatattgcctggcagaaggttttccactttccacttctgagagctgagaggcacaccagggtgtttctgctctcttt

SEQ ID NO: 371576 - DNA, 963 bp, Homo sapiens
cttcaacgccgccacccgctccctcccgccgtcggctgacgtggagggccggaggtggcggcggcggcggcggcggctgctgctgctgctgctgcccgcgtccgaggctcgcgggcggcgggcccggtgtgcaccatggacaattttgctgagggagatttcactgtggcggattatgccttgttagaagattgccctcacgtggatgattgtgtctttgctgctgaatttatgagcaatgattatgttcgtgtgactcagctttactgtgatggggtgggtgtgcaatataaagattatatccaaagtgagaggaatttggaatttgacatctgcagtatatggtgtagtaaaccaatttctgtcctgcaagattattgcgatgccattaaaataaacatcttctggccacttctgtttcaacatcaaaacagttccgtaatatcacgattgcatccctgtgtggacgccaacaattcacgtgcttctgagataaatttgaagaaactacaacatcttgagttgatggaagatattgtggatttggcaaagaaagttgctaatgattcattccttattggaggcttattgagaattggttgtaaaatagaaaataaaatcttggcaatggaagaagctctgaattggataaaatatgcaggcgatgtaacaattctaactaaattaggatcaattgacaattgttggcctatgttaagtattttctttactgaatacaagtaccacataactaaaattgtaatggaagactgcaatttgcttgaagaacttaaaactcaaagttgtatggattgtatagaggaaggagaactaatgaaaatgaaaggaaatgaagagttttccaaagaaagatttgatatagctattatctattacaccagagccattgaatataggtaagagcaaatagaacaaaagagatgctttttctatggcacatca

SEQ ID NO: 371577 - DNA, 823 bp, Homo sapiens
gcttcccccaacgcaacatctaggttcttaggaaacttcatttgttgtgaaaatcggaaatgaaaagacagttggtgacaaactcctttctccatcacctccttattggacagaaacgacccaggaatgcgcctcgcaagccaaagaagaagaagaggaagaggaaagaagaagaagaggaagaggaagaagaagaagaagaagaagaagaagaagaagaagaagaagaagaagaagaagaagaagaaaagaagaagaagaagaagaggaagaagaagaagaatgcagcagtaggttgtttacagattggtcacgagtcttggcaagaaagtctgaagacgggaccagctgcacatgttttaccctaagagcttgctatataaaggatactttctggaaggctggttggtgtgaggattcagtcttgcagccactcgagacatcacttctgttcgagaaaccaggagctctaagagaatgtataatgagaacttctatgtgtggagagttaaacaagaagctgtctcatcccagggaagatgaagagaaaatggcggatctgggcttgaagtgcacacagtgttggaaaaggccccacctaaggctctaggaccagcagtccctgagaagtagctgtgtgtaggattaagacaagctgactgcggagagctgtgacattgggcattcaagcatgaagcattgttggcccagagagggtgcacaagcattctccctcagagaaccatggtgttccagagccagagagagatggagagcttccacaatccttgtgaagatctgttatcctaacaccaatatatcc

SEQ ID NO: 371578 - DNA, 2228 bp, Homo sapiens
aagggaggaggcgccgagctgaccgggcgacgccgcgggaggttctggaaacgccgggagctgcgagtgtccagctgcggagacccgtgataattcgttaactaattcaacaaacgggacccttctgtgtgccagaaaccgcaagcagttgctaacccagtgggacaggcggattggaagagcgggaaggtcctggcccagagcagtgtgacacttccctctgtgaccatgaaactctgggtgtctgcattgctgatggcctggtttggtgtcctgagctgtgtgcaggccgaattcttcacctctattgggcacatgactgacctgatttatgcagagaaagagctggtgcagtctctgaaagagtacatccttgtggaggaagccaagctttccaagattaagagctgggccaacaaaatggaagccttgactagcaagtcagctgctgatgctgagggctacctggctcaccctgtgaatgcctacaaactggtgaagcggctaaacacagactggcctgcgctggaggaccttgtcctgcaggactcagctgcaggttttatcgccaacctctctgtgcagcggcagttcttccccactgatgaggacgagataggagctgccaaagccctgatgagacttcaggacacatacaggctggacccaggcacaatttccagaggggaacttccaggaaccaagtaccaggcaatgctgagtgtggatgactgctttgggatgggccgctcggcctacaatgaaggggactattatcatacggtgttgtggatggagcaggtgctaaagcagcttgatgccggggaggaggccaccacaaccaagtcacaggtgctggactacctcagctatgctgtcttccagttgggtgatctgcaccgtgccctggagctcacccgccgcctgctctcccttgacccaagccacgaacgagctggagggaatctgcggtactttgagcagttattggaggaagagagagaaaaaacgttaacaaatcagacagaagctgagctagcaaccccagaaggcatctatgagaggcctgtggactacctgcctgagagggatgtttacgagagcctctgtcgtggggagggtgtcaaactgacaccccgtagacagaagaggcttttctgtaggtaccaccatggcaacagggccccacagctgctcattgcccccttcaaagaggaggacgagtgggacagcccgcacatcgtcaggtactacgatgtcatgtctgatgaggaaatcgagaggatcaaggagatcgcaaaacctaaacttgcacgagccaccgttcgtgatcccaagacaggagtcctcactgtcgccagctaccgggtttccaaaagctcctggctagaggaagatgatgaccctgttgtggcccgagtaaatcgtcggatgcagcatatcacagggttaacagtaaagactgcagaattgttacaggttgcaaattatggagtgggaggacagtatgaaccgcacttcgacttctctaggcgaccttttgacagcggcctcaaaacagaggggaataggttagcgacgtttcttaactacatgagtgatgtagaagctggtggtgccaccgtcttccctgatctgggggctgcaatttggcctaagaagggtacagctgtgttctggtacaacctcttgcggagcggggaaggtgactaccgaacaagacatgctgcctgccctgtgcttgtgggctgcaagtgggtctccaataagtggttccatgaacgaggacaggagttcttgagaccttgtggatcaacagaagttgactgacatccttttctgtccttccccttcctggtccttcagcccatgtcaacgtgacagacacctttgtatgttcctttgtatgttcctatcaggctgatttttggagaaatgaatgtttgtctggagcagagggagaccatactagggcgactcctgtgtgactgaagtcccagcccttccattcagcctgtgccatccctggccccaaggctaggatcaaagtggctgcagcagagttagctgtctagcgcctagcaaggtgcctttgtacctcaggtgttttaggtgtgagatgtttcagtgaaccaaagttctgataccttgtttacatgtttgtttttatggcatttctatctattgtggctttaccaaaaaataaaatgtccctaccagaagcctta

SEQ ID NO: 371579 - DNA, 3517 bp, Homo sapiens
aagggaggaggcgccgagctgaccgggcgacgccgcgggaggttctggaaacgccgggagctgcgagtgtccagacatccttgtggaaccagcgttgtttttccttggcagctgcggagacccgtgataattcgttaactaattcaacaaacgggacccttctgtgtgccagaaaccgcaagcagttgctaacccagtgggacaggcggattggaagagcgggaaggtcctggcccagagcagtgtggtgagcgctgtgctggaagggaatgcgggcagtgggtacttggtagagcactgactgcctccggccagaggacttcccggaggaggtgacccatgagctggagtggtcagaggaaggctggcaaaagggcatcgtggacagaggaacagcctatgtgagtgggagcagagaccttggccaatgccattccttatggccttgtagtggaagcaaggtgatggggaaggaacactgtaggggatagctgtccacggacgctgtctacaagaccctggagtgagataacgtgcctggtactgtgccctgcatgtgtaagatgcccagttgaccttcgcagcaggagcctggatcagggcacttcctgcctcaggtattgctggacagcccagacacttccctctgtgaccatgaaactctgggtgtctgcattgctgatggcctggtttggtgtcctgagctgtgtgcaggccgaattcttcacctctattgggcacatgactgacctgatttatgcagagaaagagctggtgcagtctctgaaagagtacatccttgtggaggaagccaagctttccaagattaagagctgggccaacaaaatggaagccttgactagcaagtcagctgctgatgctgagggctacctggctcaccctgtgaatgcctacaaactggtgaagcggctaaacacagactggcctgcgctggaggaccttgtcctgcaggactcagctgcaggttttatcgccaacctctctgtgcagcggcagttcttccccactgatgaggacgagataggagctgccaaagccctgatgagacttcaggacacatacaggctggacccaggcacaatttccagaggggaacttccaggaaccaagtaccaggcaatgctgagtgtggatgactgctttgggatgggccgctcggcctacaatgaaggggactattatcatacggtgttgtggatggagcaggtgctaaagcagcttgatgccggggaggaggccaccacaaccaagtcacaggtgctggactacctcagctatgctgtcttccagttgggtgatctgcaccgtgccctggagctcacccgccgcctgctctcccttgacccaagccacgaacgagctggagggaatctgcggtactttgagcagttattggaggaagagagagaaaaaacgttaacaaatcagacagaagctgagctagcaaccccagaaggcatctatgagaggcctgtggactacctgcctgagagggatgtttacgagagcctctgtcgtggggagggtgtcaaactgacaccccgtagacagaagaggcttttctgtaggtaccaccatggcaacagggccccacagctgctcattgcccccttcaaagaggaggacgagtgggacagcccgcacatcgtcaggtactacgatgtcatgtctgatgaggaaatcgagaggatcaaggagatcgcaaaacctaaacttgcacgagccaccgttcgtgatcccaagacaggagtcctcactgtcgccagctaccgggtttccaaaagctcctggctagaggaagatgatgaccctgttgtggcccgagtaaatcgtcggatgcagcatatcacagggttaacagtaaagactgcagaattgttacaggttgcaaattatggagtgggaggacagtatgaaccgcacttcgacttctctaggaatgatgagcgagatactttcaagcatttagggacggggaatcgtgtggctactttcttaaactacatgagtgatgtagaagctggtggtgccaccgtcttccctgatctgggggctgcaatttggcctaagaagggtacagctgtgttctggtacaacctcttgcggagcggggaaggtgactaccgaacaagacatgctgcctgccctgtgcttgtgggctgcaagtgggtctccaataagtggttccatgaacgaggacaggagttcttgagaccttgtggatcaacagaagttgactgacatccttttctgtccttccccttcctggtccttcagcccatgtcaacgtgacagacacctttgtatgttcctttgtatgttcctatcaggctgatttttggagaaatgaatgtttgtctggagcagagggagaccatactagggcgactcctgtgtgactgaagtcccagcccttccattcagcctgtgccatccctggccccaaggctaggatcaaagtggctgcagcagagttagctgtctagcgcctagcaaggtgcctttgtacctcaggtgttttaggtgtgagatgtttcagtgaaccaaagttctgataccttgtttacatgtttgtttttatggcatttctatctattgtggctttaccaaaaaataaaatgtccctaccagaagccttaaagagccttacttggagtatttttaagactggaagcttttaccaggttcatcatttcctatgcatcaccttcatgcaggcagagtctggataatgaatgctttagcagcaaaaaagcatcttgggtcttggatttcagacctggtttcaacacttgtgttccctctaagtgtcagtgtccttttctggaaagtagggtaaatagtttctctttgtctcccagagaacatagcacatgtgttcatgattgtaatgctgttataatgtgtacttcatttttaaattttgagataagaattgttcatgatacacagatgtatacttaaaaaaatatgaaggtgagcaggagcacctgtgtcaacaccaagttagaaaagagaacgttttcaagtcagtacctcaggagccccttgggaacccctcctagatcacatctccttcactgcccccagcactttggagataaatcattgtctcatgatgtgtggtactcattcctttgcttgtctttatagttttaccatctatgattagatccctaaataagtagttattctgttttccctgattttgaacttttactaatagaatgagagtaaatatttttgggtatgtggcttcttttgttcaacattgttttaagattcatccgtgttgcttgtgtagctgtaatttgttttaatctttatagtacattcagttttgttaatgcttattgtaggactgtaccataatacaggcagcatgctgctgataaacactggaattgatttcagtctttgtatattgtgaataatgctgtgataaacatttttatacatgattcctggtgcacatataaacacatatttctgtagg

SEQ ID NO: 371580 - DNA, 2054 bp, Homo sapiens
gcctcgtgccgaatcggcacgagggcgagtgtccagacacttccctctgtgaccatgaaactctgggtgtctgcattgctgatggcctggtttggtgtcctgagctgtgtgcaggccgaattcttcacctctattgggcacatgactgacctgatttatgcagagaaagagctggtgcagtctctgaaagagtacatccttgtggaggaagccaagctttccaagattaagagctgggccaacaaaatggaagccttgactagcaagtcagctgctgatgctgagggctacctggctcaccctgtgaatgcctacaaactggtgaagcggctaaacacagactggcctgcgctggaggaccttgtcctgcaggactcagctgcaggttttatcgccaacctctctgtgcagcggcagttcttccccactgatgaggacgagataggagctgccaaagccctgatgagacttcaggacacatacaggctggacccaggcacaatttccagaggggaacttccaggaaccaagtaccaggcaatgctgagtgtggatgactgctttgggatgggccgctcggcctacaatgaaggggactattatcatacggtgttgtggatggagcaggtgctaaagcagcttgatgccggggaggaggccaccacaaccaagtcacaggtgctggactacctcagctatgctgtcttccagttgggtgatctgcaccgtgccctggagctcacccgccgcctgctctcccttgacccaagccacgaacgagctggagggaatctgcggtactttgagcagttattggaggaagagagagaaaaaacgttaacaaatcagacagaagctgagctagcaaccccagaaggcatctatgagaggcctgtggactacctgcctgagagggatgtttacgagagcctctgtcgtggggagggtgtcaaactgacaccccgtagacagaagaggcttttctgtaggtaccaccatggcaacagggccccacagctgctcattgcccccttcaaagaggaggacgagtgggacagcccgcacatcgtcaggtactacgatgtcatgtctgatgaggaaatcgagaggatcaaggagatcgcaaaacctaaacttgcacgagccaccgttcgtgatcccaagacaggagtcctcactgtcgccagctaccgggtttccaaaagctcctggctagaggaagatgatgaccctgttgtggcccgagtaaatcgtcggatgcagcatatcacagggttaacagtaaagactgcagaattgttacaggttgcaaattatggagtgggaggacagtatgaaccgcacttcgacttctctaggcgaccttttgacagcggcctcaaaacagaggggaataggttagcgacgtttcttaactacatgagtgatgtagaagctggtggtgccaccgtcttccctgatctgggggctgcaatttggcctaagaagggtacagctgtgttctggtacaacctcttgcggagcggggaaggtgactaccgaacaagacatgctgcctgccctgtgcttgtgggctgcaagtgggtctccaataagtggttccatgaacgaggacaggagttcttgagaccttgtggatcaacagaagttgactgacatccttttctgtccttccccttcctggtccttcagcccatgtcaacgtgacagacacctttgtatgttcctttgtatgttcctatcaggctgatttttggagaaatgaatgtttgtctggagcagagggagaccatactagggcgactcctgtgtgactgaagtcccagcccttccattcagcctgtgccatccctggccccaaggctaggatcaaagtggctgcagcagagttagctgtctagcgcctagcaaggtgcctttgtacctcaggtgttttaggtgtgagatgtttcagtgaaccaaagttctgataccttgtttacatgtttgtttttatggcatttctatctattgtggctttaccaaaaaataaaatgtccctaccagaagcctta

SEQ ID NO: 371581 - DNA, 2382 bp, Homo sapiens
aagggaggaggcgccgagctgaccgggcgacgccgcgggaggttctggaaacgccgggagctgcgagtgtccagctgcggagacccgtgataattcgttaactaattcaacaaacgggacccttctgtgtgccagaaaccgcaagcagttgctaacccagtgggacaggcggattggaagagcgggaaggtcctggcccagagcagtgtggtgagcgctgtgctggaagggaatgcgggcagtgggtacttggtagagcactgactgcctccggccagaggacttcccggaggaggtgacccatgagctggagtggtcagaggaaggctggcaaaagggcatcgtggacagaggaacagcctatacacttccctctgtgaccatgaaactctgggtgtctgcattgctgatggcctggtttggtgtcctgagctgtgtgcaggccgaattcttcacctctattgggcacatgactgacctgatttatgcagagaaagagctggtgcagtctctgaaagagtacatccttgtggaggaagccaagctttccaagattaagagctgggccaacaaaatggaagccttgactagcaagtcagctgctgatgctgagggctacctggctcaccctgtgaatgcctacaaactggtgaagcggctaaacacagactggcctgcgctggaggaccttgtcctgcaggactcagctgcaggttttatcgccaacctctctgtgcagcggcagttcttccccactgatgaggacgagataggagctgccaaagccctgatgagacttcaggacacatacaggctggacccaggcacaatttccagaggggaacttccaggaaccaagtaccaggcaatgctgagtgtggatgactgctttgggatgggccgctcggcctacaatgaaggggactattatcatacggtgttgtggatggagcaggtgctaaagcagcttgatgccggggaggaggccaccacaaccaagtcacaggtgctggactacctcagctatgctgtcttccagttgggtgatctgcaccgtgccctggagctcacccgccgcctgctctcccttgacccaagccacgaacgagctggagggaatctgcggtactttgagcagttattggaggaagagagagaaaaaacgttaacaaatcagacagaagctgagctagcaaccccagaaggcatctatgagaggcctgtggactacctgcctgagagggatgtttacgagagcctctgtcgtggggagggtgtcaaactgacaccccgtagacagaagaggcttttctgtaggtaccaccatggcaacagggccccacagctgctcattgcccccttcaaagaggaggacgagtgggacagcccgcacatcgtcaggtactacgatgtcatgtctgatgaggaaatcgagaggatcaaggagatcgcaaaacctaaacttgcacgagccaccgttcgtgatcccaagacaggagtcctcactgtcgccagctaccgggtttccaaaagctcctggctagaggaagatgatgaccctgttgtggcccgagtaaatcgtcggatgcagcatatcacagggttaacagtaaagactgcagaattgttacaggttgcaaattatggagtgggaggacagtatgaaccgcacttcgacttctctaggcgaccttttgacagcggcctcaaaacagaggggaataggttagcgacgtttcttaactacatgagtgatgtagaagctggtggtgccaccgtcttccctgatctgggggctgcaatttggcctaagaagggtacagctgtgttctggtacaacctcttgcggagcggggaaggtgactaccgaacaagacatgctgcctgccctgtgcttgtgggctgcaagtgggtctccaataagtggttccatgaacgaggacaggagttcttgagaccttgtggatcaacagaagttgactgacatccttttctgtccttccccttcctggtccttcagcccatgtcaacgtgacagacacctttgtatgttcctttgtatgttcctatcaggctgatttttggagaaatgaatgtttgtctggagcagagggagaccatactagggcgactcctgtgtgactgaagtcccagcccttccattcagcctgtgccatccctggccccaaggctaggatcaaagtggctgcagcagagttagctgtctagcgcctagcaaggtgcctttgtacctcaggtgttttaggtgtgagatgtttcagtgaaccaaagttctgataccttgtttacatgtttgtttttatggcatttctatctattgtggctttaccaaaaaataaaatgtccctaccagaagcctta

SEQ ID NO: 371582 - DNA, 2155 bp, Homo sapiens
gcttcccccaacgcaacatctaggttcttaggaaacttcatttgttgtgaaaatcggaaatgaaaagacagttggtgacaaactcctttctccatcacctccttattggacagaaacgacccaggaatgcgcctcgcacacttccctctgtgaccatgaaactctgggtgtctgcattgctgatggcctggtttggtgtcctgagctgtgtgcaggccgaattcttcacctctattgggcacatgactgacctgatttatgcagagaaagagctggtgcagtctctgaaagagtacatccttgtggaggaagccaagctttccaagattaagagctgggccaacaaaatggaagccttgactagcaagtcagctgctgatgctgagggctacctggctcaccctgtgaatgcctacaaactggtgaagcggctaaacacagactggcctgcgctggaggaccttgtcctgcaggactcagctgcaggttttatcgccaacctctctgtgcagcggcagttcttccccactgatgaggacgagataggagctgccaaagccctgatgagacttcaggacacatacaggctggacccaggcacaatttccagaggggaacttccaggaaccaagtaccaggcaatgctgagtgtggatgactgctttgggatgggccgctcggcctacaatgaaggggactattatcatacggtgttgtggatggagcaggtgctaaagcagcttgatgccggggaggaggccaccacaaccaagtcacaggtgctggactacctcagctatgctgtcttccagttgggtgatctgcaccgtgccctggagctcacccgccgcctgctctcccttgacccaagccacgaacgagctggagggaatctgcggtactttgagcagttattggaggaagagagagaaaaaacgttaacaaatcagacagaagctgagctagcaaccccagaaggcatctatgagaggcctgtggactacctgcctgagagggatgtttacgagagcctctgtcgtggggagggtgtcaaactgacaccccgtagacagaagaggcttttctgtaggtaccaccatggcaacagggccccacagctgctcattgcccccttcaaagaggaggacgagtgggacagcccgcacatcgtcaggtactacgatgtcatgtctgatgaggaaatcgagaggatcaaggagatcgcaaaacctaaacttgcacgagccaccgttcgtgatcccaagacaggagtcctcactgtcgccagctaccgggtttccaaaagctcctggctagaggaagatgatgaccctgttgtggcccgagtaaatcgtcggatgcagcatatcacagggttaacagtaaagactgcagaattgttacaggttgcaaattatggagtgggaggacagtatgaaccgcacttcgacttctctaggcgaccttttgacagcggcctcaaaacagaggggaataggttagcgacgtttcttaactacatgagtgatgtagaagctggtggtgccaccgtcttccctgatctgggggctgcaatttggcctaagaagggtacagctgtgttctggtacaacctcttgcggagcggggaaggtgactaccgaacaagacatgctgcctgccctgtgcttgtgggctgcaagtgggtctccaataagtggttccatgaacgaggacaggagttcttgagaccttgtggatcaacagaagttgactgacatccttttctgtccttccccttcctggtccttcagcccatgtcaacgtgacagacacctttgtatgttcctttgtatgttcctatcaggctgatttttggagaaatgaatgtttgtctggagcagagggagaccatactagggcgactcctgtgtgactgaagtcccagcccttccattcagcctgtgccatccctggccccaaggctaggatcaaagtggctgcagcagagttagctgtctagcgcctagcaaggtgcctttgtacctcaggtgttttaggtgtgagatgtttcagtgaaccaaagttctgataccttgtttacatgtttgtttttatggcatttctatctattgtggctttaccaaaaaataaaatgtccctaccagaagcctta

SEQ ID NO: 371583 - DNA, 1524 bp, Homo sapiens
ggtgcaccttgcgttttgctggtcgctctcgaggaccccggactgcacgcgcaacaatgaaggggactattatcatacggtgttgtggatggagcaggtgctaaagcagcttgatgccggggaggaggccaccacaaccaagtcacaggtgctggactacctcagctatgctgtcttccagttgggtgatctgcaccgtgccctggagctcacccgccgcctgctctcccttgacccaagccacgaacgagctggagggaatctgcggtactttgagcagttattggaggaagagagagaaaaaacgttaacaaatcagacagaagctgagctagcaaccccagaaggcatctatgagaggcctgtggactacctgcctgagagggatgtttacgagagcctctgtcgtggggagggtgtcaaactgacaccccgtagacagaagaggcttttctgtaggtaccaccatggcaacagggccccacagctgctcattgcccccttcaaagaggaggacgagtgggacagcccgcacatcgtcaggtactacgatgtcatgtctgatgaggaaatcgagaggatcaaggagatcgcaaaacctaaacttgcacgagccaccgttcgtgatcccaagacaggagtcctcactgtcgccagctaccgggtttccaaaagctcctggctagaggaagatgatgaccctgttgtggcccgagtaaatcgtcggatgcagcatatcacagggttaacagtaaagactgcagaattgttacaggttgcaaattatggagtgggaggacagtatgaaccgcacttcgacttctctaggcgaccttttgacagcggcctcaaaacagaggggaataggttagcgacgtttcttaactacatgagtgatgtagaagctggtggtgccaccgtcttccctgatctgggggctgcaatttggcctaagaagggtacagctgtgttctggtacaacctcttgcggagcggggaaggtgactaccgaacaagacatgctgcctgccctgtgcttgtgggctgcaagtgggtctccaataagtggttccatgaacgaggacaggagttcttgagaccttgtggatcaacagaagttgactgacatccttttctgtccttccccttcctggtccttcagcccatgtcaacgtgacagacacctttgtatgttcctttgtatgttcctatcaggctgatttttggagaaatgaatgtttgtctggagcagagggagaccatactagggcgactcctgtgtgactgaagtcccagcccttccattcagcctgtgccatccctggccccaaggctaggatcaaagtggctgcagcagagttagctgtctagcgcctagcaaggtgcctttgtacctcaggtgttttaggtgtgagatgtttcagtgaaccaaagttctgataccttgtttacatgtttgtttttatggcatttctatctattgtggctttaccaaaaaataaaatgtccctaccagaagcctta

SEQ ID NO: 371584 - DNA, 885 bp, Homo sapiens
cggatgtgggtctcctgtgggcctcaactcttgaacactcatgacatggagactgttctaatgaatcacactggttaagtaggcatgggaagagcctttcttggctaaagggctggccatggagcagacaccaagtagtgtcactcatgctgagaggagggcaatctatataccttgtcatgtcctttgtggctcaattgctctgagagccttgggtaggagggtcaagctctatgtcttatatttccagatgagtgatgtagaagctggtggtgccaccgtcttccctgatctgggggctgcaatttggcctaagaagggtacagctgtgttctggtacaacctcttgcggagcggggaaggtgactaccgaacaagacatgctgcctgccctgtgcttgtgggctgcaagtgggtctccaataagtggttccatgaacgaggacaggagttcttgagaccttgtggatcaacagaagttgactgacatccttttctgtccttccccttcctggtccttcagcccatgtcaacgtgacagacacctttgtatgttcctttgtatgttcctatcaggctgatttttggagaaatgaatgtttgtctggagcagagggagaccatactagggcgactcctgtgtgactgaagtcccagcccttccattcagcctgtgccatccctggccccaaggctaggatcaaagtggctgcagcagagttagctgtctagcgcctagcaaggtgcctttgtacctcaggtgttttaggtgtgagatgtttcagtgaaccaaagttctgataccttgtttacatgtttgtttttatggcatttctatctattgtggctttaccaaaaaataaaatgtccctaccagaagcctta

SEQ ID NO: 371585 - DNA, 507 bp, Homo sapiens
ggccgctcggcctacaatgaaggggactattatcatacggtgttgtggatggagcaggtgctaaagcagcttgatgccggggaggaggccaccacaaccaagtcacaggtgctggactacctcagctatgctgtcttccagttgggtgatctgcaccgtgccctggagctcacccgccgcctgctctcccttggtaaggagattctaggggaaggtaagatgggaatggagagtggcagaggaactgcactgtgctggcatctgcctgacccctctcctgggactgagtcagtttaccctgtcacttggccagtgactaatgccttactgactttaggaccagtccagcttcttactagctccttacccacctcaatcctggccttaggtttgcgcagtcgctgatagatacgctcaggcctgtggcacttgtgggcctttttaataaggactctgttatggtgtatctgtcaccatgcaggactacacagggtggaacctttacta

SEQ ID NO: 371586 - DNA, 2092 bp, Homo sapiens
aagggaggaggcgccgagctgaccgggcgacgccgcgggaggttctggaaacgccgggagctgcgagtgtccagacacttccctctgtgaccatgaaactctgggtgtctgcattgctgatggcctggtttggtgtcctgagctgtgtgcaggccgaattcttcacctctattgggcacatgactgacctgatttatgcagagaaagagctggtgcagtctctgaaagagtacatccttgtggaggaagccaagctttccaagattaagagctgggccaacaaaatggaagccttgactagcaagtcagctgctgatgctgagggctacctggctcaccctgtgaatgcctacaaactggtgaagcggctaaacacagactggcctgcgctggaggaccttgtcctgcaggactcagctgcaggttttatcgccaacctctctgtgcagcggcagttcttccccactgatgaggacgagataggagctgccaaagccctgatgagacttcaggacacatacaggctggacccaggcacaatttccagaggggaacttccaggaaccaagtaccaggcaatgctgagtgtggatgactgctttgggatgggccgctcggcctacaatgaaggggactattatcatacggtgttgtggatggagcaggtgctaaagcagcttgatgccggggaggaggccaccacaaccaagtcacaggtgctggactacctcagctatgctgtcttccagttgggtgatctgcaccgtgccctggagctcacccgccgcctgctctcccttgacccaagccacgaacgagctggagggaatctgcggtactttgagcagttattggaggaagagagagaaaaaacgttaacaaatcagacagaagctgagctagcaaccccagaaggcatctatgagaggcctgtggactacctgcctgagagggatgtttacgagagcctctgtcgtggggagggtgtcaaactgacaccccgtagacagaagaggcttttctgtaggtaccaccatggcaacagggccccacagctgctcattgcccccttcaaagaggaggacgagtgggacagcccgcacatcgtcaggtactacgatgtcatgtctgatgaggaaatcgagaggatcaaggagatcgcaaaacctaaacttgcacgagccaccgttcgtgatcccaagacaggagtcctcactgtcgccagctaccgggtttccaaaagctcctggctagaggaagatgatgaccctgttgtggcccgagtaaatcgtcggatgcagcatatcacagggttaacagtaaagactgcagaattgttacaggttgcaaattatggagtgggaggacagtatgaaccgcacttcgacttctctaggcgaccttttgacagcggcctcaaaacagaggggaataggttagcgacgtttcttaactacatgagtgatgtagaagctggtggtgccaccgtcttccctgatctgggggctgcaatttggcctaagaagggtacagctgtgttctggtacaacctcttgcggagcggggaaggtgactaccgaacaagacatgctgcctgccctgtgcttgtgggctgcaagtgggtctccaataagtggttccatgaacgaggacaggagttcttgagaccttgtggatcaacagaagttgactgacatccttttctgtccttccccttcctggtccttcagcccatgtcaacgtgacagacacctttgtatgttcctttgtatgttcctatcaggctgatttttggagaaatgaatgtttgtctggagcagagggagaccatactagggcgactcctgtgtgactgaagtcccagcccttccattcagcctgtgccatccctggccccaaggctaggatcaaagtggctgcagcagagttagctgtctagcgcctagcaaggtgcctttgtacctcaggtgttttaggtgtgagatgtttcagtgaaccaaagttctgataccttgtttacatgtttgtttttatggcatttctatctattgtggctttaccaaaaaataaaatgtccctaccagaagcctta

SEQ ID NO: 371587 - DNA, 2949 bp, Homo sapiens
aagggaggaggcgccgagctgaccgggcgacgccgcgggaggttctggaaacgccgggagctgcgagtgtccagacacttccctctgtgaccatgaaactctgggtgtctgcattgctgatggcctggtttggtgtcctgagctgtgtgcaggccgaattcttcacctctattgggcacatgactgacctgatttatgcagagaaagagctggtgcagtctctgaaagagtacatccttgtggaggaagccaagctttccaagattaagagctgggccaacaaaatggaagccttgactagcaagtcagctgctgatgctgagggctacctggctcaccctgtgaatgcctacaaactggtgaagcggctaaacacagactggcctgcgctggaggaccttgtcctgcaggactcagctgcaggttttatcgccaacctctctgtgcagcggcagttcttccccactgatgaggacgagataggagctgccaaagccctgatgagacttcaggacacatacaggctggacccaggcacaatttccagaggggaacttccaggaaccaagtaccaggcaatgctgagtgtggatgactgctttgggatgggccgctcggcctacaatgaaggggactattatcatacggtgttgtggatggagcaggtgctaaagcagcttgatgccggggaggaggccaccacaaccaagtcacaggtgctggactacctcagctatgctgtcttccagttgggtgatctgcaccgtgccctggagctcacccgccgcctgctctcccttgacccaagccacgaacgagctggagggaatctgcggtactttgagcagttattggaggaagagagagaaaaaacgttaacaaatcagacagaagctgagctagcaaccccagaaggcatctatgagaggcctgtggactacctgcctgagagggatgtttacgagagcctctgtcgtggggagggtgtcaaactgacaccccgtagacagaagaggcttttctgtaggtaccaccatggcaacagggccccacagctgctcattgcccccttcaaagaggaggacgagtgggacagcccgcacatcgtcaggtactacgatgtcatgtctgatgaggaaatcgagaggatcaaggagatcgcaaaacctaaacttgcacgagccaccgttcgtgatcccaagacaggagtcctcactgtcgccagctaccgggtttccaaaagctcctggctagaggaagatgatgaccctgttgtggcccgagtaaatcgtcggatgcagcatatcacagggttaacagtaaagactgcagaattgttacaggttgcaaattatggagtgggaggacagtatgaaccgcacttcgacttctctaggcgaccttttgacagcggcctcaaaacagaggggaataggttagcgacgtttcttaactacatgagtgatgtagaagctggtggtgccaccgtcttccctgatctgggggctgcaatttggcctaagaagggtacagctgtgttctggtacaacctcttgcggagcggggaaggtgactaccgaacaagacatgctgcctgccctgtgcttgtgggctgcaagtgggtctccaataagtggttccatgaacgaggacaggagttcttgagaccttgtggatcaacagaagttgactgacatccttttctgtccttccccttcctggtccttcagcccatgtcaacgtgacagacacctttgtatgttcctttgtatgttcctatcaggctgatttttggagaaatgaatgtttgtctggagcagagggagaccatactagggcgactcctgtgtgactgaagtcccagcccttccattcagcctgtgccatccctggccccaaggctaggatcaaagtggctgcagcagagttagctgtctagcgcctagcaaggtgcctttgtacctcaggtgttttaggtgtgagatgtttcagtgaaccaaagttctgataccttgtttacatgtttgtttttatggcatttctatctattgtggctttaccaaaaaataaaatgtccctaccagaagccttaaagagccttacttggagtatttttaagactggaagcttttaccaggttcatcatttcctatgcatcaccttcatgcaggcagagtctggataatgaatgctttagcagcaaaaaagcatcttgggtcttggatttcagacctggtttcaacacttgtgttccctctaagtgtcagtgtccttttctggaaagtagggtaaatagtttctctttgtctcccagagaacatagcacatgtgttcatgattgtaatgctgttataatgtgtacttcatttttaaattttgagataagaattgttcatgatacacagatgtatacttaaaaaaatatgaaggtgagcaggagcacctgtgtcaacaccaagttagaaaagagaacgttttcaagtcagtacctcaggagccccttgggaacccctcctagatcacatctccttcactgcccccagcactttggagataaatcattgtctcatgatgtgtggtactcattcctttgcttgtctttatagttttaccatctatgattagatccctaaataagtagttattctgttttccctgattttgaacttttactaatagaatgagagtaaatatttttgggtatgtggcttcttttgttcaacattgttttaagattcatccgtgttgcttgtgtagctgtaatttgttttaatctttatagtacattcagttttgttaatgcttattgtaggactgtaccataatacaggcagcatgctgctgataaacactggaattgatttcagtctttgtatattgtgaataatgctgtgataaacatttttatacatgattcctggtgcacatataaacacatatttctgtagg

SEQ ID NO: 371588 - DNA, 2668 bp, Homo sapiens
aagggaggaggcgccgagctgaccgggcgacgccgcgggaggttctggaaacgccgggagctgcgagtgtccagacatccttgtggaaccagcgttgtttttccttggcagctgcggagacccgtgataattcgttaactaattcaacaaacgggacccttctgtgtgccagaaaccgcaagcagttgctaacccagtgggacaggcggattggaagagcgggaaggtcctggcccagagcagtgtgacacttccctctgtgaccatgaaactctgggtgtctgcattgctgatggcctggtttggtgtcctgagctgtgtgcaggccgaattcttcacctctattgggcacatgactgacctgatttatgcagagaaagagctggtgcagtctctgaaagagtacatccttgtggaggaagccaagctttccaagattaagaggtgtcctaagtccccaaccatccttagttggccttccttcccttctgcccctcaaggaacaaggaagccatccagggtgcctataagaggaaacctttgagagggtgatgtggggctggcctggttacttcatgccagtgcttgagaggagctaagtacatgggctaaggagtcactgtttattttctatttaagaccttttcccttacattgggggtcccagctgttatctagattaaggggctagaagtatctgtggggagttactgtattcatttttcattgcctcttgatgaaaagggccccagaacctggcaccagggaattctcactaggaaaattgtcacaggtcaagacctatgtgggtggacgcattagtcttccttttcctctggttccacagctgggccaacaaaatggaagccttgactagcaagtcagctgctgatgctgagggctacctggctcaccctgtgaatgcctacaaactggtgaagcggctaaacacagactggcctgcgctggaggaccttgtcctgcaggactcagctgcaggttttatcgccaacctctctgtgcagcggcagttcttccccactgatgaggacgagataggagctgccaaagccctgatgagacttcaggacacatacaggctggacccaggcacaatttccagaggggaacttccaggaaccaagtaccaggcaatgctgagtgtggatgactgctttgggatgggccgctcggcctacaatgaaggggactattatcatacggtgttgtggatggagcaggtgctaaagcagcttgatgccggggaggaggccaccacaaccaagtcacaggtgctggactacctcagctatgctgtcttccagttgggtgatctgcaccgtgccctggagctcacccgccgcctgctctcccttgacccaagccacgaacgagctggagggaatctgcggtactttgagcagttattggaggaagagagagaaaaaacgttaacaaatcagacagaagctgagctagcaaccccagaaggcatctatgagaggcctgtggactacctgcctgagagggatgtttacgagagcctctgtcgtggggagggtgtcaaactgacaccccgtagacagaagaggcttttctgtaggtaccaccatggcaacagggccccacagctgctcattgcccccttcaaagaggaggacgagtgggacagcccgcacatcgtcaggtactacgatgtcatgtctgatgaggaaatcgagaggatcaaggagatcgcaaaacctaaacttgcacgagccaccgttcgtgatcccaagacaggagtcctcactgtcgccagctaccgggtttccaaaagctcctggctagaggaagatgatgaccctgttgtggcccgagtaaatcgtcggatgcagcatatcacagggttaacagtaaagactgcagaattgttacaggttgcaaattatggagtgggaggacagtatgaaccgcacttcgacttctctaggcgaccttttgacagcggcctcaaaacagaggggaataggttagcgacgtttcttaactacatgagtgatgtagaagctggtggtgccaccgtcttccctgatctgggggctgcaatttggcctaagaagggtacagctgtgttctggtacaacctcttgcggagcggggaaggtgactaccgaacaagacatgctgcctgccctgtgcttgtgggctgcaagtgggtctccaataagtggttccatgaacgaggacaggagttcttgagaccttgtggatcaacagaagttgactgacatccttttctgtccttccccttcctggtccttcagcccatgtcaacgtgacagacacctttgtatgttcctttgtatgttcctatcaggctgatttttggagaaatgaatgtttgtctggagcagagggagaccatactagggcgactcctgtgtgactgaagtcccagcccttccattcagcctgtgccatccctggccccaaggctaggatcaaagtggctgcagcagagttagctgtctagcgcctagcaaggtgcctttgtacctcaggtgttttaggtgtgagatgtttcagtgaaccaaagttctgataccttgtttacatgtttgtttttatggcatttctatctattgtggctttaccaaaaaataaaatgtccctaccagaagcctta

SEQ ID NO: 371589 - DNA, 2196 bp, Homo sapiens
tctagagagggggtctcgctatgttgcccagtggtcacgagtcttggcaagaaagtctgaagacgggaccagctgcacatgttttaccctaagagcttgctatataaaggatactttctggaaggctggttggtgtgaggattcagtcttgcagccactcgagacatcacttctgttcacacttccctctgtgaccatgaaactctgggtgtctgcattgctgatggcctggtttggtgtcctgagctgtgtgcaggccgaattcttcacctctattgggcacatgactgacctgatttatgcagagaaagagctggtgcagtctctgaaagagtacatccttgtggaggaagccaagctttccaagattaagagctgggccaacaaaatggaagccttgactagcaagtcagctgctgatgctgagggctacctggctcaccctgtgaatgcctacaaactggtgaagcggctaaacacagactggcctgcgctggaggaccttgtcctgcaggactcagctgcaggttttatcgccaacctctctgtgcagcggcagttcttccccactgatgaggacgagataggagctgccaaagccctgatgagacttcaggacacatacaggctggacccaggcacaatttccagaggggaacttccaggaaccaagtaccaggcaatgctgagtgtggatgactgctttgggatgggccgctcggcctacaatgaaggggactattatcatacggtgttgtggatggagcaggtgctaaagcagcttgatgccggggaggaggccaccacaaccaagtcacaggtgctggactacctcagctatgctgtcttccagttgggtgatctgcaccgtgccctggagctcacccgccgcctgctctcccttgacccaagccacgaacgagctggagggaatctgcggtactttgagcagttattggaggaagagagagaaaaaacgttaacaaatcagacagaagctgagctagcaaccccagaaggcatctatgagaggcctgtggactacctgcctgagagggatgtttacgagagcctctgtcgtggggagggtgtcaaactgacaccccgtagacagaagaggcttttctgtaggtaccaccatggcaacagggccccacagctgctcattgcccccttcaaagaggaggacgagtgggacagcccgcacatcgtcaggtactacgatgtcatgtctgatgaggaaatcgagaggatcaaggagatcgcaaaacctaaacttgcacgagccaccgttcgtgatcccaagacaggagtcctcactgtcgccagctaccgggtttccaaaagctcctggctagaggaagatgatgaccctgttgtggcccgagtaaatcgtcggatgcagcatatcacagggttaacagtaaagactgcagaattgttacaggttgcaaattatggagtgggaggacagtatgaaccgcacttcgacttctctaggcgaccttttgacagcggcctcaaaacagaggggaataggttagcgacgtttcttaactacatgagtgatgtagaagctggtggtgccaccgtcttccctgatctgggggctgcaatttggcctaagaagggtacagctgtgttctggtacaacctcttgcggagcggggaaggtgactaccgaacaagacatgctgcctgccctgtgcttgtgggctgcaagtgggtctccaataagtggttccatgaacgaggacaggagttcttgagaccttgtggatcaacagaagttgactgacatccttttctgtccttccccttcctggtccttcagcccatgtcaacgtgacagacacctttgtatgttcctttgtatgttcctatcaggctgatttttggagaaatgaatgtttgtctggagcagagggagaccatactagggcgactcctgtgtgactgaagtcccagcccttccattcagcctgtgccatccctggccccaaggctaggatcaaagtggctgcagcagagttagctgtctagcgcctagcaaggtgcctttgtacctcaggtgttttaggtgtgagatgtttcagtgaaccaaagttctgataccttgtttacatgtttgtttttatggcatttctatctattgtggctttaccaaaaaataaaatgtccctaccagaagcctta

SEQ ID NO: 371590 - DNA, 1425 bp, Homo sapiens
gttaatcactgctgttccccgtgggggtgtgtctagtctaagcgttttgacctgcattgctgcgtgcttgatgcttgtcccttttgactcgtggtgatttagagggtgaactcactagccaaccgtggactagtacccaagccacgaacgagctggagggaatctgcggtactttgagcagttattggaggaagagagagaaaaaacgttaacaaatcagacagaagctgagctagcaaccccagaaggcatctatgagaggcctgtggactacctgcctgagagggatgtttacgagagcctctgtcgtggggagggtgtcaaactgacaccccgtagacagaagaggcttttctgtaggtaccaccatggcaacagggccccacagctgctcattgcccccttcaaagaggaggacgagtgggacagcccgcacatcgtcaggtactacgatgtcatgtctgatgaggaaatcgagaggatcaaggagatcgcaaaacctaaacttgcacgagccaccgttcgtgatcccaagacaggagtcctcactgtcgccagctaccgggtttccaaaagctcctggctagaggaagatgatgaccctgttgtggcccgagtaaatcgtcggatgcagcatatcacagggttaacagtaaagactgcagaattgttacaggttgcaaattatggagtgggaggacagtatgaaccgcacttcgacttctctaggcgaccttttgacagcggcctcaaaacagaggggaataggttagcgacgtttcttaactacatgagtgatgtagaagctggtggtgccaccgtcttccctgatctgggggctgcaatttggcctaagaagggtacagctgtgttctggtacaacctcttgcggagcggggaaggtgactaccgaacaagacatgctgcctgccctgtgcttgtgggctgcaagtgggtctccaataagtggttccatgaacgaggacaggagttcttgagaccttgtggatcaacagaagttgactgacatccttttctgtccttccccttcctggtccttcagcccatgtcaacgtgacagacacctttgtatgttcctttgtatgttcctatcaggctgatttttggagaaatgaatgtttgtctggagcagagggagaccatactagggcgactcctgtgtgactgaagtcccagcccttccattcagcctgtgccatccctggccccaaggctaggatcaaagtggctgcagcagagttagctgtctagcgcctagcaaggtgcctttgtacctcaggtgttttaggtgtgagatgtttcagtgaaccaaagttctgataccttgtttacatgtttgtttttatggcatttctatctattgtggctttaccaaaaaataaaatgtccctaccagaagcctta

SEQ ID NO: 371591 - DNA, 1528 bp, Homo sapiens
  misc_feature (1516)..(1516): n is a, c, g, or t
  misc_feature (1528)..(1528): n is a, c, g, or t
aagggaggaggcgccgagctgaccgggcgacgccgcgggaggttctggaaacgccgggagctgcgagtgtccagacacttccctctgtgaccatgaaactctgggtgtctgcattgctgatggcctggtttggtgtcctgagctgtgtgcaggccgaattcttcacctctattgggcacatgactgacctgatttatgcagagaaagagctggtgcagtctctgaaagagtacatccttgtggaggaagccaagctttccaagattaagagctgggccaacaaaatggaagccttgactagcaagtcagctgctgatgctgagggctacctggctcaccctgtgaatgcctacaaactggtgaagcggctaaacacagactggcctgcgctggaggaccttgtcctgcaggactcagctgcaggttttatcgccaacctctctgtgcagcggcagttcttccccactgatgaggacgagataggagctgccaaagccctgatgagacttcaggacacatacaggctggacccaggcacaatttccagaggggaacttccaggaaccaagtaccaggcaatgctgagtgtggatgactgctttgggatgggccgctcggcctacaatgaaggggactattatcatacggtgttgtggatggagcaggtgctaaagcagcttgatgccggggaggaggccaccacaaccaagtcacaggtgctggactacctcagctatgctgtcttccagttgggtgatctgcaccgtgccctggagctcacccgccgcctgctctcccttgacccaagccacgaacgagctggagggaatctgcggtactttgagcagttattggaggaagagagagaaaaaacgttaacaaatcagacagaagctgagctagcaaccccagaaggcatctatgagaggcctgtggactacctgcctgagagggatgtttacgagagcctctgtcgtggggagggtgtcaaactgacaccccgtagacagaagaggcttttctgtaggtaccaccatggcaacagggccccacagctgctcattgcccccttcaaagaggaggacgagtgggacagcccgcacatcgtcaggtactacgatgtcatgtctgatgaggaaatcgagaggatcaaggagatcgcaaaacctaaacttgcacgagccaccgttcgtgatcccaagacaggagtcctcactgtcgccagctaccgggtttccaaaagctcctggctagaggaagatgatgaccctgttgtggcccgagtaaatcgtcggatgcagcatatcacagggttaacagtaaagactgcagaattgttacaggttgcaaattatggagtgggaggacagtatgaaccgcacttcgacttctctaggcgaccttttgacagcggcctcaaaacagaggggaataggttagcgacgtttcttaactacatgagtgatgtagaagctggtggtgccaccgtcttccctgaagtgtcaacgtggggatnctctagagcggn

SEQ ID NO: 371592 - DNA, 2498 bp, Homo sapiens
cgtgacgcatttcctgtttgttgttggagaaaggagagaaaggaaagcgcgaggagccgccgccaccaccagcgcagcagtcctggagctgtgaggagattcgggccgtcaccctgcctcccctgcgtcccgccaccggccgcttctgtcctcggacccattccaacaatctcgtaaaacatggtggattactatgaagttctaggcgtgcagagacatgcctcacccgaggatattaaaaaggcatatcggaaactggcactgaagtggcatccagataaaaatcctgagaataaagaagaagcagagagaaaattcaagcaagtagcggaggcatatgaagtgctgtcggatgctaagaaacgggacatctatgacaaatatggcaaagaaggattaaatggtggaggaggaggtggaagtcattttgacagtccatttgaatttggcttcacattccgtaacccagatgatgtcttcagggaattttttggtggaagggacccattttcatttgacttctttgaagacccttttgaggacttctttgggaatcgaaggggtccccgaggaagcagaagccgagggacggggtcgtttttctctgcgttcagtggatttccgtcttttggaagtggattttcttcttttgatacaggatttacttcatttgggtcactaggtcacgggggcctcacttcattctcttccacgtcatttggtggtagtggcatgggcaacttcaaatcgatatcaacttcaactaaaatggttaatggcagaaaaatcactacaaagagaattgtcgagaacggtcaagaaagagtagaagttgaagaagatggccagttaaagtccttaacaataaatggtgtggccgacgacgatgccctcgctgaggagcgcatgcggagaggccagaacgccctgccagcccagcctgccggcctccgcccgccgaagccgccccggcctgcctcgctgctgagacacgcgcctcactgtctctctgaggaggagggcgagcaggaccgacctcgggcacccgggccctgggaccccctcgcgtccgcagcaggattgaaagaaggtggcaagaggaagaagcagaagcagagagaggagtcgaagaagaagaagtcgaccaaaggcaatcactagaccggacttgaggcacgcggtgcacccccagacgctggcgctccaccgtgctcggcatgcggtcgtgcacacgcgctaggtagcagcgtcggtcaggactgtctcgaggccacactcgctcggcaggattatgcgatcacggatcagtcagagcagggtcaggagacggggctgacggcacgggtggcggggacagacgtttgggacttggccgcgactctctgcttctctccagctctcaatctgctgcattttcctctagtgcttccggatcctcttcattcttttcggctactcaaccactccgcatgctgctggaatatttctggctttagaagtacaggagggcgcagatggctaactgagtaacattcatgaaatgaggctttctgtggcggcgtagtgtttggaattagaaggtaattcagtagagtgtaacttagagaatattgcaagtgacacattgaatcctgcccgtcagggcaccttttcctcagagcaatccggccacacgaatagaaggctgtcgtgaatcacatcagatgtaaaatcattccttctgtttactcttttaattttcatcctttgcaggtagtgcaaattcaacttcaaatatggtgtaggttttgctagattccatatttttttcttggatttttgctaattatttttagcaaaaaatttttgctcagtggcaccctccctagtgtccatgggttagggccatgctggggaaaacgggccggtatttacacacgcgcaaaacacccagagacggcacaaggaggttgaactcatgtttcagttcgcgaacattgactccttacgaaagtcacttcattctaactagatgcgcccacttccggtcattatttcgtttgcatgatgtattgcttcttcacgttttgtttttattgagcacggagtagaattccagggctgccttgacttcttccctgcatgctccctcccagtgactttccttccctttcacatgaggatctgccgttcatgttgctttctcctttgtcctcttggacttgagggcattgtgaaaagctttgctgtgatttaaaaatgccagcaattttaatctagcagtgttgaagctgggaattttttggcgcaatccatgtagcagtgacccaggcttgggagccagaaacaagtgtgacctgggattttatttaacacaactgttgccaaagagttggctttgtttatttggttttggcggggagaggagtggtatttgatgctttctgtggacaatgtaaccctaaacacatcatgtattttaaatgccacctacataaataaaacataagcatattgaa

SEQ ID NO: 371593 - DNA, 455 bp, Homo sapiens
actagttctagatcgcgagcggcgcccttttggggggtttttaaaattgttgtaaatctctgtatgcactttgcttttttattaaacgtactccaaggtgagtcttgactctttagtgtaggacaagattgtacactaacaccagcatggacctgcttttcattgtgtctgaaatgtgagccacgtagtgtcggcctgctgtgaagttaacattgccaggacgattcttctacagaaataatttcaatttttttcagtatttagtagtgaaagatattaatacattaatggtaatacatttctggtttaatataaattaaggatgttttctagttgtgcatgaatgctggcaacttagtaagttttgacaattgtttaaatatgtaatgttaagcttaggtttaaaaaagtaaagctggtaaactgggtctttgtcatttgctttaaaaaaaaaa

SEQ ID NO: 371594 - DNA, 307 bp, Homo sapiens
gccctggcgccgtcttcatgctcttggccatgacgattcttctacagaaataatttcaatttttttcagtatttagtagtgaaagatattaatacattaatggtaatacatttctggtttaatataaattaaggatgttttctagttgtgcatgaatgctggcaacttagtaagttttgacaattgtttaaatatgtaatgttaagcttaggtttaaaaaagtaaagctggtaaactgggtctttgtcatttgctttaaaaaaaaaaaaaaagaaaataaatgcgaatgtgttggtgcattcttcct

SEQ ID NO: 371595 - DNA, 1701 bp, Homo sapiens
cgctgtgcggagatgccacccagctccaccgcaggaccgcggagcgagaggcggcagacgcgctccgggggccgccggtcaagaggaagatgaagggcgcgacgacttcgcggtttccagaatgggctccttctggcccaacaataagtgccatttggaatcttctcggccttctctgtgccttccgcgcgtctgggctccccggagagaaaggaaagcgcgaggagccgccgccaccaccagcgcagcagtcctggagctgtgaggagattcgggccgtcaccctgcctcccctgcgtcccgccaccggccgcttctgtcctcggacccattccaacaatctcgtaaaacatggtggattactatgaagttctaggcgtgcagagacatgcctcacccgaggatattaaaaaggcatatcggaaactggcactgaagtggcatccagataaaaatcctgagaataaagaagaagcagagagaaaattcaagcaagtagcggaggcatatgaagtgctgtcggatgctaagaaacgggacatctatgacaaatatggcaaagaaggattaaatggtggaggaggaggtggaagtcattttgacagtccatttgaatttggcttcacattccgtaacccagatgatgtcttcagggaattttttggtggaagggacccattttcatttgacttctttgaagacccttttgaggacttctttgggaatcgaaggggtccccgaggaagcagaagccgagggacggggtcgtttttctctgcgttcagtggatttccgtcttttggaagtggattttcttcttttgatacaggatttacttcatttgggtcactaggtcacgggggcctcacttcattctcttccacgtcatttggtggtagtggcatgggcaacttcaaatcgatatcaacttcaactaaaatggttaatggcagaaaaatcactacaaagagaattgtcgagaacggtcaagaaagagtagaagttgaagaagatggccagttaaagtccttaacaataaatggtaaggagcagctgctgcgcttggataacaagtaattcaacgcacgcacttaacagaaatgttaaactataacaagcaccatttgaggattaacaggaacatttttttgaagatttcaaacgaactcgactttcagtataattgtacctaaagtatttataaacagctcatcggagcctctatttgtcatagacttttgagttgattgttgggaccacataataggaccattttttttttgtctttaaaattgttgtaaatctctgtatgcactttgcttttttattaaacgtactccaaggtgagtcttgactctttagtgtaggacaagattgtacactaacaccagcatggacctgcttttcattgtgtctgaaatgtgagccacgtagtgtcggcctgctgtgaagttaacattgccaggacgattcttctacagaaataatttcaatttttttcagtatttagtagtgaaagatattaatacattaatggtaatacatttctggtttaatataaattaaggatgttttctagttgtgcatgaatgctggcaacttagtaagttttgacaattgtttaaatatgtaatgttaagcttaggtttaaaaaagtaaagctggtaaactgggtctttgtcatttgctttaaaaaaaaaa

SEQ ID NO: 371596 - DNA, 1537 bp, Homo sapiens
aggatccttaattaaattaatcccttcctccgggagaaaggagagaaaggaaagcgcgaggagccgccgccaccaccagcgcagcagtcctggagctgtgaggagattcgggccgtcaccctgcctcccctgcgtcccgccaccggccgcttctgtcctcggacccattccaacaatctcgtaaaacatggtggattactatgaagttctaggcgtgcagagacatgcctcacccgaggatattaaaaaggcatatcggaaactggcactgaagtggcatccagataaaaatcctgagaataaagaagaagcagagagaaaattcaagcaagtagcggaggcatatgaagtgctgtcggatgctaagaaacgggacatctatgacaaatatggcaaagaaggattaaatggtggaggaggaggtggaagtcattttgacagtccatttgaatttggcttcacattccgtaacccagatgatgtcttcagggaattttttggtggaagggacccattttcatttgacttctttgaagacccttttgaggacttctttgggaatcgaaggggtccccgaggaagcagaagccgagggacggggtcgtttttctctgcgttcagtggatttccgtcttttggaagtggattttcttcttttgatacaggatttacttcatttgggtcactaggtcacgggggcctcacttcattctcttccacgtcatttggtggtagtggcatgggcaacttcaaatcgatatcaacttcaactaaaatggttaatggcagaaaaatcactacaaagagaattgtcgagaacggtcaagaaagagtagaagttgaagaagatggccagttaaagtccttaacaataaatggtaaggagcagctgctgcgcttggataacaagtaattcaacgcacgcacttaacagaaatgttaaactataacaagcaccatttgaggattaacaggaacatttttttgaagatttcaaacgaactcgactttcagtataattgtacctaaagtatttataaacagctcatcggagcctctatttgtcatagacttttgagttgattgttgggaccacataataggaccattttttttttgtctttaaaattgttgtaaatctctgtatgcactttgcttttttattaaacgtactccaaggtgagtcttgactctttagtgtaggacaagattgtacactaacaccagcatggacctgcttttcattgtgtctgaaatgtgagccacgtagtgtcggcctgctgtgaagttaacattgccaggacgattcttctacagaaataatttcaatttttttcagtatttagtagtgaaagatattaatacattaatggtaatacatttctggtttaatataaattaaggatgttttctagttgtgcatgaatgctggcaacttagtaagttttgacaattgtttaaatatgtaatgttaagcttaggtttaaaaaagtaaagctggtaaactgggtctttgtcatttgctttaaaaaaaaaa

SEQ ID NO: 371597 - DNA, 1534 bp, Homo sapiens
tggcggccgctcgcgatctagaactagtcggagaaaggagagaaaggaaagcgcgaggagccgccgccaccaccagcgcagcagtcctggagctgtgaggagattcgggccgtcaccctgcctcccctgcgtcccgccaccggccgcttctgtcctcggacccattccaacaatctcgtaaaacatggtggattactatgaagttctaggcgtgcagagacatgcctcacccgaggatattaaaaaggcatatcggaaactggcactgaagtggcatccagataaaaatcctgagaataaagaagaagcagagagaaaattcaagcaagtagcggaggcatatgaagtgctgtcggatgctaagaaacgggacatctatgacaaatatggcaaagaaggattaaatggtggaggaggaggtggaagtcattttgacagtccatttgaatttggcttcacattccgtaacccagatgatgtcttcagggaattttttggtggaagggacccattttcatttgacttctttgaagacccttttgaggacttctttgggaatcgaaggggtccccgaggaagcagaagccgagggacggggtcgtttttctctgcgttcagtggatttccgtcttttggaagtggattttcttcttttgatacaggatttacttcatttgggtcactaggtcacgggggcctcacttcattctcttccacgtcatttggtggtagtggcatgggcaacttcaaatcgatatcaacttcaactaaaatggttaatggcagaaaaatcactacaaagagaattgtcgagaacggtcaagaaagagtagaagttgaagaagatggccagttaaagtccttaacaataaatggtaaggagcagctgctgcgcttggataacaagtaattcaacgcacgcacttaacagaaatgttaaactataacaagcaccatttgaggattaacaggaacatttttttgaagatttcaaacgaactcgactttcagtataattgtacctaaagtatttataaacagctcatcggagcctctatttgtcatagacttttgagttgattgttgggaccacataataggaccattttttttttgtctttaaaattgttgtaaatctctgtatgcactttgcttttttattaaacgtactccaaggtgagtcttgactctttagtgtaggacaagattgtacactaacaccagcatggacctgcttttcattgtgtctgaaatgtgagccacgtagtgtcggcctgctgtgaagttaacattgccaggacgattcttctacagaaataatttcaatttttttcagtatttagtagtgaaagatattaatacattaatggtaatacatttctggtttaatataaattaaggatgttttctagttgtgcatgaatgctggcaacttagtaagttttgacaattgtttaaatatgtaatgttaagcttaggtttaaaaaagtaaagctggtaaactgggtctttgtcatttgctttaaaaaaaaaa

SEQ ID NO: 371598 - DNA, 1621 bp, Homo sapiens
cgtgacgcatttcctgtttgttgttggagaaaggagagaaaggaaagcgcgaggagccgccgccaccaccagcgcagcagtcctggagctgtgaggagattcgggccgtcaccctgcctcccctgcgtcccgccaccggccgcttctgtcctcggacccattccaacaatctcgtaaaacatggtggattactatgaagttctaggcgtgcagagacatgcctcacccgaggatattaaaaaggcatatcggaaactggcactgaagtggcatccagataaaaatcctgagaataaagaagaagcagagagaaaattcaagcaagtagcggaggcatatgaagtgctgtcggatgctaagaaacgggacatctatgacaaatatggcaaagaaggattaaatggtggaggaggaggtggaagtcattttgacagtccatttgaatttggcttcacattccgtaacccagatgatgtcttcagggaattttttggtggaagggacccattttcatttgacttctttgaagacccttttgaggacttctttgggaatcgaaggggtccccgaggaagcagaagccgagggacggggtcgtttttctctgcgttcagtggatttccgtcttttggaagtggattttcttcttttgatacaggatttacttcatttgggtcactaggtcacgggggcctcacttcattctcttccacgtcatttggtggtagtggcatgggcaacttcaaatcgatatcaacttcaactaaaatggttaatggcagaaaaatcactacaaagagaattgtcgagaacggtcaagaaagagtagaagttgaagaagatggccagttaaagtccttaacaataaatggtaaggagcagctgctgcgcttggataacaagtaattcaacgcacgcacttaacagaaatgttaaactataacaagcaccatttgaggattaacaggaacatttttttgaagatttcaaacgaactcgactttcagtataattgtacctaaagtatttataaacagctcatcggagcctctatttgtcatagacttttgagttgattgttgggaccacataataggaccattttttttttgtctttaaaattgttgtaaatctctgtatgcactttgcttttttattaaacgtactccaaggtgagtcttgactctttagtgtaggacaagattgtacactaacaccagcatggacctgcttttcattgtgtctgaaatgtgagccacgtagtgtcggcctgctgtgaagttaacattgccaggacgattcttctacagaaataatttcaatttttttcagtatttagtagtgaaagatattaatacattaatggtaatacatttctggtttaatataaattaaggatgttttctagttgtgcatgaatgctggcaacttagtaagttttgacaattgtttaaatatgtaatgttaagcttaggtttaaaaaagtaaagctggtaaactgggtctttgtcatttgctttaaaaaaaaaacactggccgcgtttaacaacgtggactggaaaacttgcgtaccaatttaacgcttgaaaaattccccttcccactgcgcggccgcacgtct

SEQ ID NO: 371599 - DNA, 1492 bp, Homo sapiens
cgtgacgcatttcctgtttgttgttggagaaaggagagaaaggaaagcgcgaggagccgccgccaccaccagcgcagcagtcctggagctgtgaggagattcgggccgtcaccctgcctcccctgcgtcccgccaccggccgcttctgtcctcggacccattccaacaatctcgtaaaacatggtggattactatgaagttctaggcgtgcagagacatgcctcacccgaggatattaaaaaggcatatcggaaactggcactgaagtggcatccagataaaaatcctgagaataaagaagaagcagagagaaaattcaagcaagtagcggaggcatatgaagtgctgtcggatgctaagaaacgggacatctatgacaaatatggcaaagaaggattaaatggtggaggaggaggtggaagtcattttgacagtccatttgaatttggcttcacattccgtaacccagatgatgtcttcagggaattttttggtggaagggacccattttcatttgacttctttgaagacccttttgaggacttctttgggaatcgaaggggtccccgaggaagcagaagccgagggacggggtcgtttttctctgcgttcagtggatttccgtcttttggaagtggattttcttcttttgatacaggatttacttcatttgggtcactaggtcacgggggcctcacttcattctcttccacgtcatttggtggtagtggcatgggcaacttcaaatcgatatcaacttcaactaaaatggttaatggcagaaaaatcactacaaagagaagatggccagttaaagtccttaacaataaatggtaaggagcagctgctgcgcttggataacaagtaattcaacgcacgcacttaacagaaatgttaaactataacaagcaccatttgaggattaacaggaacatttttttgaagatttcaaacgaactcgactttcagtataattgtacctaaagtatttataaacagctcatcggagcctctatttgtcatagacttttgagttgattgttgggaccacataataggaccattttttttttgtctttaaaattgttgtaaatctctgtatgcactttgcttttttattaaacgtactccaaggtgagtcttgactctttagtgtaggacaagattgtacactaacaccagcatggacctgcttttcattgtgtctgaaatgtgagccacgtagtgtcggcctgctgtgaagttaacattgccaggacgattcttctacagaaataatttcaatttttttcagtatttagtagtgaaagatattaatacattaatggtaatacatttctggtttaatataaattaaggatgttttctagttgtgcatgaatgctggcaacttagtaagttttgacaattgtttaaatatgtaatgttaagcttaggtttaaaaaagtaaagctggtaaactgggtctttgtcatttgctttaaaaaaaaaa

SEQ ID NO: 371600 - DNA, 2366 bp, Homo sapiens
cgtgacgcatttcctgtttgttgttggagaaaggagagaaaggaaagcgcgaggagccgccgccaccaccagcgcagcagtcctggagctgtgaggagattcgggccgtcaccctgcctcccctgcgtcccgccaccggccgcttctgtcctcggacccattccaacaatctcgtaaaacatggtggattactatgaagttctaggcgtgcagagacatgcctcacccgaggatattaaaaaggcatatcggaaactggcactgaagtggcatccagataaaaatcctgagaataaagaagaagcagagagaaaattcaagcaagtagcggaggcatatgaagtgctgtcggatgctaagaaacgggacatctatgacaaatatggcaaagaaggattaaatggtggaggaggaggtggaagtcattttgacagtccatttgaatttggcttcacattccgtaacccagatgatgtcttcagggaattttttggtggaagggacccattttcatttgacttctttggatttacttcatttgggtcactaggtcacgggggcctcacttcattctcttccacgtcatttggtggtagtggcatgggcaacttcaaatcgatatcaacttcaactaaaatggttaatggcagaaaaatcactacaaagagaattgtcgagaacggtcaagaaagagtagaagttgaagaagatggccagttaaagtccttaacaataaatggtgtggccgacgacgatgccctcgctgaggagcgcatgcggagaggccagaacgccctgccagcccagcctgccggcctccgcccgccgaagccgccccggcctgcctcgctgctgagacacgcgcctcactgtctctctgaggaggagggcgagcaggaccgacctcgggcacccgggccctgggaccccctcgcgtccgcagcaggattgaaagaaggtggcaagaggaagaagcagaagcagagagaggagtcgaagaagaagaagtcgaccaaaggcaatcactagaccggacttgaggcacgcggtgcacccccagacgctggcgctccaccgtgctcggcatgcggtcgtgcacacgcgctaggtagcagcgtcggtcaggactgtctcgaggccacactcgctcggcaggattatgcgatcacggatcagtcagagcagggtcaggagacggggctgacggcacgggtggcggggacagacgtttgggacttggccgcgactctctgcttctctccagctctcaatctgctgcattttcctctagtgcttccggatcctcttcattcttttcggctactcaaccactccgcatgctgctggaatatttctggctttagaagtacaggagggcgcagatggctaactgagtaacattcatgaaatgaggctttctgtggcggcgtagtgtttggaattagaaggtaattcagtagagtgtaacttagagaatattgcaagtgacacattgaatcctgcccgtcagggcaccttttcctcagagcaatccggccacacgaatagaaggctgtcgtgaatcacatcagatgtaaaatcattccttctgtttactcttttaattttcatcctttgcaggtagtgcaaattcaacttcaaatatggtgtaggttttgctagattccatatttttttcttggatttttgctaattatttttagcaaaaaatttttgctcagtggcaccctccctagtgtccatgggttagggccatgctggggaaaacgggccggtatttacacacgcgcaaaacacccagagacggcacaaggaggttgaactcatgtttcagttcgcgaacattgactccttacgaaagtcacttcattctaactagatgcgcccacttccggtcattatttcgtttgcatgatgtattgcttcttcacgttttgtttttattgagcacggagtagaattccagggctgccttgacttcttccctgcatgctccctcccagtgactttccttccctttcacatgaggatctgccgttcatgttgctttctcctttgtcctcttggacttgagggcattgtgaaaagctttgctgtgatttaaaaatgccagcaattttaatctagcagtgttgaagctgggaattttttggcgcaatccatgtagcagtgacccaggcttgggagccagaaacaagtgtgacctgggattttatttaacacaactgttgccaaagagttggctttgtttatttggttttggcggggagaggagtggtatttgatgctttctgtggacaatgtaaccctaaacacatcatgtattttaaatgccacctacataaataaaacataagcatattgaa

SEQ ID NO: 371601 - DNA, 1027 bp, Homo sapiens
  misc_feature (1027)..(1027): n is a, c, g, or t
cgtgacgcatttcctgtttgttgttggagaaaggagagaaaggaaagcgcgaggagccgccgccaccaccagcgcagcagtcctggagctgtgaggagattcgggccgtcaccctgcctcccctgcgtcccgccaccggccgcttctgtcctcggacccattccaacaatctcgtaaaacatggtggattactatgaagttctaggcgtgcagagacatgcctcacccgaggatattaaaaaggcatatcggaaactggcactgaagtggcatccagataaaaatcctgagaataaagaagaagcagagagaaaattcaagcaagtagcggaggcatatgaagtgctgtcggatgctaagaaacgggacatctatgacaaatatggcaaagaaggattaaatggtggaggaggaggtggaagtcattttgacagtccatttgaatttggcttcacattccgtaacccagatgatgtcttcagggaattttttggtggaagggacccattttcatttgacttctttgaagacccttttgaggacttctttgggaatcgaaggggtccccgaggaagcagaagccgagggacggggtcgtttttctctgcgttcagtggatttccgtcttttggaagtggattttcttcttttgatacaggatttacttcatttgggtcactaggtcacgggggcctcacttcattctcttccacgtcatttggtggtagtggcatgggcaacttcaaatcgatatcaacttcaactaaaatggttaatggcagaaaaatcactacaaagagaattgtcgagaacggtcaagaaagagtagaagttgaagaagatggccagttaaagtccttaacaataaatggtgtggccgacgacgatgccctcgctgaggagcgcatcggtagaaggacagaagaccgcacaggccaagtggacggagatcgagagacagaacaagacaggaaacacatcgtgagaccagcgcagcacggggtccgcagacgaggggcgcaaacan

SEQ ID NO: 371602 - DNA, 1462 bp, Homo sapiens
gagcttgggtgaagaaactgaacaccacctgcaactcgaggagggaaagagaagagtagttgtgtctacagataatacaggggagaaacgtggagctcctgcctgccgcaggcacgaagaagcataatcactctcatatctggggaccgggagactggcgtgctcatcgtttaagtgcatttgctgtaatcactgctgccatcagcagaaacagagctcaagaaagaaccatgtttacatccgtccttcatcaaccctcacaggacagggcagtgttcgggttgaagtcctgtgttctgatcggtgattctcgtggtgaccaagcgaggaagaaggcccgctcttccaacaccatggcttctcttctggggcacacgaggctctcaggatttacacactggggaagctgctgctccatggctgctatatgtatgtagtcactgagcagcctgctgacgaagacccttttgaggacttctttgggaatcgaaggggtccccgaggaagcagaagccgagggacggggtcgtttttctctgcgttcagtggatttccgtcttttggaagtggattttcttcttttgatacaggatttacttcatttgggtcactaggtcacgggggcctcacttcattctcttccacgtcatttggtggtagtggcatgggcaacttcaaatcgatatcaacttcaactaaaatggttaatggcagaaaaatcactacaaagagaattgtcgagaacggtcaagaaagagtagaagttgaagaagatggccagttaaagtccttaacaataaatggtaaggagcagctgctgcgcttggataacaagtaattcaacgcacgcacttaacagaaatgttaaactataacaagcaccatttgaggattaacaggaacatttttttgaagatttcaaacgaactcgactttcagtataattgtacctaaagtatttataaacagctcatcggagcctctatttgtcatagacttttgagttgattgttgggaccacataataggaccattttttttttgtctttaaaattgttgtaaatctctgtatgcactttgcttttttattaaacgtactccaaggtgagtcttgactctttagtgtaggacaagattgtacactaacaccagcatggacctgcttttcattgtgtctgaaatgtgagccacgtagtgtcggcctgctgtgaagttaacattgccaggacgattcttctacagaaataatttcaatttttttcagtatttagtagtgaaagatattaatacattaatggtaatacatttctggtttaatataaattaaggatgttttctagttgtgcatgaatgctggcaacttagtaagttttgacaattgtttaaatatgtaatgttaagcttaggtttaaaaaagtaaagctggtaaactgggtctttgtcatttgctttaaaaaaaaaa

SEQ ID NO: 371603 - DNA, 1130 bp, Homo sapiens
taaaacctcttaagttttttgttcctgaatatgttacaaacatctattttctcttactgtagctatcacatgaggaaaaaaacttgaaaaaaagacttcatagtgtgtgtttatgtttgattttagaagacccttttgaggacttctttgggaatcgaaggggtccccgaggaagcagaagccgagggacggggtcgtttttctctgcgttcagtggatttccgtcttttggaagtggattttcttcttttgatacaggatttacttcatttgggtcactaggtcacgggggcctcacttcattctcttccacgtcatttggtggtagtggcatgggcaacttcaaatcgatatcaacttcaactaaaatggttaatggcagaaaaatcactacaaagagaattgtcgagaacggtcaagaaagagtagaagttgaagaagatggccagttaaagtccttaacaataaatggtaaggagcagctgctgcgcttggataacaagtaattcaacgcacgcacttaacagaaatgttaaactataacaagcaccatttgaggattaacaggaacatttttttgaagatttcaaacgaactcgactttcagtataattgtacctaaagtatttataaacagctcatcggagcctctatttgtcatagacttttgagttgattgttgggaccacataataggaccattttttttttgtctttaaaattgttgtaaatctctgtatgcactttgcttttttattaaacgtactccaaggtgagtcttgactctttagtgtaggacaagattgtacactaacaccagcatggacctgcttttcattgtgtctgaaatgtgagccacgtagtgtcggcctgctgtgaagttaacattgccaggacgattcttctacagaaataatttcaatttttttcagtatttagtagtgaaagatattaatacattaatggtaatacatttctggtttaatataaattaaggatgttttctagttgtgcatgaatgctggcaacttagtaagttttgacaattgtttaaatatgtaatgttaagcttaggtttaaaaaagtaaagctggtaaactgggtctttgtcatttgctttaaaaaaaaaa

SEQ ID NO: 371604 - DNA, 1901 bp, Homo sapiens
aggatccttaattaaattaatcccttcctccgggagaaaggagagaaaggaaagcgcgaggagccgccgccaccaccagcgcagcagtcctggagctgtgaggagattcgggccgtcaccctgcctcccctgcgtcccgccaccggccgcttctgtcctcgttcaactaaaatggttaatggcagaaaaatcactacaaagagaattgtcgagaacggtcaagaaagagtagaagttgaagaagatggccagttaaagtccttaacaataaatggtgtggccgacgacgatgccctcgctgaggagcgcatgcggagaggccagaacgccctgccagcccagcctgccggcctccgcccgccgaagccgccccggcctgcctcgctgctgagacacgcgcctcactgtctctctgaggaggagggcgagcaggaccgacctcgggcacccgggccctgggaccccctcgcgtccgcagcaggattgaaagaaggtggcaagaggaagaagcagaagcagagagaggagtcgaagaagaagaagtcgaccaaaggcaatcactagaccggacttgaggcacgcggtgcacccccagacgctggcgctccaccgtgctcggcatgcggtcgtgcacacgcgctaggtagcagcgtcggtcaggactgtctcgaggccacactcgctcggcaggattatgcgatcacggatcagtcagagcagggtcaggagacggggctgacggcacgggtggcggggacagacgtttgggacttggccgcgactctctgcttctctccagctctcaatctgctgcattttcctctagtgcttccggatcctcttcattcttttcggctactcaaccactccgcatgctgctggaatatttctggctttagaagtacaggagggcgcagatggctaactgagtaacattcatgaaatgaggctttctgtggcggcgtagtgtttggaattagaaggtaattcagtagagtgtaacttagagaatattgcaagtgacacattgaatcctgcccgtcagggcaccttttcctcagagcaatccggccacacgaatagaaggctgtcgtgaatcacatcagatgtaaaatcattccttctgtttactcttttaattttcatcctttgcaggtagtgcaaattcaacttcaaatatggtgtaggttttgctagattccatatttttttcttggatttttgctaattatttttagcaaaaaatttttgctcagtggcaccctccctagtgtccatgggttagggccatgctggggaaaacgggccggtatttacacacgcgcaaaacacccagagacggcacaaggaggttgaactcatgtttcagttcgcgaacattgactccttacgaaagtcacttcattctaactagatgcgcccacttccggtcattatttcgtttgcatgatgtattgcttcttcacgttttgtttttattgagcacggagtagaattccagggctgccttgacttcttccctgcatgctccctcccagtgactttccttccctttcacatgaggatctgccgttcatgttgctttctcctttgtcctcttggacttgagggcattgtgaaaagctttgctgtgatttaaaaatgccagcaattttaatctagcagtgttgaagctgggaattttttggcgcaatccatgtagcagtgacccaggcttgggagccagaaacaagtgtgacctgggattttatttaacacaactgttgccaaagagttggctttgtttatttggttttggcggggagaggagtggtatttgatgctttctgtggacaatgtaaccctaaacacatcatgtattttaaatgccacctacataaataaaacataagcatattgaa

SEQ ID NO: 371605 - DNA, 1021 bp, Homo sapiens
cagctgaggccttgatagttgcgtcgtttattactcctcggttctatgccttaacattaaatattctgctactgaactttcaaactcttgtctttgcattactagttgacatatttctttaagcatttttcttttctgttttcctgtaggatttacttcatttgggtcactaggtcacgggggcctcacttcattctcttccacgtcatttggtggtagtggcatgggcaacttcaaatcgatatcaacttcaactaaaatggttaatggcagaaaaatcactacaaagagaattgtcgagaacggtcaagaaagagtagaagttgaagaagatggccagttaaagtccttaacaataaatggtaaggagcagctgctgcgcttggataacaagtaattcaacgcacgcacttaacagaaatgttaaactataacaagcaccatttgaggattaacaggaacatttttttgaagatttcaaacgaactcgactttcagtataattgtacctaaagtatttataaacagctcatcggagcctctatttgtcatagacttttgagttgattgttgggaccacataataggaccattttttttttgtctttaaaattgttgtaaatctctgtatgcactttgcttttttattaaacgtactccaaggtgagtcttgactctttagtgtaggacaagattgtacactaacaccagcatggacctgcttttcattgtgtctgaaatgtgagccacgtagtgtcggcctgctgtgaagttaacattgccaggacgattcttctacagaaataatttcaatttttttcagtatttagtagtgaaagatattaatacattaatggtaatacatttctggtttaatataaattaaggatgttttctagttgtgcatgaatgctggcaacttagtaagttttgacaattgtttaaatatgtaatgttaagcttaggtttaaaaaagtaaagctggtaaactgggtctttgtcatttgctttaaaaaaaaaa

SEQ ID NO: 371606 - DNA, 1623 bp, Homo sapiens
aggatccttaattaaattaatcccttcctccgggagaaaggagagaaaggaaagcgcgaggagccgccgccaccaccagcgcagcagtcctggagctgtgaggagattcgggccgtcaccctgcctcccctgcgtcccgccaccggccgcttctgtcctcgctcgggcacccgggccctgggaccccctcgcgtccgcagcaggattgaaagaaggtggcaagaggaagaagcagaagcagagagaggagtcgaagaagaagaagtcgaccaaaggcaatcactagaccggacttgaggcacgcggtgcacccccagacgctggcgctccaccgtgctcggcatgcggtcgtgcacacgcgctaggtagcagcgtcggtcaggactgtctcgaggccacactcgctcggcaggattatgcgatcacggatcagtcagagcagggtcaggagacggggctgacggcacgggtggcggggacagacgtttgggacttggccgcgactctctgcttctctccagctctcaatctgctgcattttcctctagtgcttccggatcctcttcattcttttcggctactcaaccactccgcatgctgctggaatatttctggctttagaagtacaggagggcgcagatggctaactgagtaacattcatgaaatgaggctttctgtggcggcgtagtgtttggaattagaaggtaattcagtagagtgtaacttagagaatattgcaagtgacacattgaatcctgcccgtcagggcaccttttcctcagagcaatccggccacacgaatagaaggctgtcgtgaatcacatcagatgtaaaatcattccttctgtttactcttttaattttcatcctttgcaggtagtgcaaattcaacttcaaatatggtgtaggttttgctagattccatatttttttcttggatttttgctaattatttttagcaaaaaatttttgctcagtggcaccctccctagtgtccatgggttagggccatgctggggaaaacgggccggtatttacacacgcgcaaaacacccagagacggcacaaggaggttgaactcatgtttcagttcgcgaacattgactccttacgaaagtcacttcattctaactagatgcgcccacttccggtcattatttcgtttgcatgatgtattgcttcttcacgttttgtttttattgagcacggagtagaattccagggctgccttgacttcttccctgcatgctccctcccagtgactttccttccctttcacatgaggatctgccgttcatgttgctttctcctttgtcctcttggacttgagggcattgtgaaaagctttgctgtgatttaaaaatgccagcaattttaatctagcagtgttgaagctgggaattttttggcgcaatccatgtagcagtgacccaggcttgggagccagaaacaagtgtgacctgggattttatttaacacaactgttgccaaagagttggctttgtttatttggttttggcggggagaggagtggtatttgatgctttctgtggacaatgtaaccctaaacacatcatgtattttaaatgccacctacataaataaaacataagcatattgaa

SEQ ID NO: 371607 - DNA, 1463 bp, Homo sapiens
aggatccttaattaaattaatcccttcctccgggagaaaggagagaaaggaaagcgcgaggagccgccgccaccaccagcgcagcagtcctggagctgtgaggagattcgggccgtcaccctgcctcccctgcgtcccgccaccggccgcttctgtcctcggacccattccaacaatctcgtaaaacatggtggattactatgaagttctaggcgtgcagagacatgcctcacccgaggatattaaaaaggcgattatgcgatcacggatcagtcagagcagggtcaggagacggggctgacggcacgggtggcggggacagacgtttgggacttggccgcgactctctgcttctctccagctctcaatctgctgcattttcctctagtgcttccggatcctcttcattcttttcggctactcaaccactccgcatgctgctggaatatttctggctttagaagtacaggagggcgcagatggctaactgagtaacattcatgaaatgaggctttctgtggcggcgtagtgtttggaattagaaggtaattcagtagagtgtaacttagagaatattgcaagtgacacattgaatcctgcccgtcagggcaccttttcctcagagcaatccggccacacgaatagaaggctgtcgtgaatcacatcagatgtaaaatcattccttctgtttactcttttaattttcatcctttgcaggtagtgcaaattcaacttcaaatatggtgtaggttttgctagattccatatttttttcttggatttttgctaattatttttagcaaaaaatttttgctcagtggcaccctccctagtgtccatgggttagggccatgctggggaaaacgggccggtatttacacacgcgcaaaacacccagagacggcacaaggaggttgaactcatgtttcagttcgcgaacattgactccttacgaaagtcacttcattctaactagatgcgcccacttccggtcattatttcgtttgcatgatgtattgcttcttcacgttttgtttttattgagcacggagtagaattccagggctgccttgacttcttccctgcatgctccctcccagtgactttccttccctttcacatgaggatctgccgttcatgttgctttctcctttgtcctcttggacttgagggcattgtgaaaagctttgctgtgatttaaaaatgccagcaattttaatctagcagtgttgaagctgggaattttttggcgcaatccatgtagcagtgacccaggcttgggagccagaaacaagtgtgacctgggattttatttaacacaactgttgccaaagagttggctttgtttatttggttttggcggggagaggagtggtatttgatgctttctgtggacaatgtaaccctaaacacatcatgtattttaaatgccacctacataaataaaacataagcatattgaa

SEQ ID NO: 371608 - DNA, 278 bp, Homo sapiens
ggccttttgcatggtgcagttcttcagtgtgtctcaaatggggattcaaagaggttgttcttacaccttattatgggctggctggcttgaagagagcccctttctgagggaggaaggacagtcagtggcctcaagcattttcagggaaactgaagctgagcaggcgatttccgattaggggaccgggagactggcgtgctcatcgtttaagtgcatttgctgtaatcactgctgccatcagcagaaacagagctcaagaaagaaccatgtttacatcc

SEQ ID NO: 371609 - DNA, 496 bp, Homo sapiens
tacagtgttttacaagccgtgtttccttaggattgaaagaaggtggcaagaggaagaagcagaagcagagagaggagtcgaagaagaagaagtcgaccaaaggcaatcactagaccggacttgaggcacgcggtgcacccccagacgctggcgctccaccgtgctcggcatgcggtcgtgcacacgcgctaggtagcagcgtcggtcaggactgtctcgaggccacactcgctcggcaggattatgcgatcacggatcagtcagagcagggtcaggagacggggctgacggcacgggtggcggggacagacgtttgggacttggccgcgactctctgcttctctccagctctcaatctgctgcattttcctctagtgcttccggatcctcttcattcttttcggctactcaaccactccgcatgctgctggaatatttctggctttagaagtacaggagggcgcagatggctaactgagtaacattcatgaaatga

SEQ ID NO: 371610 - DNA, 1530 bp, Homo sapiens
cgtgacgcatttcctgtttgttgttggagaaaggagagaaaggaaagcgcgaggagccgccgccaccaccagcgcagcagtcctggagctgtgaggagattcgggccgtcaccctgcctcccctgcgtcccgccaccggccgcttctgtcctcggacccattccaacaatctcgtaaaacatggtggattactatgaagttctaggcgtgcagagacatgcctcacccgaggatattaaaaaggcatatcggaaactggcactgaagtggcatccagataaaaatcctgagaataaagaagaagcagagagaaaattcaagcaagtagcggaggcatatgaagtgctgtcggatgctaagaaacgggacatctatgacaaatatggcaaagaaggattaaatggtggaggaggaggtggaagtcattttgacagtccatttgaatttggcttcacattccgtaacccagatgatgtcttcagggaattttttggtggaagggacccattttcatttgacttctttgaagacccttttgaggacttctttgggaatcgaaggggtccccgaggaagcagaagccgagggacggggtcgtttttctctgcgttcagtggatttccgtcttttggaagtggattttcttcttttgatacaggatttacttcatttgggtcactaggtcacgggggcctcacttcattctcttccacgtcatttggtggtagtggcatgggcaacttcaaatcgatatcaacttcaactaaaatggttaatggcagaaaaatcactacaaagagaattgtcgagaacggtcaagaaagagtagaagttgaagaagatggccagttaaagtccttaacaataaatggtaaggagcagctgctgcgcttggataacaagtaattcaacgcacgcacttaacagaaatgttaaactataacaagcaccatttgaggattaacaggaacatttttttgaagatttcaaacgaactcgactttcagtataattgtacctaaagtatttataaacagctcatcggagcctctatttgtcatagacttttgagttgattgttgggaccacataataggaccattttttttttgtctttaaaattgttgtaaatctctgtatgcactttgcttttttattaaacgtactccaaggtgagtcttgactctttagtgtaggacaagattgtacactaacaccagcatggacctgcttttcattgtgtctgaaatgtgagccacgtagtgtcggcctgctgtgaagttaacattgccaggacgattcttctacagaaataatttcaatttttttcagtatttagtagtgaaagatattaatacattaatggtaatacatttctggtttaatataaattaaggatgttttctagttgtgcatgaatgctggcaacttagtaagttttgacaattgtttaaatatgtaatgttaagcttaggtttaaaaaagtaaagctggtaaactgggtctttgtcatttgctttaaaaaaaaaa

SEQ ID NO: 371611 - DNA, 3033 bp, Homo sapiens
cgtgacgcatttcctgtttgttgttggagaaaggagagaaaggaaagcgcgaggagccgccgccaccaccagcgcagcagtcctggagctgtgaggagattcgggccgtcaccctgcctcccctgcgtcccgccaccggccgcttctgtcctcggacccattccaacaatctcgtaaaacatggtggattactatgaagttctaggcgtgcagagacatgcctcacccgaggatattaaaaaggcatatcggaaactggcactgaagtggcatccagataaaaatcctgagaataaagaagaagcagagagaaaattcaagcaagtagcggaggcatatgaagtgctgtcggatgctaagaaacgggacatctatgacaaatatggcaaagaaggattaaatggtggaggaggaggtggaagtcattttgacagtccatttgaatttggcttcacattccgtaacccagatgatgtcttcagggaattttttggtggaagggacccattttcatttgacttctttgaagacccttttgaggacttctttgggaatcgaaggggtccccgaggaagcagaagccgagggacggggtcgtttttctctgcgttcagtggatttccgtcttttggaagtggattttcttcttttgatacaggatttacttcatttgggtcactaggtcacgggggcctcacttcattctcttccacgtcatttggtggtagtggcatgggcaacttcaaatcgatatcaacttcaactaaaatggttaatggcagaaaaatcactacaaagagaggtactgtggtattctgcattttatatttttagtaagcaggcgtaacgtttcactggtgccatgttgcacgtctcccagagtgtgaagtagaggttgttgtatgctaaatctggcgccatgaaaatcttttgctctccaaattcattaattaaagccttttctcttaaattttacttaactgttgaattattagagggaatctttaatgtaatacagtgtaataagtttctgcagcattgttaaaatggtaaaatggaaaatcattaatagtaaagcctttactgttttatagcctctgcatgtatttagcatccgcctgtacggtatttgagacacaatttattttgtcaggttaattctattttaggaaaggaagatgtgttgttgacaggttggcttcagccatgtttttacagcctgaaaattacttatattcatggtgtatttcagtaatgtccttaaacaacttagttatccctcacacatgcattttctttaccagaaaggtttttaaatgaatttttttcctacagaattgtcgagaacggtcaagaaagagtagaagttgaagaagatggccagttaaagtccttaacaataaatggtgtggccgacgacgatgccctcgctgaggagcgcatgcggagaggccagaacgccctgccagcccagcctgccggcctccgcccgccgaagccgccccggcctgcctcgctgctgagacacgcgcctcactgtctctctgaggaggagggcgagcaggaccgacctcgggcacccgggccctgggaccccctcgcgtccgcagcaggattgaaagaaggtggcaagaggaagaagcagaagcagagagaggagtcgaagaagaagaagtcgaccaaaggcaatcactagaccggacttgaggcacgcggtgcacccccagacgctggcgctccaccgtgctcggcatgcggtcgtgcacacgcgctaggtagcagcgtcggtcaggactgtctcgaggccacactcgctcggcaggattatgcgatcacggatcagtcagagcagggtcaggagacggggctgacggcacgggtggcggggacagacgtttgggacttggccgcgactctctgcttctctccagctctcaatctgctgcattttcctctagtgcttccggatcctcttcattcttttcggctactcaaccactccgcatgctgctggaatatttctggctttagaagtacaggagggcgcagatggctaactgagtaacattcatgaaatgaggctttctgtggcggcgtagtgtttggaattagaaggtaattcagtagagtgtaacttagagaatattgcaagtgacacattgaatcctgcccgtcagggcaccttttcctcagagcaatccggccacacgaatagaaggctgtcgtgaatcacatcagatgtaaaatcattccttctgtttactcttttaattttcatcctttgcaggtagtgcaaattcaacttcaaatatggtgtaggttttgctagattccatatttttttcttggatttttgctaattatttttagcaaaaaatttttgctcagtggcaccctccctagtgtccatgggttagggccatgctggggaaaacgggccggtatttacacacgcgcaaaacacccagagacggcacaaggaggttgaactcatgtttcagttcgcgaacattgactccttacgaaagtcacttcattctaactagatgcgcccacttccggtcattatttcgtttgcatgatgtattgcttcttcacgttttgtttttattgagcacggagtagaattccagggctgccttgacttcttccctgcatgctccctcccagtgactttccttccctttcacatgaggatctgccgttcatgttgctttctcctttgtcctcttggacttgagggcattgtgaaaagctttgctgtgatttaaaaatgccagcaattttaatctagcagtgttgaagctgggaattttttggcgcaatccatgtagcagtgacccaggcttgggagccagaaacaagtgtgacctgggattttatttaacacaactgttgccaaagagttggctttgtttatttggttttggcggggagaggagtggtatttgatgctttctgtggacaatgtaaccctaaacacatcatgtattttaaatgccacctacataaataaaacataagcatattgaa

SEQ ID NO: 371612 - DNA, 1473 bp, Homo sapiens
aggatccttaattaaattaatcccttcctccgggagaaaggagagaaaggaaagcgcgaggagccgccgccaccaccagcgcagcagtcctggagctgacccattccaacaatctcgtaaaacatggtggattactatgaagttctaggcgtgcagagacatgcctcacccgaggatattaaaaaggcatatcggaaactggcactgaagtggcatccagataaaaatcctgagaataaagaagaagcagagagaaaattcaagcaagtagcggaggcatatgaagtgctgtcggatgctaagaaacgggacatctatgacaaatatggcaaagaaggattaaatggtggaggaggaggtggaagtcattttgacagtccatttgaatttggcttcacattccgtaacccagatgatgtcttcagggaattttttggtggaagggacccattttcatttgacttctttgaagacccttttgaggacttctttgggaatcgaaggggtccccgaggaagcagaagccgagggacggggtcgtttttctctgcgttcagtggatttccgtcttttggaagtggattttcttcttttgatacaggatttacttcatttgggtcactaggtcacgggggcctcacttcattctcttccacgtcatttggtggtagtggcatgggcaacttcaaatcgatatcaacttcaactaaaatggttaatggcagaaaaatcactacaaagagaattgtcgagaacggtcaagaaagagtagaagttgaagaagatggccagttaaagtccttaacaataaatggtaaggagcagctgctgcgcttggataacaagtaattcaacgcacgcacttaacagaaatgttaaactataacaagcaccatttgaggattaacaggaacatttttttgaagatttcaaacgaactcgactttcagtataattgtacctaaagtatttataaacagctcatcggagcctctatttgtcatagacttttgagttgattgttgggaccacataataggaccattttttttttgtctttaaaattgttgtaaatctctgtatgcactttgcttttttattaaacgtactccaaggtgagtcttgactctttagtgtaggacaagattgtacactaacaccagcatggacctgcttttcattgtgtctgaaatgtgagccacgtagtgtcggcctgctgtgaagttaacattgccaggacgattcttctacagaaataatttcaatttttttcagtatttagtagtgaaagatattaatacattaatggtaatacatttctggtttaatataaattaaggatgttttctagttgtgcatgaatgctggcaacttagtaagttttgacaattgtttaaatatgtaatgttaagcttaggtttaaaaaagtaaagctggtaaactgggtctttgtcatttgctttaaaaaaaaaa

SEQ ID NO: 371613 - DNA, 1646 bp, Homo sapiens
cgtgacgcatttcctgtttgttgttggagaaaggagagaaaggaaagcgcgaggagccgccgccaccaccagcgcagcagtcctggagctgtgaggagattcgggccgtcaccctgcctcccctgcgtcccgccaccggccgcttctgtcctcggacccattccaacaatctcgtaaaacatggtggattactatgaagttctaggcgtgcagagacatgcctcacccgaggatattaaaaaggcatatcggaaactggcactgaagtggcatccagataaaaatcctgagaataaagaagaagcagagagaaaattcaagcaagtagcggaggcatatgaagtgctgtcggatgctaagaaacgggacatctatgacaaatatggcaaagaaggattaaatggtggaggaggaggtggaagtcattttgacagtccatttgaatttggcttcacattccgtaacccagatgatgtcttcagggaattttttggtggaagggacccattttcatttgacttctttggacagggcagtgttcgggttgaagtcctgtgttctgatcggtgattctcgtggtgaccaagcgaggaagaaggcccgctcttccaacaccatggcttctcttctggggcacacgagaagacccttttgaggacttctttgggaatcgaaggggtccccgaggaagcagaagccgagggacggggtcgtttttctctgcgttcagtggatttccgtcttttggaagtggattttcttcttttgatacaggatttacttcatttgggtcactaggtcacgggggcctcacttcattctcttccacgtcatttggtggtagtggcatgggcaacttcaaatcgatatcaacttcaactaaaatggttaatggcagaaaaatcactacaaagagaattgtcgagaacggtcaagaaagagtagaagttgaagaagatggccagttaaagtccttaacaataaatggtaaggagcagctgctgcgcttggataacaagtaattcaacgcacgcacttaacagaaatgttaaactataacaagcaccatttgaggattaacaggaacatttttttgaagatttcaaacgaactcgactttcagtataattgtacctaaagtatttataaacagctcatcggagcctctatttgtcatagacttttgagttgattgttgggaccacataataggaccattttttttttgtctttaaaattgttgtaaatctctgtatgcactttgcttttttattaaacgtactccaaggtgagtcttgactctttagtgtaggacaagattgtacactaacaccagcatggacctgcttttcattgtgtctgaaatgtgagccacgtagtgtcggcctgctgtgaagttaacattgccaggacgattcttctacagaaataatttcaatttttttcagtatttagtagtgaaagatattaatacattaatggtaatacatttctggtttaatataaattaaggatgttttctagttgtgcatgaatgctggcaacttagtaagttttgacaattgtttaaatatgtaatgttaagcttaggtttaaaaaagtaaagctggtaaactgggtctttgtcatttgctttaaaaaaaaaa

SEQ ID NO: 371614 - DNA, 1485 bp, Homo sapiens
cgtgacgcatttcctgtttgttgttggagaaaggagagaaaggaaagcgcgaggagccgccgccaccaccagcgcagcagtcctggagctgtgaggagattcgggccgtcaccctgcctcccctgcgtcccgccaccggccgcttctgtcctcggacccattccaacaatctcgtaaaacatggtggattactatgaagttctaggcgtgcagagacatgcctcacccgaggatattaaaaaggcatatcggaaactggcactgaagtggcatccagataaaaatcctgagaataaagaagaagcagagactaagaaacgggacatctatgacaaatatggcaaagaaggattaaatggtggaggaggaggtggaagtcattttgacagtccatttgaatttggcttcacattccgtaacccagatgatgtcttcagggaattttttggtggaagggacccattttcatttgacttctttgaagacccttttgaggacttctttgggaatcgaaggggtccccgaggaagcagaagccgagggacggggtcgtttttctctgcgttcagtggatttccgtcttttggaagtggattttcttcttttgatacaggatttacttcatttgggtcactaggtcacgggggcctcacttcattctcttccacgtcatttggtggtagtggcatgggcaacttcaaatcgatatcaacttcaactaaaatggttaatggcagaaaaatcactacaaagagaattgtcgagaacggtcaagaaagagtagaagttgaagaagatggccagttaaagtccttaacaataaatggtaaggagcagctgctgcgcttggataacaagtaattcaacgcacgcacttaacagaaatgttaaactataacaagcaccatttgaggattaacaggaacatttttttgaagatttcaaacgaactcgactttcagtataattgtacctaaagtatttataaacagctcatcggagcctctatttgtcatagacttttgagttgattgttgggaccacataataggaccattttttttttgtctttaaaattgttgtaaatctctgtatgcactttgcttttttattaaacgtactccaaggtgagtcttgactctttagtgtaggacaagattgtacactaacaccagcatggacctgcttttcattgtgtctgaaatgtgagccacgtagtgtcggcctgctgtgaagttaacattgccaggacgattcttctacagaaataatttcaatttttttcagtatttagtagtgaaagatattaatacattaatggtaatacatttctggtttaatataaattaaggatgttttctagttgtgcatgaatgctggcaacttagtaagttttgacaattgtttaaatatgtaatgttaagcttaggtttaaaaaagtaaagctggtaaactgggtctttgtcatttgctttaaaaaaaaaa

SEQ ID NO: 371615 - DNA, 2114 bp, Homo sapiens
gagcttgggtgaagaaactgaacaccacctgcaactcgaggagggaaagagaagagtagttgtgtctacagataatacaggggagaaacgtggagctcctgcctgccgcaggcacgaagaagcataatcactctcatatctgaagacccttttgaggacttctttgggaatcgaaggggtccccgaggaagcagaagccgagggacggggtcgtttttctctgcgttcagtggatttccgtcttttggaagtggattttcttcttttgatacaggatttacttcatttgggtcactaggtcacgggggcctcacttcattctcttccacgtcatttggtggtagtggcatgggcaacttcaaatcgatatcaacttcaactaaaatggttaatggcagaaaaatcactacaaagagaattgtcgagaacggtcaagaaagagtagaagttgaagaagatggccagttaaagtccttaacaataaatggtgtggccgacgacgatgccctcgctgaggagcgcatgcggagaggccagaacgccctgccagcccagcctgccggcctccgcccgccgaagccgccccggcctgcctcgctgctgagacacgcgcctcactgtctctctgaggaggagggcgagcaggaccgacctcgggcacccgggccctgggaccccctcgcgtccgcagcaggattgaaagaaggtggcaagaggaagaagcagaagcagagagaggagtcgaagaagaagaagtcgaccaaaggcaatcactagaccggacttgaggcacgcggtgcacccccagacgctggcgctccaccgtgctcggcatgcggtcgtgcacacgcgctaggtagcagcgtcggtcaggactgtctcgaggccacactcgctcggcaggattatgcgatcacggatcagtcagagcagggtcaggagacggggctgacggcacgggtggcggggacagacgtttgggacttggccgcgactctctgcttctctccagctctcaatctgctgcattttcctctagtgcttccggatcctcttcattcttttcggctactcaaccactccgcatgctgctggaatatttctggctttagaagtacaggagggcgcagatggctaactgagtaacattcatgaaatgaggctttctgtggcggcgtagtgtttggaattagaaggtaattcagtagagtgtaacttagagaatattgcaagtgacacattgaatcctgcccgtcagggcaccttttcctcagagcaatccggccacacgaatagaaggctgtcgtgaatcacatcagatgtaaaatcattccttctgtttactcttttaattttcatcctttgcaggtagtgcaaattcaacttcaaatatggtgtaggttttgctagattccatatttttttcttggatttttgctaattatttttagcaaaaaatttttgctcagtggcaccctccctagtgtccatgggttagggccatgctggggaaaacgggccggtatttacacacgcgcaaaacacccagagacggcacaaggaggttgaactcatgtttcagttcgcgaacattgactccttacgaaagtcacttcattctaactagatgcgcccacttccggtcattatttcgtttgcatgatgtattgcttcttcacgttttgtttttattgagcacggagtagaattccagggctgccttgacttcttccctgcatgctccctcccagtgactttccttccctttcacatgaggatctgccgttcatgttgctttctcctttgtcctcttggacttgagggcattgtgaaaagctttgctgtgatttaaaaatgccagcaattttaatctagcagtgttgaagctgggaattttttggcgcaatccatgtagcagtgacccaggcttgggagccagaaacaagtgtgacctgggattttatttaacacaactgttgccaaagagttggctttgtttatttggttttggcggggagaggagtggtatttgatgctttctgtggacaatgtaaccctaaacacatcatgtattttaaatgccacctacataaataaaacataagcatattgaa

SEQ ID NO: 371616 - DNA, 562 bp, Homo sapiens
cgtgacgcatttcctgtttgttgttggagaaaggagagaaaggaaagcgcgaggagccgccgccaccaccagcgcagcagtcctggagctgtgaggagattcgggccgtcaccctgcctcccctgcgtcccgccaccggccgcttctgtcctcggacccattccaacaatctcgtaaaacatggtggattactatgaagttctaggcgtgcagagacatgcctcacccgaggatattaaaaaggcatatcggaaactggcactgaagtggcatccagataaaaatcctgagaataaagaagaagcagagagaaaattcaagcaagtagcggaggcatatgaagtgctgtcggatgctaagaaacgggacatctatgacaaatatggcaaagaaggattaaatggtggaggaggaggtggaagtcattaagcctgtccatacgaatccgtctgctcatggaggaggccggatgatctcctcagggaatagatgggcggcagggaccgattgacatagctccagttgggagaccctattgaaggctatgctggggaatatgtgg

SEQ ID NO: 371617 - DNA, 1078 bp, Homo sapiens
gggaggaggactgcgggctgcgcctgggcaggggatgagcttgtgtcgcgggcggcagggggaagggagtcggagagctcctgcggtccagccggatgactgatgaggttgaaagcacttccgctgcggcccccgcaggaagttcccaggaggaagttgcgaccctttctaagccatcccactggcctggactctgctgggattattttgaccccccagggcagagtgtagccatctgactggctttctctctcggcaggagacggggcgcacgcctgcaggttttgggatttgagattgacgcggtgaactctgtccagttttcaaaccacacaggctatgcccactggaagggccaagtgctgaattcagatgagctccaggagttgtacgaaggcctgaggctgaacaacatgaataaatatgactacgtgctcacaggttatacgagggacaagtcgttcctggccatggtggtggacattgtgcaggagctgaagcagcagaaccccaggctggtgtacgtgtgtgatccagtcttgggtgacaagtgggacggcgaaggctcgatgagcaagaccccatctcaaaaaacaaaagaaaaatctagaaaccacttaacccatgagctgtgtagtaacagcagcagctgcagcccacagacctggacgtcggatcaagtggatggagaacaaatccactgtgaccagtccagaagcctagaatttagaggcggaaggaacccaaaggtgatcctgcctgtgggtttttaactcagccattcagcgcccaggcgatttcagtatctgccttctttgtcgttgtgtctagggtgtctgtttgcttgctgtatattcactgagcacagcgggcttctccactggcacagggcacgcctgggcctgtgccctccctgccccgctgggtcagtggttgaagtcaggatatctgtcactgggcatctaactgggtggggcgggctggtgtgctcagcgtctgtctgtccactttctcccatgcttgttctctggaaggttccctgtcctgcgcccagcctgcaggaccccagcttgcagct

SEQ ID NO: 371618 - DNA, 1974 bp, Homo sapiens
  misc_feature (4)..(4): n is a, c, g, or t
  misc_feature (6)..(8): n is a, c, g, or t
ggcncnnngcggaactcgcgggttcggagccgcccgctgaggtcagaaggaggcgtctgcgctgatcgggtccgccgcgcgccagagccagagtcgcagccgaggggagccggggccggagcccgagcccgagccgagccggagcccgagcgagcggcggagaccgtgcccccgcctcggccccgcgccgccgcggccaggcccggcatggaggaggagtgccgggtgctctccatacagagccacgtcatccgcggctacgtgggcaaccgggcggccacgttcccgctgcaggttttgggatttgagattgacgcggtgaactctgtccagttttcaaaccacacaggctatgcccactggaagggccaagtgctgaattcagatgagctccaggagttgtacgaaggcctgaggctgaacaacatgaataaatatgactacgtgctcacaggttatacgagggacaagtcgttcctggccatggtggtggacattgtgcaggagctgaagcagcagaaccccaggctggtgtacgtgtgtgatccagtcttgggtgacaagtgggacggcgaaggctcgatgtacgtcccggaggacctccttcccgtctacaaagaaaaagtggtgccgcttgcagacattatcacgcccaaccagtttgaggccgagttactgagtggccggaagatccacagccaggaggaagccttgcgggtgatggacatgctgcactctatgggccccgacaccgtggtcatcaccagctccgacctgccctccccgcagggcagcaactacctgattgtgctggggagtcagaggaggaggaatcccgctggctccgtggtgatggaacgcatccggatggacattcgcaaagtggacgccgtctttgtgggcactggggacctgtttgctgccatgctcctggcgtggacacacaagcaccccaataacctcaaggtggcctgtgagaagaccgtgtctaccttgcaccacgttctgcagaggaccatccagtgtgcaaaagcccaggccggggaaggagtgaggcccagccccatgcagctggagctgcggatggtgcagagcaaaagggacatcgaggacccagagatcgtcgtccaggccacggtgctgtgagggccccgccgcttgcccgtgacacgcagcgcgttggtgtctccgtgtttgtccctgtgaaaacatgtaacgtctgccttagagccatgaccgaaacttgatatttttttctttcaaaaaaaaaaaaaaaaaaaaaaaaaaaaaaaaaaacaaaaaaaaaaaaaaaaaaaaaaaaaaaaaaaaaaaaaaaaaaaaaacaacaaaaagagagggggcgcgcgcgcgccgccccaatatccccccgcggggggcgccacacccacttatccccccaccccaagttgtttgtatagaacaaggagggggcccccccatacgcggcagcctctattatatatatacaacgccagcgcggcccggcgcgcggctactaataacaaacaccgacggtcacggtggagagaaccaaccaacccaccgcacacagcgcgactcaactctccccgtgcgaggcaggaaggcacccccccccattaccccgcgcgcgaggcgcggcagcacacacaccaacgcagcggagacgaacaaccccccccctcccgccgccgcacctccatccaacacagcccacccccaccgacgcgcgcccactccatcataacaccccacctgccaccgccagcgcgcccaccgcggacggcgggacgaccacaccaccaccccgccgcacacaattacacccccgcgcgccgcgcgcgccgaccagacgacagatcgtcgccgcacgcccccccccgacgggcccacccgcccatccccgtaccacaacctatctcttctctccaccggcgcgggcgcaccccccaccccccaaacacgcaccacccc

SEQ ID NO: 371619 - DNA, 1339 bp, Homo sapiens
gggaggaggactgcgggctgcgcctgggcaggggatgagcttgtgtcgcgggcggcagggggaagggagtcggagagctcctgcggtccagccggatgactgatgaggttgaaagcacttccgctgcggcccccgcaggaagttcccaggaggaagttgcgaccctttctaagccatcccactggcctggactctgctgggattattttgaccccccagggcagagtgtagccatctgactggctttctctctcggcaggagacggggcgcacgcctgcaggttttgggatttgagattgacgcggtgaactctgtccagttttcaaaccacacaggctatgcccactggaagggccaagtgctgaattcagatgagctccaggagttgtacgaaggcctgaggctgaacaacatgaataaatatgactacgtgctcacaggttatacgagggacaagtcgttcctggccatggtggtggacattgtgcaggagctgaagcagcagaaccccaggctggtgtacgtgtgtgatccagtcttgggtgacaagtgggacggcgaaggctcgatgtacgtcccggaggacctccttcccgtctacaaagaaaaagtggtgccgcttgcagacattatcacgcccaaccagtttgaggccgagttactgagtggccggaagatccacagccaggaggaagccttgcgggtgatggacatgctgcactctatgggccccgacaccgtggtcatcaccagctccgacctgccctccccgcagggcagcaactacctgattgtgctggggagtcagaggaggaggaatcccgctggctccgtggtgatggaacgcatccggatggacattcgcaaagtggacgccgtctttgtgggcactggggacctgtttgctgccatgctcctggcgtggacacacaagcaccccaataacctcaaggtggcctgtgagaagaccgtgtctaccttgcaccacgttctgcagaggaccatccagtgtgcaaaagcccaggccggggaaggagtgaggcccagccccatgcagctggagctgcggatggtgcagagcaaaagggacatcgaggacccagagatcgtcgtccaggccacggtgctgtgagggccccgccgcttgcccgtgacacgcagcgcgttggtgtctccgtgtttgtccctgtgaaaacatgtaacgtctgccttagagccatgaccgaaacttgatatttttttctttcatgagtgtccggcatctgctggtcttcattgtgaaacgtgccagtcgtgctttgtgaaaaataacaaagtggtcacagaaaaattgtgatc

SEQ ID NO: 371620 - DNA, 1104 bp, Homo sapiens
agcgggcgttccatgtgggcagccgttgggacctgccaagcactgcgcctagtgatctccttcgggtttgagccagtccatggggaggagccgtccaccaggctatgcccactggaagggccaagtgctgaattcagatgagctccaggagttgtacgaaggcctgaggctgaacaacatgaataaatatgactacgtgctcacaggttatacgagggacaagtcgttcctggccatggtggtggacattgtgcaggagctgaagcagcagaaccccaggctggtgtacgtgtgtgatccagtcttgggtgacaagtgggacggcgaaggctcgatgtacgtcccggaggacctccttcccgtctacaaagaaaaagtggtgccgcttgcagacattatcacgcccaaccagtttgaggccgagttactgagtggccggaagatccacagccaggaggaagccttgcgggtgatggacatgctgcactctatgggccccgacaccgtggtcatcaccagctccgacctgccctccccgcagggcagcaactacctgattgtgctggggagtcagaggaggaggaatcccgctggctccgtggtgatggaacgcatccggatggacattcgcaaagtggacgccgtctttgtgggcactggggacctgtttgctgccatgctcctggcgtggacacacaagcaccccaataacctcaaggtggcctgtgagaagaccgtgtctaccttgcaccacgttctgcagaggaccatccagtgtgcaaaagcccaggccggggaaggagtgaggcccagccccatgcagctggagctgcggatggtgcagagcaaaagggacatcgaggacccagagatcgtcgtccaggccacggtgctgtgagggccccgccgcttgcccgtgacacgcagcgcgttggtgtctccgtgtttgtccctgtgaaaacatgtaacgtctgccttagagccatgaccgaaacttgatatttttttctttcatgagtgtccggcatctgctggtcttcattgtgaaacgtgccagtcgtgctttgtgaaaaataacaaagtggtcacagaaaaattgtgatc

SEQ ID NO: 371621 - DNA, 1527 bp, Homo sapiens
gccaggctcagggtacacctattgccagggagctcccactgattccttgtgagtgtagcacagatttgttgcgactggaccatctgcacgtctgggcttcagagctgttctccccagctgttttctgccaggtcctgtcagaggcagccaccctccctgggcagagcatcagtttcacattcttggtacctcctggtggtgcctgggagggagccactgctgtacagagatgccaattccagaggcatggtccggcacagagcgctggcttccagctgaaggacatgtgtaacagcaggagatacctttctctggggtcccaggctcccgtcctggaccttggcaccccgccccccgtgcattgtcgtcttctgagtctggctttgtctggcacatgaagttggatgggtagactctggaagcgtccagaccagcttgcgatgctgatgaataagctgattttgatggggttttgggatttgagattgacgcggtgaactctgtccagttttcaaaccacacaggctatgcccactggaagggccaagtgctgaattcagatgagctccaggagttgtacgaaggcctgaggctgaacaacatgaataaatatgactacgtgctcacaggttatacgagggacaagtcgttcctggccatggtggtggacattgtgcaggagctgaagcagcagaaccccaggctggtgtacgtgtgtgatccagtcttgggtgacaagtgggacggcgaaggctcgatgtacgtcccggaggacctccttcccgtctacaaagaaaaagtggtgccgcttgcagacattatcacgcccaaccagtttgaggccgagttactgagtggccggaagatccacagccaggaggaagccttgcgggtgatggacatgctgcactctatgggccccgacaccgtggtcatcaccagctccgacctgccctccccgcagggcagcaactacctgattgtgctggggagtcagaggaggaggaatcccgctggctccgtggtgatggaacgcatccggatggacattcgcaaagtggacgccgtctttgtgggcactggggacctgtttgctgccatgctcctggcgtggacacacaagcaccccaataacctcaaggtggcctgtgagaagaccgtgtctaccttgcaccacgttctgcagaggaccatccagtgtgcaaaagcccaggccggggaaggagtgaggcccagccccatgcagctggagctgcggatggtgcagagcaaaagggacatcgaggacccagagatcgtcgtccaggccacggtgctgtgagggccccgccgcttgcccgtgacacgcagcgcgttggtgtctccgtgtttgtccctgtgaaaacatgtaacgtctgccttagagccatgaccgaaacttgatatttttttctttcatgagtgtccggcatctgctggtcttcattgtgaaacgtgccagtcgtgctttgtgaaaaataacaaagtggtcacagaaaaattgtgatc

SEQ ID NO: 371622 - DNA, 1120 bp, Homo sapiens
cggtacagatccctttcatccatcgcggctaccgtgggcaacgcggcacgttcccgctgcaggttttgggatttgagattgacgcggtgaactctgtccagttttcaaaccacacaggctatgcccactggaagggccaagtgctgaattcagatgagctccaggagttgtacgaaggcctgaggctgaacaacatgaataaatatgactacgtgctcacaggttatacgagggacaagtcgttcctggccatggtggtggacattgtgcaggagctgaagcagcagaaccccaggctggtgtacgtgtgtgatccagtcttgggtgacaagtgggacggcgaaggctcgatgtacgtcccggaggacctccttcccgtctacaaagaaaaagtggtgccgcttgcagacattatcacgcccaaccagtttgaggccgagttactgagtggccggaagatccacagccaggaggaagccttgcgggtgatggacatgctgcactctatgggccccgacaccgtggtcatcaccagctccgacctgccctccccgcagggcagcaactacctgattgtgctggggagtcagaggaggaggaatcccgctggctccgtggtgatggaacgcatccggatggacattcgcaaagtggacgccgtctttgtgggcactggggacctgtttgctgccatgctcctggcgtggacacacaagcaccccaataacctcaaggtggcctgtgagaagaccgtgtctaccttgcaccacgttctgcagaggaccatccagtgtgcaaaagcccaggccggggaaggagtgaggcccagccccatgcagctggagctgcggatggtgcagagcaaaagggacatcgaggacccagagatcgtcgtccaggccacggtgctgtgagggccccgccgcttgcccgtgacacgcagcgcgttggtgtctccgtgtttgtccctgtgaaaacatgtaacgtctgccttagagccatgaccgaaacttgatatttttttctttcatgagtgtccggcatctgctggtcttcattgtgaaacgtgccagtcgtgctttgtgaaaaataacaaagtggtcacagaaaaattgtgatc

SEQ ID NO: 371623 - DNA, 1028 bp, Homo sapiens
gggggagcaacgcagccgtgagccggctatgcccactggaagggccaagtgctgaattcagatgagctccaggagttgtacgaaggcctgaggctgaacaacatgaataaatatgactacgtgctcacaggttatacgagggacaagtcgttcctggccatggtggtggacattgtgcaggagctgaagcagcagaaccccaggctggtgtacgtgtgtgatccagtcttgggtgacaagtgggacggcgaaggctcgatgtacgtcccggaggacctccttcccgtctacaaagaaaaagtggtgccgcttgcagacattatcacgcccaaccagtttgaggccgagttactgagtggccggaagatccacagccaggaggaagccttgcgggtgatggacatgctgcactctatgggccccgacaccgtggtcatcaccagctccgacctgccctccccgcagggcagcaactacctgattgtgctggggagtcagaggaggaggaatcccgctggctccgtggtgatggaacgcatccggatggacattcgcaaagtggacgccgtctttgtgggcactggggacctgtttgctgccatgctcctggcgtggacacacaagcaccccaataacctcaaggtggcctgtgagaagaccgtgtctaccttgcaccacgttctgcagaggaccatccagtgtgcaaaagcccaggccggggaaggagtgaggcccagccccatgcagctggagctgcggatggtgcagagcaaaagggacatcgaggacccagagatcgtcgtccaggccacggtgctgtgagggccccgccgcttgcccgtgacacgcagcgcgttggtgtctccgtgtttgtccctgtgaaaacatgtaacgtctgccttagagccatgaccgaaacttgatatttttttctttcatgagtgtccggcatctgctggtcttcattgtgaaacgtgccagtcgtgctttgtgaaaaataacaaagtggtcacagaaaaattgtgatc

SEQ ID NO: 371624 - DNA, 2483 bp, Homo sapiens
tcaatcctccagcctcagcctcccaaagtgctgcgatcacaggtgtgagccactgtgcctggccatatgactcagtttttaataatgactctacgtaaaactgacctgcactattgcatctggcaatcgcgtggcccaatccatcttcaaagccagcaacagtcgttgagtccttcttttaacttccaatctctgatttttccttctgcccttcagcctgagaaaactctgcttttgaagggctcatgtcattcaattaaactctcctggataagaagatcctcatgggagagagatctcatcacactgacaggtttcacccacactcagggggttgcccgagggtgagcggggtccctgaaggtcattcttagaattctgccacggaagagccccataggccatgatagggacagggtttactgtaaaacaaggtgattcacatacacagaccagtaatgctgttcctaaaggggcccaagctgatcccatcagtcagcagggctgctcacagggcacttggcctgtctttgttgaaggcgattcctgtgaaggcagtggaggagctccgggtgggaggtgagtgttgtggagagcccagcagcccgctgggctgaaccttggaccaagaaccagtctgtccttggctcccttgtgggtggggaaagatgaggtgtatcagcagggtccagtccagaaacagaaaccagagcaacaatcgtagaggccgttgttcagccaggtattgagaaaatagagaaggcaaaaagggaacactggtgtcgtggaggagacccctgccagcattggctccacacagctgaccctgggataagagaattgttggactctttagaacctggagctgggaaggcaggtgtctgccagctggcgggtgctgggagtctgtgggggcatgcgatgaggaattctgctggtggagggaaagccacaaagtggattccgctgctgctatgggaagggacggtcactaccgctgcccctgtggggagaagagccccgggggaagaagagcactgctgacagaagcccattctcttcgcaggcttcagtttcacattcttggtacctcctggtggtgcctgggagggagccactgctgtacagagatgccaattccagaggcatggtccggcacagagcgctggcttccagctgaaggacatgtgtaacagcaggagatacctttctctggggtcccaggctcccgtcctggaccttggcaccccgccccccgtgcattgtcgtcttctgagtctggctttgtctggcacatgaagttggatgggtagactctggaagcgtccagaccagcttgcgatgctgatgaataagctgattttgatggggttttgggatttgagattgacgcggtgaactctgtccagttttcaaaccacacaggctatgcccactggaagggccaagtgctgaattcagatgagctccaggagttgtacgaaggcctgaggctgaacaacatgaataaatatgactacgtgctcacagttgatcgtggtgagtctcctgttttctgagggtgacctggattctccccctaaaggttatacgagggacaagtcgttcctggccatggtggtggacattgtgcaggagctgaagcagcagaaccccaggctggtgtacgtgtgtgatccagtcttgggtgacaagtgggacggcgaaggctcgatgtacgtcccggaggacctccttcccgtctacaaagaaaaagtggtgccgcttgcagacattatcacgcccaaccagtttgaggccgagttactgagtggccggaagatccacagccaggaggaagccttgcgggtgatggacatgctgcactctatgggccccgacaccgtggtcatcaccagctccgacctgccctccccgcagggcagcaactacctgattgtgctggggagtcagaggaggaggaatcccgctggctccgtggtgatggaacgcatccggatggacattcgcaaagtggacgccgtctttgtgggcactggggacctgtttgctgccatgctcctggcgtggacacacaagcaccccaataacctcaaggtggcctgtgagaagaccgtgtctaccttgcaccacgttctgcagaggaccatccagtgtgcaaaagcccaggccggggaaggagtgaggcccagccccatgcagctggagctgcggatggtgcagagcaaaagggacatcgaggacccagagatcgtcgtccaggccacggtgctgtgagggccccgccgcttgcccgtgacacgcagcgcgttggtgtctccgtgtttgtccctgtgaaaacatgtaacgtctgccttagagccatgaccgaaacttgatatttttttctttcatgagtgtccggcatctgctggtcttcattgtgaaacgtgccagtcgtgctttgtgaaaaataacaaagtggtcacagaaaaattgtgatc

SEQ ID NO: 371625 - DNA, 807 bp, Homo sapiens
gtatgtatcgtctgagttcagaggatccaagatgcaaaagtacgtcccggaggacctccttcccgtctacaaagaaaaagtggtgccgcttgcagacattatcacgcccaaccagtttgaggccgagttactgagtggccggaagatccacagccaggaggaagccttgcgggtgatggacatgctgcactctatgggccccgacaccgtggtcatcaccagctccgacctgccctccccgcagggcagcaactacctgattgtgctggggagtcagaggaggaggaatcccgctggctccgtggtgatggaacgcatccggatggacattcgcaaagtggacgccgtctttgtgggcactggggacctgtttgctgccatgctcctggcgtggacacacaagcaccccaataacctcaaggtggcctgtgagaagaccgtgtctaccttgcaccacgttctgcagaggaccatccagtgtgcaaaagcccaggccggggaaggagtgaggcccagccccatgcagctggagctgcggatggtgcagagcaaaagggacatcgaggacccagagatcgtcgtccaggccacggtgctgtgagggccccgccgcttgcccgtgacacgcagcgcgttggtgtctccgtgtttgtccctgtgaaaacatgtaacgtctgccttagagccatgaccgaaacttgatatttttttctttcatgagtgtccggcatctgctggtcttcattgtgaaacgtgccagtcgtgctttgtgaaaaataacaaagtggtcacagaaaaattgtgatc

SEQ ID NO: 371626 - DNA, 1274 bp, Homo sapiens
  misc_feature (4)..(4): n is a, c, g, or t
  misc_feature (6)..(8): n is a, c, g, or t
ggcncnnngcggaactcgcgggttcggagccgcccgctgaggtcagaaggaggcgtctgcgctgatcgggtccgccgcgcgccagagccagagtcgcagccgaggggagccggggccggagcccgagcccgagccgagccggagcccgagcgagcggcggagaccgtgcccccgcctcggccccgcgccgccgcggccaggcccggcatggaggaggagtgccgggtgctctccatacagagccacgtcatccgcggctacgtgggcaaccgggcggccacgttcccgctgcaggttttgggatttgagattgacgcggtgaactctgtccagttttcaaaccacacaggctatgcccactggaagggccaagtgctgaattcagatgagctccaggagttgtacgaaggcctgaggctgaacaacatgaataaatatgactacgtgctcacaggttatacgagggacaagtcgttcctggccatggtggtggacattgtgcaggagctgaagcagcagaaccccaggctggtgtacgtgtgtgatccagtcttgggtgacaagtgggacggcgaaggctcgatgtacgtcccggaggacctccttcccgtctacaaagaaaaagtggtgccgcttgcagacattatcacgcccaaccagtttgaggccgagttactgagtggccggaagatccacagccaggaggaagccttgcggaactacctgattgtgctggggagtcagaggaggaggaatcccgctggctccgtggtgatggaacgcatccggatggacattcgcaaagtggacgccgtctttgtgggcactggggacctgtttgctgccatgctcctggcgtggacacacaagcaccccaataacctcaaggtggcctgtgagaagaccgtgtctaccttgcaccacgttctgcagaggaccatccagtgtgcaaaagcccaggccggggaaggagtgaggcccagccccatgcagctggagctgcggatggtgcagagcaaaagggacatcgaggacccagagatcgtcgtccaggccacggtgctgtgagggccccgccgcttgcccgtgacacgcagcgcgttggtgtctccgtgtttgtccctgtgaaaacatgtaacgtctgccttagagccatgaccgaaacttgatatttttttctttcatgagtgtccggcatctgctggtcttcattgtgaaacgtgccagtcgtgctttgtgaaaaataacaaagtggtcacagaaaaattgtgatc

SEQ ID NO: 371627 - DNA, 2256 bp, Homo sapiens
  misc_feature (4)..(4): n is a, c, g, or t
  misc_feature (6)..(8): n is a, c, g, or t
ggcncnnngcggaactcgcgggttcggagccgcccgctgaggtcagaaggaggcgtctgcgctgatcgggtccgccgcgcgccagagccagagtcgcagccgaggggagccggggccggagcccgagcccgagccgagccggagcccgagcgagcggcggagaccgtgcccccgcctcggccccgcgccgccgcggccaggcccggcatggaggaggagtgccgggtgctctccatacagagccacgtcatccgcggctacgtgggcaaccgggcggccacgttcccgctgcaggttttgggatttgagattgacgcggtgaactctgtccagttttcaaaccacacagagacaaggtcggtctctgtcgcccaggctggcgtgaagtggcgcaaccagctcactgcagccttgacctcctgggctgaagcaatctttctgcctccacctcccgagtggctgggactatagttgtgcaccagcacgcccacctcctgcccagggttgttactggggtggtcacgtgggcagcttctgcctgggatgggccacaaagccagactcccggcagggacacgggtgttccacacaagctgcgttgttggttccctgacgcccttcaggctggggggtgggaaagccgatcccccaagtgcctgcagagcccacctggcgcaggcctcgccgcctcgaggctgctgctcgcacttctgccccttcccccggccaggcccccgttccttgaggccgtaccacaaggtgcgttcatttttccacaccgtgagctgggcttggcagagcctccaccttgtggccagtattcccagtggcccctttgagaggatttcctggagctccctgtctgagcttcccggactgagggcactgggaaggagcctgcggagctggaggtcagcgggtggacgggttgcgctgtcctggctttcggagtgtagagccagaggggatgggacaggtgccctgctgctgggcttggtggtccctgctgcagggaaggggcagctggtgtgaacacaaggagctgcggggctggagaaggccagggccaggagcctgccgacggacaccagcgaggggccaggccgggccaggagcctgccgacggacaccagcgaggggccaggccgggccagactccctggccggctgggatctgacaggagcgccaggctccttgggccgcccgaggaaccgcttgtttgcctgtgctttttcatctgtaaatggaatgagttggacacaagatccaagcgccctcccctgttggagaaggttcttgtgggctctgggcccatcccacatcccacagtgggcaggaggccaccaagaggtgcaagaccatgccctctgtttcgataggaagctgggcctcagaggggcctggggcctgtgtctgagacccggccaagtgctggacgtctccccttcctcatggctgttatggctgaattacgtccccccaaattctcatgttgcagccttaaccccagcacctcagtgtgggactgggtttggagatggagcccctacagaggtcagcaggttaaaagaggccatcagggctctgggtgggccctgatccaagctgcttggtgtccttgtaagaagaagagatgaggacacagacacacacagagggacagccccatgaggaaacagggaggcaatgccgtctgcaagcccagggcagaggcctcaggaaccagccctggtgacacctggaccttggacccccgtgcccaggacagtaggagaattggagccgcctggctgcagtccttcccgatggcaccctgtattagtccgttctcacactgctaattgttgggaaaagggcttgtggaatgcctgtataaactggccatgaaaatatgggacaataagttgtggaaagccacaagaggcctctgaggaggaaagcctcctaattgccatcatgttcgcatgctcagggcgagacctgctgtcttatctgtaaacaccgtgttcaaggagaaagacattccttcgaagcactggactgtggacagacacacgagctcctggttaagcccgctcccaccagctcctgtccgataagttaaagatacgctgtttgagcacaaaggagattcattgaaaccgctattgctgtagattacgcctgtgacgcactgcctccctttcactgtttcgccctgaatatctgcttctcagatctaagtgactgtactcaataaatagcgtggagaccag

SEQ ID NO: 371628 - DNA, 1186 bp, Homo sapiens
  misc_feature (4)..(4): n is a, c, g, or t
  misc_feature (6)..(8): n is a, c, g, or t
ggcncnnngcggaactcgcgggttcggagccgcccgctgaggtcagaaggaggcgtctgcgctgatcgggtccgccgcgcgccagagccagagtcgcagccgaggggagccggggccggagcccgagcccgagccgagccggagcccgagcgagcggcggagaccgtgcccccgcctcggccccgcgccgccgcggccaggcccggcatggaggaggagtgccgggtgctctccatacagagccacgtcatccgcggctacgtgggcaaccgggcggccacgttcccgctgcaggttttgggatttgagattgacgcggtgaactctgtccagttttcaaaccacacaggctatgcccactggaagggccaagtgctgaattcagatgagctccaggagttgtacgaaggcctgaggctgaacaacatgaataaatatgactacgtgctcacaggttatacgagggacaagtcgttcctggccatggtggtggacattgtgcaggagctgaagcagcagaaccccaggctggtgtacgtgtgtgatccagtcttgggtgacaagtgggacggcgaaggctcgatgtacgtcccggaggacctccttcccgtctacaaagaaaaagtggtgccgcttgcagacattatcacgcccaaccagtttgaggccgagttactgagtggccggaagatccacagccaggaggaagccttgcggtggacgccgtctttgtgggcactggggacctgtttgctgccatgctcctggcgtggacacacaagcaccccaataacctcaaggtggcctgtgagaagaccgtgtctaccttgcaccacgttctgcagaggaccatccagtgtgcaaaagcccaggccggggaaggagtgaggcccagccccatgcagctggagctgcggatggtgcagagcaaaagggacatcgaggacccagagatcgtcgtccaggccacggtgctgtgagggccccgccgcttgcccgtgacacgcagcgcgttggtgtctccgtgtttgtccctgtgaaaacatgtaacgtctgccttagagccatgaccgaaacttgatatttttttctttcatgagtgtccggcatctgctggtcttcattgtgaaacgtgccagtcgtgctttgtgaaaaataacaaagtggtcacagaaaaattgtgatc

SEQ ID NO: 371629 - DNA, 1564 bp, Homo sapiens
  misc_feature (4)..(4): n is a, c, g, or t
  misc_feature (6)..(8): n is a, c, g, or t
ggcncnnngcggaactcgcgggttcggagccgcccgctgaggtcagaaggaggcgtctgcgctgatcgggtccgccgcgcgccagagccagagtcgcagccgaggggagccggggccggagcccgagcccgagccgagccggagcccgagcgagcggcggagaccgtgcccccgcctcggccccgcgccgccgcggccaggcccggcatggaggaggagtgccgggtgctctccatacagagccacgtcatccgcggctacgtgggcaaccgggcggccacgttcccgctgcaggttttgggatttgagattgacgcggtgaactctgtccagttttcaaaccacacaggctatgcccactggaagggccaagtgctgaattcagatgagctccaggagttgtacgaaggcctgaggctgaacaacatgaataaatatgactacgtgctcacaggttatacgagggacaagtcgttcctggccatggtggtggacattgtgcaggagctgaagcagcagaaccccaggctggtgtacgtgtgtgatccagtcttgggtgacaagtgggacggcgaaggctcgatgtacgtcccggaggacctccttcccgtctacaaagaaaaagtggtgccgcttgcagacattatcacgcccaaccagtttgaggccgagttactgagtggccggaagatccacagccaggaggaagccttgcggccaggccacggtgctgtgagggccccgccgcttgcccgtgacacgcagcgcgttggtgtctccgtgtttgtccctgtgaaaacatgtaacgtctgccttagagccatgaccgaaacttgatatttttttctttcaaaaaaaaaaaaaaaaaaaaaaaaaaaaaaaaaaacaaaaaaaaaaaaaaaaaaaaaaaaaaaaaaaaaaaaaaaaaaaaaacaacaaaaagagagggggcgcgcgcgcgccgccccaatatccccccgcggggggcgccacacccacttatccccccaccccaagttgtttgtatagaacaaggagggggcccccccatacgcggcagcctctattatatatatacaacgccagcgcggcccggcgcgcggctactaataacaaacaccgacggtcacggtggagagaaccaaccaacccaccgcacacagcgcgactcaactctccccgtgcgaggcaggaaggcacccccccccattaccccgcgcgcgaggcgcggcagcacacacaccaacgcagcggagacgaacaaccccccccctcccgccgccgcacctccatccaacacagcccacccccaccgacgcgcgcccactccatcataacaccccacctgccaccgccagcgcgcccaccgcggacggcgggacgaccacaccaccaccccgccgcacacaattacacccccgcgcgccgcgcgcgccgaccagacgacagatcgtcgccgcacgcccccccccgacgggcccacccgcccatccccgtaccacaacctatctcttctctccaccggcgcgggcgcaccccccaccccccaaacacgcaccacccc

SEQ ID NO: 371630 - DNA, 454 bp, Homo sapiens
cagagcaggtagctgggaccgggcatctgctcagccctccgggctctccgtggtgggcagtccgcagcgtggcctgtgagaagaccgtgtctaccttgcaccacgttctgcagaggaccatccagtgtgcaaaagcccaggccggggaaggagtgaggcccagccccatgcagctggagctgcggatggtgcagagcaaaagggacatcgaggacccagagatcgtcgtccaggccacggtgctgtgagggccccgccgcttgcccgtgacacgcagcgcgttggtgtctccgtgtttgtccctgtgaaaacatgtaacgtctgccttagagccatgaccgaaacttgatatttttttctttcatgagtgtccggcatctgctggtcttcattgtgaaacgtgccagtcgtgctttgtgaaaaataacaaagtggtcacagaaaaattgtgatc

SEQ ID NO: 371631 - DNA, 3332 bp, Homo sapiens
tcaatcctccagcctcagcctcccaaagtgctgcgatcacaggtgtgagccactgtgcctggccatatgactcagtttttaataatgactctacgtaaaactgacctgcactattgcatctggcaatcgcgtggcccaatccatcttcaaagccagcaacagtcgttgagtccttcttttaacttccaatctctgatttttccttctgcccttcagcctgagaaaactctgcttttgaagggctcatgtcattcaattaaactctcctggataagaagatcctcatgggagagagatctcatcacactgacaggtttcacccacactcagggggttgcccgagggtgagcggggtccctgaaggtcattcttagaattctgccacggaagagccccataggccatgatagggacagggtttactgtaaaacaaggtgattcacatacacagaccagtaatgctgttcctaaaggggcccaagctgatcccatcagtcagcagggctgctcacagggcacttggcctgtctttgttgaaggcgattcctgtgaaggcagtggaggagctccgggtgggaggtgagtgttgtggagagcccagcagcccgctgggctgaaccttggaccaagaaccagtctgtccttggctcccttgtgggtggggaaagatgaggtgtatcagcagggtccagtccagaaacagaaaccagagcaacaatcgtagaggccgttgttcagccaggtattgagaaaatagagaaggcaaaaagggaacactggtgtcgtggaggagacccctgccagcattggctccacacagctgaccctgggataagagaattgttggactctttagaacctggagctgggaaggcaggtgtctgccagctggcgggtgctgggagtctgtgggggcatgcgatgaggaattctgctggtggagggaaagccacaaagtggattccgctgctgctatgggaagggacggtcactaccgctgcccctgtggggagaagagccccgggggaagaagagcactgctgacagaagcccattctcttcgcaggcttcagtttcacattcttggtacctcctggtggtgcctgggagggagccactgctgtacagagatgccaattccagaggcatggtccggcacagagcgctggcttccagctgaaggacatgtgtaacagcaggagatacctttctctggggtcccaggctcccgtcctggaccttggcaccccgccccccgtgcattgtcgtcttctgagtctggctttgtctggcacatgaagttggatgggtagactctggaagcgtccagaccagcttgcgatgctgatgaataagctgattttgatggggttttgggatttgagattgacgcggtgaactctgtccagttttcaaaccacacagagacaaggtcggtctctgtcgcccaggctggcgtgaagtggcgcaaccagctcactgcagccttgacctcctgggctgaagcaatctttctgcctccacctcccgagtggctgggactatagttgtgcaccagcacgcccacctcctgcccagggttgttactggggtggtcacgtgggcagcttctgcctgggatgggccacaaagccagactcccggcagggacacgggtgttccacacaagctgcgttgttggttccctgacgcccttcaggctggggggtgggaaagccgatcccccaagtgcctgcagagcccacctggcgcaggcctcgccgcctcgaggctgctgctcgcacttctgccccttcccccggccaggcccccgttccttgaggccgtaccacaaggtgcgttcatttttccacaccgtgagctgggcttggcagagcctccaccttgtggccagtattcccagtggcccctttgagaggatttcctggagctccctgtctgagcttcccggactgagggcactgggaaggagcctgcggagctggaggtcagcgggtggacgggttgcgctgtcctggctttcggagtgtagagccagaggggatgggacaggtgccctgctgctgggcttggtggtccctgctgcagggaaggggcagctggtgtgaacacaaggagctgcggggctggagaaggccagggccaggagcctgccgacggacaccagcgaggggccaggccgggccaggagcctgccgacggacaccagcgaggggccaggccgggccagactccctggccggctgggatctgacaggagcgccaggctccttgggccgcccgaggaaccgcttgtttgcctgtgctttttcatctgtaaatggaatgagttggacacaagatccaagcgccctcccctgttggagaaggttcttgtgggctctgggcccatcccacatcccacagtgggcaggaggccaccaagaggtgcaagaccatgccctctgtttcgataggaagctgggcctcagaggggcctggggcctgtgtctgagacccggccaagtgctggacgtctccccttcctcatggctgttatggctgaattacgtccccccaaattctcatgttgcagccttaaccccagcacctcagtgtgggactgggtttggagatggagcccctacagaggtcagcaggttaaaagaggccatcagggctctgggtgggccctgatccaagctgcttggtgtccttgtaagaagaagagatgaggacacagacacacacagagggacagccccatgaggaaacagggaggcaatgccgtctgcaagcccagggcagaggcctcaggaaccagccctggtgacacctggaccttggacccccgtgcccaggacagtaggagaattggagccgcctggctgcagtccttcccgatggcaccctgtattagtccgttctcacactgctaattgttgggaaaagggcttgtggaatgcctgtataaactggccatgaaaatatgggacaataagttgtggaaagccacaagaggcctctgaggaggaaagcctcctaattgccatcatgttcgcatgctcagggcgagacctgctgtcttatctgtaaacaccgtgttcaaggagaaagacattccttcgaagcactggactgtggacagacacacgagctcctggttaagcccgctcccaccagctcctgtccgataagttaaagatacgctgtttgagcacaaaggagattcattgaaaccgctattgctgtagattacgcctgtgacgcactgcctccctttcactgtttcgccctgaatatctgcttctcagatctaagtgactgtactcaataaatagcgtggagaccag

SEQ ID NO: 371632 - DNA, 1880 bp, Homo sapiens
tcaatcctccagcctcagcctcccaaagtgctgcgatcacaggtgtgagccactgtgcctggccatatgactcagtttttaataatgactctacgtaaaactgacctgcactattgcatctggcaatcgcgtggcccaatccatcttcaaagccagcaacagtcgttgagtccttcttttaacttccaatctctgatttttccttctgcccttcagcctgagaaaactctgcttttgaagggctcatgtcattcaattaaactctcctggataagaagatcctcatgggagagagatctcatcacactgacaggtttcacccacactcagggggttgcccgagggtgagcggggtccctgaaggtcattcttagaattctgccacggaagagccccataggccatgatagggacagggtttactgtaaaacaaggtgattcacatacacagaccagtaatgctgttcctaaaggggcccaagctgatcccatcagtcagcagggctgctcacagggcacttggcctgtctttgttgaaggcgattcctgtgaaggcagtggaggagctccgggtgggaggtgagtgttgtggagagcccagcagcccgctgggctgaaccttggaccaagaaccagtctgtccttggctcccttgtgggtggggaaagatgaggtgtatcagcagggtccagtccagaaacagaaaccagagcaacaatcgtagaggccgttgttcagccaggtattgagaaaatagagaaggcaaaaagggaacactggtgtcgtggaggagacccctgccagcattggctccacacagctgaccctgggataagagaattgttggactctttagaacctggagctgggaaggcaggtgtctgccagctggcgggtgctgggagtctgtgggggcatgcgatgaggaattctgctggtggagggaaagccacaaagtggattccgctgctgctatgggaagggacggtcactaccgctgcccctgtggggagaagagccccgggggaagaagagcactgctgacagaagcccattctcttcgcaggcttcagtttcacattcttggtacctcctggtggtgcctgggagggagccactgctgtacagagatgccaattccagaggcatggtccggcacagagcgctggcttccagctgaaggacatgtgtaacagcaggagatacctttctctggggtcccaggctcccgtcctggaccttggcaccccgccccccgtgcattgtcgtcttctgagtctggctttgtctggcacatgaagttggatgggtagactctggaagcgtccagaccagcttgcgatgctgatgaataagctgattttgatggggttttgggatttgagattgacgcggtgaactctgtccagttttcaaaccacacaggctatgcccactggaagggccaagtgctgaattcagatgagctccaggagttgtacgaaggcctgaggctgaacaacatgaataaatatgactacgtgctcacagttgatcgtggtgagtctcctgttttctgagggtgacctggattctccccctaaaggttatacgagggacaagtcgttcctggccatggtggtggacattgtgcaggagctgaagcagcagaaccccaggctggtgtacgtgtgtgatccagtcttgggtgacaagtgggacggcgaaggctcgatggtgagtagtttcacgtgtgtgatttaaaagtgtggtgagtggagctattcctgtccagccagaagacaggcccacatctctaagtgtctaactcggtgggactcctctgtccaggggtaaaaagacaaaccttgttaggaaggagaaagggaaccgacatattt

SEQ ID NO: 371633 - DNA, 761 bp, Homo sapiens
  misc_feature (4)..(4): n is a, c, g, or t
  misc_feature (6)..(8): n is a, c, g, or t
ggcncnnngcggaactcgcgggttcggagccgcccgctgaggtcagaaggaggcgtctgcgctgatcgggtccgccgcgcgccagagccagagtcgcagccgaggggagccggggccggagcccgagcccgagccgagccggagcccgagcgagcggcggagaccgtgcccccgcctcggccccgcgccgccgcggccaggcccggcatggaggaggagtgccgggtgctctccatacagagccacgtcatccgcggctacgtgggcaaccgggcggccacgttcccgctgcaggttttgggatttgagattgacgcggtgaactctgtccagttttcaaaccacacaggctatgcccactggaagggccaagtgctgaattcagatgagctccaggagttgtacgaaggcctgaggctgaacaacatgaataaatatgactacgtgctcacaggttatacgagggacaagtcgttcctggccatggtggtggacattgtgcaggagctgaagcagcagaaccccaggctggtgtacgtgtgtgatccagtcttgggtgacaagtgggacggcgaaggctcgatgtacgtcccggaggacctccttcccgtctacaaagaaaaagtggctgccttagagccatgaccgaaacttgatatttttttctttcatgagtgtccggcatctgctggtcttcattgtgaaacgtgccagtcgtgctttgtgaaaaataacaaagtggtcacagaaaaattgtgatc

SEQ ID NO: 371634 - DNA, 740 bp, Homo sapiens
  misc_feature (4)..(4): n is a, c, g, or t
  misc_feature (6)..(8): n is a, c, g, or t
ggcncnnngcggaactcgcgggttcggagccgcccgctgaggtcagaaggaggcgtctgcgctgatcgggtccgccgcgcgccagagccagagtcgcagccgaggggagccggggccggagcccgagcccgagccgagccggagcccgagcgagcggcggagaccgtgcccccgcctcggccccgcgccgccgcggccaggcccggcatggaggaggagtgccgggtgctctccatacagagccacgtcatccgcggctacgtgggcaaccgggcggccacgttcccgctgcaggttttgggatttgagattgacgcggtgaactctgtccagttttcaaaccacacaggctatgcccactggaagggccaagtgctgaattcagatgagctccaggagttgtacgaaggcctgaggctgaacaacatgaataaatatgactacgtgctcacaggttatacgagggacaagtcgttcctggccatggtggtggacattgtgcaggagctgaagcagcagaaccccaggctggtgtacgtgtgtgatccagtcttgggtgacaagtgggacggcgaaggctcgatgtacgtcccagaggacctcctttccggtctacaaaggaccaggtacctggagtgagccgggattccacaggccagggagggaagcccttgtcggttggatggacatggctggactgctatgggcccccgacacccgtggtcatccaggttcgcccg

SEQ ID NO: 371635 - DNA, 814 bp, Homo sapiens
cacttgagcccaggaggtggaggctgcagtgagctgagatcgcaccgctacactcactccacagagcaagaccccatctcaaaaaacaaaagaaaaatctagaaaccacttaacccatgagctgtgtagtaacagcagcagctgcagcccacagacctggacgtcggatcaagtggatggagaacaaatccactgtgaccagtccagaagcctagaatttagaggcggaaggaacccaaaggtgatcctgcctgtgggtttttaactcagccattcagcgcccaggcgatttcagtatctgccttctttgtcgttgtgtctagggtgtctgtttgcttgctgtatattcactgagcacagcgggcttctccactggcacagggcacgcctgggcctgtgccctccctgccccgctgggtcagtggttgaagtcaggatatctgtcactgggcatctaactgggtggggcgggctggtgtgctcagcgtctgtctgtccactttctcccatgcttgttctctggaaggttccctgtcctgcgcccagcctgcaggaccccagcttgcagctccctgccttcccttcatggtgctccctggtgtgggctctgctgaccctcggcagacacttgcgtttggatcacgaagagttggggccactgtccagttcagtgcggctacgggatctggcccctcgattttgatcacatttgttttcctgaacaagagtggcctaaacacgagctcctgtctcagatgagcggtcaccccgtatctcccctttccgtgaggttaaaggggtgtgttggccctcc

SEQ ID NO: 371636 - DNA, 1352 bp, Homo sapiens
  misc_feature (4)..(4): n is a, c, g, or t
  misc_feature (6)..(8): n is a, c, g, or t
ggcncnnngcggaactcgcgggttcggagccgcccgctgaggtcagaaggaggcgtctgcgctgatcgggtccgccgcgcgccagagccagagtcgcagccgaggggagccggggccggagcccgagcccgagccgagccggagcccgagcgagcggcggagaccgtgcccccgcctcggccccgcgccgccgcggccaggcccggcatggaggaggagtgccgggtgctctccatacagagccacgtcatccgcggctacgtgggcaaccgggcggccacgttcccgctgcaggttttgggatttgagattgacgcggtgaactctgtccagttttcaaaccacacaggctatgcccactggaagggccaagtgctgaattcagatgagctccaggagttgtacgaaggcctgaggctgaacaacatgaataaatatgactacgtgctcacaggttatacgagggacaagtcgttcctggccatggtggtggacattgtgcaggagctgaagcagcagaaccccaggctggtgtacgtgtgtgatccagtcttgggtgacaagtgggacggcgaaggctcgatgtacgtcccggaggacctccttcccgtctacaaagaaaaagtggtgccgcttgcagacattatcacgcccaaccagtttgaggccgagttactgagtggccggaagatccacagccaggaggaagccttgcgggtgatggacatgctgcactctatgggccccgacaccgtggtcatcaccagctccgacctgccctccccgcagggcagcaactacctgattgtgctggggagtcagaggaggaggaatcccgctggctccgtggtgatggaacgcatccggatggacattcgcaaagtggacgccgtctttgtgggcactggggacctgtttgctgccatgctcctggcgtggacacacaagcaccccaataacctcaaggtggcctgtgagaagaccgtgtctaccttgcaccacgttctgcagaggaccatccagtgtgcaaaagcccaggccggggaaggagtgaggcccagccccatgcagctggagctgcggatggtgcagagcaaaagggacatcgaggacccagagatcgtcgtccaggccacggtgctgtgagggccccgccgcttgcccgtgacacgcagcgcgttggtgtctccgtgtttgtccctgtgaaaacatgtaacgtctgccttagagccatgaccgaaacttgatatttttttctttcatgagtgtccggcatctgctggtcttcattgtgaaacgtgccagtcgtgctttgtgaaaaataacaaagtggtcacagaaaaattgtgatc

SEQ ID NO: 371637 - DNA, 1198 bp, Homo sapiens
agcgggcgttccatgtgggcagccgttgggacctgccaagcactgcgcctagtgatctccttcgggtttgagccagtccatggggaggagccgtccaccaggcagcctcagggagagtgggcgggtgtcaagggaagcccacggccccagctggcccccttgtgtctgagcccccatggcttcctctgcctctaggctatgcccactggaagggccaagtgctgaattcagatgagctccaggagttgtacgaaggcctgaggctgaacaacatgaataaatatgactacgtgctcacaggttatacgagggacaagtcgttcctggccatggtggtggacattgtgcaggagctgaagcagcagaaccccaggctggtgtacgtgtgtgatccagtcttgggtgacaagtgggacggcgaaggctcgatgtacgtcccggaggacctccttcccgtctacaaagaaaaagtggtgccgcttgcagacattatcacgcccaaccagtttgaggccgagttactgagtggccggaagatccacagccaggaggaagccttgcgggtgatggacatgctgcactctatgggccccgacaccgtggtcatcaccagctccgacctgccctccccgcagggcagcaactacctgattgtgctggggagtcagaggaggaggaatcccgctggctccgtggtgatggaacgcatccggatggacattcgcaaagtggacgccgtctttgtgggcactggggacctgtttgctgccatgctcctggcgtggacacacaagcaccccaataacctcaaggtggcctgtgagaagaccgtgtctaccttgcaccacgttctgcagaggaccatccagtgtgcaaaagcccaggccggggaaggagtgaggcccagccccatgcagctggagctgcggatggtgcagagcaaaagggacatcgaggacccagagatcgtcgtccaggccacggtgctgtgagggccccgccgcttgcccgtgacacgcagcgcgttggtgtctccgtgtttgtccctgtgaaaacatgtaacgtctgccttagagccatgaccgaaacttgatatttttttctttcatgagtgtccggcatctgctggtcttcattgtgaaacgtgccagtcgtgctttgtgaaaaataacaaagtggtcacagaaaaattgtgatc

SEQ ID NO: 371638 - DNA, 2428 bp, Homo sapiens
tcaatcctccagcctcagcctcccaaagtgctgcgatcacaggtgtgagccactgtgcctggccatatgactcagtttttaataatgactctacgtaaaactgacctgcactattgcatctggcaatcgcgtggcccaatccatcttcaaagccagcaacagtcgttgagtccttcttttaacttccaatctctgatttttccttctgcccttcagcctgagaaaactctgcttttgaagggctcatgtcattcaattaaactctcctggataagaagatcctcatgggagagagatctcatcacactgacaggtttcacccacactcagggggttgcccgagggtgagcggggtccctgaaggtcattcttagaattctgccacggaagagccccataggccatgatagggacagggtttactgtaaaacaaggtgattcacatacacagaccagtaatgctgttcctaaaggggcccaagctgatcccatcagtcagcagggctgctcacagggcacttggcctgtctttgttgaaggcgattcctgtgaaggcagtggaggagctccgggtgggaggtgagtgttgtggagagcccagcagcccgctgggctgaaccttggaccaagaaccagtctgtccttggctcccttgtgggtggggaaagatgaggtgtatcagcagggtccagtccagaaacagaaaccagagcaacaatcgtagaggccgttgttcagccaggtattgagaaaatagagaaggcaaaaagggaacactggtgtcgtggaggagacccctgccagcattggctccacacagctgaccctgggataagagaattgttggactctttagaacctggagctgggaaggcaggtgtctgccagctggcgggtgctgggagtctgtgggggcatgcgatgaggaattctgctggtggagggaaagccacaaagtggattccgctgctgctatgggaagggacggtcactaccgctgcccctgtggggagaagagccccgggggaagaagagcactgctgacagaagcccattctcttcgcaggcttcagtttcacattcttggtacctcctggtggtgcctgggagggagccactgctgtacagagatgccaattccagaggcatggtccggcacagagcgctggcttccagctgaaggacatgtgtaacagcaggagatacctttctctggggtcccaggctcccgtcctggaccttggcaccccgccccccgtgcattgtcgtcttctgagtctggctttgtctggcacatgaagttggatgggtagactctggaagcgtccagaccagcttgcgatgctgatgaataagctgattttgatggggttttgggatttgagattgacgcggtgaactctgtccagttttcaaaccacacaggctatgcccactggaagggccaagtgctgaattcagatgagctccaggagttgtacgaaggcctgaggctgaacaacatgaataaatatgactacgtgctcacaggttatacgagggacaagtcgttcctggccatggtggtggacattgtgcaggagctgaagcagcagaaccccaggctggtgtacgtgtgtgatccagtcttgggtgacaagtgggacggcgaaggctcgatgtacgtcccggaggacctccttcccgtctacaaagaaaaagtggtgccgcttgcagacattatcacgcccaaccagtttgaggccgagttactgagtggccggaagatccacagccaggaggaagccttgcgggtgatggacatgctgcactctatgggccccgacaccgtggtcatcaccagctccgacctgccctccccgcagggcagcaactacctgattgtgctggggagtcagaggaggaggaatcccgctggctccgtggtgatggaacgcatccggatggacattcgcaaagtggacgccgtctttgtgggcactggggacctgtttgctgccatgctcctggcgtggacacacaagcaccccaataacctcaaggtggcctgtgagaagaccgtgtctaccttgcaccacgttctgcagaggaccatccagtgtgcaaaagcccaggccggggaaggagtgaggcccagccccatgcagctggagctgcggatggtgcagagcaaaagggacatcgaggacccagagatcgtcgtccaggccacggtgctgtgagggccccgccgcttgcccgtgacacgcagcgcgttggtgtctccgtgtttgtccctgtgaaaacatgtaacgtctgccttagagccatgaccgaaacttgatatttttttctttcatgagtgtccggcatctgctggtcttcattgtgaaacgtgccagtcgtgctttgtgaaaaataacaaagtggtcacagaaaaattgtgatc

SEQ ID NO: 371639 - DNA, 1574 bp, Homo sapiens
gccaggctcagggtacacctattgccagggagctcccactgattccttgtgagtgtagcacagatttgttgcgactggaccatctgcacgtctgggcttcagagctgttctccccagctgttttctgccaggtcctgtcagaggcagccaccctccctgggcagagcaaaaccttgagcctgtgtttggattttgtttctgggcctaagcctaagtcagtttcacattcttggtacctcctggtggtgcctgggagggagccactgctgtacagagatgccaattccagaggcatggtccggcacagagcgctggcttccagctgaaggacatgtgtaacagcaggagatacctttctctggggtcccaggctcccgtcctggaccttggcaccccgccccccgtgcattgtcgtcttctgagtctggctttgtctggcacatgaagttggatgggtagactctggaagcgtccagaccagcttgcgatgctgatgaataagctgattttgatggggttttgggatttgagattgacgcggtgaactctgtccagttttcaaaccacacaggctatgcccactggaagggccaagtgctgaattcagatgagctccaggagttgtacgaaggcctgaggctgaacaacatgaataaatatgactacgtgctcacaggttatacgagggacaagtcgttcctggccatggtggtggacattgtgcaggagctgaagcagcagaaccccaggctggtgtacgtgtgtgatccagtcttgggtgacaagtgggacggcgaaggctcgatgtacgtcccggaggacctccttcccgtctacaaagaaaaagtggtgccgcttgcagacattatcacgcccaaccagtttgaggccgagttactgagtggccggaagatccacagccaggaggaagccttgcgggtgatggacatgctgcactctatgggccccgacaccgtggtcatcaccagctccgacctgccctccccgcagggcagcaactacctgattgtgctggggagtcagaggaggaggaatcccgctggctccgtggtgatggaacgcatccggatggacattcgcaaagtggacgccgtctttgtgggcactggggacctgtttgctgccatgctcctggcgtggacacacaagcaccccaataacctcaaggtggcctgtgagaagaccgtgtctaccttgcaccacgttctgcagaggaccatccagtgtgcaaaagcccaggccggggaaggagtgaggcccagccccatgcagctggagctgcggatggtgcagagcaaaagggacatcgaggacccagagatcgtcgtccaggccacggtgctgtgagggccccgccgcttgcccgtgacacgcagcgcgttggtgtctccgtgtttgtccctgtgaaaacatgtaacgtctgccttagagccatgaccgaaacttgatatttttttctttcatgagtgtccggcatctgctggtcttcattgtgaaacgtgccagtcgtgctttgtgaaaaataacaaagtggtcacagaaaaattgtgatc

SEQ ID NO: 371640 - DNA, 1268 bp, Homo sapiens
  misc_feature (4)..(4): n is a, c, g, or t
  misc_feature (6)..(8): n is a, c, g, or t
ggcncnnngcggaactcgcgggttcggagccgcccgctgaggtcagaaggaggcgtctgcgctgatcgggtccgccgcgcgccagagccagagtcgcagccgaggggagccggggccggagcccgagcccgagccgagccggagcccgagcgagcggcggagaccgtgcccccgcctcggccccgcgccgccgcggccaggcccggcatggaggaggagtgccgggtgctctccatacagagccacgtcatccgcggctacgtgggcaaccgggcggccacgttcccgctgcaggttttgggatttgagattgacgcggtgaactctgtccagttttcaaaccacacaggctatgcccactggaagggccaagtgctgaattcagatgagctccaggagttgtacgaaggcctgaggctgaacaacatgaataaatatgactacgtgctcacagtgtgtgatccagtcttgggtgacaagtgggacggcgaaggctcgatgtacgtcccggaggacctccttcccgtctacaaagaaaaagtggtgccgcttgcagacattatcacgcccaaccagtttgaggccgagttactgagtggccggaagatccacagccaggaggaagccttgcgggtgatggacatgctgcactctatgggccccgacaccgtggtcatcaccagctccgacctgccctccccgcagggcagcaactacctgattgtgctggggagtcagaggaggaggaatcccgctggctccgtggtgatggaacgcatccggatggacattcgcaaagtggacgccgtctttgtgggcactggggacctgtttgctgccatgctcctggcgtggacacacaagcaccccaataacctcaaggtggcctgtgagaagaccgtgtctaccttgcaccacgttctgcagaggaccatccagtgtgcaaaagcccaggccggggaaggagtgaggcccagccccatgcagctggagctgcggatggtgcagagcaaaagggacatcgaggacccagagatcgtcgtccaggccacggtgctgtgagggccccgccgcttgcccgtgacacgcagcgcgttggtgtctccgtgtttgtccctgtgaaaacatgtaacgtctgccttagagccatgaccgaaacttgatatttttttctttcatgagtgtccggcatctgctggtcttcattgtgaaacgtgccagtcgtgctttgtgaaaaataacaaagtggtcacagaaaaattgtgatc

SEQ ID NO: 371641 - DNA, 1407 bp, Homo sapiens
  misc_feature (4)..(4): n is a, c, g, or t
  misc_feature (6)..(8): n is a, c, g, or t
ggcncnnngcggaactcgcgggttcggagccgcccgctgaggtcagaaggaggcgtctgcgctgatcgggtccgccgcgcgccagagccagagtcgcagccgaggggagccggggccggagcccgagcccgagccgagccggagcccgagcgagcggcggagaccgtgcccccgcctcggccccgcgccgccgcggccaggcccggcatggaggaggagtgccgggtgctctccatacagagccacgtcatccgcggctacgtgggcaaccgggcggccacgttcccgctgcaggttttgggatttgagattgacgcggtgaactctgtccagttttcaaaccacacaggctatgcccactggaagggccaagtgctgaattcagatgagctccaggagttgtacgaaggcctgaggctgaacaacatgaataaatatgactacgtgctcacagttgatcgtggtgagtctcctgttttctgagggtgacctggattctccccctaaaggttatacgagggacaagtcgttcctggccatggtggtggacattgtgcaggagctgaagcagcagaaccccaggctggtgtacgtgtgtgatccagtcttgggtgacaagtgggacggcgaaggctcgatgtacgtcccggaggacctccttcccgtctacaaagaaaaagtggtgccgcttgcagacattatcacgcccaaccagtttgaggccgagttactgagtggccggaagatccacagccaggaggaagccttgcgggtgatggacatgctgcactctatgggccccgacaccgtggtcatcaccagctccgacctgccctccccgcagggcagcaactacctgattgtgctggggagtcagaggaggaggaatcccgctggctccgtggtgatggaacgcatccggatggacattcgcaaagtggacgccgtctttgtgggcactggggacctgtttgctgccatgctcctggcgtggacacacaagcaccccaataacctcaaggtggcctgtgagaagaccgtgtctaccttgcaccacgttctgcagaggaccatccagtgtgcaaaagcccaggccggggaaggagtgaggcccagccccatgcagctggagctgcggatggtgcagagcaaaagggacatcgaggacccagagatcgtcgtccaggccacggtgctgtgagggccccgccgcttgcccgtgacacgcagcgcgttggtgtctccgtgtttgtccctgtgaaaacatgtaacgtctgccttagagccatgaccgaaacttgatatttttttctttcatgagtgtccggcatctgctggtcttcattgtgaaacgtgccagtcgtgctttgtgaaaaataacaaagtggtcacagaaaaattgtgatc

SEQ ID NO: 371642 - DNA, 1117 bp, Homo sapiens
agcgggcgttccatgtgggcagccgttgggacctgccaagcactgcgcctagtgatctccttcgggtttgagccagtccatggggaggagccgtccaccaggcagcctcagggagagtgggcgggtgtcaagggaagcccacggccccagctggcccccttgtgtctgagcccccatggcttcctctgcctctaggctatgcccactggaagggccaagtgctgaattcagatgagctccaggagttgtacgaaggcctgaggctgaacaacatgaataaatatgactacgtgctcacaggttatacgagggacaagtcgttcctggccatggtggtggacattgtgcaggagctgaagcagcagaaccccaggctggtgtacgtgtgtgatccagtcttgggtgacaagtgggacggcgaaggctcgatgtacgtcccggaggacctccttcccgtctacaaagaaaaagtggtgccgcttgcagacattatcacgcccaaccagtttgaggccgacgtggtcatcaccagctccgacctgccctccccgcagggcagcaactacctgattgtgctggggagtcagaggaggaggaatcccgctggctccgtggtgatggaacgcatccggatggacattcgcaaagtggacgccgtctttgtgggcactggggacctgtttgctgccatgctcctggcgtggacacacaagcaccccaataacctcaaggtggcctgtgagaagaccgtgtctaccttgcaccacgttctgcagaggaccatccagtgtgcaaaagcccaggccggggaaggagtgaggcccagccccatgcagctggagctgcggatggtgcagagcaaaagggacatcgaggacccagagatcgtcgtccaggccacggtgctgtgagggccccgccgcttgcccgtgacacgcagcgcgttggtgtctccgtgtttgtccctgtgaaaacatgtaacgtctgccttagagccatgaccgaaacttgatatttttttctttcatgagtgtccggcatctgctggtcttcattgtgaaacgtgccagtcgtgctttgtgaaaaataacaaagtggtcacagaaaaattgtgatc

SEQ ID NO: 371643 - DNA, 2405 bp, Homo sapiens
tcaatcctccagcctcagcctcccaaagtgctgcgatcacaggtgtgagccactgtgcctggccatatgactcagtttttaataatgactctacgtaaaactgacctgcactattgcatctggcaatcgcgtggcccaatccatcttcaaagccagcaacagtcgttgagtccttcttttaacttccaatctctgatttttccttctgcccttcagcctgagaaaactctgcttttgaagggctcatgtcattcaattaaactctcctggataagaagatcctcatgggagagagatctcatcacactgacaggtttcacccacactcagggggttgcccgagggtgagcggggtccctgaaggtcattcttagaattctgccacggaagagccccataggccatgatagggacagggtttactgtaaaacaaggtgattcacatacacagaccagtaatgctgttcctaaaggggcccaagctgatcccatcagtcagcagggctgctcacagggcacttggcctgtctttgttgaaggcgattcctgtgaaggcagtggaggagctccgggtgggaggtgagtgttgtggagagcccagcagcccgctgggctgaaccttggaccaagaaccagtctgtccttggctcccttgtgggtggggaaagatgaggtgtatcagcagggtccagtccagaaacagaaaccagagcaacaatcgtagaggccgttgttcagccaggtattgagaaaatagagaaggcaaaaagggaacactggtgtcgtggaggagacccctgccagcattggctccacacagctgaccctgggataagagaattgttggactctttagaacctggagctgggaaggcaggtgtctgccagctggcgggtgctgggagtctgtgggggcatgcgatgaggaattctgctggtggagggaaagccacaaagtggattccgctgctgctatgggaagggacggtcactaccgctgcccctgtggggagaagagccccgggggaagaagagcactgctgacagaagcccattctcttcgcaggcttcagtttcacattcttggtacctcctggtggtgcctgggagggagccactgctgtacagagatgccaattccagaggcatggtccggcacagagcgctggcttccagctgaaggacatgtgtaacagcaggagatacctttctctggggtcccaggctcccgtcctggaccttggcaccccgccccccgtgcattgtcgtcttctgagtctggctttgtctggcacatgaagttggatgggtagactctggaagcgtccagaccagcttgcgatgctgatgaataagctgattttgatggggttttgggatttgagattgacgcggtgaactctgtccagttttcaaaccacacaggctatgcccactggaagggccaagtgctgaattcagatgagctccaggagttgtacgaaggcctgaggctgaacaacatgaataaatatgactacgtgctcacagttgatcgtggtgagtctcctgttttctgagggtgacctggattctccccctaaaggttatacgagggacaagtcgttcctggccatggtggtggacattgtgcaggagctgaagcagcagaaccccaggctggtgtacgtgtgtgatccagtcttgggtgacaagtgggacggcgaaggctcgatgtacgtcccggaggacctccttcccgtctacaaagaaaaagtggtgccgcttgcagacattatcacgcccaaccagtttgaggccgagttactgagtggccggaagatccacagccaggaggaagccttgcggaactacctgattgtgctggggagtcagaggaggaggaatcccgctggctccgtggtgatggaacgcatccggatggacattcgcaaagtggacgccgtctttgtgggcactggggacctgtttgctgccatgctcctggcgtggacacacaagcaccccaataacctcaaggtggcctgtgagaagaccgtgtctaccttgcaccacgttctgcagaggaccatccagtgtgcaaaagcccaggccggggaaggagtgaggcccagccccatgcagctggagctgcggatggtgcagagcaaaagggacatcgaggacccagagatcgtcgtccaggccacggtgctgtgagggccccgccgcttgcccgtgacacgcagcgcgttggtgtctccgtgtttgtccctgtgaaaacatgtaacgtctgccttagagccatgaccgaaacttgatatttttttctttcatgagtgtccggcatctgctggtcttcattgtgaaacgtgccagtcgtgctttgtgaaaaataacaaagtggtcacagaaaaattgtgatc

SEQ ID NO: 371644 - DNA, 593 bp, Homo sapiens
gcgcgcgtaggattaccttgcgccccccggagtatgggctatagtcggaccacgcgtcgcatgaggaggaggaatcccgctggctccgtggtgatggaacgcatccggatggacattcgcaaagtggacgccgtctttgtgggcactggggacctgtttgctgccatgctcctggcgtggacacacaagcaccccaataacctcaaggtggcctgtgagaagaccgtgtctaccttgcaccacgttctgcagaggaccatccagtgtgcaaaagcccaggccggggaaggagtgaggcccagccccatgcagctggagctgcggatggtgcagagcaaaagggacatcgaggacccagagatcgtcgtccaggccacggtgctgtgagggccccgccgcttgcccgtgacacgcagcgcgttggtgtctccgtgtttgtccctgtgaaaacatgtaacgtctgccttagagccatgaccgaaacttgatatttttttctttcatgagtgtccggcatctgctggtcttcattgtgaaacgtgccagtcgtgctttgtgaaaaataacaaagtggtcacagaaaaattgtgatc

SEQ ID NO: 371645 - DNA, 899 bp, Homo sapiens
  misc_feature (4)..(4): n is a, c, g, or t
  misc_feature (6)..(8): n is a, c, g, or t
ggcncnnngcggaactcgcgggttcggagccgcccgctgaggtcagaaggaggcgtctgcgctgatcgggtccgccgcgcgccagagccagagtcgcagccgaggggagccggggccggagcccgagcccgagccgagccggagcccgagcgagcggcggagaccgtgcccccgcctcggccccgcgccgccgcggccaggcccggcatggaggaggagtgccgggtgctctccatacagagccacgtcatccgcggctacgtgggcaaccgggcggccacgttcccgctgcaggttttgggatttgagattgacgcggtgaactctgtccagttttcaaaccacacaggctatgcccactggaagggccaagtgctgaattcagatgagctccaggagttgtacgaaggcctgaggctgaacaacatgaataaatatgactacgtgctcacaggttatacgagggacaagtcgttcctggcgtggacacacaagcaccccaataacctcaaggtggcctgtgagaagaccgtgtctaccttgcaccacgttctgcagaggaccatccagtgtgcaaaagcccaggccggggaaggagtgaggcccagccccatgcagctggagctgcggatggtgcagagcaaaagggacatcgaggacccagagatcgtcgtccaggccacggtgctgtgagggccccgccgcttgcccgtgacacgcagcgcgttggtgtctccgtgtttgtccctgtgaaaacatgtaacgtctgccttagagccatgaccgaaacttgatatttttttctttcatgagtgtccggcatctgctggtcttcattgtgaaacgtgccagtcgtgctttgtgaaaaataacaaagtggtcacagaaaaattgtgatc

SEQ ID NO: 371646 - DNA, 2222 bp, Homo sapiens
tcaatcctccagcctcagcctcccaaagtgctgcgatcacaggtgtgagccactgtgcctggccatatgactcagtttttaataatgactctacgtaaaactgacctgcactattgcatctggcaatcgcgtggcccaatccatcttcaaagccagcaacagtcgttgagtccttcttttaacttccaatctctgatttttccttctgcccttcagcctgagaaaactctgcttttgaagggctcatgtcattcaattaaactctcctggataagaagatcctcatgggagagagatctcatcacactgacaggtttcacccacactcagggggttgcccgagggtgagcggggtccctgaaggtcattcttagaattctgccacggaagagccccataggccatgatagggacagggtttactgtaaaacaaggtgattcacatacacagaccagtaatgctgttcctaaaggggcccaagctgatcccatcagtcagcagggctgctcacagggcacttggcctgtctttgttgaaggcgattcctgtgaaggcagtggaggagctccgggtgggaggtgagtgttgtggagagcccagcagcccgctgggctgaaccttggaccaagaaccagtctgtccttggctcccttgtgggtggggaaagatgaggtgtatcagcagggtccagtccagaaacagaaaccagagcaacaatcgtagaggccgttgttcagccaggtattgagaaaatagagaaggcaaaaagggaacactggtgtcgtggaggagacccctgccagcattggctccacacagctgaccctgggataagagaattgttggactctttagaacctggagctgggaaggcaggtgtctgccagctggcgggtgctgggagtctgtgggggcatgcgatgaggaattctgctggtggagggaaagccacaaagtggattccgctgctgctatgggaagggacggtcactaccgctgcccctgtggggagaagagccccgggggaagaagagcactgctgacagaagcccattctcttcgcaggcttcagtttcacattcttggtacctcctggtggtgcctgggagggagccactgctgtacagagatgccaattccagaggcatggtccggcacagagcgctggcttccagctgaaggacatgtgtaacagcaggagatacctttctctggggtcccaggctcccgtcctggaccttggcaccccgccccccgtgcattgtcgtcttctgagtctggctttgtctggcacatgaagttggatgggtagactctggaagcgtccagaccagcttgcgatgctgatgaataagctgattttgatggggttttgggatttgagattgacgcggtgaactctgtccagttttcaaaccacacaggctatgcccactggaagggccaagtgctgaattcagatgagctccaggagttgtacgaaggcctgaggctgaacaacatgaataaatatgactacgtgctcacagttgatcgtggtgagtctcctgttttctgagggtgacctggattctccccctaaaggttatacgagggacaagtcgttcctggccatggtggtggacattgtgcaggagctgaagcagcagaaccccaggctggtgtacgtgtgtgatccagtcttgggtgacaagtgggacggcgaaggctcgatgagcaagaccccatctcaaaaaacaaaagaaaaatctagaaaccacttaacccatgagctgtgtagtaacagcagcagctgcagcccacagacctggacgtcggatcaagtggatggagaacaaatccactgtgaccagtccagaagcctagaatttagaggcggaaggaacccaaaggtgatcctgcctgtgggtttttaactcagccattcagcgcccaggcgatttcagtatctgccttctttgtcgttgtgtctagggtgtctgtttgcttgctgtatattcactgagcacagcgggcttctccactggcacagggcacgcctgggcctgtgccctccctgccccgctgggtcagtggttgaagtcaggatatctgtcactgggcatctaactgggtggggcgggctggtgtgctcagcgtctgtctgtccactttctcccatgcttgttctctggaaggttccctgtcctgcgcccagcctgcaggaccccagcttgcagct

SEQ ID NO: 371647 - DNA, 1432 bp, Homo sapiens
  misc_feature (4)..(4): n is a, c, g, or t
  misc_feature (6)..(8): n is a, c, g, or t
ggcncnnngcggaactcgcgggttcggagccgcccgctgaggtcagaaggaggcgtctgcgctgatcgggtccgccgcgcgccagagccagagtcgcagccgaggggagccggggccggagcccgagcccgagccgagccggagcccgagcgagcggcggagaccgtgcccccgcctcggccccgcgccgccgcggccaggcccggcatggaggaggagtgccgggtgctctccatacagagccacgtcatccgcggctacgtgggcaaccgggcggccacgttcccgctgcaggttttgggatttgagattgacgcggtgaactctgtccagttttcaaaccacacaggctatgcccactggaagggccaagtgctgaattcagatgagctccaggagttgtacgtgtgtgatccagtcttgggtgacaagtgggacggcgaaggctcgatgtacgtcccggaggacctccttcccgtctacaaagaaaaagtggtgccgcttgcagacattatcacgcccaaccagtttgaggccgagttactgagtggccggaagatccacagccaggaggaagccttgcggccaggccacggtgctgtgagggccccgccgcttgcccgtgacacgcagcgcgttggtgtctccgtgtttgtccctgtgaaaacatgtaacgtctgccttagagccatgaccgaaacttgatatttttttctttcaaaaaaaaaaaaaaaaaaaaaaaaaaaaaaaaaaacaaaaaaaaaaaaaaaaaaaaaaaaaaaaaaaaaaaaaaaaaaaaaacaacaaaaagagagggggcgcgcgcgcgccgccccaatatccccccgcggggggcgccacacccacttatccccccaccccaagttgtttgtatagaacaaggagggggcccccccatacgcggcagcctctattatatatatacaacgccagcgcggcccggcgcgcggctactaataacaaacaccgacggtcacggtggagagaaccaaccaacccaccgcacacagcgcgactcaactctccccgtgcgaggcaggaaggcacccccccccattaccccgcgcgcgaggcgcggcagcacacacaccaacgcagcggagacgaacaaccccccccctcccgccgccgcacctccatccaacacagcccacccccaccgacgcgcgcccactccatcataacaccccacctgccaccgccagcgcgcccaccgcggacggcgggacgaccacaccaccaccccgccgcacacaattacacccccgcgcgccgcgcgcgccgaccagacgacagatcgtcgccgcacgcccccccccgacgggcccacccgcccatccccgtaccacaacctatctcttctctccaccggcgcgggcgcaccccccaccccccaaacacgcaccacccc

SEQ ID NO: 371648 - DNA, 457 bp, Homo sapiens
ctctggggtcccaggctcccgtcctggaccttggcaccccgccccccgtgcattgtcgtcttctgagtctggctttgtctggcacatgaagttggatgggtagactctggaagcgtccagaccagcttgcgatgctgatgaataagctgattttgatggggtgtgtgaaacggagatgccagcccaggggctcagcttgctcgtgctctcatttaaaagcagaaaatagcgacttcattctcggatacgtttgccagccccaaaggattaattatctacacacccagaagcagtggagcagaatattttggcaggattttcaggatttgtgtcatcgttgcttaatatctgtttcttcacagtcggttagaattttaaaggatttgaaatactgcaagctatctgtgtatagaggctgtggattcgggctggtacatttgcaaagtgcccattttat

SEQ ID NO: 371649 - DNA, 514 bp, Homo sapiens
aaaatgttttgtgggccatttcagtgctcctcactccctcatagccaccagcctcatcagaaagatgccccgagagcacaggaagccccccaagcatgtgccccacccaccttctctaacaaggtaataaatatttccacagccagtcccaagctgctcccaagcctgtaggtcaccaggttggaagggcaggccacttctacctgttacatgccctgacacctcttatggatcaatcaggacattttttctcaatgacatgacctcagatgctgttactcagccacaaattgacccatgaggtgaaacctatttttatccatgtattaagtagtttttaataatccatactacacttgcttacagaaaggctaaagacacaaacaaaactattcaaacaccagcatcaaagaggcaaggatgggagttaaagggggaattctgttgtgcggaaggcccacaggaaggttgaggggggcctgtagcaaatgagcaaaaacttcactctcagctt

SEQ ID NO: 371650 - DNA, 1135 bp, Homo sapiens
aggttgtgctagtgcaatttttcttagtttcatggatttgatccctgatcagaccaattacctgtgatccaaggctagcaatcttaaatacaaacaatactaagattggattatcgaaagcctttgcactacagtaagaacaatgcaaatagaactttctgattatagtccatcaatggcattgaccaccgaaaagtacttgcatgtcatctttgtattgccaaacaataccttgattttgaagtctgtaatctttgataatagttaaacacttttcttggcatgaattgagacattcagttcattcactatacatgtgttttggtccagtctttgctttacttatgtctctgtggcgtcaggcaaatcaggtaacttcttacttacacccttgattgtaaaacagattatacttgtcttgcctactgacctagtgtggcaatttggggaaacatcttggtgctgaattaggttctaggctcaggcactaaacatgatttaaaacttgatcatttgaactagaagccaagtacaaccttcaagacaactctgtataaggtcataggtataatcactattttacagatgaggaaacgagattgactacaaatttggttttgaaaataaatcacatgctcaacagaagcagttttggccaggcacggtggctcgcacctataatcccagcaccttgggaaaccaaagcaggaacatcgcttgagcccaggagttggaggccagtttgggcaacatagtgagaccccatctctacaaagaaaaaaaaaaaagaatcagcaagacgtggtggacacctcctgtagtctcagctacttgggaggctgaggcagaaggattgcttgagcctgggagttcaaggtgcagtgagctgtgatcatgccagtgcactttggcctaggcaacggagcaagaccttgtctcaaaaaattattaaataataaatcaggcacaactttaacaacacttattgagtccttagcatgtgctatactgtgtgccaaattatttgcttttaatgtgctgtgaaatatctgtgcagtagatactaaaattctgttttattaacctaaaccacaaagaggttaattaacttgcccaaagccacacagctcgtaag

SEQ ID NO: 371651 - DNA, 766 bp, Homo sapiens
  misc_feature (41)..(41): n is a, c, g, or t
gacccacgcgtccgcggacgcgtgggtcgacccacgcgtcngaataatagctcttcaagtctgcaataaaaaatggcctccaacaaaactacattgcaaaaaatgggaaaaaaacagaatggaaagagtaaaaaagttgaagaggcagagcctgaagaatttgtcgtggaaaaagtactagatcgacgtgtagtgaatgggaaagtggaatatttcctgaagtggaagggatttacagatgctgacaatacttgggaacctgaagaaaatttagattgtccagaattgattgaagcgtttcttaactctcagaaagctggcaaagaaaaagatggtacaaaaagaaaatctttatctgacagtgaatctgatgacagcaaatcaaagaagaaaagagatgctgctgacaaaccaagaggatttgccagaggtcttgatcctgaaagaataattggtgccacagacagcagtggagaattgatgtttctcatgaaatggaaagattcagatgaggcagacttggtgctggcgaaagaggcaaatatgaagtgtcctcaaattgtaattgctttttatgaagagagactaacttggcattcttgtccagaagatgaagctcaatacttaattaatggtaaacatggcttttaataaaactatgttttttattaaaaatggtgcttaaatttgagttacaatggggaaaatacttactctaaatgattcagtttatattttttgtttaaaagtgcgtgaactctttttt

SEQ ID NO: 371652 - DNA, 579 bp, Homo sapiens
atcattctcacccaggcagtgtgactccagagcttgtgacattgatgtaaaactctgacaggaataaaggatttattgatatcattggttctcaaactttttttggtctcagggcctctttatactctaaaaaaattattgaggatccccagagagcttttgtttatatgggttataattatcaatactaacagtagaaattaaaacaaatttctaaaatgacttttctaaaaaagctgagaagagtagcattttacatttttacagatattcaacatgtgtcttaaggcaattttacttaaacacatttgattgctgtggcggatcattttggtggaggtatatgaagacaatccaaagtcacaaatagatgaaaaaagggggccttacacaaccccctcccaaaaaggactctggaatccccagtgaatccgtagaccacattttgagagccactggtttatattaagtactttctagcgcagggggtccaatcttttggcagccctgggccacattaggagaattgtcgagggctacacataaaatagacttaataccaaccatagctgatgagct

SEQ ID NO: 371653 - DNA, 1318 bp, Homo sapiens
atcattctcacccaggcagtgtgactccagagcttgtgacattgatgtaaaactctgacaggaataaaggatttattgatatcattggttctcaaactttttttggtctcagggcctctttatactctaaaaaaattattgaggatccccagagagcttttgtttatatgggttataattatcaatactaacagtagaaattaaaacaaatttctaaaatgacttttctaaaaaagctgagaagagtagcattttacatttttacagatattcaacatgtgtcttaaggcaattttacttaaacacatttgattgctgtggcggatcattttggtggaggtatatgaagacaatccaaagtcacaaatagatgaaaaaagggggccttacacaaccccctcccaaaaaggactctggaatccccagtgaatccgtagaccacattttgagagccactggtttatattaagtactttctagcgcagggggtccaatcttttggcagccctgggccacattaggagaattgtcgagggctacacataaaatagacttaataccaaccatagctgatgagctaaaaaaaaaaaaaaaaaaaatcgcaagaaagtttcaatgttttaagaaagtttacaaatttgtgttgggcctccaaagccatcctgggccacaggttacacaagtttgttctaacatttactatcatttagaatgattacagatagttggtatgagttttaacatttttaatatttcttaccgtttgtgttttgtttatgcttttaaaatgtgtcagtaattcagactaattcctggaagtcatttgaaatatattaactttcaagactttattattaccagaaataaagaggttagtttttctgtatgcccacacaactctgactttggtgtcattgaacgcagtaattttcttgactttttattctgaatgttttcagaaattttaagtattctacgttgagtatcaaactcaggtttttctgcttgtaaagttaatggaaatcagatgtttttaattaccaaatatgggttcttgctctagtcatttccatctcactattggaatgtttttatttaaaatacgccatgaaaacaatttaatactctgagtttgctgtatgaaaaaatgtcttctaaacagggctgacaaaccaagaggatttgccagaggtcttgatcctgaaagaataattggtgccacagacagcagtggagaattgatgtttctcatgaaatggtgagtatgcagagattgttacatttgaaagtaagagtagctttttttttttaatttgtg

SEQ ID NO: 371654 - DNA, 2844 bp, Homo sapiens
tgagaactgccgctgctcgagaaacaactctgcgaggagcacctccgcacgggacccggcgctgctgctactgccgctagagccgctgccgccgcttttctagaaccttcccccccactaacgcgtcttccgctacgtcaggccgtcgcgtaaacgccctatccgccgccaatggcgggaaggctctacgccccaccttacgccaaatgcgtactcctcccacccttgcggccagagacagtacccgacgttacttccgtaaatgcgctcaatgaattgcggaaggctagagtcctgctagttactacctcttggaatagggtcccgccccctgccttggcgcaaggcaggtgagaaacggtcgcgcagtttgaaattaacgccgacgggaggggcttaatccgcagcctggagatccagccccctcaacccgggaggtggtccctgcagttacgccaatgataacccccgccagaaaaatcttagtagccttccctttttgttttccgtgccccaactcggcggattgactcggccccttccggaaacacccgaatcaacttctagtcaaattattgttcacgccgcaatgacccacccctggcccgcgtctgtggaactgacccctggtgtacaggagagttcgctgctgaaagtggtcccaaaggggtactagtttttaagctcccaactccccctcccccagcgtctggaggattccacaccctcgcaccgcaggggcgaggaagtgggcggagtccggttttggcgccagccgctgaggctgccaagcagaaaagccaccgctgaggagactccggtcactgtcctcgccccgcctcccccttccctccccttggggaccaccgggcgccacgccgcgaacggtaagtgccgcggtcgtcggcgcctccgccctccccctagggccccaattcccagcgggcgcgcgcccgctgccccgcccttcgtggccgcccggcgtgggcggtgccacccctccccccggcggccccgcgcgcagctcccggctccctcccccttcggatgtggcttgagctgtaggcgcggagggccggagacgctgcagacccgcgacccggagcagctcggaggcggtgaataatagctcttcaagtctgcaataaaaaatggcctccaacaaaactacattgcaaaaaatgggaaaaaaacagaatggaaagagtaaaaaagttgaagaggcagagcctgaagaatttgtcgtggaaaaagtactagatcgacgtgtagtgaatgggaaagtggaatatttcctgaagtggaagggatttacagatgctgacaatacttgggaacctgaagaaaatttagattgtccagaattgattgaagcgtttcttaactctcagaaagctggcaaagaaaaagatggtacaaaaagaaaatctttatctgacagtgaatctgatgacagcaaatcaaagaagaaaagagatgctgctgacaaaccaagaggatttgccagaggtcttgatcctgaaagaataattggtgccacagacagcagtggagaattgatgtttctcatgaaatggaaagattcagatgaggcagacttggtgctggcgaaagaggcaaatatgaagtgtcctcaaattgtaattgctttttatgaagagagactaacttggcattcttgtccagaagatgaagctcaataattgttcacattgttcttttatatatatttatatatatatataaaaattgggtcttagattttgatttactagtgtgacaaaataactacatcctaatgaaaatcaagtttgatatgtttgttttgaaagtagcgttggaagagttgttgggggttttttgcatccatagcactggttactttgaacaaataaataaaagctttctgtagttgcttcctttatcagaaaagaacatttgataccatggtatatcatttcctcttcattaaagaacagcttttctaaatgttgggggaaatgtccatagtcattactcagtcaaaacttgtgttctcatgagcctaaggaccattctagatttattacgtgttttgtgtgtgtgtgtgtgtgtgtgtgtgtgtgtatccataaaatgcatatgtaaatttttttttgtttttaagcattcacccaaacaaaaaaatcacaggtaaacccatgtttctgagatgccattattccaagcaaaataagagataatcccttcaagttaaattgaaaattttcctgaaaccatacatttcaagtgaaataagtaattctagataggacaatttaaattggataattttaaagtgtctataattgcagtggtttatttgcaaaattcctaaaaggaaaaattttatcactgccatcacagcaggtttcctcatccagatgaggaaactagacaaatgctagtgtgttttaactagctaaacaaaactaagttaaatgaacatttaaaagtttccctagcgggccattccttagcaaaatgttggaatccctgttgctacattgactaaaaggtcatgatgaatggaatatgtaagacttggctcatagaaacctaatcagatggttagaggtgttggcagtttaggacctgctgtcataaatgtgtgaacaaccttttgtaacctaacctattgacctgcatgttttttctttaccccaattcattacatggaggctcaatcttgagtttgctttactggttcagcaaaagccaggaagaacaactttgtagtaatcaaaatgttatccaactgtatattgtttactttattgtaaatactggtgaacagtggttaataaatagttttatattccttta

SEQ ID NO: 371655 - DNA, 2141 bp, Homo sapiens
  misc_feature (56)..(58): n is a, c, g, or t
gggatttcctccgggctacaggcgacagagctgagccaagcgtttactgggcacgnnngctcagattccaaatgaaaatgtttgagagcgctgactctacagccacaagatctggccaggatctctgggctgaaatttgttcctgtctgccaaatcctgaacaagaagatggtgccaacaatgcattctcagactcctttgtggattcttgccctgaaggtgaaggccagagggaggtggctgactttgctgtccagccagctgtaaagccttgggctcccttgcaggattcagaagtgtatttagcatctctagccattttattttaaaaatatttcctgaggatgtggcttgagctgtaggcgcggagggccggagacgctgcagacccgcgacccggagcagctcggaggcggtgaataatagctcttcaagtctgcaataaaaaatggcctccaacaaaactacattgcaaaaaatgggaaaaaaacagaatggaaagagtaaaaaagttgaagaggcagagcctgaagaatttgtcgtggaaaaagtactagatcgacgtgtagtgaatgggaaagtggaatatttcctgaagtggaagggatttacagatgctgacaatacttgggaacctgaagaaaatttagattgtccagaattgattgaagcgtttcttaactctcagaaagctggcaaagaaaaagatggtacaaaaagaaaatctttatctgacagtgaatctgatgacagcaaatcaaagaagaaaagagatgctgctgacaaaccaagaggatttgccagaggtcttgatcctgaaagaataattggtgccacagacagcagtggagaattgatgtttctcatgaaatggaaagattcagatgaggcagacttggtgctggcgaaagaggcaaatatgaagtgtcctcaaattgtaattgctttttatgaagagagactaacttggcattcttgtccagaagatgaagctcaataattgttcacattgttcttttatatatatttatatatatatataaaaattgggtcttagattttgatttactagtgtgacaaaataactacatcctaatgaaaatcaagtttgatatgtttgttttgaaagtagcgttggaagagttgttgggggttttttgcatccatagcactggttactttgaacaaataaataaaagctttctgtagttgcttcctttatcagaaaagaacatttgataccatggtatatcatttcctcttcattaaagaacagcttttctaaatgttgggggaaatgtccatagtcattactcagtcaaaacttgtgttctcatgagcctaaggaccattctagatttattacgtgttttgtgtgtgtgtgtgtgtgtgtgtgtgtgtgtatccataaaatgcatatgtaaatttttttttgtttttaagcattcacccaaacaaaaaaatcacaggtaaacccatgtttctgagatgccattattccaagcaaaataagagataatcccttcaagttaaattgaaaattttcctgaaaccatacatttcaagtgaaataagtaattctagataggacaatttaaattggataattttaaagtgtctataattgcagtggtttatttgcaaaattcctaaaaggaaaaattttatcactgccatcacagcaggtttcctcatccagatgaggaaactagacaaatgctagtgtgttttaactagctaaacaaaactaagttaaatgaacatttaaaagtttccctagcgggccattccttagcaaaatgttggaatccctgttgctacattgactaaaaggtcatgatgaatggaatatgtaagacttggctcatagaaacctaatcagatggttagaggtgttggcagtttaggacctgctgtcataaatgtgtgaacaaccttttgtaacctaacctattgacctgcatgttttttctttaccccaattcattacatggaggctcaatcttgagtttgctttactggttcagcaaaagccaggaagaacaactttgtagtaatcaaaatgttatccaactgtatattgtttactttattgtaaatactggtgaacagtggttaataaatagttttatattccttta

SEQ ID NO: 371656 - DNA, 1843 bp, Homo sapiens
  misc_feature (41)..(41): n is a, c, g, or t
gacccacgcgtccgcggacgcgtgggtcgacccacgcgtcngaaggatgtggcttgagctgtaggcgcggagggccggagacgctgcagacccgcgacccggagcagctcggaggcggtgaataatagctcttcaagtctgcaataaaaaatggcctccaacaaaactacattgcaaaaaatgggaaaaaaacagaatggaaagagtaaaaaagttgaagaggcagagcctgaagaatttgtcgtggaaaaagtactagatcgacgtgtagtgaatgggaaagtggaatatttcctgaagtggaagggatttacagatgctgacaatacttgggaacctgaagaaaatttagattgtccagaattgattgaagcgtttcttaactctcagaaagctggcaaagaaaaagatggtacaaaaagaaaatctttatctgacagtgaatctgatgacagcaaatcaaagaagaaaagagatgctgctgacaaaccaagaggatttgccagaggtcttgatcctgaaagaataattggtgccacagacagcagtggagaattgatgtttctcatgaaatggaaagattcagatgaggcagacttggtgctggcgaaagaggcaaatatgaagtgtcctcaaattgtaattgctttttatgaagagagactaacttggcattcttgtccagaagatgaagctcaataattgttcacattgttcttttatatatatttatatatatatataaaaattgggtcttagattttgatttactagtgtgacaaaataactacatcctaatgaaaatcaagtttgatatgtttgttttgaaagtagcgttggaagagttgttgggggttttttgcatccatagcactggttactttgaacaaataaataaaagctttctgtagttgcttcctttatcagaaaagaacatttgataccatggtatatcatttcctcttcattaaagaacagcttttctaaatgttgggggaaatgtccatagtcattactcagtcaaaacttgtgttctcatgagcctaaggaccattctagatttattacgtgttttgtgtgtgtgtgtgtgtgtgtgtgtgtgtgtatccataaaatgcatatgtaaatttttttttgtttttaagcattcacccaaacaaaaaaatcacaggtaaacccatgtttctgagatgccattattccaagcaaaataagagataatcccttcaagttaaattgaaaattttcctgaaaccatacatttcaagtgaaataagtaattctagataggacaatttaaattggataattttaaagtgtctataattgcagtggtttatttgcaaaattcctaaaaggaaaaattttatcactgccatcacagcaggtttcctcatccagatgaggaaactagacaaatgctagtgtgttttaactagctaaacaaaactaagttaaatgaacatttaaaagtttccctagcgggccattccttagcaaaatgttggaatccctgttgctacattgactaaaaggtcatgatgaatggaatatgtaagacttggctcatagaaacctaatcagatggttagaggtgttggcagtttaggacctgctgtcataaatgtgtgaacaaccttttgtaacctaacctattgacctgcatgttttttctttaccccaattcattacatggaggctcaatcttgagtttgctttactggttcagcaaaagccaggaagaacaactttgtagtaatcaaaatgttatccaactgtatattgtttactttattgtaaatactggtgaacagtggttaataaatagttttatattccttta

SEQ ID NO: 371657 - DNA, 2816 bp, Homo sapiens
tgagaactgccgctgctcgagaaacaactctgcgaggagcacctccgcacgggacccggcgctgctgctactgccgctagagccgctgccgccgcttttctagaaccttcccccccactaacgcgtcttccgctacgtcaggccgtcgcgtaaacgccctatccgccgccaatggcgggaaggctctacgccccaccttacgccaaatgcgtactcctcccacccttgcggccagagacagtacccgacgttacttccgtaaatgcgctcaatgaattgcggaaggctagagtcctgctagttactacctcttggaatagggtcccgccccctgccttggcgcaaggcaggtgagaaacggtcgcgcagtttgaaattaacgccgacgggaggggcttaatccgcagcctggagatccagccccctcaacccgggaggtggtccctgcagttacgccaatgataacccccgccagaaaaatcttagtagccttccctttttgttttccgtgccccaactcggcggattgactcggccccttccggaaacacccgaatcaacttctagtcaaattattgttcacgccgcaatgacccacccctggcccgcgtctgtggaactgacccctggtgtacaggagagttcgctgctgaaagtggtcccaaaggggtactagtttttaagctcccaactccccctcccccagcgtctggaggattccacaccctcgcaccgcaggggcgaggaagtgggcggagtccggttttggcgccagccgctgaggctgccaagcagaaaagccaccgctgaggagactccggtcactgtcctcgccccgcctcccccttccctccccttggggaccaccgggcgccacgccgcgaacggtaagtgccgcggtcgtcggcgcctccgccctccccctagggccccaattcccagcgggcgcgcgcccgctgccccgcccttcgtggccgcccggcgtgggcggtgccacccctccccccggcggccccgcgcgcagctcccggctccctcccccttcggatgtggcttgagctgtaggcgcggagggccggagacgctgcagacccgcgacccggagcagctcggaggcggtgaataatagctcttcaagtctgcaataaaaaatggcctccaacaaaactacattgcaaaaaatgggaaaaaaacagaatggaaagagtaaaaaagttgaagaggcagagcctgaagaatttgtcgtggaaaaagtactagatcgacgtgtagtgaatgggaaagtggaatatttcctgaagtggaagggatttacagatgctgacaatacttgggaacctgaagaaaatttagattgtccagaattgattgaagcgtttcttaactctcagaaagctggcaaagaaaaagatggtacaaaaagaaaatctttatctgacagtgaatctgatgacagcaaatcaaagaagaaaagagatgctgctgacaaaccaagaggatttgccagaggtcttgatcctgaaagaataattggtgccacagacagcagtggagaattgatgtttctcatgaaatggaaagattcagatgaggcagacttggtgctggcgaaagaggcaaatatgaagtgtcctcaaattgtaattgctttttatgaagagagactaacttggcattcttgtccagaagatgaagctcaataattgttcacattgttcttttatatatatttatatatatatataaaaattgggtcttagattttgatttactagtgtgacaaaataactacatcctaatgaaaatcaagtttgatatgtttgttttgaaagtagcgttggaagagttgttgggggttttttgcatccatagcactggttactttgaacaaataaataaaagctttctgtagttgcttcctttatcagaaaagaacatttgataccatggtatatcatttcctcttcattaaagaacagcttttctaaatgttgggggaaatgtccatagtcattactcagtcaaaacttgtgttctcatgagcctaaggaccattctagatttattacgtgttttgtgtgtgtgtgtgtgtgtgtgtgtgtgtgtatccataaaatgcatatgtaaatttttttttgtttttaagcattcacccaaacaaaaaaatcacaggtaaacccatgtttctgagatgccattattccaagcaaaataagagataatcccttcaagttaaattgaaaattttcctgaaaccatacattacaatttaaattggataattttaaagtgtctataattgcagtggtttatttgcaaaattcctaaaaggaaaaattttatcactgccatcacagcaggtttcctcatccagatgaggaaactagacaaatgctagtgtgttttaactagctaaacaaaactaagttaaatgaacatttaaaagtttccctagcgggccattccttagcaaaatgttggaatccctgttgctacattgactaaaaggtcatgatgaatggaatatgtaagacttggctcatagaaacctaatcagatggttagaggtgttggcagtttaggacctgctgtcataaatgtgtgaacaaccttttgtaacctaacctattgacctgcatgttttttctttaccccaattcattacatggaggctcaatcttgagtttgctttactggttcagcaaaagccaggaagaacaactttgtagtaatcaaaatgttatccaactgtatattgtttactttattgtaaatactggtgaacagtggttaataaatagttttatattccttta

SEQ ID NO: 371658 - DNA, 3225 bp, Homo sapiens
  misc_feature (2863)..(2863): n is a, c, g, or t
  misc_feature (2870)..(2870): n is a, c, g, or t
  misc_feature (2879)..(2879): n is a, c, g, or t
  misc_feature (2881)..(2881): n is a, c, g, or t
  misc_feature (2893)..(2894): n is a, c, g, or t
  misc_feature (2896)..(2896): n is a, c, g, or t
  misc_feature (2899)..(2899): n is a, c, g, or t
  misc_feature (2922)..(2922): n is a, c, g, or t
tgagaactgccgctgctcgagaaacaactctgcgaggagcacctccgcacgggacccggcgctgctgctactgccgctagagccgctgccgccgcttttctagaaccttcccccccactaacgcgtcttccgctacgtcaggccgtcgcgtaaacgccctatccgccgccaatggcgggaaggctctacgccccaccttacgccaaatgcgtactcctcccacccttgcggccagagacagtacccgacgttacttccgtaaatgcgctcaatgaattgcggaaggctagagtcctgctagttactacctcttggaatagggtcccgccccctgccttggcgcaaggcaggtgagaaacggtcgcgcagtttgaaattaacgccgacgggaggggcttaatccgcagcctggagatccagccccctcaacccgggaggtggtccctgcagttacgccaatgataacccccgccagaaaaatcttagtagccttccctttttgttttccgtgccccaactcggcggattgactcggccccttccggaaacacccgaatcaacttctagtcaaattattgttcacgccgcaatgacccacccctggcccgcgtctgtggaactgacccctggtgtacaggagagttcgctgctgaaagtggtcccaaaggggtactagtttttaagctcccaactccccctcccccagcgtctggaggattccacaccctcgcaccgcaggggcgaggaagtgggcggagtccggttttggcgccagccgctgaggctgccaagcagaaaagccaccgctgaggagactccggtcactgtcctcgccccgcctcccccttccctccccttggggaccaccgggcgccacgccgcgaacggtaagtgccgcggtcgtcggcgcctccgccctccccctagggccccaattcccagcgggcgcgcgcccgctgccccgcccttcgtggccgcccggcgtgggcggtgccacccctccccccggcggccccgcgcgcagctcccggctccctcccccttcggatgtggcttgagctgtaggcgcggagggccggagacgctgcagacccgcgacccggagcagctcggaggcggtgaataatagctcttcaagtctgcaataaaaaatggcctccaacaaaactacattgcaaaaaatgggaaaaaaacagaatggaaagagtaaaaaagttgaagaggcagagcctgaagaatttgtcgtggaaaaagtactagatcgacgtgtagtgaatgggaaagtggaatatttcctgaagtggaagggatttacagatgctgacaatacttgggaacctgaagaaaatttagattgtccagaattgattgaagcgtttcttaactctcagaaagctggcaaagaaaaagatggtacaaaaagaaaatctttatctgacagtgaatctgatgacagcaaatcaaagaagaaaagagatgctgctgacaaaccaagaggatttgccagaggtcttgatcctgaaagaataattggtgccacagacagcagtggagaattgatgtttctcatgaaatggaaagattcagatgaggcagacttggtgctggcgaaagaggcaaatatgaagtgtcctcaaattgtaattgctttttatgaagagagactaacttggcattcttgtccagaagatgaagctcaataattgttcacattgttcttttatatatatttatatatatatataaaaattgggtcttagattttgatttactagtgtgacaaaataactacatcctaatgaaaatcaagtttgatatgtttgttttgaaagtagcgttggaagagttgttgggggttttttgcatccatagcactggttactttgaacaaataaataaaagctttctgtagttgcttcctttatcagaaaagaacatttgataccatggtatatcatttcctcttcattaaagaacagcttttctaaatgttgggggaaatgtccatagtcattactcagtcaaaacttgtgttctcatgagcctaaggaccattctagatttattacgtgttttgtgtgtgtgtgtgtgtgtgtgtgtgtgtgtatccataaaatgcatatgtaaatttttttttgtttttaagcattcacccaaacaaaaaaatcacaggtaaacccatgtttctgagatgccattattccaagcaaaataagagataatcccttcaagttaaattgaaaattttcctgaaaccatacatttcaagtgaaataagtaattctagataggacaatttaaattggataattttaaagtgtctataattgcagtggtttatttgcaaaattcctaaaaggaaaaattttatcactgccatcacagcaggtttcctcatccagatgaggaaactagacaaatgctagtgtgttttaactagctaaacaaaactaagttaaatgaacatttaaaagtttccctagcgggccattccttagcaaaatgttggaatccctgttgctacattgactaaaaggtcatgatgaatggaatatgtaagacttggctcatagaaacctaatcagatggttagaggtgttggcagtttaggacctgctgtcataaatgtgtgaacaaccttttgtaacctaacctattgacctgcatgttttttctttaccccaattcattacatggaggctcaatcttgagtttgctttactggttcagcaaaagccaggaagaacaactttgtagtaatcaaaatgttatccaactgtatattgtttactttattgtaaatactggtgaacagtggttaataaatagttttatattcctttaaaaaaaaaaaaaaaaaaanaaaaaanaaaaaaaananaaaaaaaaaaannanaanaaaaaaaaaaaaagaaaaaaaanaaagatgaaaaacaaaatgaaagaggggggcgagccgcacacgaaaattcccgggaggaggccgtccgaataaggaaaaataccagcgagtagtacacgtggaagaggaggcggccaccacacaagagaggagcgcgaagcgaataaaaagagacgacagcggcaggagcgagcaagccatcacgatcccgcagcgcagagagcaggaacaaacgagcgacagggagggaaccatgtgggagggcgaggacacactcagaaagcggggggggacaaaaaagtggggacaaagcacccccgcgc

SEQ ID NO: 371659 - DNA, 2422 bp, Homo sapiens
cgccgcgggggtaggcgcgtgcggtgtggcgcagtgcccttgagcccccgtgccgcggcctttgtttctccccgcggatgcgctgaccacgaggcccgcgctcccgggtgggggcgggcacccgcgcttaggcacgtctggacgccgggcttcagcggcgggggtcgggagcgggtgtttgcaagaggtgattcttttttcaaagtgtcacgaaacggggttgaagcatcttaagttttttccttttgttatttaattaccgattggaaagagggagggtttctgagcagaaaccaagttgggattgcagaacagagaagattcacagtgctttaccgttgtgagttgtttgggtaatcgtgcctggttttaaaccgaaaggattgtcctttaaaaatggaacatggactttattataaatgggacttagattggaaaagacattggtcccctattttaagccatgtgaagctgttttaggtaccaggatccccagtaaagtctttctagactcacatggttaggacacgtacttaagtacatcataagcaatgtaggtaggagcgcagatctactctggatttgtattcacgtttgaaatgtgcgctctctacttgggggttggaatccaaacagaatttgtatttagttaccttttttgtgtcatgcaaacttaccttaactgtcatgcatttttctagtaatagctcttcaagtctgcaataaaaaatggcctccaacaaaactacattgcaaaaaatgggaaaaaaacagaatggaaagagtaaaaaagttgaagaggcagagcctgaagaatttgtcgtggaaaaagtactagatcgacgtgtagtgaatgggaaagtggaatatttcctgaagtggaagggatttacagatgctgacaatacttgggaacctgaagaaaatttagattgtccagaattgattgaagcgtttcttaactctcagaaagctggcaaagaaaaagatggtacaaaaagaaaatctttatctgacagtgaatctgatgacagcaaatcaaagaagaaaagagatgctgctgacaaaccaagaggatttgccagaggtcttgatcctgaaagaataattggtgccacagacagcagtggagaattgatgtttctcatgaaatggaaagattcagatgaggcagacttggtgctggcgaaagaggcaaatatgaagtgtcctcaaattgtaattgctttttatgaagagagactaacttggcattcttgtccagaagatgaagctcaataattgttcacattgttcttttatatatatttatatatatatataaaaattgggtcttagattttgatttactagtgtgacaaaataactacatcctaatgaaaatcaagtttgatatgtttgttttgaaagtagcgttggaagagttgttgggggttttttgcatccatagcactggttactttgaacaaataaataaaagctttctgtagttgcttcctttatcagaaaagaacatttgataccatggtatatcatttcctcttcattaaagaacagcttttctaaatgttgggggaaatgtccatagtcattactcagtcaaaacttgtgttctcatgagcctaaggaccattctagatttattacgtgttttgtgtgtgtgtgtgtgtgtgtgtgtgtgtgtatccataaaatgcatatgtaaatttttttttgtttttaagcattcacccaaacaaaaaaatcacaggtaaacccatgtttctgagatgccattattccaagcaaaataagagataatcccttcaagttaaattgaaaattttcctgaaaccatacatttcaagtgaaataagtaattctagataggacaatttaaattggataattttaaagtgtctataattgcagtggtttatttgcaaaattcctaaaaggaaaaattttatcactgccatcacagcaggtttcctcatccagatgaggaaactagacaaatgctagtgtgttttaactagctaaacaaaactaagttaaatgaacatttaaaagtttccctagcgggccattccttagcaaaatgttggaatccctgttgctacattgactaaaaggtcatgatgaatggaatatgtaagacttggctcatagaaacctaatcagatggttagaggtgttggcagtttaggacctgctgtcataaatgtgtgaacaaccttttgtaacctaacctattgacctgcatgttttttctttaccccaattcattacatggaggctcaatcttgagtttgctttactggttcagcaaaagccaggaagaacaactttgtagtaatcaaaatgttatccaactgtatattgtttactttattgtaaatactggtgaacagtggttaataaatagttttatattccttta

SEQ ID NO: 371660 - DNA, 2608 bp, Homo sapiens
tgagaactgccgctgctcgagaaacaactctgcgaggagcacctccgcacgggacccggcgctgctgctactgccgctagagccgctgccgccgcttttctagaaccttcccccccactaacgcgtcttccgctacgtcaggccgtcgcgtaaacgccctatccgccgccaatggcgggaaggctctacgccccaccttacgccaaatgcgtactcctcccacccttgcggccagagacagtacccgacgttacttccgtaaatgcgctcaatgaattgcggaaggctagagtcctgctagttactacctcttggaatagggtcccgccccctgccttggcgcaaggcaggtgagaaacggtcgcgcagtttgaaattaacgccgacgggaggggcttaatccgcagcctggagatccagccccctcaacccgggaggtggtccctgcagttacgccaatgataacccccgccagaaaaatcttagtagccttccctttttgttttccgtgccccaactcggcggattgactcggccccttccggaaacacccgaatcaacttctagtcaaattattgttcacgccgcaatgacccacccctggcccgcgtctgtggaactgacccctggtgtacaggagagttcgctgctgaaagtggtcccaaaggggtactagtttttaagctcccaactccccctcccccagcgtctggaggattccacaccctcgcaccgcaggggcgaggaagtgggcggagtccggttttggcgccagccgctgaggctgccaagcagaaaagccaccgctgaggagactccggtcactgtcctcgccccgcctcccccttccctccccttggggaccaccgggcgccacgccgcgaacgtaatagctcttcaagtctgcaataaaaaatggcctccaacaaaactacattgcaaaaaatgggaaaaaaacagaatggaaagagtaaaaaagttgaagaggcagagcctgaagaatttgtcgtggaaaaagtactagatcgacgtgtagtgaatgggaaagtggaatatttcctgaagtggaagggatttacagatgctgacaatacttgggaacctgaagaaaatttagattgtccagaattgattgaagcgtttcttaactctcagaaagctggcaaagaaaaagatggtacaaaaagaaaatctttatctgacagtgaatctgatgacagcaaatcaaagaagaaaagagatgctgctgacaaaccaagaggatttgccagaggtcttgatcctgaaagaataattggtgccacagacagcagtggagaattgatgtttctcatgaaatggaaagattcagatgaggcagacttggtgctggcgaaagaggcaaatatgaagtgtcctcaaattgtaattgctttttatgaagagagactaacttggcattcttgtccagaagatgaagctcaataattgttcacattgttcttttatatatatttatatatatatataaaaattgggtcttagattttgatttactagtgtgacaaaataactacatcctaatgaaaatcaagtttgatatgtttgttttgaaagtagcgttggaagagttgttgggggttttttgcatccatagcactggttactttgaacaaataaataaaagctttctgtagttgcttcctttatcagaaaagaacatttgataccatggtatatcatttcctcttcattaaagaacagcttttctaaatgttgggggaaatgtccatagtcattactcagtcaaaacttgtgttctcatgagcctaaggaccattctagatttattacgtgttttgtgtgtgtgtgtgtgtgtgtgtgtgtgtgtatccataaaatgcatatgtaaatttttttttgtttttaagcattcacccaaacaaaaaaatcacaggtaaacccatgtttctgagatgccattattccaagcaaaataagagataatcccttcaagttaaattgaaaattttcctgaaaccatacatttcaagtgaaataagtaattctagataggacaatttaaattggataattttaaagtgtctataattgcagtggtttatttgcaaaattcctaaaaggaaaaattttatcactgccatcacagcaggtttcctcatccagatgaggaaactagacaaatgctagtgtgttttaactagctaaacaaaactaagttaaatgaacatttaaaagtttccctagcgggccattccttagcaaaatgttggaatccctgttgctacattgactaaaaggtcatgatgaatggaatatgtaagacttggctcatagaaacctaatcagatggttagaggtgttggcagtttaggacctgctgtcataaatgtgtgaacaaccttttgtaacctaacctattgacctgcatgttttttctttaccccaattcattacatggaggctcaatcttgagtttgctttactggttcagcaaaagccaggaagaacaactttgtagtaatcaaaatgttatccaactgtatattgtttactttattgtaaatactggtgaacagtggttaataaatagttttatattccttta

SEQ ID NO: 371661 - DNA, 3031 bp, Homo sapiens
tgagaactgccgctgctcgagaaacaactctgcgaggagcacctccgcacgggacccggcgctgctgctactgccgctagagccgctgccgccgcttttctagaaccttcccccccactaacgcgtcttccgctacgtcaggccgtcgcgtaaacgccctatccgccgccaatggcgggaaggctctacgccccaccttacgccaaatgcgtactcctcccacccttgcggccagagacagtacccgacgttacttccgtaaatgcgctcaatgaattgcggaaggctagagtcctgctagttactacctcttggaatagggtcccgccccctgccttggcgcaaggcaggtgagaaacggtcgcgcagtttgaaattaacgccgacgggaggggcttaatccgcagcctggagatccagccccctcaacccgggaggtggtccctgcagttacgccaatgataacccccgccagaaaaatcttagtagccttccctttttgttttccgtgccccaactcggcggattgactcggccccttccggaaacacccgaatcaacttctagtcaaattattgttcacgccgcaatgacccacccctggcccgcgtctgtggaactgacccctggtgtacaggagagttcgctgctgaaagtggtcccaaaggggtactagtttttaagctcccaactccccctcccccagcgtctggaggattccacaccctcgcaccgcaggggcgaggaagtgggcggagtccggttttggcgccagccgctgaggctgccaagcagaaaagccaccgctgaggagactccggtcactgtcctcgccccgcctcccccttccctccccttggggaccaccgggcgccacgccgcgaacggtaagtgccgcggtcgtcggcgcctccgccctccccctagggccccaattcccagcgggcgcgcgcccgctgccccgcccttcgtggccgcccggcgtgggcggtgccacccctccccccggcggccccgcgcgcagctcccggctccctcccccttcggatgtggcttgagctgtaggcgcggagggccggagacgctgcagacccgcgacccggagcagctcggaggcggtgaagtcggtggctttccttctctctagctctcgctcgctggtggtgcttcagatgccacacgcgtcccgggggcccggttctccgctcccctcccctccccttctcgccggaccccgcgccgggagctgcgggaaggagtggagggtcgggcggtggcctcgcggctggcctggcgcgcggccagcgccgtaatagctcttcaagtctgcaataaaaaatggcctccaacaaaactacattgcaaaaaatgggaaaaaaacagaatggaaagagtaaaaaagttgaagaggcagagcctgaagaatttgtcgtggaaaaagtactagatcgacgtgtagtgaatgggaaagtggaatatttcctgaagtggaagggatttacagatgctgacaatacttgggaacctgaagaaaatttagattgtccagaattgattgaagcgtttcttaactctcagaaagctggcaaagaaaaagatggtacaaaaagaaaatctttatctgacagtgaatctgatgacagcaaatcaaagaagaaaagagatgctgctgacaaaccaagaggatttgccagaggtcttgatcctgaaagaataattggtgccacagacagcagtggagaattgatgtttctcatgaaatggaaagattcagatgaggcagacttggtgctggcgaaagaggcaaatatgaagtgtcctcaaattgtaattgctttttatgaagagagactaacttggcattcttgtccagaagatgaagctcaataattgttcacattgttcttttatatatatttatatatatatataaaaattgggtcttagattttgatttactagtgtgacaaaataactacatcctaatgaaaatcaagtttgatatgtttgttttgaaagtagcgttggaagagttgttgggggttttttgcatccatagcactggttactttgaacaaataaataaaagctttctgtagttgcttcctttatcagaaaagaacatttgataccatggtatatcatttcctcttcattaaagaacagcttttctaaatgttgggggaaatgtccatagtcattactcagtcaaaacttgtgttctcatgagcctaaggaccattctagatttattacgtgttttgtgtgtgtgtgtgtgtgtgtgtgtgtgtgtatccataaaatgcatatgtaaatttttttttgtttttaagcattcacccaaacaaaaaaatcacaggtaaacccatgtttctgagatgccattattccaagcaaaataagagataatcccttcaagttaaattgaaaattttcctgaaaccatacatttcaagtgaaataagtaattctagataggacaatttaaattggataattttaaagtgtctataattgcagtggtttatttgcaaaattcctaaaaggaaaaattttatcactgccatcacagcaggtttcctcatccagatgaggaaactagacaaatgctagtgtgttttaactagctaaacaaaactaagttaaatgaacatttaaaagtttccctagcgggccattccttagcaaaatgttggaatccctgttgctacattgactaaaaggtcatgatgaatggaatatgtaagacttggctcatagaaacctaatcagatggttagaggtgttggcagtttaggacctgctgtcataaatgtgtgaacaaccttttgtaacctaacctattgacctgcatgttttttctttaccccaattcattacatggaggctcaatcttgagtttgctttactggttcagcaaaagccaggaagaacaactttgtagtaatcaaaatgttatccaactgtatattgtttactttattgtaaatactggtgaacagtggttaataaatagttttatattccttta

SEQ ID NO: 371662 - DNA, 2368 bp, Homo sapiens
cgccgcgggggtaggcgcgtgcggtgtggcgcagtgcccttgagcccccgtgccgcggcctttgtttctccccgcggatgcgctgaccacgaggcccgcgctcccgggtgggggcgggcacccgcgcttaggcacgtctggacgccgggcttcagcggcgggggtcgggagcgggtgtttgcaagaggtgattcttttttcaaagtgtcacgaaacggggttgaagcatcttaagttttttccttttgttatttaattaccgattggaaagagggagggtttctgagcagaaaccaagttgggattgcagaacagagaagattcacagtgctttaccgttgtgagttgtttgggtaatcgtgcctggttttaaaccgaaaggattgtcctttaaaaatggaacatggactttattataaatgggacttagattggtccccagtaaagtctttctagactcacatggttaggacacgtacttaagtacatcataagcaatgtaggtaggagcgcagatctactctggatttgtattcacgtttgaaatgtgcgctctctacttgggggttggaatccaaacagaatttgtatttagttaccttttttgtgtcatgcaaacttaccttaactgtcatgcatttttctagtaatagctcttcaagtctgcaataaaaaatggcctccaacaaaactacattgcaaaaaatgggaaaaaaacagaatggaaagagtaaaaaagttgaagaggcagagcctgaagaatttgtcgtggaaaaagtactagatcgacgtgtagtgaatgggaaagtggaatatttcctgaagtggaagggatttacagatgctgacaatacttgggaacctgaagaaaatttagattgtccagaattgattgaagcgtttcttaactctcagaaagctggcaaagaaaaagatggtacaaaaagaaaatctttatctgacagtgaatctgatgacagcaaatcaaagaagaaaagagatgctgctgacaaaccaagaggatttgccagaggtcttgatcctgaaagaataattggtgccacagacagcagtggagaattgatgtttctcatgaaatggaaagattcagatgaggcagacttggtgctggcgaaagaggcaaatatgaagtgtcctcaaattgtaattgctttttatgaagagagactaacttggcattcttgtccagaagatgaagctcaataattgttcacattgttcttttatatatatttatatatatatataaaaattgggtcttagattttgatttactagtgtgacaaaataactacatcctaatgaaaatcaagtttgatatgtttgttttgaaagtagcgttggaagagttgttgggggttttttgcatccatagcactggttactttgaacaaataaataaaagctttctgtagttgcttcctttatcagaaaagaacatttgataccatggtatatcatttcctcttcattaaagaacagcttttctaaatgttgggggaaatgtccatagtcattactcagtcaaaacttgtgttctcatgagcctaaggaccattctagatttattacgtgttttgtgtgtgtgtgtgtgtgtgtgtgtgtgtgtatccataaaatgcatatgtaaatttttttttgtttttaagcattcacccaaacaaaaaaatcacaggtaaacccatgtttctgagatgccattattccaagcaaaataagagataatcccttcaagttaaattgaaaattttcctgaaaccatacatttcaagtgaaataagtaattctagataggacaatttaaattggataattttaaagtgtctataattgcagtggtttatttgcaaaattcctaaaaggaaaaattttatcactgccatcacagcaggtttcctcatccagatgaggaaactagacaaatgctagtgtgttttaactagctaaacaaaactaagttaaatgaacatttaaaagtttccctagcgggccattccttagcaaaatgttggaatccctgttgctacattgactaaaaggtcatgatgaatggaatatgtaagacttggctcatagaaacctaatcagatggttagaggtgttggcagtttaggacctgctgtcataaatgtgtgaacaaccttttgtaacctaacctattgacctgcatgttttttctttaccccaattcattacatggaggctcaatcttgagtttgctttactggttcagcaaaagccaggaagaacaactttgtagtaatcaaaatgttatccaactgtatattgtttactttattgtaaatactggtgaacagtggttaataaatagttttatattccttta

SEQ ID NO: 371663 - DNA, 1765 bp, Homo sapiens
  misc_feature (41)..(41): n is a, c, g, or t
gacccacgcgtccgcggacgcgtgggtcgacccacgcgtcngaataatagctcttcaagtctgcaataaaaaatggcctccaacaaaactacattgcaaaaaatgggaaaaaaacagaatggaaagagtaaaaaagttgaagaggcagagcctgaagaatttgtcgtggaaaaagtactagatcgacgtgtagtgaatgggaaagtggaatatttcctgaagtggaagggatttacagatgctgacaatacttgggaacctgaagaaaatttagattgtccagaattgattgaagcgtttcttaactctcagaaagctggcaaagaaaaagatggtacaaaaagaaaatctttatctgacagtgaatctgatgacagcaaatcaaagaagaaaagagatgctgctgacaaaccaagaggatttgccagaggtcttgatcctgaaagaataattggtgccacagacagcagtggagaattgatgtttctcatgaaatggaaagattcagatgaggcagacttggtgctggcgaaagaggcaaatatgaagtgtcctcaaattgtaattgctttttatgaagagagactaacttggcattcttgtccagaagatgaagctcaataattgttcacattgttcttttatatatatttatatatatatataaaaattgggtcttagattttgatttactagtgtgacaaaataactacatcctaatgaaaatcaagtttgatatgtttgttttgaaagtagcgttggaagagttgttgggggttttttgcatccatagcactggttactttgaacaaataaataaaagctttctgtagttgcttcctttatcagaaaagaacatttgataccatggtatatcatttcctcttcattaaagaacagcttttctaaatgttgggggaaatgtccatagtcattactcagtcaaaacttgtgttctcatgagcctaaggaccattctagatttattacgtgttttgtgtgtgtgtgtgtgtgtgtgtgtgtgtgtatccataaaatgcatatgtaaatttttttttgtttttaagcattcacccaaacaaaaaaatcacaggtaaacccatgtttctgagatgccattattccaagcaaaataagagataatcccttcaagttaaattgaaaattttcctgaaaccatacatttcaagtgaaataagtaattctagataggacaatttaaattggataattttaaagtgtctataattgcagtggtttatttgcaaaattcctaaaaggaaaaattttatcactgccatcacagcaggtttcctcatccagatgaggaaactagacaaatgctagtgtgttttaactagctaaacaaaactaagttaaatgaacatttaaaagtttccctagcgggccattccttagcaaaatgttggaatccctgttgctacattgactaaaaggtcatgatgaatggaatatgtaagacttggctcatagaaacctaatcagatggttagaggtgttggcagtttaggacctgctgtcataaatgtgtgaacaaccttttgtaacctaacctattgacctgcatgttttttctttaccccaattcattacatggaggctcaatcttgagtttgctttactggttcagcaaaagccaggaagaacaactttgtagtaatcaaaatgttatccaactgtatattgtttactttattgtaaatactggtgaacagtggttaataaatagttttatattccttta

SEQ ID NO: 371664 - DNA, 2792 bp, Homo sapiens
tgagaactgccgctgctcgagaaacaactctgcgaggagcacctccgcacgggacccggcgctgctgctactgccgctagagccgctgccgccgcttttctagaaccttcccccccactaacgcgtcttccgctacgtcaggccgtcgcgtaaacgccctatccgccgccaatggcgggaaggctctacgccccaccttacgccaaatgcgtactcctcccacccttgcggccagagacagtacccgacgttacttccgtaaatgcgctcaatgaattgcggaaggctagagtcctgctagttactacctcttggaatagggtcccgccccctgccttggcgcaaggcaggtgagaaacggtcgcgcagtttgaaattaacgccgacgggaggggcttaatccgcagcctggagatccagccccctcaacccgggaggtggtccctgcagttacgccaatgataacccccgccagaaaaatcttagtagccttccctttttgttttccgtgccccaactcggcggattgactcggccccttccggaaacacccgaatcaacttctagtcaaattattgttcacgccgcaatgacccacccctggcccgcgtctgtggaactgacccctggtgtacaggagagttcgctgctgaaagtggtcccaaaggggtactagtttttaagctcccaactccccctcccccagcgtctggaggattccacaccctcgcaccgcaggggcgaggaagtgggcggagtccggttttggcgccagccgctgaggctgccaagcagaaaagccaccgctgaggagactccggtcactgtcctcgccccgcctcccccttccctccccttggggaccaccgggcgccacgccgcgaacggtaagtgccgcggtcgtcggcgcctccgccctccccctagggccccaattcccagcgggcgcgcgcccgctgccccgcccttcgtggccgcccggcgtgggcggtgccacccctccccccggcggccccgcgcgcagctcccggctccctcccccttcggatgtggcttgagctgtaggcgcggagggccggagacgctgcagacccgcgacccggagcagctcggaggcggtgaacaaaaaatgggaaaaaaacagaatggaaagagtaaaaaagttgaagaggcagagcctgaagaatttgtcgtggaaaaagtactagatcgacgtgtagtgaatgggaaagtggaatatttcctgaagtggaagggatttacagatgctgacaatacttgggaacctgaagaaaatttagattgtccagaattgattgaagcgtttcttaactctcagaaagctggcaaagaaaaagatggtacaaaaagaaaatctttatctgacagtgaatctgatgacagcaaatcaaagaagaaaagagatgctgctgacaaaccaagaggatttgccagaggtcttgatcctgaaagaataattggtgccacagacagcagtggagaattgatgtttctcatgaaatggaaagattcagatgaggcagacttggtgctggcgaaagaggcaaatatgaagtgtcctcaaattgtaattgctttttatgaagagagactaacttggcattcttgtccagaagatgaagctcaataattgttcacattgttcttttatatatatttatatatatatataaaaattgggtcttagattttgatttactagtgtgacaaaataactacatcctaatgaaaatcaagtttgatatgtttgttttgaaagtagcgttggaagagttgttgggggttttttgcatccatagcactggttactttgaacaaataaataaaagctttctgtagttgcttcctttatcagaaaagaacatttgataccatggtatatcatttcctcttcattaaagaacagcttttctaaatgttgggggaaatgtccatagtcattactcagtcaaaacttgtgttctcatgagcctaaggaccattctagatttattacgtgttttgtgtgtgtgtgtgtgtgtgtgtgtgtgtgtatccataaaatgcatatgtaaatttttttttgtttttaagcattcacccaaacaaaaaaatcacaggtaaacccatgtttctgagatgccattattccaagcaaaataagagataatcccttcaagttaaattgaaaattttcctgaaaccatacatttcaagtgaaataagtaattctagataggacaatttaaattggataattttaaagtgtctataattgcagtggtttatttgcaaaattcctaaaaggaaaaattttatcactgccatcacagcaggtttcctcatccagatgaggaaactagacaaatgctagtgtgttttaactagctaaacaaaactaagttaaatgaacatttaaaagtttccctagcgggccattccttagcaaaatgttggaatccctgttgctacattgactaaaaggtcatgatgaatggaatatgtaagacttggctcatagaaacctaatcagatggttagaggtgttggcagtttaggacctgctgtcataaatgtgtgaacaaccttttgtaacctaacctattgacctgcatgttttttctttaccccaattcattacatggaggctcaatcttgagtttgctttactggttcagcaaaagccaggaagaacaactttgtagtaatcaaaatgttatccaactgtatattgtttactttattgtaaatactggtgaacagtggttaataaatagttttatattccttta

SEQ ID NO: 371665 - DNA, 1805 bp, Homo sapiens
gactgaagaccagcaatccggaggagcgcggaggcggtgagtaatagactcttgagagtttagcaagtaatacataatggagcatccgatggataaatcgtactaatgtggcaatagagaaatgggcaacacaaatcaagaaatggacaagagtaaaaaagtaggcagatgagggcagcagactgcaaggaatagtgagtccgtgagagtcaagtactggatcgatgagtagtggaattggagaagaaatggaatattccctgtaaggggaagggatgttgctgacaatacttgggaacctgaagaaaatttagattgtccagaattgattgaagcgtttcttaactctcagaaagctggcaaagaaaaagatggtacaaaaagaaaatctttatctgacagtgaatctgatgacagcaaatcaaagaagaaaagagatgctgctgacaaaccaagaggatttgccagaggtcttgatcctgaaagaataattggtgccacagacagcagtggagaattgatgtttctcatgaaatggaaagattcagatgaggcagacttggtgctggcgaaagaggcaaatatgaagtgtcctcaaattgtaattgctttttatgaagagagactaacttggcattcttgtccagaagatgaagctcaataattgttcacattgttcttttatatatatttatatatatatataaaaattgggtcttagattttgatttactagtgtgacaaaataactacatcctaatgaaaatcaagtttgatatgtttgttttgaaagtagcgttggaagagttgttgggggttttttgcatccatagcactggttactttgaacaaataaataaaagctttctgtagttgcttcctttatcagaaaagaacatttgataccatggtatatcatttcctcttcattaaagaacagcttttctaaatgttgggggaaatgtccatagtcattactcagtcaaaacttgtgttctcatgagcctaaggaccattctagatttattacgtgttttgtgtgtgtgtgtgtgtgtgtgtgtgtgtgtatccataaaatgcatatgtaaatttttttttgtttttaagcattcacccaaacaaaaaaatcacaggtaaacccatgtttctgagatgccattattccaagcaaaataagagataatcccttcaagttaaattgaaaattttcctgaaaccatacatttcaagtgaaataagtaattctagataggacaatttaaattggataattttaaagtgtctataattgcagtggtttatttgcaaaattcctaaaaggaaaaattttatcactgccatcacagcaggtttcctcatccagatgaggaaactagacaaatgctagtgtgttttaactagctaaacaaaactaagttaaatgaacatttaaaagtttccctagcgggccattccttagcaaaatgttggaatccctgttgctacattgactaaaaggtcatgatgaatggaatatgtaagacttggctcatagaaacctaatcagatggttagaggtgttggcagtttaggacctgctgtcataaatgtgtgaacaaccttttgtaacctaacctattgacctgcatgttttttctttaccccaattcattacatggaggctcaatcttgagtttgctttactggttcagcaaaagccaggaagaacaactttgtagtaatcaaaatgttatccaactgtatattgtttactttattgtaaatactggtgaacagtggttaataaatagttttatattccttta

SEQ ID NO: 371666 - DNA, 2771 bp, Homo sapiens
tgagaactgccgctgctcgagaaacaactctgcgaggagcacctccgcacgggacccggcgctgctgctactgccgctagagccgctgccgccgcttttctagaaccttcccccccactaacgcgtcttccgctacgtcaggccgtcgcgtaaacgccctatccgccgccaatggcgggaaggctctacgccccaccttacgccaaatgcgtactcctcccacccttgcggccagagacagtacccgacgttacttccgtaaatgcgctcaatgaattgcggaaggctagagtcctgctagttactacctcttggaatagggtcccgccccctgccttggcgcaaggcaggtgagaaacggtcgcgcagtttgaaattaacgccgacgggaggggcttaatccgcagcctggagatccagccccctcaacccgggaggtggtccctgcagttacgccaatgataacccccgccagaaaaatcttagtagccttccctttttgttttccgtgccccaactcggcggattgactcggccccttccggaaacacccgaatcaacttctagtcaaattattgttcacgccgcaatgacccacccctggcccgcgtctgtggaactgacccctggtgtacaggagagttcgctgctgaaagtggtcccaaaggggtactagtttttaagctcccaactccccctcccccagcgtctggaggattccacaccctcgcaccgcaggggcgaggaagtgggcggagtccggttttggcgccagccgctgaggctgccaagcagaaaagccaccgctgaggagactccggtcactgtcctcgccccgcctcccccttccctccccttggggaccaccgggcgccacgccgcgaacggtaagtgccgcggtcgtcggcgcctccgccctccccctagggccccaattcccagcgggcgcgcgcccgctgccccgcccttcgtggccgcccggcgtgggcggtgccacccctccccccggcggccccgcgcgcagctcccggctccctcccccttcggatgtggcttgagctgtaggcgcggagggccggagacgctgcagacccgcgacccggagcagctcggaggcggtgaataatagctcttcaagtctgcaataaaaaatggcctccaacaaaactacattgcaaaaaatgggaaaaaaacagaatggaaagagtaaaaaagttgaagaggcagagcctgaagaatttgtcgtggaaaaagtactagatcgacgtgtagtgaatgggaaagtggaatatttcctgaagtggaagggatttacagaaaagctggcaaagaaaaagatggtacaaaaagaaaatctttatctgacagtgaatctgatgacagcaaatcaaagaagaaaagagatgctgctgacaaaccaagaggatttgccagaggtcttgatcctgaaagaataattggtgccacagacagcagtggagaattgatgtttctcatgaaatggaaagattcagatgaggcagacttggtgctggcgaaagaggcaaatatgaagtgtcctcaaattgtaattgctttttatgaagagagactaacttggcattcttgtccagaagatgaagctcaataattgttcacattgttcttttatatatatttatatatatatataaaaattgggtcttagattttgatttactagtgtgacaaaataactacatcctaatgaaaatcaagtttgatatgtttgttttgaaagtagcgttggaagagttgttgggggttttttgcatccatagcactggttactttgaacaaataaataaaagctttctgtagttgcttcctttatcagaaaagaacatttgataccatggtatatcatttcctcttcattaaagaacagcttttctaaatgttgggggaaatgtccatagtcattactcagtcaaaacttgtgttctcatgagcctaaggaccattctagatttattacgtgttttgtgtgtgtgtgtgtgtgtgtgtgtgtgtgtatccataaaatgcatatgtaaatttttttttgtttttaagcattcacccaaacaaaaaaatcacaggtaaacccatgtttctgagatgccattattccaagcaaaataagagataatcccttcaagttaaattgaaaattttcctgaaaccatacatttcaagtgaaataagtaattctagataggacaatttaaattggataattttaaagtgtctataattgcagtggtttatttgcaaaattcctaaaaggaaaaattttatcactgccatcacagcaggtttcctcatccagatgaggaaactagacaaatgctagtgtgttttaactagctaaacaaaactaagttaaatgaacatttaaaagtttccctagcgggccattccttagcaaaatgttggaatccctgttgctacattgactaaaaggtcatgatgaatggaatatgtaagacttggctcatagaaacctaatcagatggttagaggtgttggcagtttaggacctgctgtcataaatgtgtgaacaaccttttgtaacctaacctattgacctgcatgttttttctttaccccaattcattacatggaggctcaatcttgagtttgctttactggttcagcaaaagccaggaagaacaactttgtagtaatcaaaatgttatccaactgtatattgtttactttattgtaaatactggtgaacagtggttaataaatagttttatattccttta

SEQ ID NO: 371667 - DNA, 2172 bp, Homo sapiens
tgagaactgccgctgctcgagaaacaactctgcgaggagcacctccgcacgggacccggcgctgctgctactgccgctagagccgctgccgccgcttttctagaaccttcccccccactaacgcgtcttccgctacgtcaggccgtcgcgtaaacgccctatccgccgccaatggcgggaaggctctacgccccaccttacgccaaatgcgtactcctcccacccttgcggccagagacagtacccgacgttacttccgtaaatgcgctcaatgaattgcggaaggctagagtcctgctagttactacctcttggaatagggtcccgccccctgccttggcgcaaggcaggtgagaaacggtcgcgcagtttgaaattaacgccgacgggaggggcttaatccgcagcctggagatccagccccctcaacccgggaggtggtccctgcagttacgccaatgataacccccgccagaaaaatcttagtagccttccctttttgttttccgtgccccaactcggcggattgactcggccccttccggaaacacccgaatcaacttctagtcaaattattgttcacgccgcaatgacccacccctggcccgcgtctgtggaactgacccctggtgtacaggagagttcgctgctgaaagtggtcccaaaggggtactagtttttaagctcccaactccccctcccccagcgtctggaggattccacaccctcgcaccgcaggggcgaggaagtgggcggagtccggttttggcgccagccgctgaggctgccaagcagaaaagccaccgctgaggagactccggtcactgtcctcgccccgcctcccccttccctccccttggggaccaccgggcgccacgccgcgaacggtaagtgccgcggtcgtcggcgcctccgccctccccctagggccccaattcccagcgggcgcgcgcccgctgccccgcccttcgtggccgcccggcgtgggcggtgccacccctccccccggcggccccgcgcgcagctcccggctccctcccccttcggatgtggcttgagctgtaggcgcggagggccggagacgctgcagacccgcgacccggagcagctcggaggcggtgaataatagctcttcaagtctgcaataaaaaatggcctccaacaaaactacattgcaaaaaatgggaaaaaaacagaatggaaagagtaaaaaagttgaagaggcagagcctgaagaatttgtcgtggaaaaagtactagatcgacgtgtagtgaatgggaaagtggaatatttcctgaagtggaagggatttacagatgctgacaatacttgggaacctgaagaaaatttagattgtccagaattgattgaagcgtttcttaactctcagaaagctggcaaagaaaaagatggtacaaaaagaaaatctttatctgacagtgaatctgatgacagcaaatcaaagaagaaaagagatgctgctgacaaaccaagaggatttgccagaggtcttgatcctgaaagaataattggtgccacagacagcagtggagaattgatgtttctcatgaaatggaaagattcagatgaggcagacttggtgctggcgaaagaggcaaatatgaagtgtcctcaaattgtaattgctttttatgaagagagactaacttggcattcttgtccagaagatgaagctcaataattgttcacattgttcttttatatatatttatatatatatataaaaattgggtcttagattttgatttactagtgtgacaaaataactacatcctaatgaaaatcaagtttgatatgtttgttttgaaagtagcgttggaagagttgttgggggttttttgcatccatagcactggttactttgaacaaataaataaaagctttctgtagttgcttcctttatcagaaaagaacatttgataccatggtatatcatttcctcttcattaaagaacagcttttctaaatgttgggggaaatgtccatagtcattactcagtcaaaacttgtgttctcatgagcctaaggaccattctagatttattacgtgttttgtgtgtgtgtgtgtgtgcctcctagacccgtgacctgagatgtgtgacttatagatcataaaatggaagtgtctgccaaacacagcaaacacacac

SEQ ID NO: 371668 - DNA, 2526 bp, Homo sapiens
atcattctcacccaggcagtgtgactccagagcttgtgacattgatgtaaaactctgacaggaataaaggatttattgatatcattggttctcaaactttttttggtctcagggcctctttatactctaaaaaaattattgaggatccccagagagcttttgtttatatgggttataattatcaatactaacagtagaaattaaaacaaatttctaaaatgacttttctaaaaaagctgagaagagtagcattttacatttttacagatattcaacatgtgtcttaaggcaattttacttaaacacatttgattgctgtggcggatcattttggtggaggtatatgaagacaatccaaagtcacaaatagatgaaaaaagggggccttacacaaccccctcccaaaaaggactctggaatccccagtgaatccgtagaccacattttgagagccactggtttatattaagtactttctagcgcagggggtccaatcttttggcagccctgggccacattaggagaattgtcgagggctacacataaaatagacttaataccaaccatagctgatgagctaaaaaaaaaaaaaaaaaaaatcgcaagaaagtttcaatgttttaagaaagtttacaaatttgtgttgggcctccaaagccatcctgggccacaggttacacaagtttgttctaacatttactatcatttagaatgattacagatagttggtatgagttttaacatttttaatatttcttaccgtttgtgttttgtttatgcttttaaaatgtgtcagtaattcagactaattcctggaagtcatttgaaatatattaactttcaagactttattattaccagaaataaagaggttagtttttctgtatgcccacacaactctgactttggtgtcattgaacgcagtaattttcttgactttttattctgaatgttttcagaaattttaagtattctacgttgagtatcaaactcaggtttttctgcttgtaaagttaatggaaatcagatgtttttaattaccaaatatgggttcttgctctagtcatttccatctcactattggaatgtttttatttaaaatacgccatgaaaacaatttaatactctgagtttgctgtatgaaaaaatgtcttctaaacagggctgacaaaccaagaggatttgccagaggtcttgatcctgaaagaataattggtgccacagacagcagtggagaattgatgtttctcatgaaatggaaagattcagatgaggcagacttggtgctggcgaaagaggcaaatatgaagtgtcctcaaattgtaattgctttttatgaagagagactaacttggcattcttgtccagaagatgaagctcaataattgttcacattgttcttttatatatatttatatatatatataaaaattgggtcttagattttgatttactagtgtgacaaaataactacatcctaatgaaaatcaagtttgatatgtttgttttgaaagtagcgttggaagagttgttgggggttttttgcatccatagcactggttactttgaacaaataaataaaagctttctgtagttgcttcctttatcagaaaagaacatttgataccatggtatatcatttcctcttcattaaagaacagcttttctaaatgttgggggaaatgtccatagtcattactcagtcaaaacttgtgttctcatgagcctaaggaccattctagatttattacgtgttttgtgtgtgtgtgtgtgtgtgtgtgtgtgtgtatccataaaatgcatatgtaaatttttttttgtttttaagcattcacccaaacaaaaaaatcacaggtaaacccatgtttctgagatgccattattccaagcaaaataagagataatcccttcaagttaaattgaaaattttcctgaaaccatacatttcaagtgaaataagtaattctagataggacaatttaaattggataattttaaagtgtctataattgcagtggtttatttgcaaaattcctaaaaggaaaaattttatcactgccatcacagcaggtttcctcatccagatgaggaaactagacaaatgctagtgtgttttaactagctaaacaaaactaagttaaatgaacatttaaaagtttccctagcgggccattccttagcaaaatgttggaatccctgttgctacattgactaaaaggtcatgatgaatggaatatgtaagacttggctcatagaaacctaatcagatggttagaggtgttggcagtttaggacctgctgtcataaatgtgtgaacaaccttttgtaacctaacctattgacctgcatgttttttctttaccccaattcattacatggaggctcaatcttgagtttgctttactggttcagcaaaagccaggaagaacaactttgtagtaatcaaaatgttatccaactgtatattgtttactttattgtaaatactggtgaacagtggttaataaatagttttatattccttta

SEQ ID NO: 371669 - DNA, 1822 bp, Homo sapiens
ggatgctgccacgcgtcacgcgaggtcatcgcagatgggtgaataatagctttcaaggatctcgcgatatcaagtaggtgctcaactaatagtgacattgcaaggaggaagtgggtgccggtaacggaatggactgagtaaaattcggttgtggaggtcagcaggcctgaacaatgggtcggtggaacgaagtactagatcgagtctattgcattgggacacgtggaatatgtcctgaagtggaagcggataacagatgctgacaataattgggaactgtgaagaagatgtagattgtccacaattgaattgagatgcgtttcttaatgtctcagtaaagctgtggtaatatgaagatagatgtgttgctaagaagatatagtctttagtctgagcagttgaatctgattgagcagccatgtcaatataatgaacatgagatgctggttgaccaatatggctgacaaaccaagaggatttgccagaggtcttgatcctgaaagaataattggtgccacagacagcagtggagaattgatgtttctcatgaaatggaaagattcagatgaggcagacttggtgctggcgaaagaggcaaatatgaagtgtcctcaaattgtaattgctttttatgaagagagactaacttggcattcttgtccagaagatgaagctcaataattgttcacattgttcttttatatatatttatatatatatataaaaattgggtcttagattttgatttactagtgtgacaaaataactacatcctaatgaaaatcaagtttgatatgtttgttttgaaagtagcgttggaagagttgttgggggttttttgcatccatagcactggttactttgaacaaataaataaaagctttctgtagttgcttcctttatcagaaaagaacatttgataccatggtatatcatttcctcttcattaaagaacagcttttctaaatgttgggggaaatgtccatagtcattactcagtcaaaacttgtgttctcatgagcctaaggaccattctagatttattacgtgttttgtgtgtgtgtgtgtgtgtgtgtgtgtgtgtatccataaaatgcatatgtaaatttttttttgtttttaagcattcacccaaacaaaaaaatcacaggtaaacccatgtttctgagatgccattattccaagcaaaataagagataatcccttcaagttaaattgaaaattttcctgaaaccatacatttcaagtgaaataagtaattctagataggacaatttaaattggataattttaaagtgtctataattgcagtggtttatttgcaaaattcctaaaaggaaaaattttatcactgccatcacagcaggtttcctcatccagatgaggaaactagacaaatgctagtgtgttttaactagctaaacaaaactaagttaaatgaacatttaaaagtttccctagcgggccattccttagcaaaatgttggaatccctgttgctacattgactaaaaggtcatgatgaatggaatatgtaagacttggctcatagaaacctaatcagatggttagaggtgttggcagtttaggacctgctgtcataaatgtgtgaacaaccttttgtaacctaacctattgacctgcatgttttttctttaccccaattcattacatggaggctcaatcttgagtttgctttactggttcagcaaaagccaggaagaacaactttgtagtaatcaaaatgttatccaactgtatattgtttactttattgtaaatactggtgaacagtggttaataaatagttttatattccttta

SEQ ID NO: 371670 - DNA, 1987 bp, Homo sapiens
tgagaactgccgctgctcgagaaacaactctgcgaggagcacctccgcacgggacccggcgctgctgctactgccgctagagccgctgccgccgcttttctagaaccttcccccccactaacgcgtcttccgctacgtcaggccgtcgcgtaaacgccctatccgccgccaatggcgggaaggctctacgccccaccttacgccaaatgcgtactcctcccacccttgcggccagagacagtacccgacgttacttccgtaaatgcgctcaatgaattgcggaaggctagagtcctgctagttactacctcttggaatagggtcccgccccctgccttggcgcaaggcaggtgagaaacggtcgcgcagtttgaaattaacgccgacgggaggggcttaatccgcagcctggagatccagccccctcaacccgggaggtggtccctgcagttacgccaatgataacccccgccagaaaaatcttagtagccttccctttttgttttccgtgccccaactcggcggattgactcggccccttccggaaacacccgaatcaacttctagtcaaattattgttcacgccgcaatgacccacccctggcccgcgtctgtggaactgacccctggtgtacaggagagttcgctgctgaaagtggtcccaaaggggtactagtttttaagctcccaactccccctcccccagcgtctggaggattccacaccctcgcaccgcaggggcgaggaagtgggcggagtccggttttggcgccagccgctgaggctgccaagcagaaaagccaccgctgaggagactccggtcactgtcctcgccccgcctcccccttccctccccttggggaccaccgggcgccacgccgcgaacggtaagtgccgcggtcgtcggcgcctccgccctccccctagggccccaattcccagcgggcgcgcgcccgctgccccgcccttcgtggccgcccggcgtgggcggtgccacccctccccccggcggccccgcgcgcagctcccggctccctcccccttcggatgtggcttgagctgtaggcgcggagggccggagacgctgcagacccgcgacccggagcagctcggaggcggtgaataatagctcttcaagtctgcaataaaaaatggcctccaacaaaactacattgcaaaaaatgggaaaaaaacagaatggaaagagtaaaaaagttgaagaggcagagcctgaagaatttgtcgtggaaaaagtactagatcgacgtgtagtgaatgggaaagtggaatatttcctgaagtggaagggatttacagatgctgacaatacttgggaacctgaagaaaatttagattgtccagaattgattgaagcgtttcttaactctcagaaagctggcaaagaaaaagatggtacaaaaagaaaatctttatctgacagtgaatctgatgacagcaaatcaaagaagaaaagagatgctgctgacaaaccaagaggatttgccagaggtcttgatcctgaaagaataattggtgccacagacagcagtggagaattgatgtttctcatgaaatggaaagattcagatgaggcagacttggtgctggcgaaagaggcaaatatgaagtgtcctcaaattgtaattgctttttatgaagagagactaacttggcattcttgtccagaagatgaagctcaataattgttcacattgttcttttatatatatttatatatatatataaaaattgggtcttagattttgatttactagtgtgacaaaataactacatcctaatgaaaatcaagtttgatatgtttgttttgaaagtagcgttggaagagttgttgggggttttttgcatccatagcactggttactttgaacaaataaataaaagctttctgtagttgcttcctttatcagaaaagaacatttgataccatggtatatcatttcctcttcattaaagaacagcttttcta

SEQ ID NO: 371671 - DNA, 2877 bp, Homo sapiens
tgagaactgccgctgctcgagaaacaactctgcgaggagcacctccgcacgggacccggcgctgctgctactgccgctagagccgctgccgccgcttttctagaaccttcccccccactaacgcgtcttccgctacgtcaggccgtcgcgtaaacgccctatccgccgccaatggcgggaaggctctacgccccaccttacgccaaatgcgtactcctcccacccttgcggccagagacagtacccgacgttacttccgtaaatgcgctcaatgaattgcggaaggctagagtcctgctagttactacctcttggaatagggtcccgccccctgccttggcgcaaggcaggtgagaaacggtcgcgcagtttgaaattaacgccgacgggaggggcttaatccgcagcctggagatccagccccctcaacccgggaggtggtccctgcagttacgccaatgataacccccgccagaaaaatcttagtagccttccctttttgttttccgtgccccaactcggcggattgactcggccccttccggaaacacccgaatcaacttctagtcaaattattgttcacgccgcaatgacccacccctggcccgcgtctgtggaactgacccctggtgtacaggagagttcgctgctgaaagtggtcccaaaggggtactagtttttaagctcccaactccccctcccccagcgtctggaggattccacaccctcgcaccgcaggggcgaggaagtgggcggagtccggttttggcgccagccgctgaggctgccaagcagaaaagccaccgctgaggagactccggtcactgtcctcgccccgcctcccccttccctccccttggggaccaccgggcgccacgccgcgaacgtaatagctcttcaagtctgcaataaaaaatggcctccaacaaaactacattgcaaaaaatgggaaaaaaacagaatggaaagagtaaaaaagttgaagaggcagagcctgaagaatttgtcgtggaaaaagtactagatcgacgtgtagtgaatgggaaagtggaatatttcctgaagtggaagggatttacagatgctgacaatacttgggaacctgaagaaaatttagattgtccagaattgattgaagcgtttcttaactctcagaaagctggcaaagaaaaagatggtacaaaaagaaaatctttatctgacagtgaatctgatgacagcaaatcaaagaagaaaagagatgctgctgacaaaccaagaggatttgccagaggtcttgatcctgaaagaataattggtgccacagacagcagtggagaattgatgtttctcatgaaatggaaagattcagatgaggcagacttggtgctggcgaaagaggcaaatatgaagtgtcctcaaattgtaattgctttttatgaagagagactaacttggcattcttgtccagaagatgaagctcaataattgttcacattgttcttttatatatatttatatatatatataaaaattgggtcttagattttgatttactagtgtgacaaaataactacatcctaatgaaaatcaagtttgatatgtttgttttgaaagtagcgttggaagagttgttgggggttttttgcatccatagcactggttactttgaacaaataaataaaagctttctgtagttgcttcctttatcagaaaagaacatttgataccatggtatatcatttcctcttcattaaagaacagcttttctaaatgttgggggaaatgtccatagtcattactcagtcaaaacttgtgttctcatgagcctaaggaccattctagatttattacgtgttttgtgtgtgtgtgtgtgtgtgtgtgtgtgtgtatccataaaatgcatatgtaaatttttttttgtttttaagcattcacccaaacaaaaaaatcacaggtaaacccatgtttctgagatgccattattccaagcaaaataagagataatcccttcaagttaaattgaaaattttcctgaaaccatacatttcaagtgaaataagtaattctagataggacaatttaaattggataattttaaagtgtctataattgcagtggtttatttgcaaaattcctaaaaggaaaaattttatcactgccatcacagcaggtttcctcatccagatgaggaaactagacaaatgctagtgtgttttaactagctaaacaaaactaagttaaatgaacatttaaaagtttccctagcgggccattccttagcaaaatgttggaatccctgttgctacattgactaaaaggtcatgatgaatggaatatgtaagacttggctcatagaaacctaatcagatggttagaggtgttggcagtttaggacctgctgtcataaatgtgtgaacaaccttttgtaacctaacctattgacctgcatgttttttctttaccccaattcattacatggaggctcaatcttgagtttgctttactggttcagcaaaagccaggaagaacaactttgtagtaatcaaaatgttatccaactgtatattgtttactttattgtaaatactggtgaacagtggttaataaatagttttatattcctttatgccaattattagacttttttctttatttgatatgcctttacagtagaaatagaaatgcccacactcattggattatctttgtttataagttagatgataccagtaaggcattacagtacatatcctagatcttttgagcttacgagttttaaacttgaatatgtatttccacaggaatgtttccacagttgggaaataaaagtttcatgtgatgcctagggtcaattgtctcattaaaatgaggttttaaattctggtttgttgtaac

SEQ ID NO: 371672 - DNA, 1491 bp, Homo sapiens
gaggatgattctggttacttttactagtagtgttttaaagcaagggtcagcaaactgtggcctgttttgaaaatgaagtttattagaacatagcaacaagtaacataactctcctggagcacttcaataccttttgtttggactattatttcttaaatgaatggctgtcggttgacatgaacaacttcgacttgtaactgaatttttctttttcttaaaacaggaaagattcagatgaggcagacttggtgctggcgaaagaggcaaatatgaagtgtcctcaaattgtaattgctttttatgaagagagactaacttggcattcttgtccagaagatgaagctcaataattgttcacattgttcttttatatatatttatatatatatataaaaattgggtcttagattttgatttactagtgtgacaaaataactacatcctaatgaaaatcaagtttgatatgtttgttttgaaagtagcgttggaagagttgttgggggttttttgcatccatagcactggttactttgaacaaataaataaaagctttctgtagttgcttcctttatcagaaaagaacatttgataccatggtatatcatttcctcttcattaaagaacagcttttctaaatgttgggggaaatgtccatagtcattactcagtcaaaacttgtgttctcatgagcctaaggaccattctagatttattacgtgttttgtgtgtgtgtgtgtgtgtgtgtgtgtgtgtatccataaaatgcatatgtaaatttttttttgtttttaagcattcacccaaacaaaaaaatcacaggtaaacccatgtttctgagatgccattattccaagcaaaataagagataatcccttcaagttaaattgaaaattttcctgaaaccatacatttcaagtgaaataagtaattctagataggacaatttaaattggataattttaaagtgtctataattgcagtggtttatttgcaaaattcctaaaaggaaaaattttatcactgccatcacagcaggtttcctcatccagatgaggaaactagacaaatgctagtgtgttttaactagctaaacaaaactaagttaaatgaacatttaaaagtttccctagcgggccattccttagcaaaatgttggaatccctgttgctacattgactaaaaggtcatgatgaatggaatatgtaagacttggctcatagaaacctaatcagatggttagaggtgttggcagtttaggacctgctgtcataaatgtgtgaacaaccttttgtaacctaacctattgacctgcatgttttttctttaccccaattcattacatggaggctcaatcttgagtttgctttactggttcagcaaaagccaggaagaacaactttgtagtaatcaaaatgttatccaactgtatattgtttactttattgtaaatactggtgaacagtggttaataaatagttttatattccttta

SEQ ID NO: 371673 - DNA, 847 bp, Homo sapiens
gtagtagaagctgtgctgcagacagtgtctctctacctgactgcagctctactgtgcatcgcccatatatactggttttgtgtgtgtgtgtgtgtgtgtgtgtgtgtgtatccataaaatgcatatgtaaatttttttttgtttttaagcattcacccaaacaaaaaaatcacaggtaaacccatgtttctgagatgccattattccaagcaaaataagagataatcccttcaagttaaattgaaaattttcctgaaaccatacatttcaagtgaaataagtaattctagataggacaatttaaattggataattttaaagtgtctataattgcagtggtttatttgcaaaattcctaaaaggaaaaattttatcactgccatcacagcaggtttcctcatccagatgaggaaactagacaaatgctagtgtgttttaactagctaaacaaaactaagttaaatgaacatttaaaagtttccctagcgggccattccttagcaaaatgttggaatccctgttgctacattgactaaaaggtcatgatgaatggaatatgtaagacttggctcatagaaacctaatcagatggttagaggtgttggcagtttaggacctgctgtcataaatgtgtgaacaaccttttgtaacctaacctattgacctgcatgttttttctttaccccaattcattacatggaggctcaatcttgagtttgctttactggttcagcaaaagccaggaagaacaactttgtagtaatcaaaatgttatccaactgtatattgtttactttattgtaaatactggtgaacagtggttaataaatagttttatattccttta

SEQ ID NO: 371674 - DNA, 1492 bp, Homo sapiens
cgccgcgggggtaggcgcgtgcggtgtggcgcagtgcccttgagcccccgtgccgcggcctttgtttctccccgcggatgcgctgaccacgaggcccgcgctcccgggtgggggcgggcacccgcgcttaggcacgtctggacgccgggcttcagcggcgggggtcgggagcgggtgtttgcaagaggtgattcttttttcaaagtgtcacgaaacggggttgaagcatcttaagttttttccttttgttatttaattaccgattggaaagagggagggtttctgagcagaaaccaagttgggattgcagaacagagaagattcacagtgctttaccgttgtgagttgtttgggtaatcgtgcctggttttaaaccgaaaggattgtcctttaaaaatggaacatggactttattataaatgggacttagattggaaaagacattggtcccctattttaagccatgtgaagctgttttaggtaccaggatccccagtaaagtctttctagactcacatggttaggacacgtacttaagtacatcataagcaatgtaggtaggagcgcagatctactctggatttgtattcacgtttgaaatgtgcgctctctacttgggggttggaatccaaacagaatttgtatttagttaccttttttgtgtcatgcaaacttaccttaactgtcatgcatttttctagtaatagctcttcaagtctgcaataaaaaatggcctccaacaaaactacattgcaaaaaatgggaaaaaaacagaatggaaagagtaaaaaagttgaagaggcagagcctgaagaatttgtcgtggaaaaagtactagatcgacgtgtagtgaatgggaaagtggaatatttcctgaagtggaagggatttacagaaaagctggcaaagaaaaagatggtacaaaaagaaaatctttatctgacagtgaatctgatgacagcaaatcaaagaagaaaagagatgctgctgacaaaccaagaggatttgccagaggtcttgatcctgaaagaataattggtgccacagacagcagtggagaattgatgtttctcatgaaatggaaagattcagatgaggcagacttggtgctggcgaaagaggcaaatatgaagtgtcctcaaattgtaattgctttttatgaagagagactaacttggcattcttgtccagaagatgaagctcaataattgttcacattgttcttttatatatatttatatatatatataaaaattgggtcttagattttgatttactagtgtgacaaaataactacatcctaatgaaaatcaagtttgatatgtttgttttgaaagtagcgttggaagagttgttgggggttttttgcatccatagcactggttactttgaacaaataaataaaagctttctgtagttgcttcctttatcagaaaagaacatttgataccatggtatatcatttcctcttcattaaagaacagcttttcta

SEQ ID NO: 371675 - DNA, 1328 bp, Homo sapiens
  misc_feature (56)..(58): n is a, c, g, or t
gggatttcctccgggctacaggcgacagagctgagccaagcgtttactgggcacgnnngctcagattccaaatgaaaatgtttgagagcgctgactctacagccacaagatctggccaggatctctgggctgaaatttgttcctgtctgccaaatcctgaacaagaagatggtgccaacaatgcattctcagactcctttgtggattcttgccctgaaggtgaaggccagagggaggtggctgactttgctgtccagccagctgtaaagccttgggctcccttgcaggattcagaagtgtatttagcatctctagccattttattttaaaaatatttcctgaggatgtggcttgagctgtaggcgcggagggccggagacgctgcagacccgcgacccggagcagctcggaggcggtgaataatagctcttcaagtctgcaataaaaaatggcctccaacaaaactacattgcaaaaaatgggaaaaaaacagaatggaaagagtaaaaaagttgaagaggcagagcctgaagaatttgtcgtggaaaaagtactagatcgacgtgtagtgaatgggaaagtggaatatttcctgaagtggaagggatttacagatgctgacaatacttgggaacctgaagaaaatttagattgtccagaattgattgaagcgtttcttaactctcagaaagctggcaaagaaaaagatggtacaaaaagaaaatctttatctgacagtgaatctgatgacagcaaatcaaagaagaaaagagatgctatgaggaaacgagattgactacaaatttggttttgaaaataaatcacatgctcaacagaagcagttttggccaggcacggtggctcgcacctataatcccagcaccttgggaaaccaaagcaggaacatcgcttgagcccaggagttggaggccagtttgggcaacatagtgagaccccatctctacaaagaaaaaaaaaaaagaatcagcaagacgtggtggacacctcctgtagtctcagctacttgggaggctgaggcagaaggattgcttgagcctgggagttcaaggtgcagtgagctgtgatcatgccagtgcactttggcctaggcaacggagcaagaccttgtctcaaaaaattattaaataataaatcaggcacaactttaacaacacttattgagtccttagcatgtgctatactgtgtgccaaattatttgcttttaatgtgctgtgaaatatctgtgcagtagatactaaaattctgttttattaacctaaaccacaaagaggttaattaacttgcccaaagccacacagctcgtaag

SEQ ID NO: 371676 - DNA, 2019 bp, Homo sapiens
tgagaactgccgctgctcgagaaacaactctgcgaggagcacctccgcacgggacccggcgctgctgctactgccgctagagccgctgccgccgcttttctagaaccttcccccccactaacgcgtcttccgctacgtcaggccgtcgcgtaaacgccctatccgccgccaatggcgggaaggctctacgccccaccttacgccaaatgcgtactcctcccacccttgcggccagagacagtacccgacgttacttccgtaaatgcgctcaatgaattgcggaaggctagagtcctgctagttactacctcttggaatagggtcccgccccctgccttggcgcaaggcaggtgagaaacggtcgcgcagtttgaaattaacgccgacgggaggggcttaatccgcagcctggagatccagccccctcaacccgggaggtggtccctgcagttacgccaatgataacccccgccagaaaaatcttagtagccttccctttttgttttccgtgccccaactcggcggattgactcggccccttccggaaacacccgaatcaacttctagtcaaattattgttcacgccgcaatgacccacccctggcccgcgtctgtggaactgacccctggtgtacaggagagttcgctgctgaaagtggtcccaaaggggtactagtttttaagctcccaactccccctcccccagcgtctggaggattccacaccctcgcaccgcaggggcgaggaagtgggcggagtccggttttggcgccagccgctgaggctgccaagcagaaaagccaccgctgaggagactccggtcactgtcctcgccccgcctcccccttccctccccttggggaccaccgggcgccacgccgcgaacggtaagtgccgcggtcgtcggcgcctccgccctccccctagggccccaattcccagcgggcgcgcgcccgctgccccgcccttcgtggccgcccggcgtgggcggtgccacccctccccccggcggccccgcgcgcagctcccggctccctcccccttcggatgtggcttgagctgtaggcgcggagggccggagacgctgcagacccgcgacccggagcagctcggaggcggtgaagtcggtggctttccttctctctagctctcgctcgctggtggtgcttcagatgccacacgcgtcccgggggcccggttctccgctcccctcccctccccttctcgccggaccccgcgccgggagctgcgggaaggagtggagggtcgggcggtggcctcgcggctggcctggcgcgcggccagcgccggtagttagtggggggactgctctgccctcgagggggtagggagctgtggcgacggttgccccatttcgagacaaagcgcatttccccctcgagggcagagcaggcgatccaggaaaacgggcgcatggccgagcggaaggacgagggagagggagcagataggacccaaccggaacagaaccggagcagatggaccacgagaggatgacagaaagggagacgagggaaggggcaaacggacagggagaagaaccacagaagaccaggtgacacaacagagaaacaacgaaaaaaggatagacagacagcgaggagacatagagacaccagagcaagaaagcatgagcagacaaagggaacacagtaagcacgacgaaaaccaacgaagtgcaagggaacagcacgaagaaagagaagtacacacgacagcagcgcggatcacgtgaaaacgatgacgtgaacaaaccaccgaaagggaccccccgaggcaatcgacaccccccggaagaggggagagagcgctcagcaggtggcgaaccaaccgatggcggacaaggaaagcgagaaatgccctaggaacaaagagccgaggagagacgaaatagaacagcaacaagacgaagagaagagctacgaagagagcacaacggaaccagcagagagaagggacaaaaagaaacagcgaagacacaacaaacacacagaagaa

SEQ ID NO: 371677 - DNA, 1615 bp, Homo sapiens
tgagaactgccgctgctcgagaaacaactctgcgaggagcacctccgcacgggacccggcgctgctgctactgccgctagagccgctgccgccgcttttctagaaccttcccccccactaacgcgtcttccgctacgtcaggccgtcgcgtaaacgccctatccgccgccaatggcgggaaggctctacgccccaccttacgccaaatgcgtactcctcccacccttgcggccagagacagtacccgacgttacttccgtaaatgcgctcaatgaattgcggaaggctagagtcctgctagttactacctcttggaatagggtcccgccccctgccttggcgcaaggcaggtgagaaacggtcgcgcagtttgaaattaacgccgacgggaggggcttaatccgcagcctggagatccagccccctcaacccgggaggtggtccctgcagttacgccaatgataacccccgccagaaaaatcttagtagccttccctttttgttttccgtgccccaactcggcggattgactcggccccttccggaaacacccgaatcaacttctagtcaaattattgttcacgccgcaatgacccacccctggcccgcgtctgtggaactgacccctggtgtacaggagagttcgctgctgaaagtggtcccaaaggggtactagtttttaagctcccaactccccctcccccagcgtctggaggattccacaccctcgcaccgcaggggcgaggaagtgggcggagtccggttttggcgccagccgctgaggctgccaagcagaaaagccaccgctgaggagactccggtcactgtcctcgccccgcctcccccttccctccccttggggaccaccgggcgccacgccgcgaacggtaagtgccgcggtcgtcggcgcctccgccctccccctagggccccaattcccagcgggcgcgcgcccgctgccccgcccttcgtggccgcccggcgtgggcggtgccacccctccccccggcggccccgcgcgcagctcccggctccctcccccttcggatgtggcttgagctgtaggcgcggagggccggagacgctgcagacccgcgacccggagcagctcggaggcggtgaataatagctcttcaagtctgcaataaaaaatggcctccaacaaaactacattgcaacaaacatgcaaaaacaagaaaaaaaaaaaacaacaaaacaaaacacagtgtgtggtgggcgcggcgcggggccctcggagaaagagtttttggagacaccaattggggtgggggcggggggcgccccaagatgagggttagaggtgaaacagtgtggccaaagagggtggttccctgagaggagagaaccccgggggacgaggacaaagaggcgggagggaattttcccaccccaaattaaaaaaccccggggggggaccacggagggagtttgtgagaaaaaaactctccagagagggggggagatacaaggaggggacacaataaaggggggccctttataacacaggagggagtcccacaaagaagaagaccccgaatatatcacaaaatttaacacaccccgaacctctgggggacaacacaacaacacacac

SEQ ID NO: 371678 - DNA, 416 bp, Homo sapiens
aggctgaggcatgagaactgcttgaacctggggaggcggaggttgcagtgagctgagatcacgccactgcactccagcctgggcgacaagagtgtgagaccctgtctcaaaaaaaaagactggaaaaaaataactgtttccagatagtgtttttttattgtattattttggtggtgggttgtaagtttgaactaaatgaacaagataaagcattcttttattttattgtctgttgacttttaatctttccagaaggtgtctgccctgggatatagaagtaaaaatttatgtcgaatgtgataataatataagcaattgagccttgaaaatgtgctcaaaattcaagaggaatatttcttaatttctcttttgttttattttagcaaaaaatgggaaaaaaacagaatggaaagagt

SEQ ID NO: 371679 - DNA, 2823 bp, Homo sapiens
tgagaactgccgctgctcgagaaacaactctgcgaggagcacctccgcacgggacccggcgctgctgctactgccgctagagccgctgccgccgcttttctagaaccttcccccccactaacgcgtcttccgctacgtcaggccgtcgcgtaaacgccctatccgccgccaatggcgggaaggctctacgccccaccttacgccaaatgcgtactcctcccacccttgcggccagagacagtacccgacgttacttccgtaaatgcgctcaatgaattgcggaaggctagagtcctgctagttactacctcttggaatagggtcccgccccctgccttggcgcaaggcaggtgagaaacggtcgcgcagtttgaaattaacgccgacgggaggggcttaatccgcagcctggagatccagccccctcaacccgggaggtggtccctgcagttacgccaatgataacccccgccagaaaaatcttagtagccttccctttttgttttccgtgccccaactcggcggattgactcggccccttccggaaacacccgaatcaacttctagtcaaattattgttcacgccgcaatgacccacccctggcccgcgtctgtggaactgacccctggtgtacaggagagttcgctgctgaaagtggtcccaaaggggtactagtttttaagctcccaactccccctcccccagcgtctggaggattccacaccctcgcaccgcaggggcgaggaagtgggcggagtccggttttggcgccagccgctgaggctgccaagcagaaaagccaccgctgaggagactccggtcactgtcctcgccccgcctcccccttccctccccttggggaccaccgggcgccacgccgcgaacggtaagtgccgcggtcgtcggcgcctccgccctccccctagggccccaattcccagcgggcgcgcgcccgctgccccgcccttcgtggccgcccggcgtgggcggtgccacccctccccccggcggccccgcgcgcagctcccggctccctcccccttcggatgtggcttgagctgtaggcgcggagggccggagacgctgcagacccgcgacccggagcagctcggaggcggtgaataatagctcttcaagtctgcaataaaaaatggcctccaacaaaactacattgcaaaaaatgggaaaaaaacagaatggaaagagtaaaaaagttgaagaggcagagcctgaagaatttgtcgtggaaaaagtactagatcgacgtgtagtgaatgggaaagtggaatatttcctgaagtggaagggatttacagatgctgacaatacttgggaacctgaagaaaatttagattgtccagaattgattgaagcgtttcttaactctcagaaagctggcaaagaaaaagatggtacaaaaagaaaatctttatctgacagtgaatctgatgacagcaaatcaaagaagaaaagagatgctgctgacaaaccaagaggatttgccagaggtcttgatcctgaaagaataattggtgccacagacagcagtggagaattgatgtttctcatgaaatggaaagattcagatgaggcagacttggtgctggcgaaagaggcaaatatgaagtgtcctcaaattgtaattgctttttatgaagagagactaacttggcattcttgtccagaagatgaagctcaataattgttcacattgttcttttatatatatttatatatatatataaaaattgggtcttagattttgatttactagtgtgacaaaataactacatcctaatgaaaatcaagtttgatatgtttgttttgaaagtagcgttggaagagttgttgggggttttttgcatccatagcactggttactttgaacaaataaataaaagctttctgtagttgcttcctttatcagaaaagaacatttgataccatggtatatcatttcctcttcattaaagaacagcttttctaaatgttgggggaaatgtccatagtcattactcagtcaaaacttgtgttctcatgagcctaaggaccattctagatttattacgtgtgtgtgtgtgtgtatccataaaatgcatatgtaaatttttttttgtttttaagcattcacccaaacaaaaaaatcacaggtaaacccatgtttctgagatgccattattccaagcaaaataagagataatcccttcaagttaaattgaaaattttcctgaaaccatacatttcaagtgaaataagtaattctagataggacaatttaaattggataattttaaagtgtctataattgcagtggtttatttgcaaaattcctaaaaggaaaaattttatcactgccatcacagcaggtttcctcatccagatgaggaaactagacaaatgctagtgtgttttaactagctaaacaaaactaagttaaatgaacatttaaaagtttccctagcgggccattccttagcaaaatgttggaatccctgttgctacattgactaaaaggtcatgatgaatggaatatgtaagacttggctcatagaaacctaatcagatggttagaggtgttggcagtttaggacctgctgtcataaatgtgtgaacaaccttttgtaacctaacctattgacctgcatgttttttctttaccccaattcattacatggaggctcaatcttgagtttgctttactggttcagcaaaagccaggaagaacaactttgtagtaatcaaaatgttatccaactgtatattgtttactttattgtaaatactggtgaacagtggttaataaatagttttatattccttta

SEQ ID NO: 371680 - DNA, 3262 bp, Homo sapiens
  misc_feature (2863)..(2863): n is a, c, g, or t
  misc_feature (2870)..(2870): n is a, c, g, or t
  misc_feature (2879)..(2879): n is a, c, g, or t
  misc_feature (2881)..(2881): n is a, c, g, or t
  misc_feature (2893)..(2894): n is a, c, g, or t
  misc_feature (2896)..(2896): n is a, c, g, or t
  misc_feature (2899)..(2899): n is a, c, g, or t
  misc_feature (2922)..(2922): n is a, c, g, or t
  misc_feature (3262)..(3262): n is a, c, g, or t
tgagaactgccgctgctcgagaaacaactctgcgaggagcacctccgcacgggacccggcgctgctgctactgccgctagagccgctgccgccgcttttctagaaccttcccccccactaacgcgtcttccgctacgtcaggccgtcgcgtaaacgccctatccgccgccaatggcgggaaggctctacgccccaccttacgccaaatgcgtactcctcccacccttgcggccagagacagtacccgacgttacttccgtaaatgcgctcaatgaattgcggaaggctagagtcctgctagttactacctcttggaatagggtcccgccccctgccttggcgcaaggcaggtgagaaacggtcgcgcagtttgaaattaacgccgacgggaggggcttaatccgcagcctggagatccagccccctcaacccgggaggtggtccctgcagttacgccaatgataacccccgccagaaaaatcttagtagccttccctttttgttttccgtgccccaactcggcggattgactcggccccttccggaaacacccgaatcaacttctagtcaaattattgttcacgccgcaatgacccacccctggcccgcgtctgtggaactgacccctggtgtacaggagagttcgctgctgaaagtggtcccaaaggggtactagtttttaagctcccaactccccctcccccagcgtctggaggattccacaccctcgcaccgcaggggcgaggaagtgggcggagtccggttttggcgccagccgctgaggctgccaagcagaaaagccaccgctgaggagactccggtcactgtcctcgccccgcctcccccttccctccccttggggaccaccgggcgccacgccgcgaacggtaagtgccgcggtcgtcggcgcctccgccctccccctagggccccaattcccagcgggcgcgcgcccgctgccccgcccttcgtggccgcccggcgtgggcggtgccacccctccccccggcggccccgcgcgcagctcccggctccctcccccttcggatgtggcttgagctgtaggcgcggagggccggagacgctgcagacccgcgacccggagcagctcggaggcggtgaataatagctcttcaagtctgcaataaaaaatggcctccaacaaaactacattgcaaaaaatgggaaaaaaacagaatggaaagagtaaaaaagttgaagaggcagagcctgaagaatttgtcgtggaaaaagtactagatcgacgtgtagtgaatgggaaagtggaatatttcctgaagtggaagggatttacagatgctgacaatacttgggaacctgaagaaaatttagattgtccagaattgattgaagcgtttcttaactctcagaaagctggcaaagaaaaagatggtacaaaaagaaaatctttatctgacagtgaatctgatgacagcaaatcaaagaagaaaagagatgctgctgacaaaccaagaggatttgccagaggtcttgatcctgaaagaataattggtgccacagacagcagtggagaattgatgtttctcatgaaatggaaagattcagatgaggcagacttggtgctggcgaaagaggcaaatatgaagtgtcctcaaattgtaattgctttttatgaagagagactaacttggcattcttgtccagaagatgaagctcaataattgttcacattgttcttttatatatatttatatatatatataaaaattgggtcttagattttgatttactagtgtgacaaaataactacatcctaatgaaaatcaagtttgatatgtttgttttgaaagtagcgttggaagagttgttgggggttttttgcatccatagcactggttactttgaacaaataaataaaagctttctgtagttgcttcctttatcagaaaagaacatttgataccatggtatatcatttcctcttcattaaagaacagcttttctaaatgttgggggaaatgtccatagtcattactcagtcaaaacttgtgttctcatgagcctaaggaccattctagatttattacgtgttttgtgtgtgtgtgtgtgtgtgtgtgtgtgtgtatccataaaatgcatatgtaaatttttttttgtttttaagcattcacccaaacaaaaaaatcacaggtaaacccatgtttctgagatgccattattccaagcaaaataagagataatcccttcaagttaaattgaaaattttcctgaaaccatacatttcaagtgaaataagtaattctagataggacaatttaaattggataattttaaagtgtctataattgcagtggtttatttgcaaaattcctaaaaggaaaaattttatcactgccatcacagcaggtttcctcatccagatgaggaaactagacaaatgctagtgtgttttaactagctaaacaaaactaagttaaatgaacatttaaaagtttccctagcgggccattccttagcaaaatgttggaatccctgttgctacattgactaaaaggtcatgatgaatggaatatgtaagacttggctcatagaaacctaatcagatggttagaggtgttggcagtttaggacctgctgtcataaatgtgtgaacaaccttttgtaacctaacctattgacctgcatgttttttctttaccccaattcattacatggaggctcaatcttgagtttgctttactggttcagcaaaagccaggaagaacaactttgtagtaatcaaaatgttatccaactgtatattgtttactttattgtaaatactggtgaacagtggttaataaatagttttatattcctttaaaaaaaaaaaaaaaaaaanaaaaaanaaaaaaaananaaaaaaaaaaannanaanaaaaaaaaaaaaagaaaaaaaanaaaaagaggtggggggggggggaaaaaccgcgggggggaaacctttttaaagggcaaagaggggaaaaaaaaaagggggggggggaaaaacagaggggggaagacacaacgtatgtgcgtttagggaggagacccttcttgtgcgggagaagggaccccacgagaataagggaggacaaaagtggtgttgttgggaccttttcttgtcgtgttttgtcttgttaataatgacacgtatgcatagataaagtgagagaagcgggaaaaggtttgaggatgatggtagagataaaacaagcagaggaagaaggagaaatactgagtgactacacttaagacn

SEQ ID NO: 371681 - DNA, 3113 bp, Homo sapiens
tgagaactgccgctgctcgagaaacaactctgcgaggagcacctccgcacgggacccggcgctgctgctactgccgctagagccgctgccgccgcttttctagaaccttcccccccactaacgcgtcttccgctacgtcaggccgtcgcgtaaacgccctatccgccgccaatggcgggaaggctctacgccccaccttacgccaaatgcgtactcctcccacccttgcggccagagacagtacccgacgttacttccgtaaatgcgctcaatgaattgcggaaggctagagtcctgctagttactacctcttggaatagggtcccgccccctgccttggcgcaaggcaggtgagaaacggtcgcgcagtttgaaattaacgccgacgggaggggcttaatccgcagcctggagatccagccccctcaacccgggaggtggtccctgcagttacgccaatgataacccccgccagaaaaatcttagtagccttccctttttgttttccgtgccccaactcggcggattgactcggccccttccggaaacacccgaatcaacttctagtcaaattattgttcacgccgcaatgacccacccctggcccgcgtctgtggaactgacccctggtgtacaggagagttcgctgctgaaagtggtcccaaaggggtactagtttttaagctcccaactccccctcccccagcgtctggaggattccacaccctcgcaccgcaggggcgaggaagtgggcggagtccggttttggcgccagccgctgaggctgccaagcagaaaagccaccgctgaggagactccggtcactgtcctcgccccgcctcccccttccctccccttggggaccaccgggcgccacgccgcgaacggtaagtgccgcggtcgtcggcgcctccgccctccccctagggccccaattcccagcgggcgcgcgcccgctgccccgcccttcgtggccgcccggcgtgggcggtgccacccctccccccggcggccccgcgcgcagctcccggctccctcccccttcggatgtggcttgagctgtaggcgcggagggccggagacgctgcagacccgcgacccggagcagctcggaggcggtgaataatagctcttcaagtctgcaataaaaaatggcctccaacaaaactacattgcaaaaaatgggaaaaaaacagaatggaaagagtaaaaaagttgaagaggcagagcctgaagaatttgtcgtggaaaaagtactagatcgacgtgtagtgaatgggaaagtggaatatttcctgaagtggaagggatttacagatgctgacaatacttgggaacctgaagaaaatttagattgtccagaattgattgaagcgtttcttaactctcagaaagctggcaaagaaaaagatggtacaaaaagaaaatctttatctgacagtgaatctgatgacagcaaatcaaagaagaaaagagatgctgctgacaaaccaagaggatttgccagaggtcttgatcctgaaagaataattggtgccacagacagcagtggagaattgatgtttctcatgaaatggaaagattcagatgaggcagacttggtgctggcgaaagaggcaaatatgaagtgtcctcaaattgtaattgctttttatgaagagagactaacttggcattcttgtccagaagatgaagctcaataattgttcacattgttcttttatatatatttatatatatatataaaaattgggtcttagattttgatttactagtgtgacaaaataactacatcctaatgaaaatcaagtttgatatgtttgttttgaaagtagcgttggaagagttgttgggggttttttgcatccatagcactggttactttgaacaaataaataaaagctttctgtagttgcttcctttatcagaaaagaacatttgataccatggtatatcatttcctcttcattaaagaacagcttttctaaatgttgggggaaatgtccatagtcattactcagtcaaaacttgtgttctcatgagcctaaggaccattctagatttattacgtgttttgtgtgtgtgtgtgtgtgtgtgtgtgtgtgtatccataaaatgcatatgtaaatttttttttgtttttaagcattcacccaaacaaaaaaatcacaggtaaacccatgtttctgagatgccattattccaagcaaaataagagataatcccttcaagttaaattgaaaattttcctgaaaccatacatttcaagtgaaataagtaattctagataggacaatttaaattggataattttaaagtgtctataattgcagtggtttatttgcaaaattcctaaaaggaaaaattttatcactgccatcacagcaggtttcctcatccagatgaggaaactagacaaatgctagtgtgttttaactagctaaacaaaactaagttaaatgaacatttaaaagtttccctagcgggccattccttagcaaaatgttggaatccctgttgctacattgactaaaaggtcatgatgaatggaatatgtaagacttggctcatagaaacctaatcagatggttagaggtgttggcagtttaggacctgctgtcataaatgtgtgaacaaccttttgtaacctaacctattgacctgcatgttttttctttaccccaattcattacatggaggctcaatcttgagtttgctttactggttcagcaaaagccaggaagaacaactttgtagtaatcaaaatgttatccaactgtatattgtttactttattgtaaatactggtgaacagtggttaataaatagttttatattcctttatgccaattattagacttttttctttatttgatatgcctttacagtagaaatagaaatgcccacactcattggattatctttgtttataagttagatgataccagtaaggcattacagtacatatcctagatcttttgagcttacgagttttaaacttgaatatgtatttccacaggaatgtttccacagttgggaaataaaagtttcatgtgatgcctagggtcaattgtctcattaaaatgaggttttaaattctggtttgttgtaac

SEQ ID NO: 371682 - DNA, 1946 bp, Homo sapiens
gtttttatgaggatttatcaacagagttatttaaggaggaatcctgtgttgttatcaggaactaaaaggataaggctaacaatttggaaagagcaactactctttcttaaatcaatctacaattcacagataggaagaggtcaatgacctaggagtaacaatcaactcaagattcattttcattatgttattcatgaacacccggagcagctcggaggcggtgaataatagctcttcaagtctgcaataaaaaatggcctccaacaaaactacattgcaaaaaatgggaaaaaaacagaatggaaagagtaaaaaagttgaagaggcagagcctgaagaatttgtcgtggaaaaagtactagatcgacgtgtagtgaatgggaaagtggaatatttcctgaagtggaagggatttacagatgctgacaatacttgggaacctgaagaaaatttagattgtccagaattgattgaagcgtttcttaactctcagaaagctggcaaagaaaaagatggtacaaaaagaaaatctttatctgacagtgaatctgatgacagcaaatcaaagaagaaaagagatgctgctgacaaaccaagaggatttgccagaggtcttgatcctgaaagaataattggtgccacagacagcagtggagaattgatgtttctcatgaaatggaaagattcagatgaggcagacttggtgctggcgaaagaggcaaatatgaagtgtcctcaaattgtaattgctttttatgaagagagactaacttggcattcttgtccagaagatgaagctcaataattgttcacattgttcttttatatatatttatatatatatataaaaattgggtcttagattttgatttactagtgtgacaaaataactacatcctaatgaaaatcaagtttgatatgtttgttttgaaagtagcgttggaagagttgttgggggttttttgcatccatagcactggttactttgaacaaataaataaaagctttctgtagttgcttcctttatcagaaaagaacatttgataccatggtatatcatttcctcttcattaaagaacagcttttctaaatgttgggggaaatgtccatagtcattactcagtcaaaacttgtgttctcatgagcctaaggaccattctagatttattacgtgttttgtgtgtgtgtgtgtgtgtgtgtgtgtgtgtatccataaaatgcatatgtaaatttttttttgtttttaagcattcacccaaacaaaaaaatcacaggtaaacccatgtttctgagatgccattattccaagcaaaataagagataatcccttcaagttaaattgaaaattttcctgaaaccatacatttcaagtgaaataagtaattctagataggacaatttaaattggataattttaaagtgtctataattgcagtggtttatttgcaaaattcctaaaaggaaaaattttatcactgccatcacagcaggtttcctcatccagatgaggaaactagacaaatgctagtgtgttttaactagctaaacaaaactaagttaaatgaacatttaaaagtttccctagcgggccattccttagcaaaatgttggaatccctgttgctacattgactaaaaggtcatgatgaatggaatatgtaagacttggctcatagaaacctaatcagatggttagaggtgttggcagtttaggacctgctgtcataaatgtgtgaacaaccttttgtaacctaacctattgacctgcatgttttttctttaccccaattcattacatggaggctcaatcttgagtttgctttactggttcagcaaaagccaggaagaacaactttgtagtaatcaaaatgttatccaactgtatattgtttactttattgtaaatactggtgaacagtggttaataaatagttttatattccttta

SEQ ID NO: 371683 - DNA, 2505 bp, Homo sapiens
tgagaactgccgctgctcgagaaacaactctgcgaggagcacctccgcacgggacccggcgctgctgctactgccgctagagccgctgccgccgcttttctagaaccttcccccccactaacgcgtcttccgctacgtcaggccgtcgcgtaaacgccctatccgccgccaatggcgggaaggctctacgccccaccttacgccaaatgcgtactcctcccacccttgcggccagagacagtacccgacgttacttccgtaaatgcgctcaatgaattgcggaaggctagagtcctgctagttactacctcttggaatagggtcccgccccctgccttggcgcaaggcaggtgagaaacggtcgcgcagtttgaaattaacgccgacgggaggggcttaatccgcagcctggagatccagccccctcaacccgggaggtggtccctgcagttacgccaatgataacccccgccagaaaaatcttagtagccttccctttttgttttccgtgccccaactcggcggattgactcggccccttccggaaacacccgaatcaacttctagtcaaattattgttcacgccgcaatgacccacccctggcccgcgtctgtggaactgacccctggtgtacaggagagttcgctgctgaaagtggtcccaaaggggtactagtttttaagctcccaactccccctcccccagcgtctggaggattccacaccctcgccccgcctcccccttccctccccttggggaccaccgggcgccacgccgcgaacgtaatagctcttcaagtctgcaataaaaaatggcctccaacaaaactacattgcaaaaaatgggaaaaaaacagaatggaaagagtaaaaaagttgaagaggcagagcctgaagaatttgtcgtggaaaaagtactagatcgacgtgtagtgaatgggaaagtggaatatttcctgaagtggaagggatttacagatgctgacaatacttgggaacctgaagaaaatttagattgtccagaattgattgaagcgtttcttaactctcagaaagctggcaaagaaaaagatggtacaaaaagaaaatctttatctgacagtgaatctgatgacagcaaatcaaagaagaaaagagatgctgctgacaaaccaagaggatttgccagaggtcttgatcctgaaagaataattggtgccacagacagcagtggagaattgatgtttctcatgaaatggaaagattcagatgaggcagacttggtgctggcgaaagaggcaaatatgaagtgtcctcaaattgtaattgctttttatgaagagagactaacttggcattcttgtccagaagatgaagctcaataattgttcacattgttcttttatatatatttatatatatatataaaaattgggtcttagattttgatttactagtgtgacaaaataactacatcctaatgaaaatcaagtttgatatgtttgttttgaaagtagcgttggaagagttgttgggggttttttgcatccatagcactggttactttgaacaaataaataaaagctttctgtagttgcttcctttatcagaaaagaacatttgataccatggtatatcatttcctcttcattaaagaacagcttttctaaatgttgggggaaatgtccatagtcattactcagtcaaaacttgtgttctcatgagcctaaggaccattctagatttattacgtgttttgtgtgtgtgtgtgtgtgtgtgtgtgtgtgtatccataaaatgcatatgtaaatttttttttgtttttaagcattcacccaaacaaaaaaatcacaggtaaacccatgtttctgagatgccattattccaagcaaaataagagataatcccttcaagttaaattgaaaattttcctgaaaccatacatttcaagtgaaataagtaattctagataggacaatttaaattggataattttaaagtgtctataattgcagtggtttatttgcaaaattcctaaaaggaaaaattttatcactgccatcacagcaggtttcctcatccagatgaggaaactagacaaatgctagtgtgttttaactagctaaacaaaactaagttaaatgaacatttaaaagtttccctagcgggccattccttagcaaaatgttggaatccctgttgctacattgactaaaaggtcatgatgaatggaatatgtaagacttggctcatagaaacctaatcagatggttagaggtgttggcagtttaggacctgctgtcataaatgtgtgaacaaccttttgtaacctaacctattgacctgcatgttttttctttaccccaattcattacatggaggctcaatcttgagtttgctttactggttcagcaaaagccaggaagaacaactttgtagtaatcaaaatgttatccaactgtatattgtttactttattgtaaatactggtgaacagtggttaataaatagttttatattccttta

SEQ ID NO: 371684 - DNA, 2061 bp, Homo sapiens
cgccgcgggggtaggcgcgtgcggtgtggcgcagtgcccttgagcccccgtgccgcggcctttgtttctccccgcggatgcgctgaccacgaggcccgcgctcccgggtgggggcgggcacccgcgcttaggcacgtctggacgccgggcttcagcggcgggggtcgggagcgggtgtttgcaagaggtgattcttttttcaaagtgtcacgaaacggggttgaagcatcttaagttttttccttttgttatttaattaccgattggaaagagggagggtttctgagcagaaaccaagttgggattgcagaacagagaagattcacagtgctttaccgtttaatagctcttcaagtctgcaataaaaaatggcctccaacaaaactacattgcaaaaaatgggaaaaaaacagaatggaaagagtaaaaaagttgaagaggcagagcctgaagaatttgtcgtggaaaaagtactagatcgacgtgtagtgaatgggaaagtggaatatttcctgaagtggaagggatttacagatgctgacaatacttgggaacctgaagaaaatttagattgtccagaattgattgaagcgtttcttaactctcagaaagctggcaaagaaaaagatggtacaaaaagaaaatctttatctgacagtgaatctgatgacagcaaatcaaagaagaaaagagatgctgctgacaaaccaagaggatttgccagaggtcttgatcctgaaagaataattggtgccacagacagcagtggagaattgatgtttctcatgaaatggaaagattcagatgaggcagacttggtgctggcgaaagaggcaaatatgaagtgtcctcaaattgtaattgctttttatgaagagagactaacttggcattcttgtccagaagatgaagctcaataattgttcacattgttcttttatatatatttatatatatatataaaaattgggtcttagattttgatttactagtgtgacaaaataactacatcctaatgaaaatcaagtttgatatgtttgttttgaaagtagcgttggaagagttgttgggggttttttgcatccatagcactggttactttgaacaaataaataaaagctttctgtagttgcttcctttatcagaaaagaacatttgataccatggtatatcatttcctcttcattaaagaacagcttttctaaatgttgggggaaatgtccatagtcattactcagtcaaaacttgtgttctcatgagcctaaggaccattctagatttattacgtgttttgtgtgtgtgtgtgtgtgtgtgtgtgtgtgtatccataaaatgcatatgtaaatttttttttgtttttaagcattcacccaaacaaaaaaatcacaggtaaacccatgtttctgagatgccattattccaagcaaaataagagataatcccttcaagttaaattgaaaattttcctgaaaccatacatttcaagtgaaataagtaattctagataggacaatttaaattggataattttaaagtgtctataattgcagtggtttatttgcaaaattcctaaaaggaaaaattttatcactgccatcacagcaggtttcctcatccagatgaggaaactagacaaatgctagtgtgttttaactagctaaacaaaactaagttaaatgaacatttaaaagtttccctagcgggccattccttagcaaaatgttggaatccctgttgctacattgactaaaaggtcatgatgaatggaatatgtaagacttggctcatagaaacctaatcagatggttagaggtgttggcagtttaggacctgctgtcataaatgtgtgaacaaccttttgtaacctaacctattgacctgcatgttttttctttaccccaattcattacatggaggctcaatcttgagtttgctttactggttcagcaaaagccaggaagaacaactttgtagtaatcaaaatgttatccaactgtatattgtttactttattgtaaatactggtgaacagtggttaataaatagttttatattccttta

SEQ ID NO: 371685 - DNA, 2397 bp, Homo sapiens
tgagaactgccgctgctcgagaaacaactctgcgaggagcacctccgcacgggacccggcgctgctgctactgccgctagagccgctgccgccgcttttctagaaccttcccccccactaacgcgtcttccgctacgtcaggccgtcgcgtaaacgccctatccgccgccaatggcgggaaggctctacgccccaccttacgccaaatgcgtactcctcccacccttgcggccagagacagtacccgacgttacttccgtaaatgcgctcaatgaattgcggaaggctagagtcctgctagttactacctcttggaatagggtcccgccccctgccttggcgcaaggcaggtgagaaacggtcgcgcagtttgaaattaacgccgacgggaggggcttaatccgcagcctggagatccagccccctcaacccgggaggtggtccctgcagttacgccaatgataacccccgccagaaaaatcttagtagccttccctttttgttttccgtgccccaactcggcggattgactcggccccttccggaaacacccgaatcaacttctagtcaaattattgttcacgccgcaatgacccacccctggcccgcgtctgtggaactgacccctggtgtacaggagagttcgctgctgaaagtggtcccaaaggggtactagtttttaagctcccaactccccctcccccagcgtctggaggattccacaccctcgcaccgcaggggcgaggaagtgggcggagtccggttttggcgccagccgctgaggctgccaagcagaaaagccaccgctgaggagactccggtcactgtcctcgccccgcctcccccttccctccccttggggaccaccgggcgccacgccgcgaacggtaagtgccgcggtcgtcggcgcctccgccctccccctagggccccaattcccagcgggcgcgcgcccgctgccccgcccttcgtggccgcccggcgtgggcggtgccacccctccccccggcggccccgcgcgcagctcccggctccctcccccttcggatgtggcttgagctgtaggcgcggagggccggagacgctgcagacccgcgacccggagcagctcggaggcggtgaataatagctcttcaagtctgcaataaaaaatggcctccaacaaaactacattgcaaaaaatgggaaaaaaacagaatggaaagagtaaaaaagttgaagaggcagagcctgaagaatttgtcgtggaaaaagtactagatcgacgtgtagtgaatgggaaagtggaatatttcctgaagtggaagggatttacagatgctgacaatacttgggaacctgaagaaaatttagattgtccagaattgattgaagcgtttcttaactctcagaaagctggcaaagaaaaagatggtacaaaaagaaaatctttatctgacagtgaatctgatgacagcaaatcaaagaagaaaagagatgctgctgacaaaccaagaggatttgccagaggtcttgatcctgaaagaataattggtgccacagacagcagtggagaattgatgtttctcatgaaatggaaagattcagatgaggcagacttggtgctggcgaaagaggcaaatatgaagtgtcctcaaattgtaattgctttttatgaagagagactaacttggcattcttgtccagaagatgaagctcaataattgttcacattgttcttttatatatatttatatatatatataaaaattgggtcttagattttgatttactagtgtgacaaaataactacatcctaatgaaaatcaagtttgatatgtttgttttgaaagtagcgttggaagagttgttgggggttttttgcatccatagcactggttactttgaacaaataaataaaagctttctgtagttgcttcctttatcagaaaagaacatttgataccatggtatatcatttcctcttcattaaagaacagcttttctaaatgttgggggaaatgtccatagtcattactcagtcaaaacttgtgttctcatgagcctaaggaccattctagatttattacgtgttttgtgtgtgtgtgtgtgtgtgtgtgtgtgtgtatccataaaatgcatatgtaaatttttttttgtttttaagcattcacccaaacaaaaaaatcacaggtaaacccatgtttctgagatgccattattccaagcaaaataagagataatcccttcaagttaaattgaaaattttcctgaaaccatacatttcaagtgaaataagtaattctagataggaccatttaacgttcgcatactccagagggtcttcatcatcgcggggttaattggccagatcctaaagcggaaaaattatccgcgcgcccagggttcccaccaaag

SEQ ID NO: 371686 - DNA, 1929 bp, Homo sapiens
tgagaactgccgctgctcgagaaacaactctgcgaggagcacctccgcacgggacccggcgctgctgctactgccgctagagccgctgccgccgcttttctagaaccttcccccccactaacgcgtcttccgctacgtcaggccgtcgcgtaaacgccctatccgccgccaatggcgggaaggctctacgccccaccttacgccaaatgcgtactcctcccacccttgcggccagagacagtacccgacgttacttccgtaaatgcgctcaatgaattgcggaaggctagagtcctgctagttactacctcttggaatagggtcccgccccctgccttggcgcaaggcaggtgagaaacggtcgcgcagtttgaaattaacgccgacgggaggggcttaatccgcagcctggagatccagccccctcaacccgggaggtggtccctgcagttacgccaatgataacccccgccagaaaaatcttagtagccttccctttttgttttccgtgccccaactcggcggattgactcggccccttccggaaacacccgaatcaacttctagtcaaattattgttcacgccgcaatgacccacccctggcccgcgtctgtggaactgacccctggtgtacaggagagttcgctgctgaaagtggtcccaaaggggtactagtttttaagctcccaactccccctcccccagcgtctggaggattccacaccctcgcaccgcaggggcgaggaagtgggcggagtccggttttggcgccagccgctgaggctgccaagcagaaaagccaccgctgaggagactccggtcactgtcctcgccccgcctcccccttccctccccttggggaccaccgggcgccacgccgcgaacggtaagtgccgcggtcgtcggcgcctccgccctccccctagggccccaattcccagcgggcgcgcgcccgctgccccgcccttcgtggccgcccggcgtgggcggtgccacccctccccccggcggccccgcgcgcagctcccggctccctcccccttcggatgtggcttgagctgtaggcgcggagggccggagacgctgcagacccgcgacccggagcagctcggaggcggtgaataatagctcttcaagtctgcaataaaaaatggcctccaacaaaactacattgcaaaaaatgggaaaaaaacagaatggaaagagtaaaaaagttgaagaggcagagcctgaagaatttgtcgtggaaaaagtactagatcgacgtgtagtgaatgggaaagtggaatatttcctgaagtggaagggatttacagatgctgacaatacttgggaacctgaagaaaatttagattgtccagaattgattgaagcgtttcttaactctcagaaagctggcaaagaaaaagatggtacaaaaagaaaatctttatctgacagtgaatctgatgacagcaaatcaaagaagaaaagagatgctgctgacaaaccaagaggatttgccagaggtcttgatcctgaaagaataattggtgccacagacagcagtggagaattgatgtttctcatgaaatggaaagattcagatgaggcagacttggtgctggcgaaagaggcaaatatgaagtgtcctcaaattgtaattgctttttatgaagagagactaacttggcattcttgtccagaagatgaagctcaataattgttcacattgttcttttatatatatttatatatatatataaaaattgggtcttagattttgatttactagtgtgacaaaataactacatcctaatgaaaatcaagtttgatatgtttgttttgaaagtagcgttggaagagttgttgggggttttttgcatccatagcactggttactttgaacaaataaataaaagctttctgtagttgcttcctttatcaga

SEQ ID NO: 371687 - DNA, 2378 bp, Homo sapiens
cgccgcgggggtaggcgcgtgcggtgtggcgcagtgcccttgagcccccgtgccgcggcctttgtttctccccgcggatgcgctgaccacgaggcccgcgctcccgggtgggggcgggcacccgcgcttaggcacgtctggacgccgggcttcagcggcgggggtcgggagcgggtgtttgcaagaggtgattcttttttcaaagtgtcacgaaacggggttgaagcatcttaagttttttccttttgttatttaattaccgattggaaagagggagggtttctgagcagaaaccaagttgggattgcagaacagagaagattcacagtgctttaccgttgtgagttgtttgggtaatcgtgcctggttttaaaccgaaaggattgtcctttaaaaatggaacatggactttattataaatgggacttagattggaaaagacattggtcccctattttaagccatgtgaagctgttttaggtaccaggatccccagtaaagtctttctagactcacatggttaggacacgtacttaagtacatcataagcaatgtaggtaggagcgcagatctactctggatttgtattcacgtttgaaatgtgcgctctctacttgggggttggaatccaaacagaatttgtatttagttaccttttttgtgtcatgcaaacttaccttaactgtcatgcatttttctagtaatagctcttcaagtctgcaataaaaaatggcctccaacaaaactacattgcaaaaaatgggaaaaaaacagaatggaaagagtaaaaaagttgaagaggcagagcctgaagaatttgtcgtggaaaaagtactagatcgacgtgtagtgaatgggaaagtggaatatttcctgaagtggaagggatttacagatgctgacaatacttgggaacctgaagaaaatttagattgtccagaattgattgaagcgtttcttaactctcagaaagctggcaaagaaaaagatggtacaaaaagaaaatctttatctgacagtgaatctgatgacagcaaatcaaagaagaaaagagatgctaataattggtgccacagacagcagtggagaattgatgtttctcatgaaatggaaagattcagatgaggcagacttggtgctggcgaaagaggcaaatatgaagtgtcctcaaattgtaattgctttttatgaagagagactaacttggcattcttgtccagaagatgaagctcaataattgttcacattgttcttttatatatatttatatatatatataaaaattgggtcttagattttgatttactagtgtgacaaaataactacatcctaatgaaaatcaagtttgatatgtttgttttgaaagtagcgttggaagagttgttgggggttttttgcatccatagcactggttactttgaacaaataaataaaagctttctgtagttgcttcctttatcagaaaagaacatttgataccatggtatatcatttcctcttcattaaagaacagcttttctaaatgttgggggaaatgtccatagtcattactcagtcaaaacttgtgttctcatgagcctaaggaccattctagatttattacgtgttttgtgtgtgtgtgtgtgtgtgtgtgtgtgtgtatccataaaatgcatatgtaaatttttttttgtttttaagcattcacccaaacaaaaaaatcacaggtaaacccatgtttctgagatgccattattccaagcaaaataagagataatcccttcaagttaaattgaaaattttcctgaaaccatacatttcaagtgaaataagtaattctagataggacaatttaaattggataattttaaagtgtctataattgcagtggtttatttgcaaaattcctaaaaggaaaaattttatcactgccatcacagcaggtttcctcatccagatgaggaaactagacaaatgctagtgtgttttaactagctaaacaaaactaagttaaatgaacatttaaaagtttccctagcgggccattccttagcaaaatgttggaatccctgttgctacattgactaaaaggtcatgatgaatggaatatgtaagacttggctcatagaaacctaatcagatggttagaggtgttggcagtttaggacctgctgtcataaatgtgtgaacaaccttttgtaacctaacctattgacctgcatgttttttctttaccccaattcattacatggaggctcaatcttgagtttgctttactggttcagcaaaagccaggaagaacaactttgtagtaatcaaaatgttatccaactgtatattgtttactttattgtaaatactggtgaacagtggttaataaatagttttatattccttta

SEQ ID NO: 371688 - DNA, 1348 bp, Homo sapiens
  misc_feature (56)..(58): n is a, c, g, or t
gggatttcctccgggctacaggcgacagagctgagccaagcgtttactgggcacgnnngctcagattccaaatgaaaatgtttgagagcgctgactctacagccacaagatctggccaggatctctgggctgaaatttgttcctgtctgccaaatcctgaacaagaagatggtgccaacaatgcattctcagactcctttgtggattcttgccctgaaggtgaaggccagagggaggtggctgactttgctgtccagccagctgtaaagccttgggctcccttgcaggattcagaagtgtatttagcatctctagccattttattttaaaaatatttcctgaggatgtggcttgagctgtaggcgcggagggccggagacgctgcagacccgcgacccggagcagctcggaggcggtgaataatagctcttcaagtctgcaataaaaaatggcctccaacaaaactacattgcaaaaaatgggaaaaaaacagaatggaaagagtaaaaaagttgaagaggcagagcctgaagaatttgtcgtggaaaaagtactagatcgacgtgtagtgaatgggaaagtggaatatttcctgaagtggaagggatttacagatgctgacaatacttgggaacctgaagaaaatttagattgtccagaattgattgaagcgtttcttaactctcagaaagctggcaaagaaaaagatggtacaaaaagaaaatctttatctgacagtgaatctgatgacagcaaatcaaagaagaaaagagatgctgtataatcactattttacagatgaggaaacgagattgactacaaatttggttttgaaaataaatcacatgctcaacagaagcagttttggccaggcacggtggctcgcacctataatcccagcaccttgggaaaccaaagcaggaacatcgcttgagcccaggagttggaggccagtttgggcaacatagtgagaccccatctctacaaagaaaaaaaaaaaagaatcagcaagacgtggtggacacctcctgtagtctcagctacttgggaggctgaggcagaaggattgcttgagcctgggagttcaaggtgcagtgagctgtgatcatgccagtgcactttggcctaggcaacggagcaagaccttgtctcaaaaaattattaaataataaatcaggcacaactttaacaacacttattgagtccttagcatgtgctatactgtgtgccaaattatttgcttttaatgtgctgtgaaatatctgtgcagtagatactaaaattctgttttattaacctaaaccacaaagaggttaattaacttgcccaaagccacacagctcgtaag

SEQ ID NO: 371689 - DNA, 1000 bp, Homo sapiens
  misc_feature (56)..(58): n is a, c, g, or t
gggatttcctccgggctacaggcgacagagctgagccaagcgtttactgggcacgnnngctcagattccaaatgaaaatgtttgagagcgctgactctacagccacaagatctggccaggatctctgggctgaaatttgttcctgtctgccaaatcctgaacaagaagatggtgccaacaatgcattctcagactcctttgtggattcttgccctgaaggtgaaggccagagggaggtggctgactttgctgtccagccagctgtaaagccttgggctcccttgcaggattcagaagtgtatttagcatctctagccattttattttaaaaatatttcctgaggatgtggcttgagctgtaggcgcggagggccggagacgctgcagacccgcgacccggagcagctcggaggcggtgaataatagctcttcaagtctgcaataaaaaatggcctccaacaaaactacattgcaaaaaatgggaaaaaaacagaatggaaagagtaaaaaagttgaagaggcagagcctgaagaatttgtcgtggaaaaagtactagatcgacgtgtagtgaatgggaaagtggaatatttcctgaagtggaagggatttacagatgctgacaatacttgggaacctgaagaaaatttagattgtccagaattgattgaagcgtttcttaactctcagaaagctggcaaagaaaaagatggtacaaacaaagctgcccaggacctagtgctggcagccggctcatggtccacatgcggatctgcagtaggggtcagctgggggccctcaaccagcaccctgttcctaagcacgtccagatgtatcctcatatccatgtcccttttggcagcttcctggtcaacctgaacctacccttctgcacagcctcgggtggctgctgagggcaatgagtgagctggggccacgggtcagcaggcaggcagggaaggggctcaggaggctcagtctggttgtccggcggctaagtct

SEQ ID NO: 371690 - DNA, 787 bp, Homo sapiens
cgccgcgggggtaggcgcgtgcggtgtggcgcagtgcccttgagcccccgtgccgcggcctttgtttctccccgcggatgcgctgaccacgaggcccgcgctcccgggtgggggcgggcacccgcgcttaggcacgtctggacgccgggcttcagcggcgggggtcgggagcgggtgtttgcaagaggtgattcttttttcaaagtgtcacgaaacggggttgaagcatcttaagttttttccttttgttatttaattaccgattggaaagagggagggtttctgagcagaaaccaagttgggattgcagaacagagaagattcacagtgctttaccgttgtgagttgtttgggtaatcgtgcctggttttaaaccgaaaggattgtcctttaaaaatggaacatggactttattataaatgggacttagattggaaaagacattggtcccctattttaagccatgtgaagctgttttaggtaccaggatccccagtaaagtctttctagactcacatggttaggacacgtacttaagtacatcataagcaatgtaggtaggagcgcagatctactctggatttgtattcacgtttgaaatgtgcgctctctacttgggggttggaatccaaacagaatttgtatttagttgctccctccccaccacgcgccctctctctctctctctcccacgctcccagtcactcccccctcaccgggggagcgcagcagtgggggcggcggcggggggagaagggtaggggcggcaggggacggaggcggccgc

SEQ ID NO: 371691 - DNA, 287 bp, Homo sapiens
tcttttttttttaaactgcaaatttgctacaaggaacgtatattgtatctgcaaatggggaaaatgacagttatttttaaataagcttattacgtattagattaaatcagctgcctgagatgtgtacacagacaccattcagctctactgggcttaaaccacttcttcatttcatgggaggagtgactcaaaataaagtaacgggcaaaattgacacttctgaattcagctgctaatcctctgattgaacaccagccgtattcttccctgggcctggggcacataca

SEQ ID NO: 371692 - DNA, 346 bp, Homo sapiens
aaccttgggggcctcgtcagtcttgggctgccccatgccctgcacagcccgcctgaggtttgaggaaggggcagttggctaggcccagactggagaaagccaccccaccatggctcttctgcaagaacccccggccagccacaagcctaagccccctccttaaaagctcctcctctgaccttagctgtgcatcaagggagaaaagaaagctccaggccgggtgcggtggctcacacctgcaatcccagcactttgggagaccaaggctggcagatcattaggtcaggagttcgagaccagcctggccagcaaggtgaaaccccatctctactaaaattacaaaaaa

SEQ ID NO: 371693 - DNA, 3851 bp, Homo sapiens
gtcgacgagagagagagagagagagaactagtctcggggggccaaagggaaagaagaagaacggaaggaacagagggggcaaagccaacaaccccccgtatttgccccccgaggctgaagatggaaacattgaatataaattgaagctggtgaatccatcccagtaccgctttgagcacctggtgacacaaatgaagtggcggctccaggagggacgtggtgaggccgtctaccagattggggtagaggacaatgggctgctggtggggctggctgaggaggaaatgcgagcttcgctcaagaccctgcaccggatggcagagaaggttggggcagacataaccgttcttcgagagcgagaagtggattatgatagcgacatgccccggaagatcaccgaggtgctagtacgaaaggtccctgacaaccaacagttcctagacctccgtgtggccgtcctggggaatgtggactctgggaagtcaactctgcttggagtcctgacccagggagagctggacaatgggcggggccgggctcggctcaaccttttccgccacctgcatgagattcagtctggccgaacctccagcatcagcttcgagatcctgggctttaacagcaagggagaggtggtgaattacagcgactcacggacagcagaagagatctgtgagagcagctccaagatgatcaccttcatcgacctggcaggccaccataagtacctacacaccaccatctttggcctcacatcatactgccccgactgcgccctgctcctcgtcagtgccaacactgggattgctggcaccacaagggaacatctggggctggccctggccctgaaagtgcccttcttcatcgtggtcagcaagatcgacctatgtgccaagaccacagtggagaggacagtacgccagctggagcgggtcctcaagcagcctggctgccacaaggtccccatgctggtcacctctgaggatgatgccgtcactgctgcccagcagtttgctcagtcacccaatgtcacccccatcttcacattgtccagtgtgtctggagagagtctggacctcctcaaagtctttctgaatattctgccgccactcaccaacagcaaagagcaggaggaactcatgcagcagctgacggagttccaggtggatgaaatctacacagtaccagaggtggggactgttgttggaggaacactttccagtgggatttgccgtgagggggaccagctggtggtgggccccacggatgatggctgcttcctggagctgagagtatgcagcatccagcgcaaccgctctgcctgtcgtgtgctgcgagctggtcaggctgctacactggcgcttggggactttgaccgtgcactgcttcgcaagggcatggtgatggtgagcccggagatgaatcctaccatctgctcggtgtttgaggcagagatagtcttactgttccatgccaccaccttccgacgaggattccaggtgacagtacacgtgggcaacgtacgtcagacggcagtggtggaaaagatccatgccaaggacaaactgcggacaggcgagaaggcagtggtacgtttccgcttcctgaaacacccagagtacctgaaggtgggcgccaaactgctgttccgggagggtgtcaccaagggcatcggccatgtcactgatgtacaagccattacagcaggagaagcccaggccaacatgggcttctgaacccttcaggcagggacagttctattgctgtccctacaatatataaggtgacttctggccatgctgccctgccattggcggctctgtgtgttaataggctagggagagaggggtgctgtctgccacttgctccctgccaactttctggagaggtgccaaacttggtgtggccaggaaagggcagtcctgagggagaagacaggattcagggcagtgctccgaagctgtgtgctcacctggttggctcatcaaacctggcaaccctgtggcctgtctgccggagctgactggatccactcatcaattcttcgtccccactactaagactgggcatgttttgctggtgtggtctctgcacttcaggaatggtcacaacagggggtagccctcaaaagcactcctttttctatacctcttctcaaggccatgtaagttgcccatctctacctggctgtggacaaaaggttatctgctcttggccatctggtggtggtggcggcccagagtctgaagaaatggcacagggacagtgaatggtagtgttgccaccctgtgctgaggcctgaggcctcttcctcagctttatctccctttccttcactcaagggccatttccccagtccctatctcccccatcccctcccggcttataggccccacaggtgctatttgttgtgctggcccaggcgtggggctaccaagcaaaggcttggcatataccaaaggccagctgcatgcccatcagtctggtctttttcctctgcggtcatgttggctttcatgctggatcaaatgttttactttcccagactggtggcatctgagttccccatcctaccactctcaccccactttcctgccccacctaaaccctcgttttagtaatttgtagtgactgttcccttccctctgttgcagggaaccaggaggaaagggaaagatgttgccatatttcctactctttaggcatggactctcctttccctttgttagtgtcctgggttcccatggactcagggatttgttggctaaggtttctctgtgcatatatatatatatacatatgtatatatatttaaatacacatatatattgtacagaataaaaatgttttattgaatacactgtgcttatgcgttacgtacaggctcagcttccttccagggctagatacctcttcaggattagagacaagtgaaaccccaacactgctgagccctgaatgtggaaagagcccagctggtatctcgttcaccattgtttttctctcctccacataggttcagagttccagtattgtaaccaagtattgtggcctattttccgtagttcaagtgagcagaatactgaggcctttcacgtgaaataggtagctaccctgtatttgaagagttggccacttgctagtggtcagaatagtaaggagcccacttctgtgccctggcagagatacagtgccagctacttaaagaagagtagaatttagagacaaaaggtaatctggtcccatatttttcaagtttacatagcctaaattactcttggaacaatgagggccacttgaccaaaccttagtccctgctcctgtttccatgttcatactacttgattttgacattttatgggtaaataggggccaaagtcaactgtaaatagaaactgcattttgaggagaccctggaaaagaaatatgtgacccaaagtcctatgtggcattctgcctctagagtattaaagtgatagcttccctaccactcaggctgttttataaaatgtaactggtttaacttgctactaacaagcctgtagttgaacaacttcctcctgtattaggggctaagctgtttacttcctctctatagctgctgatagagatgaaagctttgtccacaatttacttatcttttgcctgtattgtaaagaaaattttggaaaatcacatttcagtacttaataagacatctccaggaactagtgagcctctctgcaacattaatggaacatttagggggataaaaagtatataaggcagactcccaaggagtttatacatgtttatgatcccaattgtggtaatcagatctaaaattcttcactatatacattcatccaatg

SEQ ID NO: 371694 - DNA, 5191 bp, Homo sapiens
cctgcctcaggtttatttgtacaaatagcacaggaggaccccagccccatgcagatggtagcccaggggcgggggtggggggtcgcaccagtccttctgtcctcatgttggcagagatatctactctgaagcctttgtaggggcctgggtacgtttgggagcctgagctggaactgaagctggggctgcagcctgggccttggtttgatccttggccttggccttggcctttggccggcacagcctgagccccttggcaatacgggcacgattcggggtgggcaatgtaggcaagtcgatcgagcttgcggctgacaccctttgggatcttgggcttaacctccttgggctttacgagggccttgatagcctcggcacgtgcactcatggccttggcattgttggcctgcatcttctttaggccctttttgttgtgcttcttggcaaagcgcatgttcctcaggaacttggggtccacccccttaagagattcgtatctttgtgatcggggtttcttgataccatttctgtgccattttcgggactggttgtgtgtggtgtggttcttggacttggccatgtctgcaccataagccgcggctcccgaagcgacatgccccggaagatcaccgaggtgctagtacgaaaggtccctgacaaccaacagttcctagacctccgtgtggccgtcctggggaatgtggactctgggaagtcaactctgcttggagtcctgacccagggagagctggacaatgggcggggccgggctcggctcaaccttttccgccacctgcatgagattcagtctggccgaacctccagcatcagcttcgagatcctgggctttaacagcaagggagaggtgcatgggatcaatgggacccaatggggccagactctgaggatgggatggtagtagtgaaggacataggatgggggtagagtgtggagactttttgaaatagtatagatgaatgccctgaggggactgtgaacaagctctgcccctcttaggaaatcaatggggaatcaactaaattaaataaaaaatggggtcaagattaagaggcagggtcacccagggaatggtttaggtcctggcaactctgaaggggttggaagggctggcaggaggcactgagggccctgggccctgggccaggtggtgaattacagcgactcacggacagcagaagagatctgtgagagcagctccaagatgatcaccttcatcgacctggcaggccaccataagtacctacacaccaccatctttggcctcacatcatactgccccgactgcgccctgctcctcgtcagtgccaacactgggattgctggcaccacaagggaacatctggggctggccctggccctgaaagtgcccttcttcatcgtggtcagcaagatcgacctatgtgccaagaccacagtggagaggacagtacgccagctggagcgggtcctcaagcagcctggctgccacaaggtccccatgctggtcacctctgaggatgatgccgtcactgctgcccagcagtttgctcagtcacccaatgtcacccccatcttcacattgtccagtgtgtctggagagagtctggacctcctcaaagtctttctgaatattctgccgccactcaccaacagcaaagagcaggaggaactcatgcagcagctgacggagttccaggtggatgaaatctacacagtaccagaggtggggactgttgttggaggaacactttccagattaggctttcactatcagaagagctggagaacggtagtctgttggctttggagggaagaaacagtattgctgcctattggggaatctccaggcccctgagagagaagtgtgggtcttgagctccaggaagaaaactagagtgtattcaactgacttcatctcacacagggaaatgagagacgtcacttaagactcttctttctttctttctttcttttttttgagacagagtctcgctctgttgcccaggctggattgcagtggagcgatcttggctcactgcaacctctgcctcctgggttccagcaattctcctgcctcagccttgagtagctggaattacaggcgcctaccaccatgcccggctaatttttgtatttttagtagagatggggtcgtcaccatattggccaggctggtcttgaattcctgacctcaagtgatccacctgcctcagcctccccaagtgctaggattacaggtgtgagccaacgcggctggcctaagactctgcaaagcagagaatgaaacccaaggggataacttgctccttcagtgattaggtgtcggtgttgttaaaccagcaagtgtctctctgtccaccatcactgctggccttttatgaaattagtcttctgattctgaactctggcagtgagccctgttacatccaagtcagaatttagggttcttccccacttgagggactcaaccctagaagggaaggaatgctctgggtgatcctaatagagaagtaggtatggggaccttggctgacactgtgccacctgccctctgggctgcagtgggatttgccgtgagggggaccagctggtggtgggccccacggatgatggctgcttcctggagctgagagtatgcagcatccagcgcaaccgctctgcctgtcgtgtgctgcgagctggtcaggctgctacactggcgcttggggactttgaccgtgcactgcttcgcaagggcatggtgatggtgagcccggagatgaatcctaccatctgctcggtgtttgaggcagagatagtcttactgttccatgccaccaccttccgacgaggattccaggtgacagtacacgtgggcaacgtacgtcagacggcagtggtggaaaagatccatgccaaggacaaactgcggacaggcgagaaggcagtggtacgtttccgcttcctgaaacacccagagtacctgaaggtgggcgccaaactgctgttccgggagggtgtcaccaagggcatcggccatgtcactgatgtacaagccattacagcaggagaagcccaggccaacatgggcttctgaacccttcaggcagggacagttctattgctgtccctacaatatataaggtgacttctggccatgctgccctgccattggcggctctgtgtgttaataggctagggagagaggggtgctgtctgccacttgctccctgccaactttctggagaggtgccaaacttggtgtggccaggaaagggcagtcctgagggagaagacaggattcagggcagtgctccgaagctgtgtgctcacctggttggctcatcaaacctggcaaccctgtggcctgtctgccggagctgactggatccactcatcaattcttcgtccccactactaagactgggcatgttttgctggtgtggtctctgcacttcaggaatggtcacaacagggggtagccctcaaaagcactcctttttctatacctcttctcaaggccatgtaagttgcccatctctacctggctgtggacaaaaggttatctgctcttggccatctggtggtggtggcggcccagagtctgaagaaatggcacagggacagtgaatggtagtgttgccaccctgtgctgaggcctgaggcctcttcctcagctttatctccctttccttcactcaagggccatttccccagtccctatctcccccatcccctcccggcttataggccccacaggtgctatttgttgtgctggcccaggcgtggggctaccaagcaaaggcttggcatataccaaaggccagctgcatgcccatcagtctggtctttttcctctgcggtcatgttggctttcatgctggatcaaatgttttactttcccagactggtggcatctgagttccccatcctaccactctcaccccactttcctgccccacctaaaccctcgttttagtaatttgtagtgactgttcccttccctctgttgcagggaaccaggaggaaagggaaagatgttgccatatttcctactctttaggcatggactctcctttccctttgttagtgtcctgggttcccatggactcagggatttgttggctaaggtttctctgtgcatatatatatatatacatatgtatatatatttaaatacacatatatattgtacagaataaaaatgttttattgaatacactgtgcttatgcgttacgtacaggctcagcttccttccagggctagatacctcttcaggattagagacaagtgaaaccccaacactgctgagccctgaatgtggaaagagcccagctggtatctcgttcaccattgtttttctctcctccacataggttcagagttccagtattgtaaccaagtattgtggcctattttccgtagttcaagtgagcagaatactgaggcctttcacgtgaaataggtagctaccctgtatttgaagagttggccacttgctagtggtcagaatagtaaggagcccacttctgtgccctggcagagatacagtgccagctacttaaagaagagtagaatttagagacaaaaggtaatctggtcccatatttttcaagtttacatagcctaaattactcttggaacaatgagggccacttgaccaaaccttagtccctgctcctgtttccatgttcatactacttgattttgacattttatgggtaaataggggccaaagtcaactgtaaatagaaactgcattttgaggagaccctggaaaagaaatatgtgacccaaagtcctatgtggcattctgcctctagagtattaaagtgatagcttccctaccactcaggctgttttataaaatgtaactggtttaacttgctactaacaagcctgtagttgaacaacttcctcctgtattaggggctaagctgtttacttcctctctatagctgctgatagagatgaaagctttgtccacaatttacttatcttttgcctgtattgtaaagaaaattttggaaaatcacatttcagtacttaataagacatctccaggaactagtgagcctctctgcaacattaatggaacatttagggggataaaaagtatataaggcagactcccaaggagtttatacatgtttatgatcccaattgtggtaatcagatctaaaattcttcactatatacattcatccaatg

SEQ ID NO: 371695 - DNA, 4628 bp, Homo sapiens
cccagggaggaggggcacgggaggagaacacctctttcaggtcccgggaccccagggaggaagggcagagactggactctcaggctgaagatggaaacattgaatataaattgaagctggtgaatccatcccagtaccgctttgagcacctggtgacacaaatgaagtggcggctccaggagggacgtggtgaggccgtctaccagattggggtagaggacaatgggctgctggtggggctggctgaggaggaaatgcgagcttcgctcaagaccctgcaccggatggcagagaaggttggggcagacataaccgttcttcgagagcgagaagtggattatgatagcgacatgccccggaagatcaccgaggtgctagtacgaaaggtccctgacaaccaacagttcctagacctccgtgtggccgtcctggggaatgtggactctgggaagtcaactctgcttggagtcctgacccagggagagctggacaatgggcggggccgggctcggctcaaccttttccgccacctgcatgagattcagtctggccgaacctccagcatcagcttcgagatcctgggctttaacagcaagggagaggtggtgaattacagcgactcacggacagcagaagagatctgtgagagcagctccaagatgatcaccttcatcgacctggcaggccaccataagtacctacacaccaccatctttggcctcacatcatactgccccgactgcgccctgctcctcgtcagtgccaacactgggattgctggcaccacaagggaacatctggggctggccctggccctgaaagtgcccttcttcatcgtggtcagcaagatcgacctatgtgccaagaccacagtggagaggacagtacgccagctggagcgggtcctcaagcagcctggctgccacaaggtccccatgctggtcacctctgaggatgatgccgtcactgctgcccagcagtttgctcagtcacccaatgtcacccccatcttcacattgtccagtgtgtctggagagagtctggacctcctcaaagtctttctgaatattctgccgccactcaccaacagcaaagagcaggaggaactcatgcagcagctgacggagttccaggtggatgaaatctacacagtaccagaggtggggactgttgttggaggaacactttccagattaggctttcactatcagaagagctggagaacggtagtctgttggctttggagggaagaaacagtattgctgcctattggggaatctccaggcccctgagagagaagtgtgggtcttgagctccaggaagaaaactagagtgtattcaactgacttcatctcacacagggaaatgagagacgtcacttaagactcttctttctttctttctttcttttttttgagacagagtctcgctctgttgcccaggctggattgcagtggagcgatcttggctcactgcaacctctgcctcctgggttccagcaattctcctgcctcagccttgagtagctggaattacaggcgcctaccaccatgcccggctaatttttgtatttttagtagagatggggtcgtcaccatattggccaggctggtcttgaattcctgacctcaagtgatccacctgcctcagcctccccaagtgctaggattacaggtgtgagccaacgcggctggcctaagactctgcaaagcagagaatgaaacccaaggggataacttgctccttcagtgattaggtgtcggtgttgttaaaccagcaagtgtctctctgtccaccatcactgctggccttttatgaaattagtcttctgattctgaactctggcagtgagccctgttacatccaagtcagaatttagggttcttccccacttgagggactcaaccctagaagggaaggaatgctctgggtgatcctaatagagaagtaggtatggggaccttggctgacactgtgccacctgccctctgggctgcagtgggatttgccgtgagggggaccagctggtggtgggccccacggatgatggctgcttcctggagctgagagtatgcagcatccagcgcaaccgctctgcctgtcgtgtgctgcgagctggtcaggctgctacactggcgcttggggactttgaccgtgcactgcttcgcaagggcatggtgatggtgagcccggagatgaatcctaccatctgctcggtgtttgaggcagagatagtcttactgttccatgccaccaccttccgacgaggattccaggtgacagtacacgtgggcaacgtacgtcagacggcagtggtggaaaagatccatgccaaggacaaactgcggacaggcgagaaggcagtggtacgtttccgcttcctgaaacacccagagtacctgaaggtgggcgccaaactgctgttccgggagggtgtcaccaagggcatcggccatgtcactgatgtacaagccattacagcaggagaagcccaggccaacatgggcttctgaacccttcaggcagggacagttctattgctgtccctacaatatataaggtgacttctggccatgctgccctgccattggcggctctgtgtgttaataggctagggagagaggggtgctgtctgccacttgctccctgccaactttctggagaggtgccaaacttggtgtggccaggaaagggcagtcctgagggagaagacaggattcagggcagtgctccgaagctgtgtgctcacctggttggctcatcaaacctggcaaccctgtggcctgtctgccggagctgactggatccactcatcaattcttcgtccccactactaagactgggcatgttttgctggtgtggtctctgcacttcaggaatggtcacaacagggggtagccctcaaaagcactcctttttctatacctcttctcaaggccatgtaagttgcccatctctacctggctgtggacaaaaggttatctgctcttggccatctggtggtggtggcggcccagagtctgaagaaatggcacagggacagtgaatggtagtgttgccaccctgtgctgaggcctgaggcctcttcctcagctttatctccctttccttcactcaagggccatttccccagtccctatctcccccatcccctcccggcttataggccccacaggtgctatttgttgtgctggcccaggcgtggggctaccaagcaaaggcttggcatataccaaaggccagctgcatgcccatcagtctggtctttttcctctgcggtcatgttggctttcatgctggatcaaatgttttactttcccagactggtggcatctgagttccccatcctaccactctcaccccactttcctgccccacctaaaccctcgttttagtaatttgtagtgactgttcccttccctctgttgcagggaaccaggaggaaagggaaagatgttgccatatttcctactctttaggcatggactctcctttccctttgttagtgtcctgggttcccatggactcagggatttgttggctaaggtttctctgtgcatatatatatatatacatatgtatatatatttaaatacacatatatattgtacagaataaaaatgttttattgaatacactgtgcttatgcgttacgtacaggctcagcttccttccagggctagatacctcttcaggattagagacaagtgaaaccccaacactgctgagccctgaatgtggaaagagcccagctggtatctcgttcaccattgtttttctctcctccacataggttcagagttccagtattgtaaccaagtattgtggcctattttccgtagttcaagtgagcagaatactgaggcctttcacgtgaaataggtagctaccctgtatttgaagagttggccacttgctagtggtcagaatagtaaggagcccacttctgtgccctggcagagatacagtgccagctacttaaagaagagtagaatttagagacaaaaggtaatctggtcccatatttttcaagtttacatagcctaaattactcttggaacaatgagggccacttgaccaaaccttagtccctgctcctgtttccatgttcatactacttgattttgacattttatgggtaaataggggccaaagtcaactgtaaatagaaactgcattttgaggagaccctggaaaagaaatatgtgacccaaagtcctatgtggcattctgcctctagagtattaaagtgatagcttccctaccactcaggctgttttataaaatgtaactggtttaacttgctactaacaagcctgtagttgaacaacttcctcctgtattaggggctaagctgtttacttcctctctatagctgctgatagagatgaaagctttgtccacaatttacttatcttttgcctgtattgtaaagaaaattttggaaaatcacatttcagtacttaataagacatctccaggaactagtgagcctctctgcaacattaatggaacatttagggggataaaaagtatataaggcagactcccaaggagtttatacatgtttatgatcccaattgtggtaatcagatctaaaattcttcactatatacattcatccaatg

SEQ ID NO: 371696 - DNA, 5107 bp, Homo sapiens
cagtggcagtaagggcggcggcgacggcggcggcggtcgggggaggggccgggcggggggctggcggcagcggcggatggactcgcgggtatcggagctgttcggcggctgctgccggcccggagggggcccggccgtgggcggaaccctcaaggctaggggggccggcagcagcagcggctgcggggggccaaagggaaagaagaagaacggaaggaacagagggggcaaagccaacaaccccccgtatttgccccccgaggctgaagatggaaacattgaatataaattgaagctggtgaatccatcccagtaccgctttgagcacctggtgacacaaatgaagtggcggctccaggagggacgtggtgaggccgtctaccagattggggtagaggacaatgggctgctggtggggctggctgaggaggaaatgcgagcttcgctcaagaccctgcaccggatggcagagaaggttggggcagacataaccgttcttcgagagcgagaagtggattatgatagcgacatgccccggaagatcaccgaggtgctagtacgaaaggtccctgacaaccaacagttcctagacctccgtgtggccgtcctggggaatgtggactctgggaagtcaactctgcttggagtcctgacccagggagagctggacaatgggcggggccgggctcggctcaaccttttccgccacctgcatgagattcagtctggccgaacctccagcatcagcttcgagatcctgggctttaacagcaagggagaggtgcatgggatcaatgggacccaatggggccagactctgaggatgggatggtagtagtgaaggacataggatgggggtagagtgtggagactttttgaaatagtatagatgaatgccctgaggggactgtgaacaagctctgcccctcttaggaaatcaatggggaatcaactaaattaaataaaaaatggggtcaagattaagaggcagggtcacccagggaatggtttaggtcctggcaactctgaaggggttggaagggctggcaggaggcactgagggccctgggccctgggccaggtggtgaattacagcgactcacggacagcagaagagatctgtgagagcagctccaagatgatcaccttcatcgacctggcaggccaccataagtacctacacaccaccatctttggcctcacatcatactgccccgactgcgccctgctcctcgtcagtgccaacactgggattgctggcaccacaagggaacatctggggctggccctggccctgaaagtgcccttcttcatcgtggtcagcaagatcgacctatgtgccaagaccacagtggagaggacagtacgccagctggagcgggtcctcaagcagcctggctgccacaaggtccccatgctggtcacctctgaggatgatgccgtcactgctgcccagcagtttgctcagtcacccaatgtcacccccatcttcacattgtccagtgtgtctggagagagtctggacctcctcaaagtctttctgaatattctgccgccactcaccaacagcaaagagcaggaggaactcatgcagcagctgacggagttccaggtggatgaaatctacacagtaccagaggtggggactgttgttggaggaacactttccagattaggctttcactatcagaagagctggagaacggtagtctgttggctttggagggaagaaacagtattgctgcctattggggaatctccaggcccctgagagagaagtgtgggtcttgagctccaggaagaaaactagagtgtattcaactgacttcatctcacacagggaaatgagagacgtcacttaagactcttctttctttctttctttcttttttttgagacagagtctcgctctgttgcccaggctggattgcagtggagcgatcttggctcactgcaacctctgcctcctgggttccagcaattctcctgcctcagccttgagtagctggaattacaggcgcctaccaccatgcccggctaatttttgtatttttagtagagatggggtcgtcaccatattggccaggctggtcttgaattcctgacctcaagtgatccacctgcctcagcctccccaagtgctaggattacaggtgtgagccaacgcggctggcctaagactctgcaaagcagagaatgaaacccaaggggataacttgctccttcagtgattaggtgtcggtgttgttaaaccagcaagtgtctctctgtccaccatcactgctggccttttatgaaattagtcttctgattctgaactctggcagtgagccctgttacatccaagtcagaatttagggttcttccccacttgagggactcaaccctagaagggaaggaatgctctgggtgatcctaatagagaagtaggtatggggaccttggctgacactgtgccacctgccctctgggctgcagtgggatttgccgtgagggggaccagctggtggtgggccccacggatgatggctgcttcctggagctgagagtatgcagcatccagcgcaaccgctctgcctgtcgtgtgctgcgagctggtcaggctgctacactggcgcttggggactttgaccgtgcactgcttcgcaagggcatggtgatggtgagcccggagatgaatcctaccatctgctcggtgtttgaggcagagatagtcttactgttccatgccaccaccttccgacgaggattccaggtgacagtacacgtgggcaacgtacgtcagacggcagtggtggaaaagatccatgccaaggacaaactgcggacaggcgagaaggcagtggtacgtttccgcttcctgaaacacccagagtacctgaaggtgggcgccaaactgctgttccgggagggtgtcaccaagggcatcggccatgtcactgatgtacaagccattacagcaggagaagcccaggccaacatgggcttctgaacccttcaggcagggacagttctattgctgtccctacaatatataaggtgacttctggccatgctgccctgccattggcggctctgtgtgttaataggctagggagagaggggtgctgtctgccacttgctccctgccaactttctggagaggtgccaaacttggtgtggccaggaaagggcagtcctgagggagaagacaggattcagggcagtgctccgaagctgtgtgctcacctggttggctcatcaaacctggcaaccctgtggcctgtctgccggagctgactggatccactcatcaattcttcgtccccactactaagactgggcatgttttgctggtgtggtctctgcacttcaggaatggtcacaacagggggtagccctcaaaagcactcctttttctatacctcttctcaaggccatgtaagttgcccatctctacctggctgtggacaaaaggttatctgctcttggccatctggtggtggtggcggcccagagtctgaagaaatggcacagggacagtgaatggtagtgttgccaccctgtgctgaggcctgaggcctcttcctcagctttatctccctttccttcactcaagggccatttccccagtccctatctcccccatcccctcccggcttataggccccacaggtgctatttgttgtgctggcccaggcgtggggctaccaagcaaaggcttggcatataccaaaggccagctgcatgcccatcagtctggtctttttcctctgcggtcatgttggctttcatgctggatcaaatgttttactttcccagactggtggcatctgagttccccatcctaccactctcaccccactttcctgccccacctaaaccctcgttttagtaatttgtagtgactgttcccttccctctgttgcagggaaccaggaggaaagggaaagatgttgccatatttcctactctttaggcatggactctcctttccctttgttagtgtcctgggttcccatggactcagggatttgttggctaaggtttctctgtgcatatatatatatatacatatgtatatatatttaaatacacatatatattgtacagaataaaaatgttttattgaatacactgtgcttatgcgttacgtacaggctcagcttccttccagggctagatacctcttcaggattagagacaagtgaaaccccaacactgctgagccctgaatgtggaaagagcccagctggtatctcgttcaccattgtttttctctcctccacataggttcagagttccagtattgtaaccaagtattgtggcctattttccgtagttcaagtgagcagaatactgaggcctttcacgtgaaataggtagctaccctgtatttgaagagttggccacttgctagtggtcagaatagtaaggagcccacttctgtgccctggcagagatacagtgccagctacttaaagaagagtagaatttagagacaaaaggtaatctggtcccatatttttcaagtttacatagcctaaattactcttggaacaatgagggccacttgaccaaaccttagtccctgctcctgtttccatgttcatactacttgattttgacattttatgggtaaataggggccaaagtcaactgtaaatagaaactgcattttgaggagaccctggaaaagaaatatgtgacccaaagtcctatgtggcattctgcctctagagtattaaagtgatagcttccctaccactcaggctgttttataaaatgtaactggtttaacttgctactaacaagcctgtagttgaacaacttcctcctgtattaggggctaagctgtttacttcctctctatagctgctgatagagatgaaagctttgtccacaatttacttatcttttgcctgtattgtaaagaaaattttggaaaatcacatttcagtacttaataagacatctccaggaactagtgagcctctctgcaacattaatggaacatttagggggataaaaagtatataaggcagactcccaaggagtttatacatgtttatgatcccaattgtggtaatcagatctaaaattcttcactatatacattcatccaatg

SEQ ID NO: 371697 - DNA, 4783 bp, Homo sapiens
cagtggcagtaagggcggcggcgacggcggcggcggtcgggggaggggccgggcggggggctggcggcagcggcggatggactcgcgggtatcggagctgttcggcggctgctgccggcccggagggggcccggccgtgggcggaaccctcaaggctaggggggccggcagcagcagcggctgcggggggccaaagggaaagaagaagaacggaaggaacagagggggcaaagccaacaaccccccgtatttgccccccgaggctgaagatggaaacattgaatataaataccgctttgagcacctggtgacacaaatgaagtggcggctccaggagggacgtggtgaggccgtctaccagattggggtagaggacaatgggctgctggtggggctggctgaggaggaaatgcgagcttcgctcaagaccctgcaccggatggcagagaaggttggggcagacataaccgttcttcgagagcgagaagtggattatgatagcgacatgccccggaagatcaccgaggtgctagtacgaaaggtccctgacaaccaacagttcctagacctccgtgtggccgtcctggggaatgtggactctgggaagtcaactctgcttggagtcctgacccagggagagctggacaatgggcggggccgggctcggctcaaccttttccgccacctgcatgagattcagtctggccgaacctccagcatcagcttcgagatcctgggctttaacagcaagggagaggtggtgaattacagcgactcacggacagcagaagagatctgtgagagcagctccaagatgatcaccttcatcgacctggcaggccaccataagtacctacacaccaccatctttggcctcacatcatactgccccgactgcgccctgctcctcgtcagtgccaacactgggattgctggcaccacaagggaacatctggggctggccctggccctgaaagtgcccttcttcatcgtggtcagcaagatcgacctatgtgccaagaccacagtggagaggacagtacgccagctggagcgggtcctcaagcagcctggctgccacaaggtccccatgctggtcacctctgaggatgatgccgtcactgctgcccagcagtttgctcagtcacccaatgtcacccccatcttcacattgtccagtgtgtctggagagagtctggacctcctcaaagtctttctgaatattctgccgccactcaccaacagcaaagagcaggaggaactcatgcagcagctgacggagttccaggtggatgaaatctacacagtaccagaggtggggactgttgttggaggaacactttccagattaggctttcactatcagaagagctggagaacggtagtctgttggctttggagggaagaaacagtattgctgcctattggggaatctccaggcccctgagagagaagtgtgggtcttgagctccaggaagaaaactagagtgtattcaactgacttcatctcacacagggaaatgagagacgtcacttaagactcttctttctttctttctttcttttttttgagacagagtctcgctctgttgcccaggctggattgcagtggagcgatcttggctcactgcaacctctgcctcctgggttccagcaattctcctgcctcagccttgagtagctggaattacaggcgcctaccaccatgcccggctaatttttgtatttttagtagagatggggtcgtcaccatattggccaggctggtcttgaattcctgacctcaagtgatccacctgcctcagcctccccaagtgctaggattacaggtgtgagccaacgcggctggcctaagactctgcaaagcagagaatgaaacccaaggggataacttgctccttcagtgattaggtgtcggtgttgttaaaccagcaagtgtctctctgtccaccatcactgctggccttttatgaaattagtcttctgattctgaactctggcagtgagccctgttacatccaagtcagaatttagggttcttccccacttgagggactcaaccctagaagggaaggaatgctctgggtgatcctaatagagaagtaggtatggggaccttggctgacactgtgccacctgccctctgggctgcagtgggatttgccgtgagggggaccagctggtggtgggccccacggatgatggctgcttcctggagctgagagtatgcagcatccagcgcaaccgctctgcctgtcgtgtgctgcgagctggtcaggctgctacactggcgcttggggactttgaccgtgcactgcttcgcaagggcatggtgatggtgagcccggagatgaatcctaccatctgctcggtgtttgaggcagagatagtcttactgttccatgccaccaccttccgacgaggattccaggtgacagtacacgtgggcaacgtacgtcagacggcagtggtggaaaagatccatgccaaggacaaactgcggacaggcgagaaggcagtggtacgtttccgcttcctgaaacacccagagtacctgaaggtgggcgccaaactgctgttccgggagggtgtcaccaagggcatcggccatgtcactgatgtacaagccattacagcaggagaagcccaggccaacatgggcttctgaacccttcaggcagggacagttctattgctgtccctacaatatataaggtgacttctggccatgctgccctgccattggcggctctgtgtgttaataggctagggagagaggggtgctgtctgccacttgctccctgccaactttctggagaggtgccaaacttggtgtggccaggaaagggcagtcctgagggagaagacaggattcagggcagtgctccgaagctgtgtgctcacctggttggctcatcaaacctggcaaccctgtggcctgtctgccggagctgactggatccactcatcaattcttcgtccccactactaagactgggcatgttttgctggtgtggtctctgcacttcaggaatggtcacaacagggggtagccctcaaaagcactcctttttctatacctcttctcaaggccatgtaagttgcccatctctacctggctgtggacaaaaggttatctgctcttggccatctggtggtggtggcggcccagagtctgaagaaatggcacagggacagtgaatggtagtgttgccaccctgtgctgaggcctgaggcctcttcctcagctttatctccctttccttcactcaagggccatttccccagtccctatctcccccatcccctcccggcttataggccccacaggtgctatttgttgtgctggcccaggcgtggggctaccaagcaaaggcttggcatataccaaaggccagctgcatgcccatcagtctggtctttttcctctgcggtcatgttggctttcatgctggatcaaatgttttactttcccagactggtggcatctgagttccccatcctaccactctcaccccactttcctgccccacctaaaccctcgttttagtaatttgtagtgactgttcccttccctctgttgcagggaaccaggaggaaagggaaagatgttgccatatttcctactctttaggcatggactctcctttccctttgttagtgtcctgggttcccatggactcagggatttgttggctaaggtttctctgtgcatatatatatatatacatatgtatatatatttaaatacacatatatattgtacagaataaaaatgttttattgaatacactgtgcttatgcgttacgtacaggctcagcttccttccagggctagatacctcttcaggattagagacaagtgaaaccccaacactgctgagccctgaatgtggaaagagcccagctggtatctcgttcaccattgtttttctctcctccacataggttcagagttccagtattgtaaccaagtattgtggcctattttccgtagttcaagtgagcagaatactgaggcctttcacgtgaaataggtagctaccctgtatttgaagagttggccacttgctagtggtcagaatagtaaggagcccacttctgtgccctggcagagatacagtgccagctacttaaagaagagtagaatttagagacaaaaggtaatctggtcccatatttttcaagtttacatagcctaaattactcttggaacaatgagggccacttgaccaaaccttagtccctgctcctgtttccatgttcatactacttgattttgacattttatgggtaaataggggccaaagtcaactgtaaatagaaactgcattttgaggagaccctggaaaagaaatatgtgacccaaagtcctatgtggcattctgcctctagagtattaaagtgatagcttccctaccactcaggctgttttataaaatgtaactggtttaacttgctactaacaagcctgtagttgaacaacttcctcctgtattaggggctaagctgtttacttcctctctatagctgctgatagagatgaaagctttgtccacaatttacttatcttttgcctgtattgtaaagaaaattttggaaaatcacatttcagtacttaataagacatctccaggaactagtgagcctctctgcaacattaatggaacatttagggggataaaaagtatataaggcagactcccaaggagtttatacatgtttatgatcccaattgtggtaatcagatctaaaattcttcactatatacattcatccaatg

SEQ ID NO: 371698 - DNA, 3025 bp, Homo sapiens
ccgcatcactcacccatcattaagatcccccacggctgcctgccctaagccctctcactgtcacaaatcgactattccaaacccattgagagacatacccactgtacggtcccaaaaacctggctgccacaaggtccccatgctggtcacctctgaggatgatgccgtcactgctgcccagcagtttgctcagtcacccaatgtcacccccatcttcacattgtccagtgtgtctggagagagtctggacctcctcaaagtctttctgaatattctgccgccactcaccaacagcaaagagcaggaggaactcatgcagcagctgacggagttccaggtggatgaaatctacacagtaccagaggtggggactgttgttggaggaacactttccagtgggatttgccgtgagggggaccagctggtggtgggccccacggatgatggctgcttcctggagctgagagtatgcagcatccagcgcaaccgctctgcctgtcgtgtgctgcgagctggtcaggctgctacactggcgcttggggactttgaccgtgcactgcttcgcaagggcatggtgatggtgagcccggagatgaatcctaccatctgctcggtgtttgaggcagagatagtcttactgttccatgccaccaccttccgacgaggattccaggtgacagtacacgtgggcaacgtacgtcagacggcagtggtggaaaagatccatgccaaggacaaactgcggacaggcgagaaggcagtggtacgtttccgcttcctgaaacacccagagtacctgaaggtgggcgccaaactgctgttccgggagggtgtcaccaagggcatcggccatgtcactgatgtacaagccattacagcaggagaagcccaggccaacatgggcttctgaacccttcaggcagggacagttctattgctgtccctacaatatataaggtgacttctggccatgctgccctgccattggcggctctgtgtgttaataggctagggagagaggggtgctgtctgccacttgctccctgccaactttctggagaggtgccaaacttggtgtggccaggaaagggcagtcctgagggagaagacaggattcagggcagtgctccgaagctgtgtgctcacctggttggctcatcaaacctggcaaccctgtggcctgtctgccggagctgactggatccactcatcaattcttcgtccccactactaagactgggcatgttttgctggtgtggtctctgcacttcaggaatggtcacaacagggggtagccctcaaaagcactcctttttctatacctcttctcaaggccatgtaagttgcccatctctacctggctgtggacaaaaggttatctgctcttggccatctggtggtggtggcggcccagagtctgaagaaatggcacagggacagtgaatggtagtgttgccaccctgtgctgaggcctgaggcctcttcctcagctttatctccctttccttcactcaagggccatttccccagtccctatctcccccatcccctcccggcttataggccccacaggtgctatttgttgtgctggcccaggcgtggggctaccaagcaaaggcttggcatataccaaaggccagctgcatgcccatcagtctggtctttttcctctgcggtcatgttggctttcatgctggatcaaatgttttactttcccagactggtggcatctgagttccccatcctaccactctcaccccactttcctgccccacctaaaccctcgttttagtaatttgtagtgactgttcccttccctctgttgcagggaaccaggaggaaagggaaagatgttgccatatttcctactctttaggcatggactctcctttccctttgttagtgtcctgggttcccatggactcagggatttgttggctaaggtttctctgtgcatatatatatatatacatatgtatatatatttaaatacacatatatattgtacagaataaaaatgttttattgaatacactgtgcttatgcgttacgtacaggctcagcttccttccagggctagatacctcttcaggattagagacaagtgaaaccccaacactgctgagccctgaatgtggaaagagcccagctggtatctcgttcaccattgtttttctctcctccacataggttcagagttccagtattgtaaccaagtattgtggcctattttccgtagttcaagtgagcagaatactgaggcctttcacgtgaaataggtagctaccctgtatttgaagagttggccacttgctagtggtcagaatagtaaggagcccacttctgtgccctggcagagatacagtgccagctacttaaagaagagtagaatttagagacaaaaggtaatctggtcccatatttttcaagtttacatagcctaaattactcttggaacaatgagggccacttgaccaaaccttagtccctgctcctgtttccatgttcatactacttgattttgacattttatgggtaaataggggccaaagtcaactgtaaatagaaactgcattttgaggagaccctggaaaagaaatatgtgacccaaagtcctatgtggcattctgcctctagagtattaaagtgatagcttccctaccactcaggctgttttataaaatgtaactggtttaacttgctactaacaagcctgtagttgaacaacttcctcctgtattaggggctaagctgtttacttcctctctatagctgctgatagagatgaaagctttgtccacaatttacttatcttttgcctgtattgtaaagaaaattttggaaaatcacatttcagtacttaataagacatctccaggaactagtgagcctctctgcaacattaatggaacatttagggggataaaaagtatataaggcagactcccaaggagtttatacatgtttatgatcccaattgtggtaatcagatctaaaattcttcactatatacattcatccaatg

SEQ ID NO: 371699 - DNA, 2445 bp, Homo sapiens
gagagtgcaagagattgaagagttcaactctgaccaagatgttgatgttggatacgagaattctctgctccccacctctaagttgcccgccaatcgaatcgataggtgggcaacgtacgtcagacggcagtggtggaaaagatccatgccaaggacaaactgcggacaggcgagaaggcagtggtacgtttccgcttcctgaaacacccagagtacctgaaggtgggcgccaaactgctgttccgggagggtgtcaccaagggcatcggccatgtcactgatgtacaagccattacagcaggagaagcccaggccaacatgggcttctgaacccttcaggcagggacagttctattgctgtccctacaatatataaggtgacttctggccatgctgccctgccattggcggctctgtgtgttaataggctagggagagaggggtgctgtctgccacttgctccctgccaactttctggagaggtgccaaacttggtgtggccaggaaagggcagtcctgagggagaagacaggattcagggcagtgctccgaagctgtgtgctcacctggttggctcatcaaacctggcaaccctgtggcctgtctgccggagctgactggatccactcatcaattcttcgtccccactactaagactgggcatgttttgctggtgtggtctctgcacttcaggaatggtcacaacagggggtagccctcaaaagcactcctttttctatacctcttctcaaggccatgtaagttgcccatctctacctggctgtggacaaaaggttatctgctcttggccatctggtggtggtggcggcccagagtctgaagaaatggcacagggacagtgaatggtagtgttgccaccctgtgctgaggcctgaggcctcttcctcagctttatctccctttccttcactcaagggccatttccccagtccctatctcccccatcccctcccggcttataggccccacaggtgctatttgttgtgctggcccaggcgtggggctaccaagcaaaggcttggcatataccaaaggccagctgcatgcccatcagtctggtctttttcctctgcggtcatgttggctttcatgctggatcaaatgttttactttcccagactggtggcatctgagttccccatcctaccactctcaccccactttcctgccccacctaaaccctcgttttagtaatttgtagtgactgttcccttccctctgttgcagggaaccaggaggaaagggaaagatgttgccatatttcctactctttaggcatggactctcctttccctttgttagtgtcctgggttcccatggactcagggatttgttggctaaggtttctctgtgcatatatatatatatacatatgtatatatatttaaatacacatatatattgtacagaataaaaatgttttattgaatacactgtgcttatgcgttacgtacaggctcagcttccttccagggctagatacctcttcaggattagagacaagtgaaaccccaacactgctgagccctgaatgtggaaagagcccagctggtatctcgttcaccattgtttttctctcctccacataggttcagagttccagtattgtaaccaagtattgtggcctattttccgtagttcaagtgagcagaatactgaggcctttcacgtgaaataggtagctaccctgtatttgaagagttggccacttgctagtggtcagaatagtaaggagcccacttctgtgccctggcagagatacagtgccagctacttaaagaagagtagaatttagagacaaaaggtaatctggtcccatatttttcaagtttacatagcctaaattactcttggaacaatgagggccacttgaccaaaccttagtccctgctcctgtttccatgttcatactacttgattttgacattttatgggtaaataggggccaaagtcaactgtaaatagaaactgcattttgaggagaccctggaaaagaaatatgtgacccaaagtcctatgtggcattctgcctctagagtattaaagtgatagcttccctaccactcaggctgttttataaaatgtaactggtttaacttgctactaacaagcctgtagttgaacaacttcctcctgtattaggggctaagctgtttacttcctctctatagctgctgatagagatgaaagctttgtccacaatttacttatcttttgcctgtattgtaaagaaaattttggaaaatcacatttcagtacttaataagacatctccaggaactagtgagcctctctgcaacattaatggaacatttagggggataaaaagtatataaggcagactcccaaggagtttatacatgtttatgatcccaattgtggtaatcagatctaaaattcttcactatatacattcatccaatg

SEQ ID NO: 371700 - DNA, 2471 bp, Homo sapiens
gtcagaaaagagggaggcctgccccagactggcagagaactccttgatcccacaatgggaataaaaccccacttagggtgggtagcggcctgataggcctctggagggtggagagccacggctggcagagaatgggacagaaggcactggccaggggagtgaccacttatttgctgcaggacaaactgcggacaggcgagaaggcagtggtacgtttccgcttcctgaaacacccagagtacctgaaggtgggcgccaaactgctgttccgggagggtgtcaccaagggcatcggccatgtcactgatgtacaagccattacagcaggagaagcccaggccaacatgggcttctgaacccttcaggcagggacagttctattgctgtccctacaatatataaggtgacttctggccatgctgccctgccattggcggctctgtgtgttaataggctagggagagaggggtgctgtctgccacttgctccctgccaactttctggagaggtgccaaacttggtgtggccaggaaagggcagtcctgagggagaagacaggattcagggcagtgctccgaagctgtgtgctcacctggttggctcatcaaacctggcaaccctgtggcctgtctgccggagctgactggatccactcatcaattcttcgtccccactactaagactgggcatgttttgctggtgtggtctctgcacttcaggaatggtcacaacagggggtagccctcaaaagcactcctttttctatacctcttctcaaggccatgtaagttgcccatctctacctggctgtggacaaaaggttatctgctcttggccatctggtggtggtggcggcccagagtctgaagaaatggcacagggacagtgaatggtagtgttgccaccctgtgctgaggcctgaggcctcttcctcagctttatctccctttccttcactcaagggccatttccccagtccctatctcccccatcccctcccggcttataggccccacaggtgctatttgttgtgctggcccaggcgtggggctaccaagcaaaggcttggcatataccaaaggccagctgcatgcccatcagtctggtctttttcctctgcggtcatgttggctttcatgctggatcaaatgttttactttcccagactggtggcatctgagttccccatcctaccactctcaccccactttcctgccccacctaaaccctcgttttagtaatttgtagtgactgttcccttccctctgttgcagggaaccaggaggaaagggaaagatgttgccatatttcctactctttaggcatggactctcctttccctttgttagtgtcctgggttcccatggactcagggatttgttggctaaggtttctctgtgcatatatatatatatacatatgtatatatatttaaatacacatatatattgtacagaataaaaatgttttattgaatacactgtgcttatgcgttacgtacaggctcagcttccttccagggctagatacctcttcaggattagagacaagtgaaaccccaacactgctgagccctgaatgtggaaagagcccagctggtatctcgttcaccattgtttttctctcctccacataggttcagagttccagtattgtaaccaagtattgtggcctattttccgtagttcaagtgagcagaatactgaggcctttcacgtgaaataggtagctaccctgtatttgaagagttggccacttgctagtggtcagaatagtaaggagcccacttctgtgccctggcagagatacagtgccagctacttaaagaagagtagaatttagagacaaaaggtaatctggtcccatatttttcaagtttacatagcctaaattactcttggaacaatgagggccacttgaccaaaccttagtccctgctcctgtttccatgttcatactacttgattttgacattttatgggtaaataggggccaaagtcaactgtaaatagaaactgcattttgaggagaccctggaaaagaaatatgtgacccaaagtcctatgtggcattctgcctctagagtattaaagtgatagcttccctaccactcaggctgttttataaaatgtaactggtttaacttgctactaacaagcctgtagttgaacaacttcctcctgtattaggggctaagctgtttacttcctctctatagctgctgatagagatgaaagctttgtccacaatttacttatcttttgcctgtattgtaaagaaaattttggaaaatcacatttcagtacttaataagacatctccaggaactagtgagcctctctgcaacattaatggaacatttagggggataaaaagtatataaggcagactcccaaggagtttatacatgtttatgatcccaattgtggtaatcagatctaaaattcttcactatatacattcatccaatg

SEQ ID NO: 371701 - DNA, 3007 bp, Homo sapiens
cagtggcagtaagggcggcggcgacggcggcggcggtcgggggaggggccgggcggggggctggcggcagcggcggatggactcgcgggtatcggagctgttcggcggctgctgccggcccggagggggcccggccgtgggcggaaccctcaaggctaggggggccggcagcagcagcggctgcggggggccaaagggaaagaagaagaacggaaggaacagagggggcaaagccaacaaccccccgtatttgccccccgaggctgaagatggaaacattgaatataaattgaagctggtgaatccatcccagtaccgctttgagcacctggtgacacaaatgaagtggcggctccaggagggacgtggtgaggccgtctaccagattggggtagaggacaatgggctgctggtggggctggctgaggaggaaatgcgagcttcgctcaagaccctgcaccggatggcagagaaggttggggcagacataaccgttcttcgagagcgagaagtggattatgatagcgacatgccccggaagatcaccgaggtgctagtacgaaaggtccctgacaaccaacagttcctagacctccgtgtggccgtcctggggaatgtggactctgggaagtcaactctgcttggagtcctgacccagggagagctggacaatgggcggggccgggctcggctcaaccttttccgccacctgcatgagattcagtctggccgaacctccagcatcagcttcgagatcctgggctttaacagcaagggagaggtggtgaattacagcgactcacggacagcagaagagatctgtgagagcagctccaagatgatcaccttcatcgacctggcaggccaccataagtacctacacaccaccatctttggcctcacatcatactgccccgactgcgccctgctcctcgtcagtgccaacactgggattgctggcaccacaagggaacatctggggctggccctggccctgaaagtgcccttcttcatcgtggtcagcaagatcgacctatgtgccaagaccacagtggagaggacagtacgccagctggagcgggtcctcaagcagcctggctgccacaaggtccccatgctggtcacctctgaggatgatgccgtcactgctgcccagcagtttgctcagtcacccaatgtcacccccatcttcacattgtccagtgtgtctggagagagtctggacctcctcaaagtctttctgaatattctgccgccactcaccaacagcaaagagcaggaggaactcatgcagcagctgacggagttccaggtggatgaaatctacacagtaccagaggtggggactgttgttggaggaacactttccagtgggatttgccgtgagggggaccagctggtggtgggccccacggatgatggctgcttcctggagctgagagtatgcagcatccagcgcaaccgctctgcctgtcgtgtgctgcgagctggtcaggctgctacactggcgcttggggactttgaccgtgcactgcttcgcaagggcatggtgatggtgagcccggagatgaatcctaccatctgctcggtgtttgaggcagagatagtcttactgttccatgccaccaccttccgacgaggattccaggtgacagtacacgtgggcaacgtacgtcagacggcagtggtggaaaagatccatgccaaggacaaactgcggacaggcgagaaggcagtggtacgtttccgcttcctgaaacacccagagtacctgaaggtgggcgccaaactgctgttccgggagggtgtcaccaagggcatcggccatgtcactgatgtacaagccattacagcaggagaagcccaggccaacatgggcttctgaacccttcaggcagggacagttctattgctgtccctacaatatataaggtgacttctggccatgctgccctgccattggcggctctgtgtgttaataggctagggagagaggggtgctgtctgccacttgctccctgccaactttctggagaggtgccaaacttggtgtggccaggaaagggcagtcctgagggagaagacaggattcagggcagtgctccgaagctgtgtgctcacctggttggctcatcaaacctggcaaccctgtggcctgtctgccggagctgactggatccactcatcaattcttcgtccccactactaagactgggcatgttttgctggtgtggtctctgcacttcaggaatggtcacaacagggggtagccctcaaaagcactcctttttctatacctcttctcaaggccatgtaagttgcccatctctacctggctgtggacaaaaggttatctgctcttggccatctggtggtggtggcggcccagagtctgaagaaatggcacagggacagtgaatggtagtgttgccaccctgtgctgaggcctgaggcctcttcctcagctttatctccctttccttcactcaagggccatttccccagtccctatctcccccatcccctcccggcttataggccccacaggtgctatttgttgtgctggcccaggcgtggggctaccaagcaaaggcttggcatataccaaaggccagctgcatgcccatcagtctggtctttttcctctgcggtcatgttggctttcatgctggatcaaatgttttactttcccagactggtggcatctgagttccccatcctaccactctcaccccactttcctgccccacctaaaccctcgttttagtaatttgtagtgactgttcccttccctctgttgcagggaaccaggaggaaagggaaagatgttgccatatttcctactctttaggcatggactctcctttccctttgttagtgtcctgggttcccatggactcagggatttgttggctaaggtttctctgtgcatatatatatatatacatatgtatatatatttaaatacacatatatattgtacagctcgtgccgaattcggcacgag

SEQ ID NO: 371702 - DNA, 3544 bp, Homo sapiens
cctgcctcaggtttatttgtacaaatagcacaggaggaccccagccccatgcagatggtagcccaggggcgggggtggggggtcgcaccagtccttctgtcctcatgttggcagagatatctactctgaagcctttgtaggggcctgggtacgtttgggagcctgagctggaactgaagctggggctgcagcctgggccttggtttgatccttggccttggccttggcctttggccggcacagcctgagccccttggcaatacgggcacgattcggggtgggcaatgtaggcaagtcgatcgagcttgcggctgacaccctttgggatcttgggcttaacctccttgggctttacgagggccttgatagcctcggcacgtgcactcatggccttggcattgttggcctgcatcttctttaggccctttttgttgtgcttcttggcaaagcgcatgttcctcaggaacttggggtccacccccttaagagattcgtatctttgtgatcggggtttcttgataccatttctgtgccattttcgggactggttgtgtgtggtgtggttcttggacttggccatgtctgcaccataagccgcggctcccgaagcgacatgccccggaagatcaccgaggtgctagtacgaaaggtccctgacaaccaacagttcctagacctccgtgtggccgtcctggggaatgtggactctgggaagtcaactctgcttggagtcctgacccagggagagctggacaatgggcggggccgggctcggctcaaccttttccgccacctgcatgagattcagtctggccgaacctccagcatcagcttcgagatcctgggctttaacagcaagggagaggtgcatgggatcaatgggacccaatggggccagactctgaggatgggatggtagtagtgaaggacataggatgggggtagagtgtggagactttttgaaatagtatagatgaatgccctgaggggactgtgaacaagctctgcccctcttaggaaatcaatggggaatcaactaaattaaataaaaaatggggtcaagattaagaggcagggtcacccagggaatggtttaggtcctggcaactctgaaggggttggaagggctggcaggaggcactgagggccctgggccctgggccaggtggtgaattacagcgactcacggacagcagaagagatctgtgagagcagctccaagatgatcaccttcatcgacctggcaggccaccataagtacctacacaccaccatctttggcctcacatcatactgccccgactgcgccctgctcctcgtcagtgccaacactgggattgctggcaccacaagggaacatctggggctggccctggccctgaaagtgcccttcttcatcgtggtcagcaagatcgacctatgtgccaagaccacagtggagaggacagtacgccagctggagcgggtcctcaagcagcctggctgccacaaggtccccatgctggtcacctctgaggatgatgccgtcactgctgcccagcagtttgctcagtcacccaatgtcacccccatcttcacattgtccagtgtgtctggagagagtctggacctcctcaaagtctttctgaatattctgccgccactcaccaacagcaaagagcaggaggaactcatgcagcagctgacggagttccaggtggatgaaatctacacagtaccagaggtggggactgttgttggaggaacactttccagattaggctttcactatcagaagagctggagaacggtagtctgttggctttggagggaagaaacagtattgctgcctattggggaatctccaggcccctgagagagaagtgtgggtcttgagctccaggaagaaaactagagtgtattcaactgacttcatctcacacagggaaatgagagacgtcacttaagactcttctttctttctttctttcttttttttgagacagagtctcgctctgttgcccaggctggattgcagtggagcgatcttggctcactgcaacctctgcctcctgggttccagcaattctcctgcctcagccttgagtagctggaattacaggcgcctaccaccatgcccggctaatttttgtatttttagtagagatggggtcgtcaccatattggccaggctggtcttgaattcctgacctcaagtgatccacctgcctcagcctccccaagtgctaggattacaggtgtgagccaacgcggctggcctaagactctgcaaagcagagaatgaaacccaaggggataacttgctccttcagtgattaggtgtcggtgttgttaaaccagcaagtgtctctctgtccaccatcactgctggccttttatgaaattagtcttctgattctgaactctggcagtgagccctgttacatccaagtcagaatttagggttcttccccacttgagggactcaaccctagaagggaaggaatgctctgggtgatcctaatagagaagtaggtatggggaccttggctgacactgtgccacctgccctctgggctgcagtgggatttgccgtgagggggaccagctggtggtgggccccacggatgatggctgcttcctggagctgagagtatgcagcatccagcgcaaccgctctgcctgtcgtgtgctgcgagctggtcaggctgctacactggcgcttggggactttgaccgtgcactgcttcgcaagggcatggtgatggtgagcccggagatgaatcctaccatctgctcggtgtttgaggcagagatagtcttactgttccatgccaccaccttccgacgaggattccaggtgacagtacacgtgggcaacgtacgtcagacggcagtggtggaaaagatccatgccaaggacaaactgcggacaggcgagaaggcagtggtacgtttccgcttcctgaaacacccagagtacctgaaggtgggcgccaaactgctgttccgggagggtgtcaccaagggcatcggccatgtcactgatgtacaagccattacagcaggagaagcccaggccaacatgggcttctgaacccttcaggcagggacagttctattgctgtccctacaatatataaggtgacttctggccatgctgccctgccattggcggctctgtgtgttaataggctagggagagaggggtgctgtctgccacttgctccctgccaactttctggagaggtgccaaacttggtgtggccaggaaagggcagtcctgagggagaagacaggattcagggcagtgctccgaagctgtgtgctcacctggttggctcatcaaacctggcaaccctgtggcctgtctgccggagctgactggatccactcatcaattcttcgtccccactactaagactgggcatgttttgctggtgtggtctctgcacttcaggaatggtcacaacagggggtagccctcaaaagcactccttcaacatggggactctagagtgactgcagctcagctgactgcgcgttcagttagaccctgcggggg

SEQ ID NO: 371703 - DNA, 3043 bp, Homo sapiens
cctgcctcaggtttatttgtacaaatagcacaggaggaccccagccccatgcagatggtagcccaggggcgggggtggggggtcgcaccagtccttctgtcctcatgttggcagagatatctactctgaagcctttgtaggggcctgggtacgtttgggagcctgagctggaactgaagctggggctgcagcctgggccttggtttgatccttggccttggccttggcctttggccggcacagcctgagccccttggcaatacgggcacgattcggggtgggcaatgtaggcaagtcgatcgagcttgcggctgacaccctttgggatcttgggcttaacctccttgggctttacgagggccttgatagcctcggcacgtgcactcatggccttggcattgttggcctgcatcttctttaggccctttttgttgtgcttcttggcaaagcgcatgttcctcaggaacttggggtccacccccttaagagattcgtatctttgtgatcggggtttcttgataccatttctgtgccattttcgggactggttgtgtgtggtgtggttcttggacttggccatgtctgcaccataagccgcggctcccgaagcgacatgccccggaagatcaccgaggtgctagtacgaaaggtccctgacaaccaacagttcctagacctccgtgtggccgtcctggggaatgtggactctgggaagtcaactctgcttggagtcctgacccagggagagctggacaatgggcggggccgggctcggctcaaccttttccgccacctgcatgagattcagtctggccgaacctccagcatcagcttcgagatcctgggctttaacagcaagggagaggtgcatgggatcaatgggacccaatggggccagactctgaggatgggatggtagtagtgaaggacataggatgggggtagagtgtggagactttttgaaatagtatagatgaatgccctgaggggactgtgaacaagctctgcccctcttaggaaatcaatggggaatcaactaaattaaataaaaaatggggtcaagattaagaggcagggtcacccagggaatggtttaggtcctggcaactctgaaggggttggaagggctggcaggaggcactgagggccctgggccctgggccaggtggtgaattacagcgactcacggacagcagaagagatctgtgagagcagctccaagatgatcaccttcatcgacctggcaggccaccataagtacctacacaccaccatctttggcctcacatcatactgccccgactgcgccctgctcctcgtcagtgccaacactgggattgctggcaccacaagggaacatctggggctggccctggccctgaaagtgcccttcttcatcgtggtcagcaagatcgacctatgtgccaagaccacagtggagaggacagtacgccagctggagcgggtcctcaagcagcctggctgccacaaggtccccatgctggtcacctctgaggatgatgccgtcactgctgcccagcagtttgctcagtcacccaatgtcacccccatcttcacattgtccagtgtgtctggagagagtctggacctcctcaaagtctttctgaatattctgccgccactcaccaacagcaaagagcaggaggaactcatgcagcagctgacggagttccaggtggatgaaatctacacagtaccagaggtggggactgttgttggaggaacactttccagattaggctttcactatcagaagagctggagaacggtagtctgttggctttggagggaagaaacagtattgctgcctattggggaatctccaggcccctgagagagaagtgtgggtcttgagctccaggaagaaaactagagtgtattcaactgacttcatctcacacagggaaatgagagacgtcacttaagactcttctttctttctttctttcttttttttgagacagagtctcgctctgttgcccaggctggattgcagtggagcgatcttggctcactgcaacctctgcctcctgggttccagcaattctcctgcctcagccttgagtagctggaattacaggcgcctaccaccatgcccggctaatttttgtatttttagtagagatggggtcgtcaccatattggccaggctggtcttgaattcctgacctcaagtgatccacctgcctcagcctccccaagtgctaggattacaggtgtgagccaacgcggctggcctaagactctgcaaagcagagaatgaaacccaaggggataacttgctccttcagtgattaggtgtcggtgttgttaaaccagcaagtgtctctctgtccaccatcactgctggccttttatgaaattagtcttctgattctgaactctggcagtgagccctgttacatccaagtcagaatttagggttcttccccacttgagggactcaaccctagaagggaaggaatgctctgggtgatcctaatagagaagtaggtatggggaccttggctgacactgtgccacctgccctctgggctgcagtgggatttgccgtgagggggaccagctggtggtgggccccacggatgatggctgcttcctggagctgagagtatgcagcatccagcgcaaccgctctgcctgtcgtgtgctgcgagctggtcaggctgctacactggcgcttggggactttgaccgtgcactgcttcgcaaggtgaggtgggtgcatgggttggggagggaacgctaagagaagtgcctaggagactggctactgaatgagcacctatctaaggtgcttcagagaaactcagaggaaacacactctctgacccaagaagcttctggtctagctacgtagactataaaaacagcttaacgtactcatgaggtacagataactaaatatgaatcactatgttacactgtttttaatgaacactatttttagtgttcaggaccctaaaaatgtgaagcgttagatgggctagaggacgtaggaggtgggtaaagactcattccc

SEQ ID NO: 371704 - DNA, 2996 bp, Homo sapiens
cctgcctcaggtttatttgtacaaatagcacaggaggaccccagccccatgcagatggtagcccaggggcgggggtggggggtcgcaccagtccttctgtcctcatgttggcagagatatctactctgaagcctttgtaggggcctgggtacgtttgggagcctgagctggaactgaagctggggctgcagcctgggccttggtttgatccttggccttggccttggcctttggccggcacagcctgagccccttggcaatacgggcacgattcggggtgggcaatgtaggcaagtcgatcgagcttgcggctgacaccctttgggatcttgggcttaacctccttgggctttacgagggccttgatagcctcggcacgtgcactcatggccttggcattgttggcctgcatcttctttaggccctttttgttgtgcttcttggcaaagcgcatgttcctcaggaacttggggtccacccccttaagagattcgtatctttgtgatcggggtttcttgataccatttctgtgccattttcgggactggttgtgtgtggtgtggttcttggacttggccatgtctgcaccataagccgcggctcccgaagcgacatgccccggaagatcaccgaggtgctagtacgaaaggtccctgacaaccaacagttcctagacctccgtgtggccgtcctggggaatgtggactctgggaagtcaactctgcttggagtcctgacccagggagagctggacaatgggcggggccgggctcggctcaaccttttccgccacctgcatgagattcagtctggccgaacctccagcatcagcttcgagatcctgggctttaacagcaagggagaggtgcatgggatcaatgggacccaatggggccagactctgaggatgggatggtagtagtgaaggacataggatgggggtagagtgtggagactttttgaaatagtatagatgaatgccctgaggggactgtgaacaagctctgcccctcttaggaaatcaatggggaatcaactaaattaaataaaaaatggggtcaagattaagaggcagggtcacccagggaatggtttaggtcctggcaactctgaaggggttggaagggctggcaggaggcactgagggccctgggccctgggccaggtggtgaattacagcgactcacggacagcagaagagatctgtgagagcagctccaagatgatcaccttcatcgacctggcaggccaccataagtacctacacaccaccatctttggcctcacatcatactgccccgactgcgccctgctcctcgtcagtgccaacactgggattgctggcaccacaagggaacatctggggctggccctggccctgaaagtgcccttcttcatcgtggtcagcaagatcgacctatgtgccaagaccacagtggagaggacagtacgccagctggagcgggtcctcaagcagcctggctgccacaaggtccccatgctggtcacctctgaggatgatgccgtcactgctgcccagcagtttgctcagtcacccaatgtcacccccatcttcacattgtccagtgtgtctggagagagtctggacctcctcaaagtctttctgaatattctgccgccactcaccaacagcaaagagcaggaggaactcatgcagcagctgacggagttccaggtggatgaaatctacacagtaccagaggtggggactgttgttggaggaacactttccagtgggatttgccgtgagggggaccagctggtggtgggccccacggatgatggctgcttcctggagctgagagtatgcagcatccagcgcaaccgctctgcctgtcgtgtgctgcgagctggtcaggctgctacactggcgcttggggactttgaccgtgcactgcttcgcaagggcatggtgatggtgagcccggagatgaatcctaccatctgctcggtgtttgaggcagagatagtcttactgttccatgccaccaccttccgacgaggattccaggtgacagtacacgtgggcaacgtacgtcagacggcagtggtggaaaagatccatgccaaggacaaactgcggacaggcgagaaggcagtggtacgtttccgcttcctgaaacacccagagtacctgaaggttcagagttccagtattgtaaccaagtattgtggcctattttccgtagttcaagtgagcagaatactgaggcctttcacgtgaaataggtagctaccctgtatttgaagagttggccacttgctagtggtcagaatagtaaggagcccacttctgtgccctggcagagatacagtgccagctacttaaagaagagtagaatttagagacaaaaggtaatctggtcccatatttttcaagtttacatagcctaaattactcttggaacaatgagggccacttgaccaaaccttagtccctgctcctgtttccatgttcatactacttgattttgacattttatgggtaaataggggccaaagtcaactgtaaatagaaactgcattttgaggagaccctggaaaagaaatatgtgacccaaagtcctatgtggcattctgcctctagagtattaaagtgatagcttccctaccactcaggctgttttataaaatgtaactggtttaacttgctactaacaagcctgtagttgaacaacttcctcctgtattaggggctaagctgtttacttcctctctatagctgctgatagagatgaaagctttgtccacaatttacttatcttttgcctgtattgtaaagaaaattttggaaaatcacatttcagtacttaataagacatctccaggaactagtgagcctctctgcaacattaatggaacatttagggggataaaaagtatataaggcagactcccaaggagtttatacatgtttatgatcccaattgtggtaatcagatctaaaattcttcactatatacattcatccaatg

SEQ ID NO: 371705 - DNA, 1379 bp, Homo sapiens
  misc_feature (28)..(28): n is a, c, g, or t
  misc_feature (59)..(59): n is a, c, g, or t
gccgacccccaacacctggaccccctgngaaaaccccgccgcgcccttgaaaccctggnaattcggcacgaggactggtggcatctgagttccccatcctaccactctcaccccactttcctgccccacctaaaccctcgttttagtaatttgtagtgactgttcccttccctctgttgcagggaaccaggaggaaagggaaagatgttgccatatttcctactctttaggcatggactctcctttccctttgttagtgtcctgggttcccatggactcagggatttgttggctaaggtttctctgtgcatatatatatatatacatatgtatatatatttaaatacacatatatattgtacagaataaaaatgttttattgaatacactgtgcttatgcgttacgtacaggctcagcttccttccagggctagatacctcttcaggattagagacaagtgaaaccccaacactgctgagccctgaatgtggaaagagcccagctggtatctcgttcaccattgtttttctctcctccacataggttcagagttccagtattgtaaccaagtattgtggcctattttccgtagttcaagtgagcagaatactgaggcctttcacgtgaaataggtagctaccctgtatttgaagagttggccacttgctagtggtcagaatagtaaggagcccacttctgtgccctggcagagatacagtgccagctacttaaagaagagtagaatttagagacaaaaggtaatctggtcccatatttttcaagtttacatagcctaaattactcttggaacaatgagggccacttgaccaaaccttagtccctgctcctgtttccatgttcatactacttgattttgacattttatgggtaaataggggccaaagtcaactgtaaatagaaactgcattttgaggagaccctggaaaagaaatatgtgacccaaagtcctatgtggcattctgcctctagagtattaaagtgatagcttccctaccactcaggctgttttataaaatgtaactggtttaacttgctactaacaagcctgtagttgaacaacttcctcctgtattaggggctaagctgtttacttcctctctatagctgctgatagagatgaaagctttgtccacaatttacttatcttttgcctgtattgtaaagaaaattttggaaaatcacatttcagtacttaataagacatctccaggaactagtgagcctctctgcaacattaatggaacatttagggggataaaaagtatataaggcagactcccaaggagtttatacatgtttatgatcccaattgtggtaatcagatctaaaattcttcactatatacattcatccaatg

SEQ ID NO: 371706 - DNA, 375 bp, Homo sapiens
ggggagggagagtctgatgttagagctgcccttcctgggcctggggtctgttcctccccagggcatggtgatggtgagcccggagatgaatcctaccatctgctcggtgtttgaggcagagatagtcttactgttccatgccaccaccttccgacgaggattccaggtgacagtacacgtgggcaacgtacgtcagacggcagtggtggaaaagatccatgccaaggtgagagggacctggccttccatttctccagaggtcagaaaagagggaggcctgccccagactggcagagaactccttgatcccacaatgggaataaaaccccacttagggtgggtagcggcctgataggcctctggagggtggagagc

SEQ ID NO: 371707 - DNA, 1618 bp, Homo sapiens
acagaggagacatagacttctgggaaaagcaggctgaagatggaaacattgaatataaattgaagctggtgaatccatcccagtaccgctttgagcacctggtgacacaaatgaagtggcggctccaggagggacgtggtgaggcctgtcacccccatcttcacattgtccagtgtgtctggagagagtctggacctcctcaaagtctttctgaatattctgccgccactcaccaacagcaaagagcaggaggaactcatgcagcagctgacggagttccaggtggatgaaatctacacagtaccagaggtggggactgttgttggaggaacactttccagtgggatttgccgtgagggggaccagctggtggtgggccccacggatgatggctgcttcctggagctgagagtatgcagcatccagcgcaaccgctctgcctgtcgtgtgctgcgagctggtcaggctgctacactggcgcttggggactttgaccgtgcactgcttcgcaagggcatggtgatggtgagcccggagatgaatcctaccatctgctcggtgtttgaggcagagatagtcttactgttccatgccaccaccttccgacgaggattccaggtgacagtacacgtgggcaacgtacgtcagacggcagtggtggaaaagatccatgccaaggacaaactgcggacaggcgagaaggcagtggtacgtttccgcttcctgaaacacccagagtacctgaaggtgggcgccaaactgctgttccgggagggtgtcaccaagggcatcggccatgtcactgatgtacaagccattacagcaggagaagcccaggccaacatgggcttctgaacccttcaggcagggacagttctattgctgtccctacaatatataaggtgacttctggccatgctgccctgccattggcggctctgtgtgttaataggctagggagagaggggtgctgtctgccacttgctccctgccaactttctggagaggtgccaaacttggtgtggccaggaaagggcagtcctgagggagaagacaggattcagggcagtgctccgaagctgtgtgctcacctggttggctcatcaaacctggcaaccctgtggcctgtctgccggagctgactggatccactcatcaattcttcgtccccactactaagactgggcatgttgtgctggcccaggcgtggggctaccaagcaaaggcttggcatataccaaaggccagctgcatgcccatcagtctggtctttttcctctgcggtcatgttggctttcatgctggatcaaatgttttactttcccagactggtggcatctgagttccccatcctaccactctcaccccactttcctgccccacctaaaccctcgttttagtaatttgtagtgactgttcccttccctctgttgcagggaaccaggaggaaagggaaagatgttgccatatttcctactctttaggcatggactctcctttccctttgttagtgtcctgggttcccatggactcagggatttgttggctaaggtttctctgtgcatatatatatatatacatatgtatatatatttaaatacacatatatattgtacag

SEQ ID NO: 371708 - DNA, 3408 bp, Homo sapiens
gtcgacgagagagagagagagagagaactagtctcggggggccaaagggaaagaagaagaacggaaggaacagagggggcaaagccaacaaccccccgtatttgccccccgaggctgaagatggaaacattgaatataaattgaagctggtgaatccatcccagtaccgctttgagcacctggtgacacaaatgaagtggcggctccaggagggacgtggtgaggccgtctaccagattggggtagaggacaatgggctgctggtggggctggctgaggaggaaatgcgagcttcgctcaagaccctgcaccggatggcagagaaggttggggcagacataaccgttcttcgagagcgagaagtggattatgatagcgacatgccccggaagatcaccgaggtgctagtacgaaaggtccctgacaaccaacagttcctagacctccgtgtggccgtcctggggaatgtggactctgggaagtcaactctgcttggagtcctgacccagggagagctggacaatgggcggggccgggctcggctcaaccttttccgccacctgcatgagattcagtctggccgaacctccagcatcagcttcgagatcctgggctttaacagcaagggagaggtggtgaattacagcgactcacggacagcagaagagatctgtgagagcagctccaagatgatcaccttcatcgacctggcaggccaccataagtacctacacaccaccatctttggcctcacatcatactgccccgactgcgccctgctcctcgtcagtgccaacactgggattgctggcaccacaagggaacatctggggctggccctggccctgaaagtgcccttcttcatcgtggtcagcaagatcgacctatgtgccaagaccacagtggagaggacagtacgccagctggagcgggtcctcaagcagcctggctgccacaaggtccccatgctggtcacctctgaggatgatgccgtcactgctgcccagcagtttgctcagtcacccaatgtcacccccatcttcacattgtccagtgtgtctggagagagtctggacctcctcaaagtctttctgaatattctgccgccactcaccaacagcaaagagcaggaggaactcatgcagcagctgacggagttccaggtggatgaaatctacacagtaccagaggtggggactgttgttggaggaacactttccagtgggatttgccgtgagggggaccagctggtggtgggccccacggatgatggctgcttcctggagctgagagtatgcagcatccagcgcaaccgctctgcctgtcgtgtgctgcgagctggtcaggctgctacactggcgcttggggactttgaccgtgcactgcttcgcaagggcatggtgatggtgagcccggagatgaatcctaccatctgctcggtgtttgaggcagagatagtcttactgttccatgccaccaccttccgacgaggattccaggtgacagtacacgtgggcaacgtacgtcagacggcagtggtggaaaagatccatgccaaggacaaactgcggacaggcgagaaggcagtggtacgtttccgcttcctgaaacacccagagtacctgaaggtgggcgccaaactgctgttccgggagggtgtcaccaagggcatcggccatgtcactgatgtacaagccattacagcaggagaagcccaggccaacatgggcttctgaacccttcaggcagggacagttctattgctgtccctacaatatataaggtgacttctggccatgctgccctgccattggcggctctgtgtgttaataggctagggagagaggggtgctgtctgccacttgctccctgccaactttctggagaggtgccaaacttggtgtggccaggaaagggcagtcctgagggagaagacaggattcagggcagtgctccgaagctgtgtgctcacctggttggctcatcaaacctggcaaccctgtggcctgtctgccggagctgactggatccactcatcaattcttcgtccccactactaagactgggcatgttttgctggtgtggtctctgcacttcaggaatggtcacaacagggggtagccctcaaaagcactcctttttctatacctcttctcaaggccatgtaagttgcccatctctacctggctgtggacaaaaggttatctgctcttggccatctggtggtggtggcggcccagagtctgaagaaatggcacagggacagtgaatggtagtgttgccaccctgtgctgaggcctgaggcctcttcctcagctttatctccctttccttcactcaagggccatttccccagtccctatctcccccatcccctcccggcttataggccccacaggtgctatttgttgtgctggcccaggcgtggggctaccaagcaaaggcttggcatataccaaaggccagctgcatgcccatcagtctggtctttttcctctgcggtcatgttggctttcatgctggatcaaatgttttactttcccagactggtggcatctgagttccccatcctaccactctcaccccactttcctgccccacctaaaccctcgttttagtaatttgtagtgactgttcccttccctctgttgcagggaaccaggaggaaagggaaagatgttgccatatttcctactctttaggcatggactctcctttccctttgttagtgtcctgggttcccatggactcagggatttgttggctaaggtttctctgtgcatatatatatatatacatatgtatatatatttaaatacacatatatattgtacagaataaaaatgttttattgaaaaaacaaaaaacacagggcggccgccctatcagcgtgccggatcaagcacgacaaacaacagcctctaatctgtcacaagagatccacaccctcgcaagaccgactgctccgctgcccactccctcaaccctagcaagggggcacccactacaccgtgggatcacccagaagggagcagacacggagggcatccataataccacaagaacgagaagcaccactgcattcaaaccaacactcacaggtgcctggcgcgcccacaatgacaactggccgggacctccccgggcacctgccgagagaattcacagcaacacggccgcgagcactacacgtggggcacaagagacgtgcacgcgaaacgggtccaccaagccgaaacctaacagcctgaacacaataccagcagcatgtcacaacaaacattgggcacctacaccacaagcgaccccacagagatccaccaccgctattatcacgtccccagacaccaagggcagaccgcacccatagaagctctggggccaagtgcacaccacgggcacataccc

SEQ ID NO: 371709 - DNA, 4807 bp, Homo sapiens
cagtggcagtaagggcggcggcgacggcggcggcggtcgggggaggggccgggcggggggctggcggcagcggcggatggactcgcgggtatcggagctgttcggcggctgctgccggcccggagggggcccggccgtgggcggaaccctcaaggctaggggggccggcagcagcagcggctgcggggggccaaagggaaagaagaagaacggaaggaacagagggggcaaagccaacaaccccccgtatttgccccccgaggctgaagatggaaacattgaatataaattgaagctggtgaatccatcccagtaccgctttgagcacctggtgacacaaatgaagtggcggctccaggagggacgtggtgaggccgtctaccagattggggtagaggacaatgggctgctggtggggctggctgaggaggaaatgcgagcttcgctcaagaccctgcaccggatggcagagaaggttggggcagacataaccgttcttcgagagcgagaagtggattatgatagcgacatgccccggaagatcaccgaggtgctagtacgaaaggtccctgacaaccaacagttcctagacctccgtgtggccgtcctggggaatgtggactctgggaagtcaactctgcttggagtcctgacccagggagagctggacaatgggcggggccgggctcggctcaaccttttccgccacctgcatgagattcagtctggccgaacctccagcatcagcttcgagatcctgggctttaacagcaagggagaggtggtgaattacagcgactcacggacagcagaagagatctgtgagagcagctccaagatgatcaccttcatcgacctggcaggccaccataagtacctacacaccaccatctttggcctcacatcatactgccccgactgcgccctgctcctcgtcagtgccaacactgggattgctggcaccacaagggaacatctggggctggccctggccctgaaagtgcccttcttcatcgtggtcagcaagatcgacctatgtgccaagaccacagtggagaggacagtacgccagctggagcgggtcctcaagcagcctggctgccacaaggtccccatgctggtcacctctgaggatgatgccgtcactgctgcccagcagtttgctcagtcacccaatgtcacccccatcttcacattgtccagtgtgtctggagagagtctggacctcctcaaagtctttctgaatattctgccgccactcaccaacagcaaagagcaggaggaactcatgcagcagctgacggagttccaggtggatgaaatctacacagtaccagaggtggggactgttgttggaggaacactttccagattaggctttcactatcagaagagctggagaacggtagtctgttggctttggagggaagaaacagtattgctgcctattggggaatctccaggcccctgagagagaagtgtgggtcttgagctccaggaagaaaactagagtgtattcaactgacttcatctcacacagggaaatgagagacgtcacttaagactcttctttctttctttctttcttttttttgagacagagtctcgctctgttgcccaggctggattgcagtggagcgatcttggctcactgcaacctctgcctcctgggttccagcaattctcctgcctcagccttgagtagctggaattacaggcgcctaccaccatgcccggctaatttttgtatttttagtagagatggggtcgtcaccatattggccaggctggtcttgaattcctgacctcaagtgatccacctgcctcagcctccccaagtgctaggattacaggtgtgagccaacgcggctggcctaagactctgcaaagcagagaatgaaacccaaggggataacttgctccttcagtgattaggtgtcggtgttgttaaaccagcaagtgtctctctgtccaccatcactgctggccttttatgaaattagtcttctgattctgaactctggcagtgagccctgttacatccaagtcagaatttagggttcttccccacttgagggactcaaccctagaagggaaggaatgctctgggtgatcctaatagagaagtaggtatggggaccttggctgacactgtgccacctgccctctgggctgcagtgggatttgccgtgagggggaccagctggtggtgggccccacggatgatggctgcttcctggagctgagagtatgcagcatccagcgcaaccgctctgcctgtcgtgtgctgcgagctggtcaggctgctacactggcgcttggggactttgaccgtgcactgcttcgcaagggcatggtgatggtgagcccggagatgaatcctaccatctgctcggtgtttgaggcagagatagtcttactgttccatgccaccaccttccgacgaggattccaggtgacagtacacgtgggcaacgtacgtcagacggcagtggtggaaaagatccatgccaaggacaaactgcggacaggcgagaaggcagtggtacgtttccgcttcctgaaacacccagagtacctgaaggtgggcgccaaactgctgttccgggagggtgtcaccaagggcatcggccatgtcactgatgtacaagccattacagcaggagaagcccaggccaacatgggcttctgaacccttcaggcagggacagttctattgctgtccctacaatatataaggtgacttctggccatgctgccctgccattggcggctctgtgtgttaataggctagggagagaggggtgctgtctgccacttgctccctgccaactttctggagaggtgccaaacttggtgtggccaggaaagggcagtcctgagggagaagacaggattcagggcagtgctccgaagctgtgtgctcacctggttggctcatcaaacctggcaaccctgtggcctgtctgccggagctgactggatccactcatcaattcttcgtccccactactaagactgggcatgttttgctggtgtggtctctgcacttcaggaatggtcacaacagggggtagccctcaaaagcactcctttttctatacctcttctcaaggccatgtaagttgcccatctctacctggctgtggacaaaaggttatctgctcttggccatctggtggtggtggcggcccagagtctgaagaaatggcacagggacagtgaatggtagtgttgccaccctgtgctgaggcctgaggcctcttcctcagctttatctccctttccttcactcaagggccatttccccagtccctatctcccccatcccctcccggcttataggccccacaggtgctatttgttgtgctggcccaggcgtggggctaccaagcaaaggcttggcatataccaaaggccagctgcatgcccatcagtctggtctttttcctctgcggtcatgttggctttcatgctggatcaaatgttttactttcccagactggtggcatctgagttccccatcctaccactctcaccccactttcctgccccacctaaaccctcgttttagtaatttgtagtgactgttcccttccctctgttgcagggaaccaggaggaaagggaaagatgttgccatatttcctactctttaggcatggactctcctttccctttgttagtgtcctgggttcccatggactcagggatttgttggctaaggtttctctgtgcatatatatatatatacatatgtatatatatttaaatacacatatatattgtacagaataaaaatgttttattgaatacactgtgcttatgcgttacgtacaggctcagcttccttccagggctagatacctcttcaggattagagacaagtgaaaccccaacactgctgagccctgaatgtggaaagagcccagctggtatctcgttcaccattgtttttctctcctccacataggttcagagttccagtattgtaaccaagtattgtggcctattttccgtagttcaagtgagcagaatactgaggcctttcacgtgaaataggtagctaccctgtatttgaagagttggccacttgctagtggtcagaatagtaaggagcccacttctgtgccctggcagagatacagtgccagctacttaaagaagagtagaatttagagacaaaaggtaatctggtcccatatttttcaagtttacatagcctaaattactcttggaacaatgagggccacttgaccaaaccttagtccctgctcctgtttccatgttcatactacttgattttgacattttatgggtaaataggggccaaagtcaactgtaaatagaaactgcattttgaggagaccctggaaaagaaatatgtgacccaaagtcctatgtggcattctgcctctagagtattaaagtgatagcttccctaccactcaggctgttttataaaatgtaactggtttaacttgctactaacaagcctgtagttgaacaacttcctcctgtattaggggctaagctgtttacttcctctctatagctgctgatagagatgaaagctttgtccacaatttacttatcttttgcctgtattgtaaagaaaattttggaaaatcacatttcagtacttaataagacatctccaggaactagtgagcctctctgcaacattaatggaacatttagggggataaaaagtatataaggcagactcccaaggagtttatacatgtttatgatcccaattgtggtaatcagatctaaaattcttcactatatacattcatccaatg

SEQ ID NO: 371710 - DNA, 4615 bp, Homo sapiens
agtgggaattgaggggaagtagggattgggtctgtacagtgtatggtaactgctcactgtttcttttcaggctgaagatggaaacattgaatataaattgaagctggtgaatccatcccagtaccgctttgagcacctggtgacacaaatgaagtggcggctccaggagggacgtggtgaggccgtctaccagattggggtagaggacaatgggctgctggtggggctggctgaggaggaaatgcgagcttcgctcaagaccctgcaccggatggcagagaaggttggggcagacataaccgttcttcgagagcgagaagtggattatgatagcgacatgccccggaagatcaccgaggtgctagtacgaaaggtccctgacaaccaacagttcctagacctccgtgtggccgtcctggggaatgtggactctgggaagtcaactctgcttggagtcctgacccagggagagctggacaatgggcggggccgggctcggctcaaccttttccgccacctgcatgagattcagtctggccgaacctccagcatcagcttcgagatcctgggctttaacagcaagggagaggtggtgaattacagcgactcacggacagcagaagagatctgtgagagcagctccaagatgatcaccttcatcgacctggcaggccaccataagtacctacacaccaccatctttggcctcacatcatactgccccgactgcgccctgctcctcgtcagtgccaacactgggattgctggcaccacaagggaacatctggggctggccctggccctgaaagtgcccttcttcatcgtggtcagcaagatcgacctatgtgccaagaccacagtggagaggacagtacgccagctggagcgggtcctcaagcagcctggctgccacaaggtccccatgctggtcacctctgaggatgatgccgtcactgctgcccagcagtttgctcagtcacccaatgtcacccccatcttcacattgtccagtgtgtctggagagagtctggacctcctcaaagtctttctgaatattctgccgccactcaccaacagcaaagagcaggaggaactcatgcagcagctgacggagttccaggtggatgaaatctacacagtaccagaggtggggactgttgttggaggaacactttccagattaggctttcactatcagaagagctggagaacggtagtctgttggctttggagggaagaaacagtattgctgcctattggggaatctccaggcccctgagagagaagtgtgggtcttgagctccaggaagaaaactagagtgtattcaactgacttcatctcacacagggaaatgagagacgtcacttaagactcttctttctttctttctttcttttttttgagacagagtctcgctctgttgcccaggctggattgcagtggagcgatcttggctcactgcaacctctgcctcctgggttccagcaattctcctgcctcagccttgagtagctggaattacaggcgcctaccaccatgcccggctaatttttgtatttttagtagagatggggtcgtcaccatattggccaggctggtcttgaattcctgacctcaagtgatccacctgcctcagcctccccaagtgctaggattacaggtgtgagccaacgcggctggcctaagactctgcaaagcagagaatgaaacccaaggggataacttgctccttcagtgattaggtgtcggtgttgttaaaccagcaagtgtctctctgtccaccatcactgctggccttttatgaaattagtcttctgattctgaactctggcagtgagccctgttacatccaagtcagaatttagggttcttccccacttgagggactcaaccctagaagggaaggaatgctctgggtgatcctaatagagaagtaggtatggggaccttggctgacactgtgccacctgccctctgggctgcagtgggatttgccgtgagggggaccagctggtggtgggccccacggatgatggctgcttcctggagctgagagtatgcagcatccagcgcaaccgctctgcctgtcgtgtgctgcgagctggtcaggctgctacactggcgcttggggactttgaccgtgcactgcttcgcaagggcatggtgatggtgagcccggagatgaatcctaccatctgctcggtgtttgaggcagagatagtcttactgttccatgccaccaccttccgacgaggattccaggtgacagtacacgtgggcaacgtacgtcagacggcagtggtggaaaagatccatgccaaggacaaactgcggacaggcgagaaggcagtggtacgtttccgcttcctgaaacacccagagtacctgaaggtgggcgccaaactgctgttccgggagggtgtcaccaagggcatcggccatgtcactgatgtacaagccattacagcaggagaagcccaggccaacatgggcttctgaacccttcaggcagggacagttctattgctgtccctacaatatataaggtgacttctggccatgctgccctgccattggcggctctgtgtgttaataggctagggagagaggggtgctgtctgccacttgctccctgccaactttctggagaggtgccaaacttggtgtggccaggaaagggcagtcctgagggagaagacaggattcagggcagtgctccgaagctgtgtgctcacctggttggctcatcaaacctggcaaccctgtggcctgtctgccggagctgactggatccactcatcaattcttcgtccccactactaagactgggcatgttttgctggtgtggtctctgcacttcaggaatggtcacaacagggggtagccctcaaaagcactcctttttctatacctcttctcaaggccatgtaagttgcccatctctacctggctgtggacaaaaggttatctgctcttggccatctggtggtggtggcggcccagagtctgaagaaatggcacagggacagtgaatggtagtgttgccaccctgtgctgaggcctgaggcctcttcctcagctttatctccctttccttcactcaagggccatttccccagtccctatctcccccatcccctcccggcttataggccccacaggtgctatttgttgtgctggcccaggcgtggggctaccaagcaaaggcttggcatataccaaaggccagctgcatgcccatcagtctggtctttttcctctgcggtcatgttggctttcatgctggatcaaatgttttactttcccagactggtggcatctgagttccccatcctaccactctcaccccactttcctgccccacctaaaccctcgttttagtaatttgtagtgactgttcccttccctctgttgcagggaaccaggaggaaagggaaagatgttgccatatttcctactctttaggcatggactctcctttccctttgttagtgtcctgggttcccatggactcagggatttgttggctaaggtttctctgtgcatatatatatatatacatatgtatatatatttaaatacacatatatattgtacagaataaaaatgttttattgaatacactgtgcttatgcgttacgtacaggctcagcttccttccagggctagatacctcttcaggattagagacaagtgaaaccccaacactgctgagccctgaatgtggaaagagcccagctggtatctcgttcaccattgtttttctctcctccacataggttcagagttccagtattgtaaccaagtattgtggcctattttccgtagttcaagtgagcagaatactgaggcctttcacgtgaaataggtagctaccctgtatttgaagagttggccacttgctagtggtcagaatagtaaggagcccacttctgtgccctggcagagatacagtgccagctacttaaagaagagtagaatttagagacaaaaggtaatctggtcccatatttttcaagtttacatagcctaaattactcttggaacaatgagggccacttgaccaaaccttagtccctgctcctgtttccatgttcatactacttgattttgacattttatgggtaaataggggccaaagtcaactgtaaatagaaactgcattttgaggagaccctggaaaagaaatatgtgacccaaagtcctatgtggcattctgcctctagagtattaaagtgatagcttccctaccactcaggctgttttataaaatgtaactggtttaacttgctactaacaagcctgtagttgaacaacttcctcctgtattaggggctaagctgtttacttcctctctatagctgctgatagagatgaaagctttgtccacaatttacttatcttttgcctgtattgtaaagaaaattttggaaaatcacatttcagtacttaataagacatctccaggaactagtgagcctctctgcaacattaatggaacatttagggggataaaaagtatataaggcagactcccaaggagtttatacatgtttatgatcccaattgtggtaatcagatctaaaattcttcactatatacattcatccaatg

SEQ ID NO: 371711 - DNA, 4947 bp, Homo sapiens
cctgcctcaggtttatttgtacaaatagcacaggaggaccccagccccatgcagatggtagcccaggggcgggggtggggggtcgcaccagtccttctgtcctcatgttggcagagatatctactctgaagcctttgtaggggcctgggtacgtttgggagcctgagctggaactgaagctggggctgcagcctgggccttggtttgatccttggccttggccttggcctttggccggcacagcctgagccccttggcaatacgggcacgattcggggtgggcaatgtaggcaagtcgatcgagcttgcggctgacaccctttgggatcttgggcttaacctccttgggctttacgagggccttgatagcctcggcacgtgcactcatggccttggcattgttggcctgcatcttctttaggccctttttgttgtgcttcttggcaaagcgcatgttcctcaggaacttggggtccacccccttaagagattcgtatctttgtgatcggggtttcttgataccatttctgtgccattttcgggactggttgtgtgtggtgtggttcttggacttggccatgtctgcaccataagccgcggctcccgaagcgacatgccccggaagatcaccgaggtgctagtacgaaaggtccctgacaaccaacagttcctagacctccgtgtggccgtcctggggaatgtggactctgggaagtcaactctgcttggagtcctgacccagggagagctggacaatgggcggggccgggctcggctcaaccttttccgccacctgcatgagattcagtctggccgaacctccagcatcagcttcgagatcctgggctttaacagcaagggagaggtgcatgggatcaatgggacccaatggggccagactctgaggatgggatggtagtagtgaaggacataggatgggggtagagtgtggagactttttgaaatagtatagatgaatgccctgaggggactgtgaacaagctctgcccctcttaggaaatcaatggggaatcaactaaattaaataaaaaatggggtcaagattaagaggcagggtcacccagggaatggtttaggtcctggcaactctgaaggggttggaagggctggcaggaggcactgagggccctgggccctgggccaggtggtgaattacagcgactcacggacagcagaagagatctgtgagagcagctccaagatgatcaccttcatcgacctggcaggccaccataagtacctacacaccaccatctttggcctcacatcatactgccccgactgcgccctgctcctcgtcagtgccaacactgggattgctggcaccacaagggaacatctggggctggccctggccctgaaagtgcccttcttcatcgtggtcagcaagatcgacctatgtgccaagaccacagtggagaggacagtacgccagctggagcgggtcctcaagcagcctggctgccacaaggtccccatgctggtcacctctgaggatgatgccgtcactgctgcccagcagtttgctcagtcacccaatgtcacccccatcttcacattgtccagtgtgtctggagagagtctggacctcctcaaagtctttctgaatattctgccgccactcaccaacagcaaagagcaggaggaactcatgcagcagctgacggagttccaggtggatgaaatctacacagtaccagaggtggggactgttgttggaggaacactttccagattaggctttcactatcagaagagctggagaacggtagtctgttggctttggagggaagaaacagtattgctgcctattggggaatctccaggcccctgagagagaagtgtgggtcttgagctccaggaagaaaactagagtgtattcaactgacttcatctcacacagggaaatgagagacgtcacttaagactcttctttctttctttctttcttttttttgagacagagtctcgctctgttgcccaggctggattgcagtggagcgatcttggctcactgcaacctctgcctcctgggttccagcaattctcctgcctcagccttgagtagctggaattacaggcgcctaccaccatgcccggctaatttttgtatttttagtagagatggggtcgtcaccatattggccaggctggtcttgaattcctgacctcaagtgatccacctgcctcagcctccccaagtgctaggattacaggtgtgagccaacgcggctggcctaagactctgcaaagcagagaatgaaacccaaggggataacttgctccttcagtgattaggtgtcggtgttgttaaaccagcaagtgtctctctgtccaccatcactgctggccttttatgaaattagtcttctgattctgaactctggcagtgagccctgttacatccaagtcagaatttagggttcttccccacttgagggactcaaccctagaagggaaggaatgctctgggtgatcctaatagagaagtaggtatggggaccttggctgacactgtgccacctgccctctgggctgcagtgggatttgccgtgagggggaccagctggtggtgggccccacggatgatggctgcttcctggagctgagagtatgcagcatccagcgcaaccgctctgcctgtcgtgtgctgcgagctggtcaggctgctacactggcgcttggggactttgaccgtgcactgcttcgcaagggcatggtgatggtgagcccggagatgaatcctaccatctgctcggtgtttgaggcagagatagtcttactgttccatgccaccaccttccgacgaggattccaggtgacagtacacgtgggcaacgtacgtcagacggcagtggtggaaaagatccatgccaaggacaaactgcggacaggcgagaaggcagtggctagggagagaggggtgctgtctgccacttgctccctgccaactttctggagaggtgccaaacttggtgtggccaggaaagggcagtcctgagggagaagacaggattcagggcagtgctccgaagctgtgtgctcacctggttggctcatcaaacctggcaaccctgtggcctgtctgccggagctgactggatccactcatcaattcttcgtccccactactaagactgggcatgttttgctggtgtggtctctgcacttcaggaatggtcacaacagggggtagccctcaaaagcactcctttttctatacctcttctcaaggccatgtaagttgcccatctctacctggctgtggacaaaaggttatctgctcttggccatctggtggtggtggcggcccagagtctgaagaaatggcacagggacagtgaatggtagtgttgccaccctgtgctgaggcctgaggcctcttcctcagctttatctccctttccttcactcaagggccatttccccagtccctatctcccccatcccctcccggcttataggccccacaggtgctatttgttgtgctggcccaggcgtggggctaccaagcaaaggcttggcatataccaaaggccagctgcatgcccatcagtctggtctttttcctctgcggtcatgttggctttcatgctggatcaaatgttttactttcccagactggtggcatctgagttccccatcctaccactctcaccccactttcctgccccacctaaaccctcgttttagtaatttgtagtgactgttcccttccctctgttgcagggaaccaggaggaaagggaaagatgttgccatatttcctactctttaggcatggactctcctttccctttgttagtgtcctgggttcccatggactcagggatttgttggctaaggtttctctgtgcatatatatatatatacatatgtatatatatttaaatacacatatatattgtacagaataaaaatgttttattgaatacactgtgcttatgcgttacgtacaggctcagcttccttccagggctagatacctcttcaggattagagacaagtgaaaccccaacactgctgagccctgaatgtggaaagagcccagctggtatctcgttcaccattgtttttctctcctccacataggttcagagttccagtattgtaaccaagtattgtggcctattttccgtagttcaagtgagcagaatactgaggcctttcacgtgaaataggtagctaccctgtatttgaagagttggccacttgctagtggtcagaatagtaaggagcccacttctgtgccctggcagagatacagtgccagctacttaaagaagagtagaatttagagacaaaaggtaatctggtcccatatttttcaagtttacatagcctaaattactcttggaacaatgagggccacttgaccaaaccttagtccctgctcctgtttccatgttcatactacttgattttgacattttatgggtaaataggggccaaagtcaactgtaaatagaaactgcattttgaggagaccctggaaaagaaatatgtgacccaaagtcctatgtggcattctgcctctagagtattaaagtgatagcttccctaccactcaggctgttttataaaatgtaactggtttaacttgctactaacaagcctgtagttgaacaacttcctcctgtattaggggctaagctgtttacttcctctctatagctgctgatagagatgaaagctttgtccacaatttacttatcttttgcctgtattgtaaagaaaattttggaaaatcacatttcagtacttaataagacatctccaggaactagtgagcctctctgcaacattaatggaacatttagggggataaaaagtatataaggcagactcccaaggagtttatacatgtttatgatcccaattgtggtaatcagatctaaaattcttcactatatacattcatccaatg

SEQ ID NO: 371712 - DNA, 2367 bp, Homo sapiens
gtggtgatctagaggatcccttcgatggtgggcaacgtacgtcagacggcagtggtggaaaagatccatgccaaggacaaactgcggacaggcgagaaggcagtggtacgtttccgcttcctgaaacacccagagtacctgaaggtgggcgccaaactgctgttccgggagggtgtcaccaagggcatcggccatgtcactgatgtacaagccattacagcaggagaagcccaggccaacatgggcttctgaacccttcaggcagggacagttctattgctgtccctacaatatataaggtgacttctggccatgctgccctgccattggcggctctgtgtgttaataggctagggagagaggggtgctgtctgccacttgctccctgccaactttctggagaggtgccaaacttggtgtggccaggaaagggcagtcctgagggagaagacaggattcagggcagtgctccgaagctgtgtgctcacctggttggctcatcaaacctggcaaccctgtggcctgtctgccggagctgactggatccactcatcaattcttcgtccccactactaagactgggcatgttttgctggtgtggtctctgcacttcaggaatggtcacaacagggggtagccctcaaaagcactcctttttctatacctcttctcaaggccatgtaagttgcccatctctacctggctgtggacaaaaggttatctgctcttggccatctggtggtggtggcggcccagagtctgaagaaatggcacagggacagtgaatggtagtgttgccaccctgtgctgaggcctgaggcctcttcctcagctttatctccctttccttcactcaagggccatttccccagtccctatctcccccatcccctcccggcttataggccccacaggtgctatttgttgtgctggcccaggcgtggggctaccaagcaaaggcttggcatataccaaaggccagctgcatgcccatcagtctggtctttttcctctgcggtcatgttggctttcatgctggatcaaatgttttactttcccagactggtggcatctgagttccccatcctaccactctcaccccactttcctgccccacctaaaccctcgttttagtaatttgtagtgactgttcccttccctctgttgcagggaaccaggaggaaagggaaagatgttgccatatttcctactctttaggcatggactctcctttccctttgttagtgtcctgggttcccatggactcagggatttgttggctaaggtttctctgtgcatatatatatatatacatatgtatatatatttaaatacacatatatattgtacagaataaaaatgttttattgaatacactgtgcttatgcgttacgtacaggctcagcttccttccagggctagatacctcttcaggattagagacaagtgaaaccccaacactgctgagccctgaatgtggaaagagcccagctggtatctcgttcaccattgtttttctctcctccacataggttcagagttccagtattgtaaccaagtattgtggcctattttccgtagttcaagtgagcagaatactgaggcctttcacgtgaaataggtagctaccctgtatttgaagagttggccacttgctagtggtcagaatagtaaggagcccacttctgtgccctggcagagatacagtgccagctacttaaagaagagtagaatttagagacaaaaggtaatctggtcccatatttttcaagtttacatagcctaaattactcttggaacaatgagggccacttgaccaaaccttagtccctgctcctgtttccatgttcatactacttgattttgacattttatgggtaaataggggccaaagtcaactgtaaatagaaactgcattttgaggagaccctggaaaagaaatatgtgacccaaagtcctatgtggcattctgcctctagagtattaaagtgatagcttccctaccactcaggctgttttataaaatgtaactggtttaacttgctactaacaagcctgtagttgaacaacttcctcctgtattaggggctaagctgtttacttcctctctatagctgctgatagagatgaaagctttgtccacaatttacttatcttttgcctgtattgtaaagaaaattttggaaaatcacatttcagtacttaataagacatctccaggaactagtgagcctctctgcaacattaatggaacatttagggggataaaaagtatataaggcagactcccaaggagtttatacatgtttatgatcccaattgtggtaatcagatctaaaattcttcactatatacattcatccaatg

SEQ ID NO: 371713 - DNA, 2493 bp, Homo sapiens
ggatcccttcgattgggggcacttagaggtggggagcagagaatctcttatccaacatcaacatctggtcagattgaactcttcaatctcttgcactcaaagcttgttaagatagttaagcgtgcataagttgcccgccaatcgaatcgataggtgggcaacgtacgtcagacggcagtggtggaaaagatccatgccaaggacaaactgcggacaggcgagaaggcagtggtacgtttccgcttcctgaaacacccagagtacctgaaggtgggcgccaaactgctgttccgggagggtgtcaccaagggcatcggccatgtcactgatgtacaagccattacagcaggagaagcccaggccaacatgggcttctgaacccttcaggcagggacagttctattgctgtccctacaatatataaggtgacttctggccatgctgccctgccattggcggctctgtgtgttaataggctagggagagaggggtgctgtctgccacttgctccctgccaactttctggagaggtgccaaacttggtgtggccaggaaagggcagtcctgagggagaagacaggattcagggcagtgctccgaagctgtgtgctcacctggttggctcatcaaacctggcaaccctgtggcctgtctgccggagctgactggatccactcatcaattcttcgtccccactactaagactgggcatgttttgctggtgtggtctctgcacttcaggaatggtcacaacagggggtagccctcaaaagcactcctttttctatacctcttctcaaggccatgtaagttgcccatctctacctggctgtggacaaaaggttatctgctcttggccatctggtggtggtggcggcccagagtctgaagaaatggcacagggacagtgaatggtagtgttgccaccctgtgctgaggcctgaggcctcttcctcagctttatctccctttccttcactcaagggccatttccccagtccctatctcccccatcccctcccggcttataggccccacaggtgctatttgttgtgctggcccaggcgtggggctaccaagcaaaggcttggcatataccaaaggccagctgcatgcccatcagtctggtctttttcctctgcggtcatgttggctttcatgctggatcaaatgttttactttcccagactggtggcatctgagttccccatcctaccactctcaccccactttcctgccccacctaaaccctcgttttagtaatttgtagtgactgttcccttccctctgttgcagggaaccaggaggaaagggaaagatgttgccatatttcctactctttaggcatggactctcctttccctttgttagtgtcctgggttcccatggactcagggatttgttggctaaggtttctctgtgcatatatatatatatacatatgtatatatatttaaatacacatatatattgtacagaataaaaatgttttattgaatacactgtgcttatgcgttacgtacaggctcagcttccttccagggctagatacctcttcaggattagagacaagtgaaaccccaacactgctgagccctgaatgtggaaagagcccagctggtatctcgttcaccattgtttttctctcctccacataggttcagagttccagtattgtaaccaagtattgtggcctattttccgtagttcaagtgagcagaatactgaggcctttcacgtgaaataggtagctaccctgtatttgaagagttggccacttgctagtggtcagaatagtaaggagcccacttctgtgccctggcagagatacagtgccagctacttaaagaagagtagaatttagagacaaaaggtaatctggtcccatatttttcaagtttacatagcctaaattactcttggaacaatgagggccacttgaccaaaccttagtccctgctcctgtttccatgttcatactacttgattttgacattttatgggtaaataggggccaaagtcaactgtaaatagaaactgcattttgaggagaccctggaaaagaaatatgtgacccaaagtcctatgtggcattctgcctctagagtattaaagtgatagcttccctaccactcaggctgttttataaaatgtaactggtttaacttgctactaacaagcctgtagttgaacaacttcctcctgtattaggggctaagctgtttacttcctctctatagctgctgatagagatgaaagctttgtccacaatttacttatcttttgcctgtattgtaaagaaaattttggaaaatcacatttcagtacttaataagacatctccaggaactagtgagcctctctgcaacattaatggaacatttagggggataaaaagtatataaggcagactcccaaggagtttatacatgtttatgatcccaattgtggtaatcagatctaaaattcttcactatatacattcatccaatg

SEQ ID NO: 371714 - DNA, 4176 bp, Homo sapiens
cctgcctcaggtttatttgtacaaatagcacaggaggaccccagccccatgcagatggtagcccaggggcgggggtggggggtcgcaccagtccttctgtcctcatgttggcagagatatctactctgaagcctttgtaggggcctgggtacgtttgggagcctgagctggaactgaagctggggctgcagcctgggccttggtttgatccttggccttggccttggcctttggccggcacagcctgagccccttggcaatacgggcacgattcggggtgggcaatgtaggcaagtcgatcgagcttgcggctgacaccctttgggatcttgggcttaacctccttgggctttacgagggccttgatagcctcggcacgtgcactcatggccttggcattgttggcctgcatcttctttaggccctttttgttgtgcttcttggcaaagcgcatgttcctcaggaacttggggtccacccccttaagagattcgtatctttgtgatcggggtttcttgataccatttctgtgccattttcgggactggttgtgtgtggtgtggttcttggacttggccatgtctgcaccataagccgcggctcccgaagcgacatgccccggaagatcaccgaggtgctagtacgaaaggtccctgacaaccaacagttcctagacctccgtgtggccgtcctggggaatgtggactctgggaagtcaactctgcttggagtcctgacccagggagagctggacaatgggcggggccgggctcggctcaaccttttccgccacctgcatgagattcagtctggccgaacctccagcatcagcttcgagatcctgggctttaacagcaagggagaggtgcatgggatcaatgggacccaatggggccagactctgaggatgggatggtagtagtgaaggacataggatgggggtagagtgtggagactttttgaaatagtatagatgaatgccctgaggggactgtgaacaagctctgcccctcttaggaaatcaatggggaatcaactaaattaaataaaaaatggggtcaagattaagaggcagggtcacccagggaatggtttaggtcctggcaactctgaaggggttggaagggctggcaggaggcactgagggccctgggccctgggccaggtggtgaattacagcgactcacggacagcagaagagatctgtgagagcagctccaagatgatcaccttcatcgacctggcaggccaccataagtacctacacaccaccatctttggcctcacatcatactgccccgactgcgccctgctcctcgtcagtgccaacactgggattgctggcaccacaagggaacatctggggctggccctggccctgaaagtgcccttcttcatcgtggtcagcaagatcgacctatgtgccaagaccacagtggagaggacagtacgccagctggagcgggtcctcaagcagcctggctgccacaaggtccccatgctggtcacctctgaggatgatgccgtcactgctgcccagcagtttgctcagtcacccaatgtcacccccatcttcacattgtccagtgtgtctggagagagtctggacctcctcaaagtctttctgaatattctgccgccactcaccaacagcaaagagcaggaggaactcatgcagcagctgacggagttccaggtggatgaaatctacacagtaccagaggtggggactgttgttggaggaacactttccagattaggctttcactatcagaagagctggagaacggtagtctgttggctttggagggaagaaacagtattgctgcctattggggaatctccaggcccctgagagagaagtgtgggtcttgagctccaggaagaaaactagagtgtattcaactgacttcatctcacacagggaaatgagagacgtcacttaagactcttctttctttctttctttcttttttttgagacagagtctcgctctgttgcccaggctggattgcagtggagcgatcttggctcactgcaacctctgcctcctgggttccagcaattctcctgcctcagccttgagtagctggaattacaggcgcctaccaccatgcccggctaatttttgtatttttagtagagatggggtcgtcaccatattggccaggctggtcttgaattcctgacctcaagtgatccacctgcctcagcctccccaagtgctaggattacaggtgtgagccaacgcggctggcctaagactctgcaaagcagagaatgaaacccaaggggataacttgctccttcagtgattaggtgtcggtgttgttaaaccagcaagtgtctctctgtccaccatcactgctggccttttatgaaattagtcttctgattctgaactctggcagtgagccctgttacatccaagtcagaatttagggttcttccccacttgagggactcaaccctagaagggaaggaatgctctgggtgatcctaatagagaagtaggtatggggaccttggctgacactgtgccacctgccctctgggctgcagtgggatttgccgtgagggggaccagctggtggtgggccccacggatgatggctgcttcctggagctgagagtatgcagcatccagcgcaaccgctctgcctgtcgtgtgctgcgagctggtcaggctgctacactggcgcttggggactttgaccgtgcactgcttcgcaagggcatggtgatggtgagcccggagatgaatcctaccatctgctcggtgtttgaggcagagatagtcttactgttccatgccaccaccttccgacgaggattccaggtgacagtacacgtgggcaacgtacgtcagacggcagtggtggaaaagatccatgccaaggacaaactgcggacaggcgagaaggcagtggtacgtttccgcttcctgaaacacccagagtacctgaaggtgggcgccaaactgctgttccgggagggtgtcaccaagggcatcggccatgtcactgatgtacaagccattacagcaggagaagcccaggccaacatgggcttctgaacccttcaggcagggacagttctattgctgtccctacaatatataaggtgacttctggccatgctgccctgccattggcggctctgtgtgttaataggctagggagagaggggtgctgtctgccacttgctccctgccaactttctggagaggtgccaaacttggtgtggccaggaaagggcagtcctgagggagaagacaggattcagggcagtgctccgaagctgtgtgctcacctggttggctcatcaaacctggcaaccctgtggcctgtctgccggagctgactggatccactcatcaattcttcgtccccactactaagactgggcatgttttgctggtgtggtctctgcacttcaggaatggtcacaacagggggtagccctcaaaagcactcctttttctatacctcttctcaaggccatgtaagttgcccatctctacctggctgtggacaaaaggttatctgctcttggccatctggtggtggtggcggcccagagtctgaagaaatggcacagggacagtgaatggtagtgttgccaccctgtgctgaggcctgaggcctcttcctcagctttatctccctttccttcactcaagggccatttccccagtccctatctcccccatcccctcccggcttataggccccacaggtgctatttgttgtgctggcccaggcgtggggctaccaagcaaaggcttggcatataccaaaggccagctgcatgcccatcagtctggtctttttcctctgcggtcatgttggctttcatgctggatcaaatgttttactttcccagactggtggcatctgagttccccatcctaccactctcaccccactttcctgccccacctaaaccctcgttttagtaatttgtagtgactgttcccttccctctgttgcagggaaccaggaggaaagggaaagatgttgccatatttcctactctttaggcatggactctcctttccctttgttagtgtcctgggttcccatggactcagggatttgttggctaaggtttctctgtgcatatatatatatatacatatgtatatatatttaaatacacatatatattgtacag

SEQ ID NO: 371715 - DNA, 3252 bp, Homo sapiens
cctgcctcaggtttatttgtacaaatagcacaggaggaccccagccccatgcagatggtagcccaggggcgggggtggggggtcgcaccagtccttctgtcctcatgttggcagagatatctactctgaagcctttgtaggggcctgggtacgtttgggagcctgagctggaactgaagctggggctgcagcctgggccttggtttgatccttggccttggccttggcctttggccggcacagcctgagccccttggcaatacgggcacgattcggggtgggcaatgtaggcaagtcgatcgagcttgcggctgacaccctttgggatcttgggcttaacctccttgggctttacgagggccttgatagcctcggcacgtgcactcatggccttggcattgttggcctgcatcttctttaggccctttttgttgtgcttcttggcaaagcgcatgttcctcaggaacttggggtccacccccttaagagattcgtatctttgtgatcggggtttcttgataccatttctgtgccattttcgggactggttgtgtgtggtgtggttcttggacttggccatgtctgcaccataagccgcggctcccgaagcgacatgccccggaagatcaccgaggtgctagtacgaaaggtccctgacaaccaacagttcctagacctccgtgtggccgtcctggggaatgtggactctgggaagtcaactctgcttggagtcctgacccagggagagctggacaatgggcggggccgggctcggctcaaccttttccgccacctgcatgagattcagtctggccgaacctccagcatcagcttcgagatcctgggctttaacagcaagggagaggtgcatgggatcaatgggacccaatggggccagactctgaggatgggatggtagtagtgaaggacataggatgggggtagagtgtggagactttttgaaatagtatagatgaatgccctgaggggactgtgaacaagctctgcccctcttaggaaatcaatggggaatcaactaaattaaataaaaaatggggtcaagattaagaggcagggtcacccagggaatggtttaggtcctggcaactctgaaggggttggaagggctggcaggaggcactgagggccctgggccctgggccaggtggtgaattacagcgactcacggacagcagaagagatctgtgagagcagctccaagatgatcaccttcatcgacctggcaggccaccataagtacctacacaccaccatctttggcctcacatcatactgccccgactgcgccctgctcctcgtcagtgccaacactgggattgctggcaccacaagggaacatctggggctggccctggccctgaaagtgcccttcttcatcgtggtcagcaagatcgacctatgtgccaagaccacagtggagaggacagtacgccagctggagcgggtcctcaagcagcctggctgccacaaggtccccatgctggtcacctctgaggatgatgccgtcactgctgcccagcagtttgctcagtcacccaatgtcacccccatcttcacattgtccagtgtgtctggagagagtctggacctcctcaaagtctttctgaatattctgccgccactcaccaacagcaaagagcaggaggaactcatgcagcagctgacggagttccaggtggatgaaatctacacagtaccagaggtggggactgttgttggaggaacactttccagattaggctttcactatcagaagagctggagaacggtagtctgttggctttggagggaagaaacagtattgctgcctattggggaatctccaggcccctgagagagaagtgtgggtcttgagctccaggaagaaaactagagtgtattcaactgacttcatctcacacagggaaatgagagacgtcacttaagactcttctttctttctttctttcttttttttgagacagagtctcgctctgttgcccaggctggattgcagtggagcgatcttggctcactgcaacctctgcctcctgggttccagcaattctcctgcctcagccttgagtagctggaattacaggcgcctaccaccatgcccggctaatttttgtatttttagtagagatggggtcgtcaccatattggccaggctggtcttgaattcctgacctcaagtgatccacctgcctcagcctccccaagtgctaggattacaggtgtgagccaacgcggctggcctaagactctgcaaagcagagaatgaaacccaaggggataacttgctccttcagtgattaggtgtcggtgttgttaaaccagcaagtgtctctctgtccaccatcactgctggccttttatgaaattagtcttctgattctgaactctggcagtgagccctgttacatccaagtcagaatttagggttcttccccacttgagggactcaaccctagaagggaaggaatgctctgggtgatcctaatagagaagtaggtatggggaccttggctgacactgtgccacctgccctctgggctgcagtgggatttgccgtgagggggaccagctggtggtgggccccacggatgatggctgcttcctggagctgagagtatgcagcatccagcgcaaccgctctgcctgtcgtgtgctgcgagctggtcaggctgctacactggcgcttggggactttgaccgtgcactgcttcgcaagggcatggtgatggtgagcccggagatgaatcctaccatctgctcggtgtttgaggcagagatagtcttactgttccatgccaccaccttccgacgaggattccaggtgacagtacacgtgggcaacgtacgtcagacggcagtggtggaaaagatccatgccaaggacaaactgcggacaggcgagaaggcagtggtacgtttccgcttcctgaaacacccagagtacctgaaggttcagagttccagtattgtaaccaagtattgtggcctattttccgtagttcaagtgagcagaatactgaggcctttcacgtgaaataggtagctaccctgtatttgaagagttggccacttgctagtggtcagaatagtaaggagcccacttctgtgccctggcagagatacagtgccagctacttaaagaagagtagaatttagagacaaaaggtaaagagcagctgatatgtaaattgcaaagcccaccccaggaataaagaaagaaaatcttacatcatt

SEQ ID NO: 371716 - DNA, 388 bp, Homo sapiens
cccttgacccagtcttcagttagaggggtgagagattggagttcttatctctggcaattcatccacagttcctagacctccgtgtggccgtcctggggaatgtggactctgggaagtcaactctgcttggagtcctgacccagggagagctggacaatgggcggggccgggctcggctcaaccttttccgccacctgcatgagattcagtctggccgaacctccagcatcagcttcgagatcctgggctttaacagcaagggagaggtgcatgggatcaatgggacccaatggggccagactctgaggatgggatggtagtagtgaaggacataggatgggggtagagtgtggagactttttgaaatagtatagatgaatgccctgag

SEQ ID NO: 371717 - DNA, 555 bp, Homo sapiens
catctctaaaaaaaattttttttaaataaataactaacagtaaccttaaaatgaaattatggttcttaatgatagtggcttgttacatctcttatagccccacataggttagatttttcaatataaaattagaggataggcacattctttctttttagatgcttaagaaattacctcacataaacattttaccatttaaaaaatgatgtttaccagtccatttcagttcttcaactgaggtccattgtaaaatatactacttttgctgtataccaagctacagttgtagatattgattcaagtaaaggtgatacttcctcttccagttgatttttatactcttaatttgtgtatacatacattttcacacatgaatatgtgtgtgtaagagacagagtgcattcatttgcacccagggttggaggaaagaagagaaagaaatgagaatatgtatattggagatacttggctatttgtacctcacctgcccatgaaggctaaaaatggatggttaaacacctgtctctgtgctcatgatgaaaatgacctttgcaa

SEQ ID NO: 371718 - DNA, 257 bp, Homo sapiens
tttatgaaaggatatgaaaaattagcatatcctttacaaacccagattggcatttagaattgaggaaaggtgtgtaacatcaatttacttattttggttaagcaaattctatcaaataataatatgtgcagttagtatctcctgttccacctcgtagctgctttacctaaaccatgcattgacacgtacctccaaggcctcaaagtgcccacagtgtgtgctcccacagcattaaaatgcacccccttaacatttta

SEQ ID NO: 371719 - DNA, 253 bp, Homo sapiens
acccttcccacaacacagactatttttcaaatagaaataaacatatggatgtgaaactgcttgaaaagaatttttttaaatataataaatgaaacaactagacagaagataaggaaataggggacttaaacgacacaataaatcaactaggtttaacatacatgtatagaacactctagtaaacaacaatagcattcacattcttctcaagaacacatgggacattttccaagatagaccatatgttaggcag

SEQ ID NO: 371720 - DNA, 1565 bp, Homo sapiens
gaggaacttggctgggcctaaactcaatccgtggtctggtacaggtttcagggcaaagcggccatgcgttccgggggccgcgggcgaccccgcctgcggctgggggaacgtggcctcatggagccactcttgccgccgaagcgccgcctgctaccgcgggttcggctcttgcctctgttgctggcgctggccgtgggctcggcgttctacaccatttggagcggctggcaccgcaggactgaggagctgccgctgggccgggagctgcgggtcccattgatcggaagcctccccgaagcccggctgcggagggtggtgggacaactggatccacagcgtctctggagcacttatctgcgccccctgctggttgtgcgaaccccgggcagcccgggaaatctccaagtcagaaagttcctggaggccacgctgcggtccctgacagcaggttggcacgtggagctggatcccttcacagcctcaacacccctggggccagtggactttggcaatgtggtggccacactggacccaagggctgcccgtcacctcacccttgcctgccattatgactcgaagctcttcccacccggatcgaccccctttgtaggggccacggattcggctgtgccctgtgccctgctgctggagctggcccaagcacttgacctggagctgagcagggccaaaaaacaggcagccccggtgaccctgcaactgctcttcttggatggtgaagaggcgctgaaggagtggggacccaaggactccctttacggttcccggcacctggcccagctcatggagtctatacctcacagccccggccccaccaggatccaggctattgagctctttatgcttcttgatctcctgggagcccccaatcccaccttctacagccacttccctcgcacggtccgctggttccatcggctgaggagcattgagaagcgtctgcaccgtttgaacctgctgcagtctcatccccaggaagtgatgtacttccaacccggggagccctttggctctgtggaagacgaccacatccccttcctccgcagaggggtacccgtgctccatctcatctccacgcccttccctgctgtctggcacacccctgcggacaccgaggtcaatctccacccacccacggtacacaacttgtgccgcattctcgctgtgttcctggctgaatacctggggctctagcgtgcttggccaatgactgtggagaggactgtgagagagaaggtcccagcgggggccagtgaagctcaggcaggatctgcctagggtgtgctggtttgtccttttcatacctttgtctcctaattgtgctacaattggaagaccttctttcttttgattgtctcaagctgccacccttcaaggacagggaagagaccactgtgggatgacagccagaggaataagaacttgctccctccccagaggtaaacacttggtccaaaggtttgcagggcctgggcaacagagcgagactccatctcaataaataaataaataaataaatattttttaaaaagagtaaaagactaaaa

SEQ ID NO: 371721 - DNA, 1599 bp, Homo sapiens
gaggaacttggctgggcctaaactcaatccgtggtctggtacaggtttcagggcaaagcggccatgcgttccgggggccgcgggcgaccccgcctgcggctgggggaacgtggcctcatggagccactcttgccgccgaagcgccgcctgctaccgcgggttcggctcttgcctctgttgctggcgctggccgtgggctcggcgttctacaccatttggagcggctggcaccgcaggactgaggagctgccgctgggccgggagctgcgggtcccattgatcggaagcctccccgaagcccggctgcggagggtggtgggacaactggatccacagcgtctctggagcacttatctgcgccccctgctggttgtgcgaaccccgggcagcccgggaaatctccaagtcagaaagttcctggaggccacgctgcggtccctgacagcaggttggcacgtggagctggatcccttcacagcctcaacacccctggggccagtggactttggcaatgtggtggccacactggacccaagggctgcccgtcacctcacccttgcctgccattatgactcgaagctcttcccacccggatcgaccccctttgtaggggccacggattcggctgtgccctgtgccctgctgctggagctggcccaagcacttgacctggagctgagcagggccaaaaaacaggcagccccggtgaccctgcaactgctcttcttggatggtgaagaggcgctgaaggagtggggacccaaggactccctttacggttcccggcacctggcccagctcatggagtctatacctcacagccccggccccaccaggatccaggctattgagctctttatgcttcttgatctcctgggagcccccaatcccaccttctacagccacttccctcgcacggtccgctggttccatcggctgaggagcattgagaagcgtctgcaccgtttgaacctgctgcagtctcatccccaggaagtgatgtacttccaacccggggagccctttggctctgtggaagacgaccacatccccttcctccgcagaggggtacccgtgctccatctcatctccacgcccttccctgctgtctggcacacccctgcggacaccgaggtcaatctccacccacccacggtacacaacttgtgccgcattctcgctgtgttcctggctgaatacctggggctctagcgtgcttggccaatgactgtggagaggactgtgagagagaaggtcccagcgggggccagtgaagctcaggcaggatctgcctagggtgtgctggtttgtccttttcatacctttgtctcctaattgtgctacaattggaagaccttctttcttttgattgtctcaagctgccacccttcaaggacagggaagagaccactgtgggatgacagccagaggaataagaacttgctccctccccagaggtaaacacttggtccaaaggtttgcagggaccaaatactgttttttttttttttgagacggagcctgggcaacagagcgagactccatctcaataaataaataaataaataaatattttttaaaaagagtaaaagactaaaa

SEQ ID NO: 371722 - DNA, 479 bp, Homo sapiens
caagtagctgggattacaggcgcccaccaccacacccagctaatttttgtatttttagtagagacagggtttcaccatgttggccaagctggtttcgaactcctgacctcaggtgatccacctgccttggtctccctaagtgctgggattacaggcatgagccaccacaccaggccacaagatcttgtctcaaaaaaaagaatgtctatgtcttagactctgagggattgaatgagaccaggaacatagtgagcccacaggaaggagtaactggcattcactcttgttgggctgaccagggctttgtctctgggtgctctgccttcctctgatttgtggactggggaccttcgactactaaggactaacccttcctctctaatcgcccccacttccagagaagcgtctgcaccgtttgaacctgctgcagtctcatccccaggaagtgatgtacttccaacccggggagccctttggct

SEQ ID NO: 371723 - DNA, 291 bp, Homo sapiens
gcaaggttacctagaggttgggcttgggctcctgggttgtggtgggctgcagtggacctgacaaagtctcctctgtcacttcaggggtacccgtgctccatctcatctccacgcccttccctgctgtctggcacacccctgcggacaccgaggtcaatctccacccacccacggtacacaacttgtgccgcattctcgctgtgttcctggctgaatacctggggctctagcgtgcttggccaatgactgtggagaggactgtgagagagaaggtcccagcgggggccagtg

SEQ ID NO: 371724 - DNA, 1221 bp, Homo sapiens
gaggaacttggctgggcctaaactcaatccgtggtctggtacaggtttcagggcaaagcggccatgcgttccgggggccgcgggcgaccccgcctgcggctgggggaacgtggcctcatggagccactcttgccgccgaagcgccgcctgctaccgcgggttcggctcttgcctctgttgctggcgctggccgtgggctcggcgttctacaccatttggagcggctggcaccgcaggactgaggagctgccgctgggccgggagctgcgggtcccattgatcggaagcctccccgaagcccggctgcggagggtggtgggacaactggatccacagcgtctctggagcacttatctgcgccccctgctggttgtgcgaaccccgggcagcccgggaaatctccaagtcagaaaggcagccccggtgaccctgcaactgctcttcttggatggtgaagaggcgctgaaggagtggggacccaaggactccctttacggttcccggcacctggcccagctcatggagtctatacctcacagccccggccccaccaggatccaggctattgagctctttatgcttcttgatctcctgggagcccccaatcccaccttctacagccacttccctcgcacggtccgctggttccatcggctgaggagcattgagaagcgtctgcaccgtttgaacctgctgcagtctcatccccaggaagtgatgtacttccaacccggggagccctttggctctgtggaagacgaccacatccccttcctccgcagaggggtacccgtgctccatctcatctccacgcccttccctgctgtctggcacacccctgcggacaccgaggtcaatctccacccacccacggtacacaacttgtgccgcattctcgctgtgttcctggctgaatacctggggctctagcgtgcttggccaatgactgtggagaggactgtgagagagaaggtcccagcgggggccagtgaagctcaggcaggatctgcctagggtgtgctggtttgtccttttcatacctttgtctcctaattgtgctacaattggaagaccttctttcttttgattgtctcaagctgccacccttcaaggacagggaagagaccactgtgggatgacagcctgggcaacagagcgagactccatctcaataaataaataaataaataaatattttttaaaaagagtaaaagactaaaa

SEQ ID NO: 371725 - DNA, 989 bp, Homo sapiens
tgtgggtatgttgactgtgagggctatgtcctgagctggctctggcacccccctgctgcccccacaggcagccccggtgaccctgcaactgctcttcttggatggtgaagaggcgctgaaggagtggggacccaaggactccctttacggttcccggcacctggcccagctcatggagtctatacctcacagccccggccccaccaggatccaggctatttcctagcctttctccttaggagctctttatgcttcttgatctcctgggagcccccaatcccaccttctacagccacttccctcgcacggtccgctggttccatcggctgaggagcattgagaagcgtctgcaccgtttgaacctgctgcagtctcatccccaggaagtgatgtacttccaacccggggagccctttggctctgtggaagacgaccacatccccttcctccgcagaggggtacccgtgctccatctcatctccacgcccttccctgctgtctggcacacccctgcggacaccgaggtcaatctccacccacccacggtacacaacttgtgccgcattctcgctgtgttcctggctgaatacctggggctctagcgtgcttggccaatgactgtggagaggactgtgagagagaaggtcccagcgggggccagtgaagctcaggcaggatctgcctagggtgtgctggtttgtccttttcatacctttgtctcctaattgtgctacaattggaagaccttctttcttttgattgtctcaagctgccacccttcaaggacagggaagagaccactgtgggatgacagccagaggaataagaacttgctccctccccagaggtaaacacttggtccaaaggtttgcagggaccaaatactgttttttttttttttgagacggagcctgggcaacagagcgagactccatctcaataaataaataaataaataaatattttttaaaaagagtaaaagactaaaa

SEQ ID NO: 371726 - DNA, 6354 bp, Homo sapiens
agactgcgcgagggcggccccgggggcgagcggctgtgcgcggggccaagggcgggggcagcaggccggagtcctgaaagtcgagcgagctccgggttttgaaaatgttggagggaaaagctcctcggagatgagcgtgaccccctggctcgtggtggccgcctgttctcactaacgccatggcggggaccggagtgagaaaccggtgtctgtcactgactgcaaagtgagcgagaagcaggctgcgggccgtcccagcacgacgtggagccccgcggagacctcgagatgccccgcggggaagctcctggccccgggagacggggggctaaggacgaggccctgggcgaagaatcgggggagcggtggagccccgagttccatctgcagaggaaattggcggacagcagccacagtgaacagcaagatcgaaacagagtttctgaagaacttatcatggttgtccaagaaatgaaaaaatacttcccctcggagagacgcaataaaccaagcactctagatgccctcaactatgctctccgctgtgtccacagcgttcaagcaaacagtgagtttttccagattctcagtcagaatggagcacctcaggcagatgtgagcatgtacagtcttgaggagctggccactatcgcttcagaacacacttccaaaaacacagatacctttgtggcagtattttcatttctgtctggaaggttagtgcacatttctgaacaggctgctttgatcctgaatcgtaagaaagatgtcctggcgtcttctcactttgttgacctgcttgcacctcaagacatgagggtattctacgcgcacactgccagagctcagcttcctttctggaacaactggacccaaagagcagctgcacggtatgaatgtgctccggtgaaaccttttttctgcaggatccgtggaggtgaagacagaaagcaagagaagtgtcactccccattccggatcatcccctatctgattcatgtacatcaccctgcccagccagaattggaatcggaaccttgctgtctcactgtggttgaaaagattcactctggttatgaagctcctcggatcccagtgaataaaagaatcttcaccaccacacacaccccagggtgtgtttttcttgaagtagatgaaaaagcagtgcctttgctgggttacctacctcaggacctgattggaacatcgatcctaagctacctgcaccctgaagatcgttctctgatggttgccatacaccaaaaagttttgaagtatgcagggcatcctccctttgaacattctcccattcgattttgtactcaaaacggagactacatcatactggattccagttggtccagctttgtgaatccctggagccggaagatttctttcatcattggtcggcataaagttcgaacgagcccactaaatgaggatgtttttgctaccaaaattaaaaagatgaacgataatgacaaagacataacagaattacaagaacaaatttacaaacttctcttacagccagttcacgtgagcgtgtccagcggctacgggagcctggggagcagcgggtcgcaggagcagcttgtcagcatcgcctcctccagtgaggccagtgggcaccgtgtggaggagacgaaggcggagcagatgaccttgcagcaggtctatgccagtgtgaacaaaattaaaaatctgggtcagcagctctacattgagtcaatgaccaaatcatcattcaagccagtgacggggacacgcacagaaccgaatggtggtggtgagtcagcgaatggtggtggtgaatgtaagacctttacttccttccaccaaacactgaaaaacaatagtgtgtacactgagccctgtgaggatttgaggaacgatgagcacagcccatcctatcaacagatcaactgtatcgacagtgtcatcagatacctgaagagctacaacattccagctttgaaaagaaagtgtatctcctgtacaaatacaacttcttcctcctcagaagaagacaaacagaaccacaaggcagatgatgtccaagccttacaagctggtttgcaaatcccagccatacctaaatcagaaatgccaacaaatggacggtccatagacacaggaggaggagctccacagatcctgtccacggcgatgctgagcttggggtcgggcataagccaatgcggttacagcagcaccattgtccatgtcccacccccagagacagccagggatgctaccctcttctgtgagccctggaccctgaacatgcagccagcccctttgacctcggaagaatttaaacacgtggggctcacagcggctgttctgtcagcgcacacccagaaggaagagcagaattatgttgataaattccgagaaaagatcctgtcatcaccctacagctcctatcttcagcaagaaagcaggagcaaagctaaatattcatattttcaaggagattctacttccaagcagacgcggtcggccggctgcaggaaagggaagcacaagcggaagaagctgccggagccgccagacagcagcagctcgaacaccggctctggtccccgcaggggagcgcatcagaacgcacagccctgctgcccctccgcggcctcctctccgcacacctcgagcccgaccttcccacctgccgccatggtgcccagccaggccccttacctcgtcccagcttttcccctcccagccgcgacctcacccggaagagaatacgcagcccccggaactgcaccggaaggcctgcatgggccgcccttgtccgagggcttgcagccttacccagctttcccttttccttacttggatacttttatgaccgttttcctgcctgacccccctgtctgtcctctgttgtcgccatcgtttttgccatgtccattcctgggggcgacagcctcttctgcgatatcaccctcaatgtcgtcagcaatgagtccaactctggacccacccccttcagtcaccagccaaaggagagaggaggaaaagtgggaggcacaaagcgaggggcacccgttcattacttcgagaagcagctcacccttgcagttaaacttacttcaggaagagatgcccagaccctctgaatctccagatcagatgagaaggaacacgtgcccacaaactgagtattgtgttacaggcaacaatggcagtgagagcagtcctgctactaccggtgcactgtccacggggtcacctcccagggagaatccatcccatcctactgccagcgctctgtccacaggatcgcctcccatgaagaatccatcccatcctactgccagcgctctgtccacgggatcgcctcccatgaagaatccatcccatcctactgccagcacactgtccatgggattgcctcccagcaggactccatcccatcctactgccactgttctgtccacggggtcacctcccagcgaatccccatccagaactggttcagcagcatcaggaagcagcgacagcagtatataccttactagtagtgtttattcttctaaaatctcccaaaatgggcagcaatctcaggacgtacagaaaaaagaaacatttcctaatgtcgccgaagagcccatctggagaatgatacggcagacacctgagcgcattctcatgacataccaggtacctgagagggttaaagaagttgtactaaaagaagacctggaaaagctagaaagtatgaggcagcagcagccccagttttctcatgggcaaaaggaggagctggctaaggtgtataattggattcaaagccagactgtcactcaagaaatcgacattcaagcctgtgtcacttgtgaaaatgaagattcagctgatggtgcggccacatcctgtggtcaggttctggtagaagacagctgttgagtgactgtgaggatgaaccttcataccctttccaagacgtgttacacagacagacctttttaagtcctggacttttaaatgaccatgaagttatcattgaatgttaagattttttcttcttgattttttaatacacgtaatctttttgaagcagacattgtatacagaatcttacttctctttgttcctgatatattaaaatggccagttaggctctttttgtagttgaattgtcttctaaagagattggatggcctctaaagaggtatgtgtatctttatttcagatgtcacccagagtaaattataattagaagtatagctagaatgagccccaaaccttagcctcatttattttgttctgttacataagtcattttccccttagagtgcttgaagaaatgccacctacaggttgtgtacttttcataatggtttccatgaatgtagtacgttcatacaggcttcattcaacctggcgttcccctccataattaagatgaaacattccggttttctcacaacacattagcacatactgtccattagcatatctgggataaccaggttttgggggttgagttttggccttcatccttgtagatccctttcctattgatttcccaccttccagtgaaattctgaaagtcttatcttaaaaatcgatccgcttaccatgggcctattcttgtaagtttcagttagcatttgcatgtgtaatattaaaatgaaagagcttcttacccagtgctgttgcccttttgagtatttttgtttttaaaataatgattgtaaaatgttttacaagtaatgtaaaagctagtatcattcttacatacttctgtgtttaaattttcattcttaccaaaacagttaactctttctttccaatcaatttatacaaaagaggtcgctccagccctaccacaggtctgactggcactgccttttgtttgcccttgaacagggcagtgttgtggggactgcaaaagagaaaacgtccaggcgagcccagttgtcctcgcccacagggtcctgcaggctccatcagtcaccgctttctatggcgtttgtagttgtgtcttttaagaagtgagtgtgattgtttacttgataaatcagctcactctctggtgctttttagagaagtccctgattccttcttaaacttggaatgatagatgaaattcacacccctgcagatcagaaaaaacaaatagaagaaaatgagggttacagtaacctgttgtctttatataacttgcaacaaactaatttatttttttttcctttttttgtttttggttttttatggttttttaaggaaaatacttttctcctttgaagttttacagctttttgtaaatgcgtcctgataatgattaggaaaatcgaccttttcatccatgatgaccatcctcatagctcagatttcctttcaaagtagtggctttctggatggtaattccatcttaaggtgtcagaactattttcaaatgctgcctttgacagttcttggaattttctgatattaagcagttccatgcaaatattcgtgttttataaatagctctcatagtctgctccatcttgatagttaagtgatttctgaagcgtttgtgtgtgtgttgatcaggttgtgtgatatttttgcttgataaagaatcaaatttgaaacaattaaccagccagtagattgtctgtcagtgaccttctgtagtaataaagtttttgccactgtaaataaaaacagtatccgtagctatcaggatcattgcgcactcatatatgctaagccttctgttctctaatagaagcctttcttttccattgtttctggatatttgtattatccaaatgtgcttatttctttgccttagcacacgttttatggagtacttgttatactaggtttgatttgaaactggtgcttgtcgcagaactgtcagagcatgaggagcgctcctcctgtgggtggacgcattcacgcactcccaggttgcacctgctgctggcggtgagcagggggttcagcagcttgaccgatgccccccgagggggctctccccagcttaaactttgttgtttaaatttgttaactttttatattaatgactattgaaagtggtaataaaaatttatattataggcttcaatgttttcatgaatgttacccaaaaagctgtgttttctttggtcagaggtcaaaatttatgaaaaacaaaatgctgtatgaatggaaatcattttgcaattgagtgacacttcattgtaattcacagtgtaaatttaatccaaactgaaattttgtttcaactgaatttgtaattaactctgaatttgtttttaatcattagtaatatttcagttgggtatctttttaagtaaaaacaacaaataaactctgtacatgtaaaacgtgaaaaaaaaaaagctt

SEQ ID NO: 371727 - DNA, 6279 bp, Homo sapiens
agactgcgcgagggcggccccgggggcgagcggctgtgcgcggggccaagggcgggggcagcaggccggagtcctgaaagtcgagcgagctccgggttttgaaaatgttggagggaaaagctcctcggagatgagcgtgaccccctggctcgtggtggccgcctgttctcactaacgccatggcggggaccggagtgagaaaccggtgtctgtcactgactgcaaagtgagcgagaagcaggctgcgggccgtcccagcacgacgtggagccccgcggagacctcgagatgccccgcggggaagctcctggccccgggagacggggggctaaggacgaggccctgggcgaagaatcgggggagcggtggagccccgagttccatctgcagaggaaattggcggacagcagccacagtgaacagcaagatcgaaacagagtttctgaagaacttatcatggttgtccaagaaatgaaaaaatacttcccctcggagagacgcaataaaccaagcactctagatgccctcaactatgctctccgctgtgtccacagcgttcaagcaaacagtgagtttttccagattctcagtcagaatggagcacctcaggcagatgtgagcatgtacagtcttgaggagctggccactatcgcttcagaacacacttccaaaaacacagatacctttgtggcagtattttcatttctgtctggaaggttagtgcacatttctgaacaggctgctttgatcctgaatcgtaagaaagatgtcctggcgtcttctcactttgttgacctgcttgcacctcaagacatgagggtattctacgcgcacactgccagagctcagcttcctttctggaacaactggacccaaagagcagctgcacggtatgaatgtgctccggtgaaaccttttttctgcaggatccgtggaggtgaagacagaaagcaagagaagtgtcactccccattccggatcatcccctatctgattcatgtacatcaccctgcccagccagaattggaatcggaaccttgctgtctcactgtggttgaaaagattcactctggttatgaagctcctcggatcccagtgaataaaagaatcttcaccaccacacacaccccagggtgtgtttttcttgaagtagatgaaaaagcagtgcctttgctgggttacctacctcaggacctgattggaacatcgatcctaagctacctgcaccctgaagatcgttctctgatggttgccatacaccaaaaagttttgaagtatgcagggcatcctccctttgaacattctcccattcgattttgtactcaaaacggagactacatcatactggattccagttggtccagctttgtgaatccctggagccggaagatttctttcatcattggtcggcataaagttcgaacgagcccactaaatgaggatgtttttgctaccaaaattaaaaagatgaacgataatgacaaagacataacagaattacaagaacaaatttacaaacttctcttacagccagttcacgtgagcgtgtccagcggctacgggagcctggggagcagcgggtcgcaggagcagcttgtcagcatcgcctcctccagtgaggccagtgggcaccgtgtggaggagacgaaggcggagcagatgaccttgcagcaggtctatgccagtgtgaacaaaattaaaaatctgggtcagcagctctacattgagtcaatgaccaaatcatcattcaagccagtgacggggacacgcacagaaccgaatggtggtggtgaatgtaagacctttacttccttccaccaaacactgaaaaacaatagtgtgtacactgagccctgtgaggatttgaggaacgatgagcacagcccatcctatcaacagatcaactgtatcgacagtgtcatcagatacctgaagagctacaacattccagctttgaaaagaaagtgtatctcctgtacaaatacaacttcttcctcctcagaagaagacaaacagaaccacaaggcagatgatgtccaagccttacaagctggtttgcaaatcccagccatacctaaatcagaaatgccaacaaatggacggtccatagacacaggaggaggagctccacagatcctgtccacggcgatgctgagcttggggtcgggcataagccaatgcggttacagcagcaccattgtccatgtcccacccccagagacagccagggatgctaccctcttctgtgagccctggaccctgaacatgcagccagcccctttgacctcggaagaatttaaacacgtggggctcacagcggctgttctgtcagcgcacacccagaaggaagagcagaattatgttgataaattccgagaaaagatcctgtcatcaccctacagctcctatcttcagcaagaaagcaggagcaaagctaaatattcatattttcaaggagattctacttccaagcagacgcggtcggccggctgcaggaaagggaagcacaagcggaagaagctgccggagccgccagacagcagcagctcgaacaccggctctggtccccgcaggggagcgcatcagaacgcacagccctgctgcccctccgcggcctcctctccgcacacctcgagcccgaccttcccacctgccgccatggtgcccagccaggccccttacctcgtcccagcttttcccctcccagccgcgacctcacccggaagagaatacgcagcccccggaactgcaccggaaggcctgcatgggccgcccttgtccgagggcttgcagccttacccagctttcccttttccttacttggatacttttatgaccgttttcctgcctgacccccctgtctgtcctctgttgtcgccatcgtttttgccatgtccattcctgggggcgacagcctcttctgcgatatcaccctcaatgtcgtcagcaatgagtccaactctggacccacccccttcagtcaccagccaaaggagagaggaggaaaagtgggaggcacaaagcgaggggcacccgttcattacttcgagaagcagctcacccttgcagttaaacttacttcaggaagagatgcccagaccctctgaatctccagatcagatgagaaggaacacgtgcccacaaactgagtattgtgttacaggcaacaatggcagtgagagcagtcctgctactaccggtgcactgtccacggggtcacctcccagggagaatccatcccatcctactgccagcgctctgtccacaggatcgcctcccatgaagaatccatcccatcctactgccagcacactgtccatgggattgcctcccagcaggactccatcccatcctactgccactgttctgtccacggggtcacctcccagcgaatccccatccagaactggttcagcagcatcaggaagcagcgacagcagtatataccttactagtagtgtttattcttctaaaatctcccaaaatgggcagcaatctcaggacgtacagaaaaaagaaacatttcctaatgtcgccgaagagcccatctggagaatgatacggcagacacctgagcgcattctcatgacataccaggtacctgagagggttaaagaagttgtactaaaagaagacctggaaaagctagaaagtatgaggcagcagcagccccagttttctcatgggcaaaaggaggagctggctaaggtgtataattggattcaaagccagactgtcactcaagaaatcgacattcaagcctgtgtcacttgtgaaaatgaagattcagctgatggtgcggccacatcctgtggtcaggttctggtagaagacagctgttgagtgactgtgaggatgaaccttcataccctttccaagacgtgttacacagacagacctttttaagtcctggacttttaaatgaccatgaagttatcattgaatgttaagattttttcttcttgattttttaatacacgtaatctttttgaagcagacattgtatacagaatcttacttctctttgttcctgatatattaaaatggccagttaggctctttttgtagttgaattgtcttctaaagagattggatggcctctaaagaggtatgtgtatctttatttcagatgtcacccagagtaaattataattagaagtatagctagaatgagccccaaaccttagcctcatttattttgttctgttacataagtcattttccccttagagtgcttgaagaaatgccacctacaggttgtgtacttttcataatggtttccatgaatgtagtacgttcatacaggcttcattcaacctggcgttcccctccataattaagatgaaacattccggttttctcacaacacattagcacatactgtccattagcatatctgggataaccaggttttgggggttgagttttggccttcatccttgtagatccctttcctattgatttcccaccttccagtgaaattctgaaagtcttatcttaaaaatcgatccgcttaccatgggcctattcttgtaagtttcagttagcatttgcatgtgtaatattaaaatgaaagagcttcttacccagtgctgttgcccttttgagtatttttgtttttaaaataatgattgtaaaatgttttacaagtaatgtaaaagctagtatcattcttacatacttctgtgtttaaattttcattcttaccaaaacagttaactctttctttccaatcaatttatacaaaagaggtcgctccagccctaccacaggtctgactggcactgccttttgtttgcccttgaacagggcagtgttgtggggactgcaaaagagaaaacgtccaggcgagcccagttgtcctcgcccacagggtcctgcaggctccatcagtcaccgctttctatggcgtttgtagttgtgtcttttaagaagtgagtgtgattgtttacttgataaatcagctcactctctggtgctttttagagaagtccctgattccttcttaaacttggaatgatagatgaaattcacacccctgcagatcagaaaaaacaaatagaagaaaatgagggttacagtaacctgttgtctttatataacttgcaacaaactaatttatttttttttcctttttttgtttttggttttttatggttttttaaggaaaatacttttctcctttgaagttttacagctttttgtaaatgcgtcctgataatgattaggaaaatcgaccttttcatccatgatgaccatcctcatagctcagatttcctttcaaagtagtggctttctggatggtaattccatcttaaggtgtcagaactattttcaaatgctgcctttgacagttcttggaattttctgatattaagcagttccatgcaaatattcgtgttttataaatagctctcatagtctgctccatcttgatagttaagtgatttctgaagcgtttgtgtgtgtgttgatcaggttgtgtgatatttttgcttgataaagaatcaaatttgaaacaattaaccagccagtagattgtctgtcagtgaccttctgtagtaataaagtttttgccactgtaaataaaaacagtatccgtagctatcaggatcattgcgcactcatatatgctaagccttctgttctctaatagaagcctttcttttccattgtttctggatatttgtattatccaaatgtgcttatttctttgccttagcacacgttttatggagtacttgttatactaggtttgatttgaaactggtgcttgtcgcagaactgtcagagcatgaggagcgctcctcctgtgggtggacgcattcacgcactcccaggttgcacctgctgctggcggtgagcagggggttcagcagcttgaccgatgccccccgagggggctctccccagcttaaactttgttgtttaaatttgttaactttttatattaatgactattgaaagtggtaataaaaatttatattataggcttcaatgttttcatgaatgttacccaaaaagctgtgttttctttggtcagaggtcaaaatttatgaaaaacaaaatgctgtatgaatggaaatcattttgcaattgagtgacacttcattgtaattcacagtgtaaatttaatccaaactgaaattttgtttcaactgaatttgtaattaactctgaatttgtttttaatcattagtaatatttcagttgggtatctttttaagtaaaaacaacaaataaactctgtacatgtaaaacgtgaaaaaaaaaaagctt

SEQ ID NO: 371728 - DNA, 5051 bp, Homo sapiens
cacatataatactagtcagcacaaataatccatcagtcatcacagaaagttctgttggacacaggctccacctgggagatgctgtgtacttcacacagcatcacgtaagatgcacaggtcttcccacattccacccttagtgattgccagggttgatcagttgtacaggaagcgtcagcttaacattggaaagctccccatcaaccttaaacctatggtttcattccttgataatctttgttggaaatttttgtttcattccttatttttctaaatacaatcgtagccattctatgtgtaatgtgctctgcaccttattttattcattacgtgttgtggatatctttctattagtgcattttagatctgcactcatttttaatagccgcatgatattctgttgatatatacatgataaagtgccatgatttaattttggtaagaaagtatatgttcttaattacatgctgggtacttttaattgcacatccctttattctgtttcaggtgaatgtaagacctttacttccttccaccaaacactgaaaaacaatagtgtgtacactgagccctgtgaggatttgaggaacgatgagcacagcccatcctatcaacagatcaactgtatcgacagtgtcatcagatacctgaagagctacaacattccagctttgaaaagaaagtgtatctcctgtacaaatacaacttcttcctcctcagaagaagacaaacagaaccacaaggcagatgatgtccaagccttacaagctggtttgcaaatcccagccatacctaaatcagaaatgccaacaaatggacggtccatagacacaggaggaggagctccacagatcctgtccacggcgatgctgagcttggggtcgggcataagccaatgcggttacagcagcaccattgtccatgtcccacccccagagacagccagggatgctaccctcttctgtgagccctggaccctgaacatgcagccagcccctttgacctcggaagaatttaaacacgtggggctcacagcggctgttctgtcagcgcacacccagaaggaagagcagaattatgttgataaattccgagaaaagatcctgtcatcaccctacagctcctatcttcagcaagaaagcaggagcaaagctaaatattcatattttcaaggagattctacttccaagcagacgcggtcggccggctgcaggaaagggaagcacaagcggaagaagctgccggagccgccagacagcagcagctcgaacaccggctctggtccccgcaggggagcgcatcagaacgcacagccctgctgcccctccgcggcctcctctccgcacacctcgagcccgaccttcccacctgccgccatggtgcccagccaggccccttacctcgtcccagcttttcccctcccagccgcgacctcacccggaagagaatacgcagcccccggaactgcaccggaaggcctgcatgggccgcccttgtccgagggcttgcagccttacccagctttcccttttccttacttggatacttttatgaccgttttcctgcctgacccccctgtctgtcctctgttgtcgccatcgtttttgccatgtccattcctgggggcgacagcctcttctgcgatatcaccctcaatgtcgtcagcaatgagtccaactctggacccacccccttcagtcaccagccaaaggagagaggaggaaaagtgggaggcacaaagcgaggggcacccgttcattacttcgagaagcagctcacccttgcagttaaacttacttcaggaagagatgcccagaccctctgaatctccagatcagatgagaaggaacacgtgcccacaaactgagtattgtgttacaggcaacaatggcagtgagagcagtcctgctactaccggtgcactgtccacggggtcacctcccagggagaatccatcccatcctactgccagcgctctgtccacaggatcgcctcccatgaagaatccatcccatcctactgccagcgctctgtccacgggatcgcctcccatgaagaatccatcccatcctactgccagcacactgtccatgggattgcctcccagcaggactccatcccatcctactgccactgttctgtccacggggtcacctcccagcgaatccccatccagaactggttcagcagcatcaggaagcagcgacagcagtatataccttactagtagtgtttattcttctaaaatctcccaaaatgggcagcaatctcaggacgtacagaaaaaagaaacatttcctaatgtcgccgaagagcccatctggagaatgatacggcagacacctgagcgcattctcatgacataccaggtacctgagagggttaaagaagttgtactaaaagaagacctggaaaagctagaaagtatgaggcagcagcagccccagttttctcatgggcaaaaggaggagctggctaaggtgtataattggattcaaagccagactgtcactcaagaaatcgacattcaagcctgtgtcacttgtgaaaatgaagattcagctgatggtgcggccacatcctgtggtcaggttctggtagaagacagctgttgagtgactgtgaggatgaaccttcataccctttccaagacgtgttacacagacagacctttttaagtcctggacttttaaatgaccatgaagttatcattgaatgttaagattttttcttcttgattttttaatacacgtaatctttttgaagcagacattgtatacagaatcttacttctctttgttcctgatatattaaaatggccagttaggctctttttgtagttgaattgtcttctaaagagattggatggcctctaaagaggtatgtgtatctttatttcagatgtcacccagagtaaattataattagaagtatagctagaatgagccccaaaccttagcctcatttattttgttctgttacataagtcattttccccttagagtgcttgaagaaatgccacctacaggttgtgtacttttcataatggtttccatgaatgtagtacgttcatacaggcttcattcaacctggcgttcccctccataattaagatgaaacattccggttttctcacaacacattagcacatactgtccattagcatatctgggataaccaggttttgggggttgagttttggccttcatccttgtagatccctttcctattgatttcccaccttccagtgaaattctgaaagtcttatcttaaaaatcgatccgcttaccatgggcctattcttgtaagtttcagttagcatttgcatgtgtaatattaaaatgaaagagcttcttacccagtgctgttgcccttttgagtatttttgtttttaaaataatgattgtaaaatgttttacaagtaatgtaaaagctagtatcattcttacatacttctgtgtttaaattttcattcttaccaaaacagttaactctttctttccaatcaatttatacaaaagaggtcgctccagccctaccacaggtctgactggcactgccttttgtttgcccttgaacagggcagtgttgtggggactgcaaaagagaaaacgtccaggcgagcccagttgtcctcgcccacagggtcctgcaggctccatcagtcaccgctttctatggcgtttgtagttgtgtcttttaagaagtgagtgtgattgtttacttgataaatcagctcactctctggtgctttttagagaagtccctgattccttcttaaacttggaatgatagatgaaattcacacccctgcagatcagaaaaaacaaatagaagaaaatgagggttacagtaacctgttgtctttatataacttgcaacaaactaatttatttttttttcctttttttgtttttggttttttatggttttttaaggaaaatacttttctcctttgaagttttacagctttttgtaaatgcgtcctgataatgattaggaaaatcgaccttttcatccatgatgaccatcctcatagctcagatttcctttcaaagtagtggctttctggatggtaattccatcttaaggtgtcagaactattttcaaatgctgcctttgacagttcttggaattttctgatattaagcagttccatgcaaatattcgtgttttataaatagctctcatagtctgctccatcttgatagttaagtgatttctgaagcgtttgtgtgtgtgttgatcaggttgtgtgatatttttgcttgataaagaatcaaatttgaaacaattaaccagccagtagattgtctgtcagtgaccttctgtagtaataaagtttttgccactgtaaataaaaacagtatccgtagctatcaggatcattgcgcactcatatatgctaagccttctgttctctaatagaagcctttcttttccattgtttctggatatttgtattatccaaatgtgcttatttctttgccttagcacacgttttatggagtacttgttatactaggtttgatttgaaactggtgcttgtcgcagaactgtcagagcatgaggagcgctcctcctgtgggtggacgcattcacgcactcccaggttgcacctgctgctggcggtgagcagggggttcagcagcttgaccgatgccccccgagggggctctccccagcttaaactttgttgtttaaatttgttaactttttatattaatgactattgaaagtggtaataaaaatttatattataggcttcaatgttttcatgaatgttacccaaaaagctgtgttttctttggtcagaggtcaaaatttatgaaaaacaaaatgctgtatgaatggaaatcattttgcaattgagtgacacttcattgtaattcacagtgtaaatttaatccaaactgaaattttgtttcaactgaatttgtaattaactctgaatttgtttttaatcattagtaatatttcagttgggtatctttttaagtaaaaacaacaaataaactctgtacatgtaaaacgtgaaaaaaaaaaagctt

SEQ ID NO: 371729 - DNA, 1175 bp, Homo sapiens
tgtggtcgtctagaggatcccgtccactgttcgatgtttttggttttttatggttttttaaggaaaatacttttctcctttgaagttttacagctttttgtaaatgcgtcctgataatgattaggaaaatcgaccttttcatccatgatgaccatcctcatagctcagatttcctttcaaagtagtggctttctggatggtaattccatcttaaggtgtcagaactattttcaaatgctgcctttgacagttcttggaattttctgatattaagcagttccatgcaaatattcgtgttttataaatagctctcatagtctgctccatcttgatagttaagtgatttctgaagcgtttgtgtgtgtgttgatcaggttgtgtgatatttttgcttgataaagaatcaaatttgaaacaattaaccagccagtagattgtctgtcagtgaccttctgtagtaataaagtttttgccactgtaaataaaaacagtatccgtagctatcaggatcattgcgcactcatatatgctaagccttctgttctctaatagaagcctttcttttccattgtttctggatatttgtattatccaaatgtgcttatttctttgccttagcacacgttttatggagtacttgttatactaggtttgatttgaaactggtgcttgtcgcagaactgtcagagcatgaggagcgctcctcctgtgggtggacgcattcacgcactcccaggttgcacctgctgctggcggtgagcagggggttcagcagcttgaccgatgccccccgagggggctctccccagcttaaactttgttgtttaaatttgttaactttttatattaatgactattgaaagtggtaataaaaatttatattataggcttcaatgttttcatgaatgttacccaaaaagctgtgttttctttggtcagaggtcaaaatttatgaaaaacaaaatgctgtatgaatggaaatcattttgcaattgagtgacacttcattgtaattcacagtgtaaatttaatccaaactgaaattttgtttcaactgaatttgtaattaactctgaatttgtttttaatcattagtaatatttcagttgggtatctttttaagtaaaaacaacaaataaactctgtacatgtaaaacgtgaaaaaaaaaaagctt

SEQ ID NO: 371730 - DNA, 5450 bp, Homo sapiens
  misc_feature (5381)..(5381): n is a, c, g, or t
  misc_feature (5391)..(5392): n is a, c, g, or t
agactgcgcgagggcggccccgggggcgagcggctgtgcgcggggccaagggcgggggcagcaggccggagtcctgaaagtcgagcgagctccgggttttgaaaatgttggagggaaaagctcctcggagatgagcgtgaccccctggctcgtggtggccgcctgttctcactaacgccatggcggggaccggagtgagaaaccggtgtctgtcactgactgcaaagtgagcgagaagcaggctgcgggccgtcccagcacgacgtggagccccgcggagacctcgagatgccccgcggggaagctcctggccccgggagacggggggctaaggacgaggccctgggcgaagaatcgggggagcggtggagccccgagttccatctgcagaggaaattggcggacagcagccacagtgaacagcaagatcgaaacagagtttctgaagaacttatcatggttgtccaagaaatgaaaaaatacttcccctcggagagacgcaataaaccaagcactctagatgccctcaactatgctctccgctgtgtccacagcgttcaagcaaacagtgagtttttccagattctcagtcagaatggagcacctcaggcagatgtgagcatgtacagtcttgaggagctggccactatcgcttcagaacacacttccaaaaacacagatacctttgtggcagtattttcatttctgtctggaaggttagtgcacatttctgaacaggctgctttgatcctgaatcgtaagaaagatgtcctggcgtcttctcactttgttgacctgcttgcacctcaagacatgagggtattctacgcgcacactgccagagctcagcttcctttctggaacaactggacccaaagagcagctgcacggtatgaatgtgctccggtgaaaccttttttctgcaggatccgtggaggtgaagacagaaagcaagagaagtgtcactccccattccggatcatcccctatctgattcatgtacatcaccctgcccagccagaattggaatcggaaccttgctgtctcactgtggttgaaaagattcactctggttatgaagctcctcggatcccagtgaataaaagaatcttcaccaccacacacaccccagggtgtgtttttcttgaagtagatgaaaaagcagtgcctttgctgggttacctacctcaggacctgattggaacatcgatcctaagctacctgcaccctgaagatcgttctctgatggttgccatacaccaaaaagttttgaagtatgcagggcatcctccctttgaacattctcccattcgattttgtactcaaaacggagactacatcatactggattccagttggtccagctttgtgaatccctggagccggaagatttctttcatcattggtcggcataaagttcgaacgagcccactaaatgaggatgtttttgctaccaaaattaaaaagatgaacgataatgacaaagacataacagaattacaagaacaaatttacaaacttctcttacagccagttcacgtgagcgtgtccagcggctacgggagcctggggagcagcgggtcgcaggagcagcttgtcagcatcgcctcctccagtgaggccagtgggcaccgtgtggaggagacgaaggcggagcagatgaccttgcagcaggtctatgccagtgtgaacaaaattaaaaatctgggtcagcagctctacattgagtcaatgaccaaatcatcattcaagccagtgacggggacacgcacagaaccgaatggtggtggtgaatgtaagacctttacttccttccaccaaacactgaaaaacaatagtgtgtacactgagccctgtgaggatttgaggaacgatgagcacagcccatcctatcaacagatcaactgtatcgacagtgtcatcagatacctgaagagctacaacattccagctttgaaaagaaagtgtatctcctgtacaaatacaacttcttcctcctcagaagaagacaaacagaaccacaaggcagatgatgtccaagccttacaagctggtttgcaaatcccagccatacctaaatcagaaatgccaacaaatggacggtccatagacacaggaggaggagctccacagatcctgtccacggcgatgctgagcttggggtcgggcataagccaatgcggttacagcagcaccattgtccatgtcccacccccagagacagccagggatgctaccctcttctgtgagccctggaccctgaacatgcagccagcccctttgacctcggaagaatttaaacacgtggggctcacagcggctgttctgtcagcgcacacccagaaggaagagcagaattatgttgataaattccgagaaaagatcctgtcatcaccctacagctcctatcttcagcaagaaagcaggagcaaagctaaatattcatattttcaaggagattctacttccaagcagacgcggtcggccggctgcaggaaagggaagcacaagcggaagaagctgccggagccgccagacagcagcagctcgaacaccggctctggtccccgcaggggagcgcatcagaacgcacagccctgctgcccctccgcggcctcctctccgcacacctcgagcccgaccttcccacctgccgccatggtgcccagccaggccccttacctcgtcccagcttttcccctcccagccgcgacctcacccggaagagaatacgcagcccccggaactgcaccggaaggcctgcatgggccgcccttgtccgagggcttgcagccttacccagctttcccttttccttacttggatacttttatgaccgttttcctgcctgacccccctgtctgtcctctgttgtcgccatcgtttttgccatgtccattcctgggggcgacagcctcttctgcgatatcaccctcaatgtcgtcagcaatgagtccaactctggacccacccccttcagtcaccagccaaaggagagaggaggaaaagtgggaggcacaaagcgaggggcacccgttcattacttcgagaagcagctcacccttgcagttaaacttacttcaggaagagatgcccagaccctctgaatctccagatcagatgagaaggaacacgtgcccacaaactgagtattgtgttacaggcaacaatggcagtgagagcagtcctgctactaccggtgcactgtccacggggtcacctcccagggagaatccatcccatcctactgccagcgctctgtccacaggatcgcctcccatgaagaatccatcccatcctactgccagcgctctgtccacgggatcgcctcccatgaagaatccatcccatcctactgccagcacactgtccatgggattgcctcccagcaggactccatcccatcctactgccactgttctgtccacggggtcacctcccagcgaatccccatccagaactggttcagcagcatcaggaagcagcgacagcagtatataccttactagtagtgtttattcttctaaaatctcccaaaatgggcagcaatctcaggacgtacagaaaaaagaaacatttcctaatgtcgccgaagagcccatctggagaatgatacggcagacacctgagcgcattctcatgacataccaggtacctgagagggttaaagaagttgtactaaaagaagacctggaaaagctagaaagtatgaggcagcagcagccccagttttctcatgggcaaaaggaggagctggctaaggtgtataattggattcaaagccagactgtcactcaagaaatcgacattcaagcctgtgtcacttgtgaaaatgaagattcagctgatggtgcggccacatcctgtggtcaggttctggtagaagacagctgttgagtgactgtgaggatgaaccttcataccctttccaagacgtgttacacagacagacctttttaagtcctggacttttaaatgaccatgaagttatcattgaatgttaagattttttcttcttgattttttaatacacgtaatctttttgaagcagacattgtatacagaatcttacttctctttgttcctgatatattaaaatggccagttaggctctttttgtagttgaattgtcttctaaagagattggatggcctctaaagaggtatgtgtatctttatttcagatgtcacccagagtaaattataattagaagtatagctagaatgagccccaaaccttagcctcatttattttgttctgttacataagtcattttccccttagagtgcttgaagaaatgccacctacaggttgtgtacttttcataatggtttccatgaatgtagtacgttcatacaggcttcattcaacctggcgttcccctccataattaagatgaaacattccggttttctcacaacacattagcacatactgtccattagcatatctgggataaccaggttttgggggttgagttttggccttcatccttgtagatccctttcctattgatttcccaccttccagtgaaattctgaaagtcttatcttaaaaatcgatccgcttaccatgggcctattcttgtaagtttcagttagcatttgcatgtgtaatattaaaatgaaagagcttcttacccagtgctgttgcccttttgagtatttttgtttttaaaataatgattgtaaaatgttttacaagtaatgtaaaagctagtatcattcttacatacttctgtgtttaaattttcattcttaccaaaacagttaactctttctttccaatcaatttatacaaaagaggtcgctccagccctaccacaggtctgactggcactgccttttgtttgcccttgaacagggcagtgttgtggggactgcaaaagagaaaacgtccaggcgagcccagttgtcctcgcccacagggtcctgcaggctccatcagtcaccgctttctatggcgtttgtagttgtgtcttttaagaagtgagtgtgattgtttacttgataaatcagctcactctctggtgctttttagagaagtccctgattccttcttaaacttggaatgatagatgaaattcacacccctgcagatcagaaaaaacaaatagaagaaaatgagggttacagtaacctgttgtctttatataacttgcaacaaactaatttatttttttttcctttttttgtttttggttttttatggttttttaaggaaaatacttttctcctttgaagttttacagctttttgtaaatgcgtcctgataatgattaggaaaatcgaccttttcatccatgatgaccatcctcatagctcagatttcctttcaaagtagtggctttctggatggaactgcttaatatcagaaaattncaagaactgnnaaaggcagcatttgaaaatagttctgacaccttaagatggaattaccatccagagtcg

SEQ ID NO: 371731 - DNA, 1206 bp, Homo sapiens
agactgcgcgagggcggccccgggggcgagcggctgtgcgcggggccaagggcgggggcagcaggccggagtcctgaaagtcgagcgagctccgggttttgaaaatgttggagggaaaagctcctcggagatgagcgtgaccccctggctcgtggtggccgcctgttctcactaacgccatggcggggaccggagtgagaaaccggtgtctgtcactgactgcaaagtgagcgagaagcaggctgcgggccgtcccagcacgacgtggagccccgcggagacctcgagatgccccgcggggaagctcctggccccgggagacggggggctaaggacgaggccctgggcgaagaatcgggggagcggtggagccccgagttccatctgcagaggaaattggcggacagcagccacagtgaacagcaagatcgaaacagagtttctgaagaacttatcatggttgtccaagaaatgaaaaaatacttcccctcggagagacgcaataaaccaagcactctagatgccctcaactatgctctccgctgtgtccacagcgttcaagcaaacagtgagtttttccagattctcagtcagaatggagcacctcaggcagatgtgagcatgtacagtcttgaggagctggccactatcgcttcagaacacacttccaaaaacacagatacctttgtggcagtattttcatttctgtctggaaggttagtgcacatttctgaacaggctgctttgatcctgaatcgtaagaaagatgtcctggcgtcttctcactttgttgacctgcttgcacctcaagacatgagggtattctacgcgcacactgccagagctcagcttcctttctggaacaactggacccaaagaggtaacaggaccaatgttcagatgtctatctttcctcatcaagatcagtttcattcttacaggaatagtacagaaattaacatattatttagaacatgcacactatctggtttttcttattcctgttatagaaagtcacgtgatgaaaacagcattttaaaagcttctgataacatactcaatacgtttgtttccattttgtcacatctgtttcacagatgatatgtcataaatattatttcattaccagcgtattgtatagtggtttagttgctatgaaggctctgtttcctttaagttaaaattaaatgtttttcctccttcatg

SEQ ID NO: 371732 - DNA, 499 bp, Homo sapiens
tggaggtgaagacagaaagcaagagaagtgtcactccccattccggatcatcccctatctgattcatgtacatcaccctgcccagccagaattggaatcggaaccttgctgtctcactgtggttgaaaagattcactctggttatgaaggtaagtcagtagataagatgcagaaatgtcagcaatcagataggaacatgggaaagtctgtttacgtcagtcatagaacaacaaaaagagctcttgggtctccaatttgacccttaaactcttcaggcatttgaagctggttttcattgatgtctctgtttactgacttttagcttcttgtacagtcattgtcttcatggtcagcatggctgaacgaatggtctcagcacaggacttggtgacagatacggttttctagtcctctctctgctggtgacccattcagtgtggccttttgcttgtgttgtgtgaaataagagtgctgaaattgtttcccagagaggccacaa

SEQ ID NO: 371733 - DNA, 6333 bp, Homo sapiens
agactgcgcgagggcggccccgggggcgagcggctgtgcgcggggccaagggcgggggcagcaggccggagtcctgaaagtcgagcgagctccgggttttgaaaatgttggagggaaaagctcctcggagatgagcgtgaccccctggctcgtggtggccgcctgttctcactaacgccatggcggggaccggagtgagaaaccggtgtctgtcactgactgcaaagtgagcgagaagcaggctgcgggccgtcccagcacgacgtggagccccgcggagacctcgagatgccccgcggggaagctcctggccccgggagacggggggctaaggacgaggccctgggcgaagaatcgggggagcggtggagccccgagttccatctgcagaggaaattggcggacagcagccacagtgaacagcaagatcgaaacagagtttctgaagaacttatcatggttgtccaagaaatgaaaaaatacttcccctcggagagacgcaataaaccaagcactctagatgccctcaactatgctctccgctgtgtccacagcgttcaagcaaacagtgagtttttccagattctcagtcagaatggagcacctcaggcagatgtgagcatgtacagtcttgaggagctggccactatcgcttcagaacacacttccaaaaacacagatacctttgtggcagtattttcatttctgtctggaaggttagtgcacatttctgaacaggctgctttgatcctgaatcgtaagaaagatgtcctggcgtcttctcactttgttgacctgcttgcacctcaagacatgagggtattctacgcgcacactgccagagctcagcttcctttctggaacaactggacccaaagagcagctgcacggtatgaatgtgctccggtgaaaccttttttctgcaggatccgtggaggtgaagacagaaagcaagagaagtgtcactccccattccggatcatcccctatctgattcatgtacatcaccctgcccagccagaattggaatcggaaccttgctgtctcactgtggttgaaaagattcactctggttatgaagctcctcggatcccagtgaataaaagaatcttcaccaccacacacaccccagggtgtgtttttcttgaagtagatgaaaaagcagtgcctttgctgggttacctacctcaggacctgattggaacatcgatcctaagctacctgcaccctgaagatcgttctctgatggttgccatacaccaaaaagttttgaagtatgcagggcatcctccctttgaacattctcccattcgattttgtactcaaaacggagactacatcatactggattccagttggtccagctttgtgaatccctggagccggaagatttctttcatcattggtcggcataaagttcgaacgagcccactaaatgaggatgtttttgctaccaaaattaaaaagatgaacgataatgacaaagacataacagaattacaagaacaaatttacaaacttctcttacagccagttcacgtgagcgtgtccagcggctacgggagcctggggagcagcgggtcgcaggagcagcttgtcagcatcgcctcctccagtgaggccagtgggcaccgtgtggaggagacgaaggcggagcagatgaccttgcagcaggtctatgccagtgtgaacaaaattaaaaatctgggtcagcagctctacattgagtcaatgaccaaatcatcattcaagccagtgacggggacacgcacagaaccgaatggtggtggtgaatgtaagacctttacttccttccaccaaacactgaaaaacaatagtgtgtacactgagccctgtgaggatttgaggaacgatgagcacagcccatcctatcaacagatcaactgtatcgacagtgtcatcagatacctgaagagctacaacattccagctttgaaaagaaagtgtatctcctgtacaaatacaacttcttcctcctcagaagaagacaaacagaaccacaaggcagatgatgtccaagccttacaagctggtttgcaaatcccagccatacctaaatcagaaatgccaacaaatggacggtccatagacacaggaggaggagctccacagatcctgtccacggcgatgctgagcttggggtcgggcataagccaatgcggttacagcagcaccattgtccatgtcccacccccagagacagccagggatgctaccctcttctgtgagccctggaccctgaacatgcagccagcccctttgacctcggaagaatttaaacacgtggggctcacagcggctgttctgtcagcgcacacccagaaggaagagcagaattatgttgataaattccgagaaaagatcctgtcatcaccctacagctcctatcttcagcaagaaagcaggagcaaagctaaatattcatattttcaaggagattctacttccaagcagacgcggtcggccggctgcaggaaagggaagcacaagcggaagaagctgccggagccgccagacagcagcagctcgaacaccggctctggtccccgcaggggagcgcatcagaacgcacagccctgctgcccctccgcggcctcctctccgcacacctcgagcccgaccttcccacctgccgccatggtgcccagccaggccccttacctcgtcccagcttttcccctcccagccgcgacctcacccggaagagaatacgcagcccccggaactgcaccggaaggcctgcatgggccgcccttgtccgagggcttgcagccttacccagctttcccttttccttacttggatacttttatgaccgttttcctgcctgacccccctgtctgtcctctgttgtcgccatcgtttttgccatgtccattcctgggggcgacagcctcttctgcgatatcaccctcaatgtcgtcagcaatgagtccaactctggacccacccccttcagtcaccagccaaaggagagaggaggaaaagtgggaggcacaaagcgaggggcacccgttcattacttcgagaagcagctcacccttgcagttaaacttacttcaggaagagatgcccagaccctctgaatctccagatcagatgagaaggaacacgtgcccacaaactgagtattgtgttacaggcaacaatggcagtgagagcagtcctgctactaccggtgcactgtccacggggtcacctcccagggagaatccatcccatcctactgccagcgctctgtccacaggatcgcctcccatgaagaatccatcccatcctactgccagcgctctgtccacgggatcgcctcccatgaagaatccatcccatcctactgccagcacactgtccatgggattgcctcccagcaggactccatcccatcctactgccactgttctgtccacggggtcacctcccagcgaatccccatccagaactggttcagcagcatcaggaagcagcgacagcagtatataccttactagtagtgtttattcttctaaaatctcccaaaatgggcagcaatctcaggacgtacagaaaaaagaaacatttcctaatgtcgccgaagagcccatctggagaatgatacggcagacacctgagcgcattctcatgacataccaggtacctgagagggttaaagaagttgtactaaaagaagacctggaaaagctagaaagtatgaggcagcagcagccccagttttctcatgggcaaaaggaggagctggctaaggtgtataattggattcaaagccagactgtcactcaagaaatcgacattcaagcctgtgtcacttgtgaaaatgaagattcagctgatggtgcggccacatcctgtggtcaggttctggtagaagacagctgttgagtgactgtgaggatgaaccttcataccctttccaagacgtgttacacagacagacctttttaagtcctggacttttaaatgaccatgaagttatcattgaatgttaagattttttcttcttgattttttaatacacgtaatctttttgaagcagacattgtatacagaatcttacttctctttgttcctgatatattaaaatggccagttaggctctttttgtagttgaattgtcttctaaagagattggatggcctctaaagaggtatgtgtatctttatttcagatgtcacccagagtaaattataattagaagtatagctagaatgagccccaaaccttagcctcatttattttgttctgttacataagtcattttccccttagagtgcttgaagaaatgccacctacaggttgtgtacttttcataatggtttccatgaatgtagtacgttcatacaggcttcattcaacctggcgttcccctccataattaagatgaaacattccggttttctcacaacacattagcacatactgtccattagcatatctgggataaccaggttttgggggttgagttttggccttcatccttgtagatccctttcctattgatttcccaccttccagtgaaattctgaaagtcttatcttaaaaatcgatccgcttaccatgggcctattcttgtaagtttcagttagcatttgcatgtgtaatattaaaatgaaagagcttcttacccagtgctgttgcccttttgagtatttttgtttttaaaataatgattgtaaaatgttttacaagtaatgtaaaagctagtatcattcttacatacttctgtgtttaaattttcattcttaccaaaacagttaactctttctttccaatcaatttatacaaaagaggtcgctccagccctaccacaggtctgactggcactgccttttgtttgcccttgaacagggcagtgttgtggggactgcaaaagagaaaacgtccaggcgagcccagttgtcctcgcccacagggtcctgcaggctccatcagtcaccgctttctatggcgtttgtagttgtgtcttttaagaagtgagtgtgattgtttacttgataaatcagctcactctctggtgctttttagagaagtccctgattccttcttaaacttggaatgatagatgaaattcacacccctgcagatcagaaaaaacaaatagaagaaaatgagggttacagtaacctgttgtctttatataacttgcaacaaactaatttatttttttttcctttttttgtttttggttttttatggttttttaaggaaaatacttttctcctttgaagttttacagctttttgtaaatgcgtcctgataatgattaggaaaatcgaccttttcatccatgatgaccatcctcatagctcagatttcctttcaaagtagtggctttctggatggtaattccatcttaaggtgtcagaactattttcaaatgctgcctttgacagttcttggaattttctgatattaagcagttccatgcaaatattcgtgttttataaatagctctcatagtctgctccatcttgatagttaagtgatttctgaagcgtttgtgtgtgtgttgatcaggttgtgtgatatttttgcttgataaagaatcaaatttgaaacaattaaccagccagtagattgtctgtcagtgaccttctgtagtaataaagtttttgccactgtaaataaaaacagtatccgtagctatcaggatcattgcgcactcatatatgctaagccttctgttctctaatagaagcctttcttttccattgtttctggatatttgtattatccaaatgtgcttatttctttgccttagcacacgttttatggagtacttgttatactaggtttgatttgaaactggtgcttgtcgcagaactgtcagagcatgaggagcgctcctcctgtgggtggacgcattcacgcactcccaggttgcacctgctgctggcggtgagcagggggttcagcagcttgaccgatgccccccgagggggctctccccagcttaaactttgttgtttaaatttgttaactttttatattaatgactattgaaagtggtaataaaaatttatattataggcttcaatgttttcatgaatgttacccaaaaagctgtgttttctttggtcagaggtcaaaatttatgaaaaacaaaatgctgtatgaatggaaatcattttgcaattgagtgacacttcattgtaattcacagtgtaaatttaatccaaactgaaattttgtttcaactgaatttgtaattaactctgaatttgtttttaatcattagtaatatttcagttgggtatctttttaagtaaaaacaacaaataaactctgtacatgtaaaacgtgaaaaaaaaaaagctt

SEQ ID NO: 371734 - DNA, 5806 bp, Homo sapiens
tcagtagagctgtattacctacctaggacctgactggaacatcgatcctaagctacctgcaccctgaagatcgttctctgatggtggccatacaccaaaaagttttgaagtatgcagggcatcctccctttgaacattctcccatacgattttgtactcaaaacggagactacatcatactggattccagttggtccagcacaagaaccaggctgctttgatcctgaatcgtaagaaagatgtcctggcgtcttctcactttgttgacctgcttgcacctcaagacatgagggtattctacgcgcacactgccagagctcagcttcctttctggaacaactggacccaaagagcagctgcacggtatgaatgtgctccggtgaaaccttttttctgcaggatccgtggaggtgaagacagaaagcaagagaagtgtcactccccattccggatcatcccctatctgattcatgtacatcaccctgcccagccagaattggaatcggaaccttgctgtctcactgtggttgaaaagattcactctggttatgaagctcctcggatcccagtgaataaaagaatcttcaccaccacacacaccccagggtgtgtttttcttgaagtagatgaaaaagcagtgcctttgctgggttacctacctcaggacctgattggaacatcgatcctaagctacctgcaccctgaagatcgttctctgatggttgccatacaccaaaaagttttgaagtatgcagggcatcctccctttgaacattctcccattcgattttgtactcaaaacggagactacatcatactggattccagttggtccagctttgtgaatccctggagccggaagatttctttcatcattggtcggcataaagttcgaacgagcccactaaatgaggatgtttttgctaccaaaattaaaaagatgaacgataatgacaaagacataacagaattacaagaacaaatttacaaacttctcttacagccagttcacgtgagcgtgtccagcggctacgggagcctggggagcagcgggtcgcaggagcagcttgtcagcatcgcctcctccagtgaggccagtgggcaccgtgtggaggagacgaaggcggagcagatgaccttgcagcaggtctatgccagtgtgaacaaaattaaaaatctgggtcagcagctctacattgagtcaatgaccaaatcatcattcaagccagtgacggggacacgcacagaaccgaatggtggtggtgaatgtaagacctttacttccttccaccaaacactgaaaaacaatagtgtgtacactgagccctgtgaggatttgaggaacgatgagcacagcccatcctatcaacagatcaactgtatcgacagtgtcatcagatacctgaagagctacaacattccagctttgaaaagaaagtgtatctcctgtacaaatacaacttcttcctcctcagaagaagacaaacagaaccacaaggcagatgatgtccaagccttacaagctggtttgcaaatcccagccatacctaaatcagaaatgccaacaaatggacggtccatagacacaggaggaggagctccacagatcctgtccacggcgatgctgagcttggggtcgggcataagccaatgcggttacagcagcaccattgtccatgtcccacccccagagacagccagggatgctaccctcttctgtgagccctggaccctgaacatgcagccagcccctttgacctcggaagaatttaaacacgtggggctcacagcggctgttctgtcagcgcacacccagaaggaagagcagaattatgttgataaattccgagaaaagatcctgtcatcaccctacagctcctatcttcagcaagaaagcaggagcaaagctaaatattcatattttcaaggagattctacttccaagcagacgcggtcggccggctgcaggaaagggaagcacaagcggaagaagctgccggagccgccagacagcagcagctcgaacaccggctctggtccccgcaggggagcgcatcagaacgcacagccctgctgcccctccgcggcctcctctccgcacacctcgagcccgaccttcccacctgccgccatggtgcccagccaggccccttacctcgtcccagcttttcccctcccagccgcgacctcacccggaagagaatacgcagcccccggaactgcaccggaaggcctgcatgggccgcccttgtccgagggcttgcagccttacccagctttcccttttccttacttggatacttttatgaccgttttcctgcctgacccccctgtctgtcctctgttgtcgccatcgtttttgccatgtccattcctgggggcgacagcctcttctgcgatatcaccctcaatgtcgtcagcaatgagtccaactctggacccacccccttcagtcaccagccaaaggagagaggaggaaaagtgggaggcacaaagcgaggggcacccgttcattacttcgagaagcagctcacccttgcagttaaacttacttcaggaagagatgcccagaccctctgaatctccagatcagatgagaaggaacacgtgcccacaaactgagtattgtgttacaggcaacaatggcagtgagagcagtcctgctactaccggtgcactgtccacggggtcacctcccagggagaatccatcccatcctactgccagcgctctgtccacaggatcgcctcccatgaagaatccatcccatcctactgccagcgctctgtccacgggatcgcctcccatgaagaatccatcccatcctactgccagcacactgtccatgggattgcctcccagcaggactccatcccatcctactgccactgttctgtccacggggtcacctcccagcgaatccccatccagaactggttcagcagcatcaggaagcagcgacagcagtatataccttactagtagtgtttattcttctaaaatctcccaaaatgggcagcaatctcaggacgtacagaaaaaagaaacatttcctaatgtcgccgaagagcccatctggagaatgatacggcagacacctgagcgcattctcatgacataccaggtacctgagagggttaaagaagttgtactaaaagaagacctggaaaagctagaaagtatgaggcagcagcagccccagttttctcatgggcaaaaggaggagctggctaaggtgtataattggattcaaagccagactgtcactcaagaaatcgacattcaagcctgtgtcacttgtgaaaatgaagattcagctgatggtgcggccacatcctgtggtcaggttctggtagaagacagctgttgagtgactgtgaggatgaaccttcataccctttccaagacgtgttacacagacagacctttttaagtcctggacttttaaatgaccatgaagttatcattgaatgttaagattttttcttcttgattttttaatacacgtaatctttttgaagcagacattgtatacagaatcttacttctctttgttcctgatatattaaaatggccagttaggctctttttgtagttgaattgtcttctaaagagattggatggcctctaaagaggtatgtgtatctttatttcagatgtcacccagagtaaattataattagaagtatagctagaatgagccccaaaccttagcctcatttattttgttctgttacataagtcattttccccttagagtgcttgaagaaatgccacctacaggttgtgtacttttcataatggtttccatgaatgtagtacgttcatacaggcttcattcaacctggcgttcccctccataattaagatgaaacattccggttttctcacaacacattagcacatactgtccattagcatatctgggataaccaggttttgggggttgagttttggccttcatccttgtagatccctttcctattgatttcccaccttccagtgaaattctgaaagtcttatcttaaaaatcgatccgcttaccatgggcctattcttgtaagtttcagttagcatttgcatgtgtaatattaaaatgaaagagcttcttacccagtgctgttgcccttttgagtatttttgtttttaaaataatgattgtaaaatgttttacaagtaatgtaaaagctagtatcattcttacatacttctgtgtttaaattttcattcttaccaaaacagttaactctttctttccaatcaatttatacaaaagaggtcgctccagccctaccacaggtctgactggcactgccttttgtttgcccttgaacagggcagtgttgtggggactgcaaaagagaaaacgtccaggcgagcccagttgtcctcgcccacagggtcctgcaggctccatcagtcaccgctttctatggcgtttgtagttgtgtcttttaagaagtgagtgtgattgtttacttgataaatcagctcactctctggtgctttttagagaagtccctgattccttcttaaacttggaatgatagatgaaattcacacccctgcagatcagaaaaaacaaatagaagaaaatgagggttacagtaacctgttgtctttatataacttgcaacaaactaatttatttttttttcctttttttgtttttggttttttatggttttttaaggaaaatacttttctcctttgaagttttacagctttttgtaaatgcgtcctgataatgattaggaaaatcgaccttttcatccatgatgaccatcctcatagctcagatttcctttcaaagtagtggctttctggatggtaattccatcttaaggtgtcagaactattttcaaatgctgcctttgacagttcttggaattttctgatattaagcagttccatgcaaatattcgtgttttataaatagctctcatagtctgctccatcttgatagttaagtgatttctgaagcgtttgtgtgtgtgttgatcaggttgtgtgatatttttgcttgataaagaatcaaatttgaaacaattaaccagccagtagattgtctgtcagtgaccttctgtagtaataaagtttttgccactgtaaataaaaacagtatccgtagctatcaggatcattgcgcactcatatatgctaagccttctgttctctaatagaagcctttcttttccattgtttctggatatttgtattatccaaatgtgcttatttctttgccttagcacacgttttatggagtacttgttatactaggtttgatttgaaactggtgcttgtcgcagaactgtcagagcatgaggagcgctcctcctgtgggtggacgcattcacgcactcccaggttgcacctgctgctggcggtgagcagggggttcagcagcttgaccgatgccccccgagggggctctccccagcttaaactttgttgtttaaatttgttaactttttatattaatgactattgaaagtggtaataaaaatttatattataggcttcaatgttttcatgaatgttacccaaaaagctgtgttttctttggtcagaggtcaaaatttatgaaaaacaaaatgctgtatgaatggaaatcattttgcaattgagtgacacttcattgtaattcacagtgtaaatttaatccaaactgaaattttgtttcaactgaatttgtaattaactctgaatttgtttttaatcattagtaatatttcagttgggtatctttttaagtaaaaacaacaaataaactctgtacatgtaaaacgtgaaaaaaaaaaagctt

SEQ ID NO: 371735 - DNA, 6116 bp, Homo sapiens
agactgcgcgagggcggccccgggggcgagcggctgtgcgcggggccaagggcgggggcagcaggccggagtcctgaaagtcgagcgagctccgggttttgaaaatgttggagggaaaagctcctcggagatgagcgtgaccccctggctcgtggtggccgcctgttctcactaacgccatggcggggaccggagtgagaaaccggtgtctgtcactgactgcaaagtgagcgagaagcaggctgcgggccgtcccagcacgacgtggagccccgcggagacctcgagatgccccgcggggaagctcctggccccgggagacggggggctaaggacgaggccctgggcgaagaatcgggggagcggtggagccccgagttccatctgcagaggaaattggcggacagcagccacagtgaacagcaagatcgaaacagagtttctgaagaacttatcatggttgtccaagaaatgaaaaaatacttcccctcggagagacgcaataaaccaagcactctagatgccctcaactatgctctccgctgtgtccacagcgttcaagcaaacagtgagtttttccagattctcagtcagaatggagcacctcaggcagatgtgagcatgtacagtcttgaggagctggccactatcgcttcagaacacacttccaaaaacacagatacctttgtggcagtattttcatttctgtctggaaggttagtgcacatttctgaacaggctgctttgatcctgaatcgtaagaaagatgtcctggcgtcttctcactttgttgacctgcttgcacctcaagacatgagggtattctacgcgcacactgccagagctcagcttcctttctggaacaactggacccaaagagcagctgcacggtatgaatgtgctccggtgaaaccttttttctgcaggatccgtggaggtgaagacagaaagcaagagaagtgtcactccccattccggatcatcccctatctgattcatgtacatcaccctgcccagccagaattggaatcggaaccttgctgtctcactgtggttgaaaagattcactctggttatgaagctcctcggatcccagtgaataaaagaatcttcaccaccacacacaccccagggtgtgtttttcttgaagtagatgaaaaagcagtgcctttgctgggttacctacctcaggacctgattggaacatcgatcctaagctacctgcaccctgaagatcgttctctgatggttgccatacaccaaaaagttttgaagtatgcagggcatcctccctttgaacattctcccattcgattttgtactcaaaacggagactacatcatactggattccagttggtccagctttgtgaatccctggagccggaagatttctttcatcattggtcggcataaagttcgaacgagcccactaaatgaggatgtttttgctaccaaaattaaaaagatgaacgataatgacaaagacataacagaattacaagaacaaatttacaaacttctcttacagccagttcacgtgagcgtgtccagcggctacgggagcctggggagcagcgggtcgcaggagcagcttgtcagcatcgcctcctccagtgaggccagtgggcaccgtgtggaggagacgaaggcggagcagatgaccttgcagcaggtctatgccagtgtgaacaaaattaaaaatctgggtcagcagctctacattgagtcaatgaccaaatcatcattcaagccagtgacggggacacgcacagaaccgaatggtggtggtgaatgtaagacctttacttccttccaccaaacactgaaaaacaatagtgtgtacactgagccctgtgaggatttgaggaacgatgagcacagcccatcctatcaacagatcaactgtatcgacagtgtcatcagatacctgaagagctacaacattccagctttgaaaagaaagtgtatctcctgtacaaatacaacttcttcctcctcagaagaagacaaacagaaccacaaggcagatgatgtccaagccttacaagctggtttgcaaatcccagccatacctaaatcagaaatgccaacaaatggacggtccatagacacaggaggaggagctccacagatcctgtccacggcgatgctgagcttggggtcgggcataagccaatgcggttacagcagcaccattgtccatgtcccacccccagagacagccagggatgctaccctcttctgtgagccctggaccctgaacatgcagccagcccctttgacctcggaagaatttaaacacgtggggctcacagcggctgttctgtcagcgcacacccagaaggaagagcagaattatgttgataaattccgagaaaagatcctgtcatcaccctacagctcctatcttcagcaagaaagcaggagcaaagctaaatattcatattttcaaggagattctacttccaagcagacgcggtcggccggctgcaggaaagggaagcacaagcggaagaagctgccggagccgccagacagcagcagctcgaacaccggctctggtccccgcaggggagcgcatcagaacgcacagccctgctgcccctccgcggcctcctctccgcacacctcgagcccgaccttcccacctgccgccatggtgcccagccaggccccttacctcgtcccagcttttcccctcccagccgcgacctcacccggaagagaatacgcagcccccggaactgcaccggaaggcctgcatgggccgcccttgtccgagggcttgcagccttacccagctttcccttttccttacttggatacttttatgaccgttttcctgcctgacccccctgtctgtcctctgttgtcgccatcgtttttgccatgtccattcctgggggcgacagcctcttctgcgatatcaccctcaatgtcgtcagcaatgagtccaactctggacccacccccttcagtcaccagccaaaggagagaggaggaaaagtgggaggcacaaagcgaggggcacccgttcattacttcgagaagcagctcacccttgcagttaaacttacttcaggaagagatgcccagaccctctgaatctccagatcagatgagaaggaacacgtgcccacaaactgagtattgtgttacaggcaacaatggcagtgagagcagtcctgctactaccgtgttctgtccacggggtcacctcccagcgaatccccatccagaactggttcagcagcatcaggaagcagcgacagcagtatataccttactagtagtgtttattcttctaaaatctcccaaaatgggcagcaatctcaggacgtacagaaaaaagaaacatttcctaatgtcgccgaagagcccatctggagaatgatacggcagacacctgagcgcattctcatgacataccaggtacctgagagggttaaagaagttgtactaaaagaagacctggaaaagctagaaagtatgaggcagcagcagccccagttttctcatgggcaaaaggaggagctggctaaggtgtataattggattcaaagccagactgtcactcaagaaatcgacattcaagcctgtgtcacttgtgaaaatgaagattcagctgatggtgcggccacatcctgtggtcaggttctggtagaagacagctgttgagtgactgtgaggatgaaccttcataccctttccaagacgtgttacacagacagacctttttaagtcctggacttttaaatgaccatgaagttatcattgaatgttaagattttttcttcttgattttttaatacacgtaatctttttgaagcagacattgtatacagaatcttacttctctttgttcctgatatattaaaatggccagttaggctctttttgtagttgaattgtcttctaaagagattggatggcctctaaagaggtatgtgtatctttatttcagatgtcacccagagtaaattataattagaagtatagctagaatgagccccaaaccttagcctcatttattttgttctgttacataagtcattttccccttagagtgcttgaagaaatgccacctacaggttgtgtacttttcataatggtttccatgaatgtagtacgttcatacaggcttcattcaacctggcgttcccctccataattaagatgaaacattccggttttctcacaacacattagcacatactgtccattagcatatctgggataaccaggttttgggggttgagttttggccttcatccttgtagatccctttcctattgatttcccaccttccagtgaaattctgaaagtcttatcttaaaaatcgatccgcttaccatgggcctattcttgtaagtttcagttagcatttgcatgtgtaatattaaaatgaaagagcttcttacccagtgctgttgcccttttgagtatttttgtttttaaaataatgattgtaaaatgttttacaagtaatgtaaaagctagtatcattcttacatacttctgtgtttaaattttcattcttaccaaaacagttaactctttctttccaatcaatttatacaaaagaggtcgctccagccctaccacaggtctgactggcactgccttttgtttgcccttgaacagggcagtgttgtggggactgcaaaagagaaaacgtccaggcgagcccagttgtcctcgcccacagggtcctgcaggctccatcagtcaccgctttctatggcgtttgtagttgtgtcttttaagaagtgagtgtgattgtttacttgataaatcagctcactctctggtgctttttagagaagtccctgattccttcttaaacttggaatgatagatgaaattcacacccctgcagatcagaaaaaacaaatagaagaaaatgagggttacagtaacctgttgtctttatataacttgcaacaaactaatttatttttttttcctttttttgtttttggttttttatggttttttaaggaaaatacttttctcctttgaagttttacagctttttgtaaatgcgtcctgataatgattaggaaaatcgaccttttcatccatgatgaccatcctcatagctcagatttcctttcaaagtagtggctttctggatggtaattccatcttaaggtgtcagaactattttcaaatgctgcctttgacagttcttggaattttctgatattaagcagttccatgcaaatattcgtgttttataaatagctctcatagtctgctccatcttgatagttaagtgatttctgaagcgtttgtgtgtgtgttgatcaggttgtgtgatatttttgcttgataaagaatcaaatttgaaacaattaaccagccagtagattgtctgtcagtgaccttctgtagtaataaagtttttgccactgtaaataaaaacagtatccgtagctatcaggatcattgcgcactcatatatgctaagccttctgttctctaatagaagcctttcttttccattgtttctggatatttgtattatccaaatgtgcttatttctttgccttagcacacgttttatggagtacttgttatactaggtttgatttgaaactggtgcttgtcgcagaactgtcagagcatgaggagcgctcctcctgtgggtggacgcattcacgcactcccaggttgcacctgctgctggcggtgagcagggggttcagcagcttgaccgatgccccccgagggggctctccccagcttaaactttgttgtttaaatttgttaactttttatattaatgactattgaaagtggtaataaaaatttatattataggcttcaatgttttcatgaatgttacccaaaaagctgtgttttctttggtcagaggtcaaaatttatgaaaaacaaaatgctgtatgaatggaaatcattttgcaattgagtgacacttcattgtaattcacagtgtaaatttaatccaaactgaaattttgtttcaactgaatttgtaattaactctgaatttgtttttaatcattagtaatatttcagttgggtatctttttaagtaaaaacaacaaataaactctgtacatgtaaaacgtgaaaaaaaaaaagctt

SEQ ID NO: 371736 - DNA, 2176 bp, Homo sapiens
agactgcgcgagggcggccccgggggcgagcggctgtgcgcggggccaagggcgggggcagcaggccggagtcctgaaagtcgagcgagctccgggttttgaaaatgttggagggaaaagctcctcggagatgagcgtgaccccctggctcgtggtggccgcctgttctcactaacgccatggcggggaccggagtgagaaaccggtgtctgtcactgactgcaaagtgagcgagaagcaggctgcgggccgtcccagcacgacgtggagccccgcggagacctcgagatgccccgcggggaagctcctggccccgggagacggggggctaaggacgaggccctgggcgaagaatcgggggagcggtggagccccgagttccatctgcagaggaaattggcggacagcagccacagtgaacagcaagatcgaaacagagtttctgaagaacttatcatggttgtccaagaaatgaaaaaatacttcccctcggagagacgcaataaaccaagcactctagatgccctcaactatgctctccgctgtgtccacagcgttcaagcaaacagtgagtttttccagattctcagtcagaatggagcacctcaggcagatgtgagcatgtacagtcttgaggagctggccactatcgcttcagaacacacttccaaaaacacagatacctttgtggcagtattttcatttctgtctggaaggttagtgcacatttctgaacaggctgctttgatcctgaatcgtaagaaagatgtcctggcgtcttctcactttgttgacctgcttgcacctcaagacatgagggtattctacgcgcacactgccagagctcagcttcctttctggaacaactggacccaaagagcagctgcacggtatgaatgtgctccggtgaaaccttttttctgcaggatccgtggaggtgaagacagaaagcaagagaagtgtcactccccattccggatcatcccctatctgattcatgtacatcaccctgcccagccagaattggaatcggaaccttgctgtctcactgtggttgaaaagattcactctggttatgaagctcctcggatcccagtgaataaaagaatcttcaccaccacacacaccccagggtgtgtttttcttgaagtagatgaaaaagcagtgcctttgctgggttacctacctcaggacctgattggaacatcgatcctaagctacctgcaccctgaagatcgttctctgatggttgccatacaccaaaaagttttgaagtatgcagggcatcctccctttgaacattctcccattcgattttgtactcaaaacggagactacatcatactggattccagttggtccagctttgtgaatccctggagccggaagatttctttcatcattggtcggcataaagttcgaacgagcccactaaatgaggatgtttttgctaccaaaattaaaaagatgaacgataatgacaaagacataacagaattacaagaacaaatttacaaacttctcttacagccagttcacgtgagcgtgtccagcggctacgggagcctggggagcagcgggtcgcaggagcagcttgtcagcatcgcctcctccagtgaggccagtgggcaccgtgtggaggagacgaaggcggagcagatgaccttgcagcaggtctatgccagtgtgaacaaaattaaaaatctgggtcagcagctctacattgagtcaatgaccaaatcatcattcaagccagtgacggggacacgcacagaaccgaatggtggtggtgagtcagcgaatggtggtggtgagtcagccggcagccccaaggatctccttccatgggctgtcactctctgcatagacgtcatgtatgtgattcgtgagcataaagtcatgaccctgtgttgctgcttttcatatttcttgatttgcctagatagcaatagtaatagcaatagtagtaataataatggcagcaacaaatactgttctgaaaggaaatggtattagaatgtatttgtaacagttgcagttcacttttactgaagaattaacttctctgtaaataccaacgaattatagatttccctccctacatgggcatctctttaaacaaaaagagtggattttagaatgcattttaaataataaagtatattaaaatgaaaat

SEQ ID NO: 371737 - DNA, 1255 bp, Homo sapiens
agactgcgcgagggcggccccgggggcgagcggctgtgcgcggggccaagggcgggggcagcaggccggagtcctgaaagtcgagcgagctccgggttttgaaaatgttggagggaaaagctcctcggagatgagcgtgaccccctggctcgtggtggccgcctgttctcactaacgccatggcggggaccggagtgagaaaccggtgtctgtcactgactgcaaagtgagcgagaagcaggctgcgggccgtcccagcacgacgtggagccccgcggagacctcgagatgccccgcggggaagctcctggccccgggagacggggggctaaggacgaggccctgggcgaagaatcgggggagcggtggagccccgagttccatctgcagaggaaattggcggacagcagccacagtgaacagcaagatcgaaacagagtttctgaagaacttatcatggttgtccaagaaatgaaaaaatacttcccctcggagagacgcaataaaccaagcactctagatgccctcaactatgctctccgctgtgtccacagcgttcaagcaaacagtgagtttttccagattctcagtcagaatggagcacctcaggcagatgtgagcatgtacagtcttgaggagctggccactatcgcttcagaacacacttccaaaaacacattccaatacctactacttcaagttgtaacaactggatgttatagaacaggatacctttgtggcagtattttcatttctgtctggaaggttagtgcacatttctgaacaggctgctttgatcctgaatcgtaagaaagatgtcctggcgtcttctcactttgttgacctgcttgcacctcaagacatgagggtattctacgcgcacactgccagagctcagcttcctttctggaacaactggacccaaagaggtaacaggaccaatgttcagatgtctatctttcctcatcaagatcagtttcattcttacaggaatagtacagaaattaacatattatttagaacatgcacactatctggtttttcttattcctgttatagaaagtcacgtgatgaaaacagcattttaaaagcttctgataacatactcaatacgtttgtttccattttgtcacatctgtttcacagatgatatgtcataaatattatttcattaccagcgtattgtatagtggtttagttgctatgaaggctctgtttcctttaagttaaaattaaatgtttttcctccttcatg

SEQ ID NO: 371738 - DNA, 3556 bp, Homo sapiens
agggaagcgcgcggccgcgagccctgggcgccagcggagactcgctgtttgtggcccaggtgcaggaagcttacgcggtggcagccgctcgctgaggtagtctctcgcggcgccggggatccctgaacacagacagcgcgggactgagaaggaaagcttctttctgggcagccagagccgcaaaggtggagccgcgttggcgccctccgcgggaccagcgcctcggatgcgggcggagcgcggggggccgcggctgcgggagcgcgaagcggggggccaggggcgcctcatgtgagagccgcgggacctgcagccgccgccgtccccggagcacggggtggtgtgtgggggaagccgcccccggcagcaggatgaaacgaggaggaagagatagtgaccgtaattcatcagaagaaggaactgcagagaaatccaagaaactgaggactacaaatgagcattctcagacttgtgattggggtaatctccttcaggacattattctccaagtatttaaatatttgcctcttcttgaccgggctcatgcttcacaagtttgccgcaactggaaccaggtatttcacatgcctgacttgtggagatgttttgaatttgaactgaatcagccagctacatcttatttgaaagctacccatccagagctgatcaaacagattattaaaagacattcaaaccatctacaatatgtcagcttcaaggtggacagcagcaaggaatcagctgaagcagcttgtgatatactatcgcaacttgtgaattgctctttaaaaacacttggacttatttcaactgctcgaccaagctttatggatttaccaaagtctcactttatctctgcactgacagttgtgttcgtaaactccaaatccctgtcttcgcttaagatagatgatactccagtagatgatccatctctcaaagtactagtggccaacaatagtgatacactcaagctgttgaaaatgagcagctgtcctcatgtctctccagcaggtatcctttgtgtggctgatcagtgtcacggcttaagagaactagccctgaactaccacttattgagtgatgagttgttacttgcattgtcttctgaaaaacatgttcgattagaacatttgcgcattgatgtagtcagtgagaatcctggacagacacacttccatactattcagaagagtagctgggatgctttcatcagacattcacccaaagtgaacttagtgatgtatttttttttatatgaagaagaatttgaccccttctttcgctatgaaatacctgccacccatctgtactttgggagatcagtaagcaaagatgtgcttggccgtgtgggaatgacatgccctagactggttgaactagtagtgtgtgcaaatggattacggccacttgatgaagagttaattcgcattgcagaacgttgcaaaaatttgtcagctattggactaggggaatgtgaagtctcatgtagtgcctttgttgagtttgtgaagatgtgtggtggccgcctatctcaattatccattatggaagaagtactaattcctgaccaaaagtatagtttggagcagattcactgggaagtgtccaagcatcttggtagggtgtggtttcccgacatgatgcccacttggtaaaaactgcatgatgaatagcaccttaatttcaagcaaatgtattataattaaagttttatttgctgtagttctgatataattctactattttgtggcacagaaatttgatatcttcagtcagtatatgtaaagattgtttatcggaagacccatgaatgagttttggtcagaaaattccacttgtttccttagtgtaatagcagtcatatctccgaattttttttaatgtggttcggatgtgaaataaccagttatacgtattaaacagtttacagtctaaaggaaacaaaacctatatgttataatatccaagaagtactaataggttttctgaaatgttatattctctatgcatttaaaaaaaaatgtaaacttgacattttagggtcttcagttacacatacacctgttataaggtgtttaatatagctcaggaaagtgagcattttgtgagaaaaatgaatatatcatatctaatggaaaagattggatgaatgttctcaaatgttacaaagctgtttaaagaaaaaggtatatataagtaatcagaacacttagaagactgatagatgtcacacagtggtattatagaaggataatacagagccaagatcaaattaaaagacaataaatggaacagaagggaggcagtgtttagctttgtataaacttttaggtttgctctgtaatctgctaaaccatatacattcttttgtgatatgttattatgtatgtggcacttgaggcactgtatgtaaagtaaggaatgctttactagttctccttggttttatctttgtttaaactagctttaaagtattaaacaataattgaaatgaaaagcttacctattttaaaaagccaaatttaaataaatatagaactttaaaatgtttatcagttgtttccatgaaagaatattagtttccagtaaattttagtgatggctcactcacttttctattttggaattacatagttatgtaagtaaaatttttaaaaatcataaagggagcaccattgtacagtctagcataaacagcaaattttaaagaggacatatttaagttcataatcatatttttcagtaaatattgctcagtgaactggaaaactttaatagaaaaatgtctgcagttttgtgattgttaatttggttaaaccgatattttatattatttaagttaggtaacattttatattactttcatatgaataaaagtaatccatgcattgtagagtctataaaatgttgagtttttttagatgatataaactttgattctgggcactagtgctagtagatattactaccctcctgagggaaatcagaaatgatttaaccccagtggaatacattaattcttaaagcggctcttttcagtagtgtgacttttagaaagtgtctcagtagttaaggaagctaacagtcttagatctacttttaaaacggatggccttcttaagaataaagcaaaaggtgattttctacataatttttgctttccaaaagtgatgatatgctctcctacagcaacatatgagaagaaaaaaggcttatctagattcgaaaattaacagcaattatagtaatatatcccctccttctaaatagtaaaaagctctgattgtacaagaattacctgtgctagtcaagttgttgtttttccttgaacaactttggaaaaatggatttgacagtacataatcagttctactaaccaaagcttgtatttggaaatttactttttgtacaaattgaattatataatgcttaaaatactttgtcactttataagcaaaatgcatagtacttaatttgtttatactgtaaagtatatgttaaatgcttttatcactttgagaataaaaagttactaatgctgttgtattttact

SEQ ID NO: 371739 - DNA, 4715 bp, Homo sapiens
gctgaggcaggcagatcacctgaggtcaggagttcaagaccagcctggccaacatggtgaaaccctgtctctactaaaaatacaaaaaattagctgggcgtggtggcaggcacctgtaatcccagctacttgggaggctgaggcaggagaattgctggaaccatgatcgtgccactgcactccagcctgggtgacagagcgagaccccatcttgaatgaatgagtgaacggaatgaatgaatgagtgaacggaatgaatgaatgaatcattctctgccttctgggtagtaaccctggtttttagcatgttgtgtactttaatgtcgttaatgctggactgctttcctacacaacagtcatatctcaacagttcaacagtcgtatctcccctttgaaaagccttaatagtattgcatttctcacagaaaccctgttttattaaactaattttggaaatttaagcacaggaatatcaagtaatttgctcaaagccacatagccagtgagaggtagagccagaattcaaacccaaggagcttggttccagagcccattctctttagccataatactgttttgccatgaaaaaactatctttcaaagaaactaatggaatgaaagtgctaagaatacatagaataaacaaataggtataattcagaaacacaacttggggaaaacagtgcaatattaagtgatgtgtttgaagaagcagctacattccagaccaaacaattcatagtaggggtggttttgcttattttaggcggagttaagaaatgtctggcagtaacacatagcatagcccagtgcctgtccgtggcagggggtgatttcaggaagaaactgttccacctcagatcatcaggcattaagagtctcataaggagcgcacaacctagatccctcatgtggacatttcacaataagattctcactcctatgagaatctaatgtagctgctgatctgacaggaggaggagttcagactgtaaagcttgctcacttcctgctatggggcccagttctggtcctcaggccagaaccacaggacccctgtatagactattaaatgtggaacatcctctctggaggttcttgggaccctggttggcctggaattcaagaacaaatatccttagatgacttttaagaaacctttacaaagtatcgctgtaggttcccttttatattcattttagttaagttgaccacaacttttgaaatataaattcttagcatagtttcaaaatcataatactctctcccatgtagtatatactgtatattatactgataaatgtagatgtttaaaaacatgccaaaaaagtgtaaaatttataaaaccattgttggccttcattggcatttttcataatagtttgttttggtattcttgaattactgatccagtttttcctgcatgtttgtgtatataaacacacatctcagtgacagaagaatgaattttgagtttatttctattcaaaagttgagtaggaaaaaaactgatgcatttttcggaataggatgaaacgaggaggaagagatagtgaccgtaattcatcagaagaaggaactgcagagaaatccaagaaactgaggactacaaatgagcattctcagacttgtgattggggtaatctccttcaggacattattctccaagtatttaaatatttgcctcttcttgaccgggctcatgcttcacaagtttgccgcaactggaaccaggtatttcacatgcctgacttgtggagatgttttgaatttgaactgaatcagccagctacatcttatttgaaagctacccatccagagctgatcaaacagattattaaaagacattcaaaccatctacaatatgtcagcttcaaggtggacagcagcaaggaatcagctgaagcagcttgtgatatactatcgcaacttgtgaattgctctttaaaaacacttggacttatttcaactgctcgaccaagctttatggatttaccaaagtctcactttatctctgcactgacagttgtgttcgtaaactccaaatccctgtcttcgcttaagatagatgatactccagtagatgatccatctctcaaagtactagtggccaacaatagtgatacactcaagctgttgaaaatgagcagctgtcctcatgtctctccagcaggtatcctttgtgtggctgatcagtgtcacggcttaagagaactagccctgaactaccacttattgagtgatgagttgttacttgcattgtcttctgaaaaacatgttcgattagaacatttgcgcattgatgtagtcagtgagaatcctggacagacacacttccatactattcagaagagtagctgggatgctttcatcagacattcacccaaagtgaacttagtgatgtatttttttttatatgaagaagaatttgaccccttctttcgctatgaaatacctgccacccatctgtactttgggagatcagtaagcaaagatgtgcttggccgtgtgggaatgacatgccctagactggttgaactagtagtgtgtgcaaatggattacggccacttgatgaagagttaattcgcattgcagaacgttgcaaaaatttgtcagctattggactaggggaatgtgaagtctcatgtagtgcctttgttgagtttgtgaagatgtgtggtggccgcctatctcaattatccattatggaagaagtactaattcctgaccaaaagtatagtttggagcagattcactgggaagtgtccaagcatcttggtagggtgtggtttcccgacatgatgcccacttggtaaaaactgcatgatgaatagcaccttaatttcaagcaaatgtattataattaaagttttatttgctgtagttctgatataattctactattttgtggcacagaaatttgatatcttcagtcagtatatgtaaagattgtttatcggaagacccatgaatgagttttggtcagaaaattccacttgtttccttagtgtaatagcagtcatatctccgaattttttttaatgtggttcggatgtgaaataaccagttatacgtattaaacagtttacagtctaaaggaaacaaaacctatatgttataatatccaagaagtactaataggttttctgaaatgttatattctctatgcatttaaaaaaaaatgtaaacttgacattttagggtcttcagttacacatacacctgttataaggtgtttaatatagctcaggaaagtgagcattttgtgagaaaaatgaatatatcatatctaatggaaaagattggatgaatgttctcaaatgttacaaagctgtttaaagaaaaaggtatatataagtaatcagaacacttagaagactgatagatgtcacacagtggtattatagaaggataatacagagccaagatcaaattaaaagacaataaatggaacagaagggaggcagtgtttagctttgtataaacttttaggtttgctctgtaatctgctaaaccatatacattcttttgtgatatgttattatgtatgtggcacttgaggcactgtatgtaaagtaaggaatgctttactagttctccttggttttatctttgtttaaactagctttaaagtattaaacaataattgaaatgaaaagcttacctattttaaaaagccaaatttaaataaatatagaactttaaaatgtttatcagttgtttccatgaaagaatattagtttccagtaaattttagtgatggctcactcacttttctattttggaattacatagttatgtaagtaaaatttttaaaaatcataaagggagcaccattgtacagtctagcataaacagcaaattttaaagaggacatatttaagttcataatcatatttttcagtaaatattgctcagtgaactggaaaactttaatagaaaaatgtctgcagttttgtgattgttaatttggttaaaccgatattttatattatttaagttaggtaacattttatattactttcatatgaataaaagtaatccatgcattgtagagtctataaaatgttgagtttttttagatgatataaactttgattctgggcactagtgctagtagatattactaccctcctgagggaaatcagaaatgatttaaccccagtggaatacattaattcttaaagcggctcttttcagtagtgtgacttttagaaagtgtctcagtagttaaggaagctaacagtcttagatctacttttaaaacggatggccttcttaagaataaagcaaaaggtgattttctacataatttttgctttccaaaagtgatgatatgctctcctacagcaacatatgagaagaaaaaaggcttatctagattcgaaaattaacagcaattatagtaatatatcccctccttctaaatagtaaaaagctctgattgtacaagaattacctgtgctagtcaagttgttgtttttccttgaacaactttggaaaaatggatttgacagtacataatcagttctactaaccaaagcttgtatttggaaatttactttttgtacaaattgaattatataatgcttaaaatactttgtcactttataagcaaaatgcatagtacttaatttgtttatactgtaaagtatatgttaaatgcttttatcactttgagaataaaaagttactaatgctgttgtattttact

SEQ ID NO: 371740 - DNA, 3412 bp, Homo sapiens
agggaagcgcgcggccgcgagccctgggcgccagcggagactcgctgtttgtggcccaggtgcaggaagcttacgcggtggcagccgctcgctgaggtagtctctcgcggcgccggggatccctgaacacagacagcgcgggactgagaaggaaagcttctttctgggcagccagagccgcaaaggtggagccgcgttggcgccctccgcgggaccagcgcctcggatgcgggcggagcgcggggggccgcggctgcgggagcgcgaagcggggggccaggggcgcctcatgtgagagccgcgggacctgcagccgccgccgtccccggagcacggggtggtgtgtgggggaagccgcccccggcagcaggatgaaacgaggaggaagagatagtgaccgtaattcatcagaagaaggaactgcagagaaatccaagaaactgaggactacaaatgagcattctcagacttgtgattggggtaatctccttcaggacattattctccaagtatttaaatatttgcctcttcttgaccgggctcatgcttcacaagtttgccgcaactggaaccaggtggacagcagcaaggaatcagctgaagcagcttgtgatatactatcgcaacttgtgaattgctctttaaaaacacttggacttatttcaactgctcgaccaagctttatggatttaccaaagtctcactttatctctgcactgacagttgtgttcgtaaactccaaatccctgtcttcgcttaagatagatgatactccagtagatgatccatctctcaaagtactagtggccaacaatagtgatacactcaagctgttgaaaatgagcagctgtcctcatgtctctccagcaggtatcctttgtgtggctgatcagtgtcacggcttaagagaactagccctgaactaccacttattgagtgatgagttgttacttgcattgtcttctgaaaaacatgttcgattagaacatttgcgcattgatgtagtcagtgagaatcctggacagacacacttccatactattcagaagagtagctgggatgctttcatcagacattcacccaaagtgaacttagtgatgtatttttttttatatgaagaagaatttgaccccttctttcgctatgaaatacctgccacccatctgtactttgggagatcagtaagcaaagatgtgcttggccgtgtgggaatgacatgccctagactggttgaactagtagtgtgtgcaaatggattacggccacttgatgaagagttaattcgcattgcagaacgttgcaaaaatttgtcagctattggactaggggaatgtgaagtctcatgtagtgcctttgttgagtttgtgaagatgtgtggtggccgcctatctcaattatccattatggaagaagtactaattcctgaccaaaagtatagtttggagcagattcactgggaagtgtccaagcatcttggtagggtgtggtttcccgacatgatgcccacttggtaaaaactgcatgatgaatagcaccttaatttcaagcaaatgtattataattaaagttttatttgctgtagttctgatataattctactattttgtggcacagaaatttgatatcttcagtcagtatatgtaaagattgtttatcggaagacccatgaatgagttttggtcagaaaattccacttgtttccttagtgtaatagcagtcatatctccgaattttttttaatgtggttcggatgtgaaataaccagttatacgtattaaacagtttacagtctaaaggaaacaaaacctatatgttataatatccaagaagtactaataggttttctgaaatgttatattctctatgcatttaaaaaaaaatgtaaacttgacattttagggtcttcagttacacatacacctgttataaggtgtttaatatagctcaggaaagtgagcattttgtgagaaaaatgaatatatcatatctaatggaaaagattggatgaatgttctcaaatgttacaaagctgtttaaagaaaaaggtatatataagtaatcagaacacttagaagactgatagatgtcacacagtggtattatagaaggataatacagagccaagatcaaattaaaagacaataaatggaacagaagggaggcagtgtttagctttgtataaacttttaggtttgctctgtaatctgctaaaccatatacattcttttgtgatatgttattatgtatgtggcacttgaggcactgtatgtaaagtaaggaatgctttactagttctccttggttttatctttgtttaaactagctttaaagtattaaacaataattgaaatgaaaagcttacctattttaaaaagccaaatttaaataaatatagaactttaaaatgtttatcagttgtttccatgaaagaatattagtttccagtaaattttagtgatggctcactcacttttctattttggaattacatagttatgtaagtaaaatttttaaaaatcataaagggagcaccattgtacagtctagcataaacagcaaattttaaagaggacatatttaagttcataatcatatttttcagtaaatattgctcagtgaactggaaaactttaatagaaaaatgtctgcagttttgtgattgttaatttggttaaaccgatattttatattatttaagttaggtaacattttatattactttcatatgaataaaagtaatccatgcattgtagagtctataaaatgttgagtttttttagatgatataaactttgattctgggcactagtgctagtagatattactaccctcctgagggaaatcagaaatgatttaaccccagtggaatacattaattcttaaagcggctcttttcagtagtgtgacttttagaaagtgtctcagtagttaaggaagctaacagtcttagatctacttttaaaacggatggccttcttaagaataaagcaaaaggtgattttctacataatttttgctttccaaaagtgatgatatgctctcctacagcaacatatgagaagaaaaaaggcttatctagattcgaaaattaacagcaattatagtaatatatcccctccttctaaatagtaaaaagctctgattgtacaagaattacctgtgctagtcaagttgttgtttttccttgaacaactttggaaaaatggatttgacagtacataatcagttctactaaccaaagcttgtatttggaaatttactttttgtacaaattgaattatataatgcttaaaatactttgtcactttataagcaaaatgcatagtacttaatttgtttatactgtaaagtatatgttaaatgcttttatcactttgagaataaaaagttactaatgctgttgtattttact

SEQ ID NO: 371741 - DNA, 3223 bp, Homo sapiens
taccaaatacataattattttttaaagactataaattgatttactccattagtttatacagtcactttggaataaatcagtgtaaaagccaacattaaatatgtctcttatcataatgaaagctaggtcttgtcttgacaattgcccttatactttttcagagagacttagaaaaggccaagttggaggtgagggtggagggtggatgattgaaagaatattctttaagttataatgcaataaactagtaatgatacttctataaaatgaatatgtgtacagagaaatataaatatatacatgagtaatcttgaagtctgggtatttggggaaaaaagtaaaaaaataataaaatattcatgagtaaacggtgtttcttttctaaggtggacagcagcaaggaatcagctgaagcagcttgtgatatactatcgcaacttgtgaattgctctttaaaaacacttggacttatttcaactgctcgaccaagctttatggatttaccaaagtctcactttatctctgcactgacagttgtgttcgtaaactccaaatccctgtcttcgcttaagatagatgatactccagtagatgatccatctctcaaagtactagtggccaacaatagtgatacactcaagctgttgaaaatgagcagctgtcctcatgtctctccagcaggtatcctttgtgtggctgatcagtgtcacggcttaagagaactagccctgaactaccacttattgagtgatgagttgttacttgcattgtcttctgaaaaacatgttcgattagaacatttgcgcattgatgtagtcagtgagaatcctggacagacacacttccatactattcagaagagtagctgggatgctttcatcagacattcacccaaagtgaacttagtgatgtatttttttttatatgaagaagaatttgaccccttctttcgctatgaaatacctgccacccatctgtactttgggagatcagtaagcaaagatgtgcttggccgtgtgggaatgacatgccctagactggttgaactagtagtgtgtgcaaatggattacggccacttgatgaagagttaattcgcattgcagaacgttgcaaaaatttgtcagctattggactaggggaatgtgaagtctcatgtagtgcctttgttgagtttgtgaagatgtgtggtggccgcctatctcaattatccattatggaagaagtactaattcctgaccaaaagtatagtttggagcagattcactgggaagtgtccaagcatcttggtagggtgtggtttcccgacatgatgcccacttggtaaaaactgcatgatgaatagcaccttaatttcaagcaaatgtattataattaaagttttatttgctgtagttctgatataattctactattttgtggcacagaaatttgatatcttcagtcagtatatgtaaagattgtttatcggaagacccatgaatgagttttggtcagaaaattccacttgtttccttagtgtaatagcagtcatatctccgaattttttttaatgtggttcggatgtgaaataaccagttatacgtattaaacagtttacagtctaaaggaaacaaaacctatatgttataatatccaagaagtactaataggttttctgaaatgttatattctctatgcatttaaaaaaaaatgtaaacttgacattttagggtcttcagttacacatacacctgttataaggtgtttaatatagctcaggaaagtgagcattttgtgagaaaaatgaatatatcatatctaatggaaaagattggatgaatgttctcaaatgttacaaagctgtttaaagaaaaaggtatatataagtaatcagaacacttagaagactgatagatgtcacacagtggtattatagaaggataatacagagccaagatcaaattaaaagacaataaatggaacagaagggaggcagtgtttagctttgtataaacttttaggtttgctctgtaatctgctaaaccatatacattcttttgtgatatgttattatgtatgtggcacttgaggcactgtatgtaaagtaaggaatgctttactagttctccttggttttatctttgtttaaactagctttaaagtattaaacaataattgaaatgaaaagcttacctattttaaaaagccaaatttaaataaatatagaactttaaaatgtttatcagttgtttccatgaaagaatattagtttccagtaaattttagtgatggctcactcacttttctattttggaattacatagttatgtaagtaaaatttttaaaaatcataaagggagcaccattgtacagtctagcataaacagcaaattttaaagaggacatatttaagttcataatcatatttttcagtaaatattgctcagtgaactggaaaactttaatagaaaaatgtctgcagttttgtgattgttaatttggttaaaccgatattttatattatttaagttaggtaacattttatattactttcatatgaataaaagtaatccatgcattgtagagtctataaaatgttgagtttttttagatgatataaactttgattctgggcactagtgctagtagatattactaccctcctgagggaaatcagaaatgatttaaccccagtggaatacattaattcttaaagcggctcttttcagtagtgtgacttttagaaagtgtctcagtagttaaggaagctaacagtcttagatctacttttaaaacggatggccttcttaagaataaagcaaaaggtgattttctacataatttttgctttccaaaagtgatgatatgctctcctacagcaacatatgagaagaaaaaaggcttatctagattcgaaaattaacagcaattatagtaatatatcccctccttctaaatagtaaaaagctctgattgtacaagaattacctgtgctagtcaagttgttgtttttccttgaacaactttggaaaaatggatttgacagtacataatcagttctactaaccaaagcttgtatttggaaatttactttttgtacaaattgaattatataatgcttaaaatactttgtcactttataagcaaaatgcatagtacttaatttgtttatactgtaaagtatatgttaaatgcttttatcactttgagaataaaaagttactaatgctgttgtattttact

SEQ ID NO: 371742 - DNA, 3502 bp, Homo sapiens
agggaagcgcgcggccgcgagccctgggcgccagcggagactcgctgtttgtggcccaggtgcaggaagcttacgcggtggcagccgctcgctgaggtagtctctcgcggcgccggggatccctgaacacagacagcgcgggactgagaaggaaagcttctttctgggcagccagagccgcaaaggtggagccgcgttggcgccctccgcgggaccagcgcctcggatgcgggcggagcgcggggggccgcggctgcgggagcgcgaagcggggggccaggggcgcctcatgtgagagccgcgggacctgcagccgccgccgtccccggagcacggggtggtgtgtgggggaagccgcccccggcagcaggatgaaacgaggaggaagagatagtgaccgtaattcatcagaagaaggaactgcagagaaatccaagaaactgaggactacaaatgagcattctcagacttgtgattggggtaatctccttcaggacattattctccaagtatttaaatatttgcctcttcttgaccgggctcatgcttcacaagtttgccgcaactggaaccaggtatttcacatgcctgacttgtggagatgttttgaatttgaactgaatcagccagctacatcttatttgaaagctacccatccagagctgatcaaacagattattaaaagacattcaaaccatctacaatatgtcagcttcaaggtggacagcagcaaggaatcagctgaagcagcttgtgatatactatcgcaacttgtgaattgctctttaaaaacacttggacttatttcaactgctcgaccaagctttatggatttaccaaagtctcactttatctctgcactgacagttgtgttcgtaaactccaaatccctgtcttcgcttaagatagatgatactccagtagatgatccatctctcaaagtactagtggccaacaatagtgatacactcaagctgttgaaaatgagcagctgtcctcatgtctctccagcaggtatcctttgtgtggctgatcagtgtcacggcttaagagaactagccctgaactaccacttattgagtgatgagttgttacttgcattgtcttctgaaaaacatgttcgattagaacatttgcgcattgatgtagtcagtgagaatcctggacagacacacttccatactattcagaagagtagctgggatgctttcatcagacattcacccaaagtgaacttagtgatgtatttttttttatatgaagaagaatttgaccccttctttcgctatgaaatacctgccacccatctgtactttgggagatcagtaagcaaagatgtgcttggccgtgtgggaatgacatgccctagactggttgaactagtagtgtgtgcaaatggattacggccacttgatgaagagttaattcgcattgcagaacgttgcaaaaatttgtcagctattggactaggggaatgtgaagtctcatgtagtgcctttgttgagtttgtgaagatgtgtggtggccgcctatctcaattatccattatggaagaagtactaattcctgaccaaaagtatagtttggagcagattcactgggaagtgtccaagcatcttggtagggtgtggtttcccgacatgatgcccacttggtaaaaactgcatgatgaatagcaccttaatttcaagcaaatgtattataattaaagttttatttgctgtagttctgatataattctactattttgtggcacagaaatttgatatcttcagtcagtatatgtaaagattgtttatcggaagacccatgaatgagttttggtcagaaaattccacttgtttccttagtgtaatagcagtcatatctccgaattttttttaatgtggttcggatgtgaaataaccagttatacgtattaaacagtttacagtctaaaggaaacaaaacctatatgttataatatccaagaagtactaataggttttctgaaatgttatattctctatgcatttaaaaaaaaatgtaaacttgacattttagggtcttcagttacacatacacctgttataaggtgtttaatatagctcaggaaagtgagcattttgtgagaaaaatgaatatatcatatctaatggaaaagattggatgaatgttctcaaatgttacaaagctgtttaaagaaaaaggtatatataagtaatcagaacacttagaagactgatagatgtcacacagtggtattatagaaggataatacagagccaagatcaaattaaaagacaataaatggaacagaagggaggcagtgtttagctttgtataaacttttaggtttgctctgtaatctgctaaaccatatacattcttttgtgatatgttattatgtatgtggcacttgaggcactgtatgtaaagtaaggaatgctttactagttctccttggttttatctttgtttaaactagctttaaagtattaaacaataattgaaatgaaaagcttacctattttaaaaagccaaatttaaataaatatagaacttttgatggctcactcacttttctattttggaattacatagttatgtaagtaaaatttttaaaaatcataaagggagcaccattgtacagtctagcataaacagcaaattttaaagaggacatatttaagttcataatcatatttttcagtaaatattgctcagtgaactggaaaactttaatagaaaaatgtctgcagttttgtgattgttaatttggttaaaccgatattttatattatttaagttaggtaacattttatattactttcatatgaataaaagtaatccatgcattgtagagtctataaaatgttgagtttttttagatgatataaactttgattctgggcactagtgctagtagatattactaccctcctgagggaaatcagaaatgatttaaccccagtggaatacattaattcttaaagcggctcttttcagtagtgtgacttttagaaagtgtctcagtagttaaggaagctaacagtcttagatctacttttaaaacggatggccttcttaagaataaagcaaaaggtgattttctacataatttttgctttccaaaagtgatgatatgctctcctacagcaacatatgagaagaaaaaaggcttatctagattcgaaaattaacagcaattatagtaatatatcccctccttctaaatagtaaaaagctctgattgtacaagaattacctgtgctagtcaagttgttgtttttccttgaacaactttggaaaaatggatttgacagtacataatcagttctactaaccaaagcttgtatttggaaatttactttttgtacaaattgaattatataatgcttaaaatactttgtcactttataagcaaaatgcatagtacttaatttgtttatactgtaaagtatatgttaaatgcttttatcactttgagaataaaaagttactaatgctgttgtattttact

SEQ ID NO: 371743 - DNA, 1502 bp, Homo sapiens
agggaagcgcgcggccgcgagccctgggcgccagcggagactcgctgtttgtggcccaggtgcaggaagcttacgcggtggcagccgctcgctgaggtagtctctcgcggcgccggggatccctgaacacagacagcgcgggactgagaaggaaagcttctttctgggcagccagagccgcaaaggtggagccgcgttggcgccctccgcgggaccagcgcctcggatgcgggcggagcgcggggggccgcggctgcgggagcgcgaagcggggggccaggggcgcctcatgtgagagccgcgggacctgcagccgccgccgtccccggagcacggggtggtgtgtgggggaagccgcccccggcagcaggatgaaacgaggaggaagagatagtgaccgtaattcatcagaagaaggaactgcagagaaatccaagaaactgaggactacaaatgagcattctcagacttgtgattggggtaatctccttcaggacattattctccaagtatttaaatatttgcctcttcttgaccgggctcatgcttcacaagtttgccgcaactggaaccaggtatttcacatgcctgacttgtggagatgttttgaatttgaactgaatcagccagctacatcttatttgaaagctacccatccagagctgatcaaacagattattaaaagacattcaaaccatctacaatatgtcagcttcaaggtggacagcagcaaggaatcagctgaagcagcttgtgatatactatcgcaacttgtgaattgctctttaaaaacacttggacttatttcaactgctcgaccaagctttatggatttaccaaagtctcactttatctctgcactgacagttgtgttcgtaaactccaaatccctgtcttcgcttaagatagatgatactccagtagatgatccatctctcaaagtactagtggccaacaatagtgatacactcaagctgttgaaaatgagcagctgtcctcatgtctctccagcagaaacgtgttcagttgatcatcaaatacttaaaggaccttgaaagcttgtctggctctaattaaagcacagctacttggtgatcttaacagaaacctgtcctctctcggagaagtgcaacctcttccactgcgctgacagctttgtgggaagagggagaactacaggaaacaatgaagaagtcagaaggtgcctgtttacccaaacgtgtctgcagccatgttcctgcataccccggttagaagaaccgctgaagcactatgctatcagcttaaaatctaggtgactacaaaaccctggaaagtttggcacataaactacattaggcaagatcaaggatgacatttgttctttgattaatcattatcactgccattcaatgtgacctgccaaacatacacaacttacatctttacagcaatcctaaatcctaagatttagtgatgttagtatgcttaaagacacaagccagttactagctagttccaaa

SEQ ID NO: 371744 - DNA, 2774 bp, Homo sapiens
gctgaggcaggcagatcacctgaggtcaggagttcaagaccagcctggccaacatggtgaaaccctgtctctactaaaaatacaaaaaattagctgggcgtggtggcaggcacctgtaatcccagctacttgggaggctgaggcaggagaattgctggaaccatgatcgtgccactgcactccagcctgggtgacagagcgagaccccatcttgaatgaatgagtgaacggaatgaatgaatgagtgaacggaatgaatgaatgaatcattctctgccttctgggtagtaaccctggtttttagcatgttgtgtactttaatgtcgttaatgctggactgctttcctacacaacagtcatatctcaacagttcaacagtcgtatctcccctttgaaaagccttaatagtattgcatttctcacagaaaccctgttttattaaactaattttggaaatttaagcacaggaatatcaagtaatttgctcaaagccacatagccagtgagaggtagagccagaattcaaacccaaggagcttggttccagagcccattctctttagccataatactgttttgccatgaaaaaactatctttcaaagaaactaatggaatgaaagtgctaagaatacatagaataaacaaataggtataattcagaaacacaacttggggaaaacagtgcaatattaagtgatgtgtttgaagaagcagctacattccagaccaaacaattcatagtaggggtggttttgcttattttaggcggagttaagaaatgtctggcagtaacacatagcatagcccagtgcctgtccgtggcagggggtgatttcaggaagaaactgttccacctcagatcatcaggcattaagagtctcataaggagcgcacaacctagatccctcatgtggacatttcacaataagattctcactcctatgagaatctaatgtagctgctgatctgacaggaggaggagttcagactgtaaagcttgctcacttcctgctatggggcccagttctggtcctcaggccagaaccacaggacccctgtatagactattaaatgtggaacatcctctctggaggttcttgggaccctggttggcctggaattcaagaacaaatatccttagatgacttttaagaaacctttacaaagtatcgctgtaggttcccttttatattcattttagttaagttgaccacaacttttgaaatataaattcttagcatagtttcaaaatcataatactctctcccatgtagtatatactgtatattatactgataaatgtagatgtttaaaaacatgccaaaaaagtgtaaaatttataaaaccattgttggccttcattggcatttttcataatagtttgttttggtattcttgaattactgatccagtttttcctgcatgtttgtgtatataaacacacatctcagtgacagaagaatgaattttgagtttatttctattcaaaagttgagtaggaaaaaaactgatgcatttttcggaataggatgaaacgaggaggaagagatagtgaccgtaattcatcagaagaaggaactgcagagaaatccaagaaactgaggactacaaatgagcattctcagacttgtgattggggtaatctccttcaggacattattctccaagtatttaaatatttgcctcttcttgaccgggctcatgcttcacaagtttgccgcaactggaaccaggtatttcacatgcctgacttgtggagatgttttgaatttgaactgaatcagccagctacatcttatttgaaagctacccatccagagctgatcaaacagattattaaaagacattcaaaccatctacaatatgtcagcttcaaggtaatattttaaatccttcttttaaaaaataaagtatttttagtggctttgtttcctaaaccagtacatcttctcatgcctttaaaatatttgctttttcagggaaaatgcttaaaaatttagaattattgtataccttagaagctgtcacaaaatattatatttgatggagctaaattactctattaattattaataatttcttaaaacagcaaaagcagccactaaataagcataagtcattgataaagctgtgaattacattgaattattgtgaacgattttgaggaagaagaaatatctaataaaataaaaattgggagattataattgagtagagcttaattgctatttctatctaacaggaacttagtgttacttactgatggctttttgaaatgggatcttcagatgaaaaggaagcatagaaactttatgtagaagatttagatgaatatattttagagagaaatagaaaaaggtacatgggagaatgccaaagggaactgtttatttctttttgttgctggaaggaaggtattggaaatcatgcagtgatgagataaatgaagtgggtggctttttgcgatatccagaataatttaagaaatcatagctggatgtgggtacctgtagtcccatagtcccagcttctcaggaggctgaggcgggaagattgcatgagcccaggagtttgaggttgtggtgagctatgattgtgcagctgtactacagccttggtgacagagcgagaccctgtctctatttaaaaaaataaaaaatcacagtggtttgtgtgaggcttgtcatgttttgtttgggtgatgaataatgaaatatggacatgtttactggatctttaaacaccagattttgtggtagcaaataacttattg

SEQ ID NO: 371745 - DNA, 3465 bp, Homo sapiens
agggaagcgcgcggccgcgagccctgggcgccagcggagactcgctgtttgtggcccaggtgcaggaagcttacgcggtggcagccgctcgctgaggtagtctctcgcggcgccggggatccctgaacacagacagcgcgggaggagcgcggggggccgcggctgcgggagcgcgaagcggggggccaggggcgcctcatgtgagagccgcgggacctgcagccgccgccgtccccggagcacggggtggtgtgtgggggaagccgcccccggcagcaggatgaaacgaggaggaagagatagtgaccgtaattcatcagaagaaggaactgcagagaaatccaagaaactgaggactacaaatgagcattctcagacttgtgattggggtaatctccttcaggacattattctccaagtatttaaatatttgcctcttcttgaccgggctcatgcttcacaagtttgccgcaactggaaccaggtatttcacatgcctgacttgtggagatgttttgaatttgaactgaatcagccagctacatcttatttgaaagctacccatccagagctgatcaaacagattattaaaagacattcaaaccatctacaatatgtcagcttcaaggtggacagcagcaaggaatcagctgaagcagcttgtgatatactatcgcaacttgtgaattgctctttaaaaacacttggacttatttcaactgctcgaccaagctttatggatttaccaaagtctcactttatctctgcactgacagttgtgttcgtaaactccaaatccctgtcttcgcttaagatagatgatactccagtagatgatccatctctcaaagtactagtggccaacaatagtgatacactcaagctgttgaaaatgagcagctgtcctcatgtctctccagcaggtatcctttgtgtggctgatcagtgtcacggcttaagagaactagccctgaactaccacttattgagtgatgagttgttacttgcattgtcttctgaaaaacatgttcgattagaacatttgcgcattgatgtagtcagtgagaatcctggacagacacacttccatactattcagaagagtagctgggatgctttcatcagacattcacccaaagtgaacttagtgatgtatttttttttatatgaagaagaatttgaccccttctttcgctatgaaatacctgccacccatctgtactttgggagatcagtaagcaaagatgtgcttggccgtgtgggaatgacatgccctagactggttgaactagtagtgtgtgcaaatggattacggccacttgatgaagagttaattcgcattgcagaacgttgcaaaaatttgtcagctattggactaggggaatgtgaagtctcatgtagtgcctttgttgagtttgtgaagatgtgtggtggccgcctatctcaattatccattatggaagaagtactaattcctgaccaaaagtatagtttggagcagattcactgggaagtgtccaagcatcttggtagggtgtggtttcccgacatgatgcccacttggtaaaaactgcatgatgaatagcaccttaatttcaagcaaatgtattataattaaagttttatttgctgtagttctgatataattctactattttgtggcacagaaatttgatatcttcagtcagtatatgtaaagattgtttatcggaagacccatgaatgagttttggtcagaaaattccacttgtttccttagtgtaatagcagtcatatctccgaattttttttaatgtggttcggatgtgaaataaccagttatacgtattaaacagtttacagtctaaaggaaacaaaacctatatgttataatatccaagaagtactaataggttttctgaaatgttatattctctatgcatttaaaaaaaaatgtaaacttgacattttagggtcttcagttacacatacacctgttataaggtgtttaatatagctcaggaaagtgagcattttgtgagaaaaatgaatatatcatatctaatggaaaagattggatgaatgttctcaaatgttacaaagctgtttaaagaaaaaggtatatataagtaatcagaacacttagaagactgatagatgtcacacagtggtattatagaaggataatacagagccaagatcaaattaaaagacaataaatggaacagaagggaggcagtgtttagctttgtataaacttttaggtttgctctgtaatctgctaaaccatatacattcttttgtgatatgttattatgtatgtggcacttgaggcactgtatgtaaagtaaggaatgctttactagttctccttggttttatctttgtttaaactagctttaaagtattaaacaataattgaaatgaaaagcttacctattttaaaaagccaaatttaaataaatatagaactttaaaatgtttatcagttgtttccatgaaagaatattagtttccagtaaattttagtgatggctcactcacttttctattttggaattacatagttatgtaagtaaaatttttaaaaatcataaagggagcaccattgtacagtctagcataaacagcaaattttaaagaggacatatttaagttcataatcatatttttcagtaaatattgctcagtgaactggaaaactttaatagaaaaatgtctgcagttttgtgattgttaatttggttaaaccgatattttatattatttaagttaggtaacattttatattactttcatatgaataaaagtaatccatgcattgtagagtctataaaatgttgagtttttttagatgatataaactttgattctgggcactagtgctagtagatattactaccctcctgagggaaatcagaaatgatttaaccccagtggaatacattaattcttaaagcggctcttttcagtagtgtgacttttagaaagtgtctcagtagttaaggaagctaacagtcttagatctacttttaaaacggatggccttcttaagaataaagcaaaaggtgattttctacataatttttgctttccaaaagtgatgatatgctctcctacagcaacatatgagaagaaaaaaggcttatctagattcgaaaattaacagcaattatagtaatatatcccctccttctaaatagtaaaaagctctgattgtacaagaattacctgtgctagtcaagttgttgtttttccttgaacaactttggaaaaatggatttgacagtacataatcagttctactaaccaaagcttgtatttggaaatttactttttgtacaaattgaattatataatgcttaaaatactttgtcactttataagcaaaatgcatagtacttaatttgtttatactgtaaagtatatgttaaatgcttttatcactttgagaataaaaagttactaatgctgttgtattttact

SEQ ID NO: 371746 - DNA, 2896 bp, Homo sapiens
agggaagcgcgcggccgcgagccctgggcgccagcggagactcgctgtttgtggcccaggtgcaggaagcttacgcggtggcagccgctcgctgaggtagtctctcgcggcgccggggatccctgaacacagacagcgcgggactgagaaggaaagcttctttctgggcagccagagccgcaaaggtggagccgcgttggcgccctccgcgggaccagcgcctcggatgcgggcggagcgcggggggccgcggctgcgggagcgcgaagcggggggccaggggcgcctcatgtgagagccgcgggacctgcagccgccgccgtccccggagcacggggtggtgtgtgggggaagccgcccccggcagcaggatgaaacgaggaggaagagatagtgaccgtaattcatcagaagaaggaactgcagagaaatccaagaaactgaggactacaaatgagcattctcagacttgtgattggggtaatctccttcaggacattattctccaagtatttaaatatttgcctcttcttgaccgggctcatgcttcacaagtttgccgcaactggaaccaggtatttcacatgcctgacttgtggagatgttttgaatttgaactgaatcagccagctacatcttatttgaaagctacccatccagagctgatcaaacagattattaaaagacattcaaaccatctacaatatgtcagcttcaaggtggacagcagcaaggaatcagctgaagcagcttgtgatatactatcgcaacttgtgaattgctctttaaaaacacttggacttatttcaactgctcgaccaagctttatggatttaccaaagtctcactttatctctgcactgacagttgtgttcgtaaactccaaatccctgtcttcgcttaagatagatgatactccagtagatgatccatctctcaaagtactagtggccaacaatagtgatacactcaagctgttgaaaatgagcagctgtcctcatgtctctccagcaggtatcctttgtgtggctgatcagtgtcacggcttaagagaactagccctgaactaccacttattgagtgatgagttgttacttgcattgtcttctgaaaaacatgttcgattagaacatttgcgcattgatgtagtcagtgagaatcctggacagacacacttccatactattcagaagagtagctgggatgctttcatcagacattcacccaaagtgaacttagtgatgtatttttttttatatgaagaagaatttgaccccttctttcgctatgaaatacctgccacccatctgtactttgggagatcagtaagcaaagatgtgcttggccgtgtgggaatgacatgccctagactggttgaactagtagtgtgtgcaaatggattacggccacttgatgaagagttaattcgcattgcagaacgttgcaaaaatttgtcagctattggactaggggaatgtgaagtctcatgtagtgcctttgttgagtttgtgaagatgtgtggtggccgcctatctcaattatccattatggaagaagtactaattcctgaccaaaagtatagtttggagcagattcactgggaagtgtccaagcatcttggtagggtgtggtttcccgacatgatgcccacttggtaaaaactgcatgatgaatagcaccttaatttcaagcaaatgtattataattaaagttttatttgctgtagttctgatataattctactattttgtggcacagaaatttgatatcttcagtcagtatatgtaaagattgtttatcggaagacccatgaatgagttttggtcagaaaattccacttgtttccttagtgtaatagcagtcatatctccgaattttttttaatgtggttcggatgtgaaataaccagttatacgtattaaacagtttacagtctaaaggaaacaaaacctatatgttataatatccaagaagtactaataggttttctgaaatgttatattctctatgcatttaaaaaaaaatgtaaacttgacattttagggtcttcagttacacatacacctgttataaggtgtttaatatagctcaggaaagtgagcattttgtgagaaaaatgaatatatcatatctaatggaaaagattggatgaatgttctcaaatgttacaaagctgtttaaagaaaaaggtatatataagtaatcagaacacttagaagactgatagatgtcacacagtggtattatagaaggataatacagagccaagatcaaattaaaagacaataaatggaacagaagggaggcagtgtttagctttgtataaacttttaggtttgctctgtaatctgctaaaccatatacattcttttgtgatatgttattatgtatgtggcacttgaggcactgtatgtaaagtaaggaatgctttactagttctccttggttttatctttgtttaaactagctttaaagtattaaacaataattgaaatgaaaagcttacctattttaaaaagccaaatttaaataaatatagaactttaaaatgtttatcagttgtttccatgaaagaatattagtttccagtaaattttagtgatggctcactcacttttctattttggaattacatagttatgtaagtaaaatttttaaaaatcataaagggagcaccattgtacagtctagcataaacagcaaattttaaagaggacatatttaagttcataatcatatttttcagtaaatattgctcagtgaactggaaaactttaatagaaaaatgtctgcagttttgtgattgttaatttggttaaaccgatattttatattatttaagttaggtaacattttatattactttcatatgaataaaagtaatccatgcattgta

SEQ ID NO: 371747 - DNA, 1583 bp, Homo sapiens
agggaagcgcgcggccgcgagccctgggcgccagcggagactcgctgtttgtggcccaggtgcaggaagcttacgcggtggcagccgctcgctgaggtagtctctcgcggcgccggggatccctgaacacagacagcgcgggactgagaaggaaagcttctttctgggcagccagagccgcaaaggtggagccgcgttggcgccctccgcgggaccagcgcctcggatgcgggcggagcgcggggggccgcggctgcgggagcgcgaagcggggggccaggggcgcctcatgtgagagccgcgggacctgcagccgccgccgtccccggagcacggggtggtgtgtgggggaagccgcccccggcagcaggatgaaacgaggaggaagagatagtgaccgtaattcatcagaagaaggaactgcagagaaatccaagaaactgaggactacaaatgagcattctcagacttgtgattggggtaatctccttcaggacattattctccaagtatttaaatatttgcctcttcttgaccgggctcatgcttcacaagtttgccgcaactggaaccaggtatttcacatgcctgacttgtggagatgttttgaatttgaactgaatcagccagctacatcttatttgaaagctacccatccagagctgatcaaacagattattaaaagacattcaaaccatctacaatatgtcagcttcaaggtggacagcagcaaggaatcagctgaagcagcttgtgatatactatcgcaacttgtgaattgctctttaaaaacacttggacttatttcaactgctcgaccaagctttatggatttaccaaagtctcactttatctctgcactgacagttgtgttcgtaaactccaaatccctgtcttcgcttaagatagatgatactccagtagatgatccatctctcaaagtactagtggccaacaatagtgatacactcaagctgttgaaaatgagcagctgtcctcatgtctctccagcagctatctctgaccgccggaggctgtgtcttctctgtcaaaggctggaatcgacctcccaggtgtgcgggctctgtccccgacttaggaccggcgtcctacctccaggctgaagactggacaaaagcggtgacaatcttcccggtctaaccaggactgcaggagacggggattcccgggatgcgcgacttttgagggcaaaactgggaagtcccaataaggacttcggatcaggttctgatcaggttcaaaccagagcgagttggtcgcccagtaaattgtaccaaatgttccgcggtaataactaacgacagtgcatgatataaataaatgcgatagacagtgtttttaaactactcaagaaatcagctacttgtacccagaagtccctccattaaataacattactctccttttcttcttccacgattcaggactgtcctgagtctgccgcaagtgaccagaggggacgaaaggtcccagggctgcacgtaacgagcggctgcgactccccagtcctcaactttgctctcaagtgcgctccgagcgtcacccggcgctgtccccgcact

SEQ ID NO: 371748 - DNA, 2767 bp, Homo sapiens
gttggaaaatcccactttacttcaagtgaagtcactgggttgtccccatgaaatatctccacaatgggtgtgctagacctttactctctgtggcaccaccaagaccccctcaccctgccagagccctctgaagtgtactcagaatggaggggctggaagtggggccagtggtcctggtagtcagcctccccttctgacacaagaattatcgtggaacagcttgtgtgaccgatcaactggtctctccatctttaagccattgtcttgttgactctgttactgcagagtttggggaggtctcatggcttctcgcatcctatttcctgagcttccctgaagccaacttctggccactggtatgtgatgcgagcacagtgcctcctcctgctcctccaggaagcttctgctgattgaacgcaggccagatggcgagatccggagcaaccttcttagatcaagggaagaaaggggcacaagaggggagtaggtaacaagataaaaggagctccctccctgatgactacagagccatcgtggcagccctgggcctccatttcagacgttcatcttgcctaagccaccaccatcagggtctcagtcagtcatcattctcatttactcgggtggctgggtgagggcggaatactaccttccagctgtctgagattaagcctaagccaccaccatcagggtctcagtcagtcatcattctcatttactcgggtggctgggcgagggcggaatactaccttccagctgtctgagattaagcagaacagcagctaaagcagtaacagcaggtctccttcagcagcttgccacagggaagagggtcccgcgtgaaccgaactcaacttccacctgcgcagaggtagctaccatttgcgtagaggtagctgggtctttaaggttagagggaaggcgcagggagggagagacggcgggtgggggttgaacaaagtggagattcacaaaagcagactagggcgggcgacgtgatcagatgacctgtgcgggcggcagcctcctgccctcctccccttcgtgcgccggctggagcgaagagttcttttgacagccgtgagcttccccgccaggaacttactggggctgcatcaccctagaaacgtggctttgggctgtggaaacgctgcctctgtggaagtctctcctcgcgggggtggacgggtcgctgcgcgcccagcgttcttctgcggttctcacagcccgccgccgccgccgcctcggggacctttgcggggaggcctcagggcaccttcctcctctctctcaggcacgtcctcgacctcagttgccacgtgcacatgctggtgccttccaggctggagtatagtggcatgatcatagatcactgcagcctcaaactcctgggctcaagcgatcctcccacctcagcctccatatagctggtggggaccaagtttctaacacatgaatgttgggagacacattcagaccatcgcagtggccttataaaaagagacacaagagcttgctctctgccatgtgagaataccacaagaagactgtcctcagcaaatcagaaagcgggtggaccctcatcagacaccagatgtgcctgcaccttgatcttggacttgccagccttcagaacagtaagaaagaaatgtgtgttgtttaagccacccagtctatggtaacttgctatagcagcccactaggagaccccaagatatttaaaaactcatcagcacctgctttctgcatctggaccctgatcttctggtgggtttaccagttacttgtagagtgtccctgtgatagttttaggtgtcaacttgacaggattgagggatgcctagatggctggggaagcactgtttctgagaaggaccatgtttttggaggagactgttttatgagtgaatttcaggggacacattcagatcatggcagtggcattataaagagagacacaaaagcttgctctctctctctgccatgtaagactaccacacaaagactgccatctgcaaaccagaagcaggtgggctttcctcagacaccagatctgcctgcaccttgatcttggacttgccagccttcagaactctaagaaagaaatggtagcatggcttggtctaagttggaaggcctgagaaacaagcacatggtggaactgagttcaaggataaagacttgagaatacctgctcagtggactgagtagggaagatcaaccctcaatgtaggcaggcactatccaatcacctgagggcccagatggaacaaaaaggtggaagaagggtgaattctctcttccagagctgtgacacccttctcatgcccttgtaccacacaactctaggtcctttggcctttggactctgacacttgcaccagtggccctctggggctctcaagcctttagccttgaacttagttacaccatgtgcctccttgtttctcaggccttccaacttggatcaggccatgccaccggcttctctgattctccagcttgcagatggtatattgtgaccctggcatttaataactatgactttggtcttaagcaattttcttcctctgtggattgatatttacatatcaatgtggataataatttcttaccacggtaactgttgtgaggtaaaaatgagttaacataagtaaaaccgagcacatgcaaaccatccgaaatggttaatacttactatttgtacttgaagaaataaatgtttttgacaataaacttcttgtgcagttttcctcaaaaaaatcaa

SEQ ID NO: 371749 - DNA, 2376 bp, Homo sapiens
gttggaaaatcccactttacttcaagtgaagtcactgggttgtccccatgaaatatctccacaatgggtgtgctagacctttactctctgtggcaccaccaagaccccctcaccctgccagagccctctgaagtgtactcagaatggaggggctggaagtggggccagtggtcctggtagtcagcctccccttctgacacaagaattatcgtggaacagcttgtgtgaccgatcaactggtctctccatctttaagccattgtcttgttgactctgttactgcagagtttggggaggtctcatggcttctcgcatcctatttcctgagcttccctgaagccaacttctggccactggtatgtgatgcgagcacagtgcctcctcctgctcctccaggaagcttctgctgattgaacgcaggccagatggcgagatccggagcaaccttcttagatcaagggaagaaaggggcacaagaggggagtaggtaacaagataaaaggagctccctccctgatgactacagagccatcgtggcagccctgggcctccatttcagacgttcatcttgcctaagccaccaccatcagggtctcagtcagtcatcattctcatttactcgggtggctgggtgagggcggaatactaccttccagctgtctgagattaagcctaagccaccaccatcagggtctcagtcagtcatcattctcatttactcgggtggctgggcgagggcggaatactaccttccagctgtctgagattaagcagaacagcagctaaagcagtaacagcaggtctccttcagcagcttgccacagggaagagggtcccgcgtgaaccgaactcaacttccacctgcgcagaggtagctaccatttgcgtagaggtagctgggtctttaaggttagagggaaggcgcagggagggagagacggcgggtgggggttgaacaaagtggagattcacaaaagcagactagggcgggcgacgtgatcagatgacctgtgcgggcggcagcctcctgccctcctccccttcgtgcgccggctggagcgaagagttcttttgacagccgtgagcttccccgccaggaacttactggggctgcatcaccctagaaacgtggctttgggctgtggaaacgctgcctctgtggaagtctctcctcgcgggggtggacgggtcgctgcgcgcccagcgttcttctgcggttctcacagcccgccgccgccgccgcctcggggacctttgcggggaggcctcagggcaccttcctcctctctctcaggcacgtcctcgacctcagttgccacgtgcacatgctggtgccttccaggctggagtatagtggcatgatcatagatcactgcagcctcaaactcctgggctcaagcgatcctcccacctcagcctccatatagctggtggggaccaagtttctaacacatgaatgttgggagacacattcagaccatcgcagtggccttataaaaagagacacaagagcttgctctctgccatgtgagaataccacaagaagactgtcctcagcaaatcagaaagcgggtggaccctcatcagacaccagatgtgcctgcaccttgatcttggacttgccagccttcagaacagtaagaaagaaatgtgtgttgtttaagccacccagtctatggtaacttgctatagcagcccactaggagaccccaagatatttaaaaactcatcagcacctgctttctgcatctggaccctgatcttctggtgggtttaccagttacttgtagagtgtccctgtgatagttttaggtgtcaacttgacaggattgagggatgcctagatggctggggaagcactgtttctgagaaggaccatgtttttggaggagactgttttatgagtgaatttcaggggacacattcagatcatggcagtggcattataaagagagacacaaaagcttgctctctctctctgccatgtaagactaccacacaaagactgccatctgcaaaccagaagcaggtgggctttcctcagacaccagatctgcctgcaccttgatcttggacttgcgccatgccaccggcttctctgattctccagcttgcagatggtatattgtgaccctggcatttaataactatgactttggtcttaagcaattttcttcctctgtggattgatatttacatatcaatgtggataataatttcttaccacggtaactgttgtgaggtaaaaatgagttaacataagtaaaaccgagcacatgcaaaccatccgaaatggttaatacttactatttgtacttgaagaaataaatgtttttgacaataaacttcttgtgcagttttcctcaaaaaaatcaa

SEQ ID NO: 371750 - DNA, 1538 bp, Homo sapiens
ccgttctccattcccgacctccgcaccctacccggtccgcagggcaccttcctcctctctctcaggcacgtcctcgacctcagttgccacgtgcacatgctggtgccttccaggctggagtatagtggcatgatcatagatcactgcagcctcaaactcctgggctcaagcgatcctcccacctcagcctccatatagctggtggggaccaagtttctaacacatgaatgttgggagacacattcagaccatcgcagtggccttataaaaagagacacaagagcttgctctctgccatgtgagaataccacaagaagactgtcctcagcaaatcagaaagcgggtggaccctcatcagacaccagatgtgcctgcaccttgatcttggacttgccagccttcagaacagtaagaaagaaatgtgtgttgtttaagccacccagtctatggtaacttgctatagcagcccactaggagaccccaagatatttaaaaactcatcagcacctgctttctgcatctggaccctgatcttctggtgggtttaccagttacttgtagagtgtccctgtgatagttttaggtgtcaacttgacaggattgagggatgcctagatggctggggaagcactgtttctgagaaggaccatgtttttggaggagactgttttatgagtgaatttcaggggacacattcagatcatggcagtggcattataaagagagacacaaaagcttgctctctctctctgccatgtaagactaccacacaaagactgccatctgcaaaccagaagcaggtgggctttcctcagacaccagatctgcctgcaccttgatcttggacttgccagccttcagaactctaagaaagaaatggtagcatggcttggtctaagttggaaggcctgagaaacaagcacatggtggaactgagttcaaggataaagacttgagaatacctgctcagtggactgagtagggaagatcaaccctcaatgtaggcaggcactatccaatcacctgagggcccagatggaacaaaaaggtggaagaagggtgaattctctcttccagagctgtgacacccttctcatgcccttgtaccacacaactctaggtcctttggcctttggactctgacacttgcaccagtggccctctggggctctcaagcctttagccttgaacttagttacaccatgtgcctccttgtttctcaggccttccaacttggatcaggccatgccaccggcttctctgattctccagcttgcagatggtatattgtgaccctggcatttaataactatgactttggtcttaagcaattttcttcctctgtggattgatatttacatatcaatgtggataataatttcttaccacggtaactgttgtgaggtaaaaatgagttaacataagtaaaaccgagcacatgcaaaccatccgaaatggttaatacttactatttgtacttgaagaaataaatgtttttgacaataaacttcttgtgcagttttcctcaaaaaaatcaa

SEQ ID NO: 371751 - DNA, 1179 bp, Homo sapiens
tacttccacaggggaagaaaatgcttaagaccaaagtcatagttattaaatgccaggtcacaatataccatctgcaagctggagaatcagaaacagtgcttccccagcccactaggagaccccaagatatttaaaaactcatcagcacctgctttctgcatctggaccctgatcttctggtgggtttaccagttacttgtagagtgtccctgtgatagttttaggtgtcaacttgacaggattgagggatgcctagatggctggggaagcactgtttctgagaaggaccatgtttttggaggagactgttttatgagtgaatttcaggggacacattcagatcatggcagtggcattataaagagagacacaaaagcttgctctctctctctgccatgtaagactaccacacaaagactgccatctgcaaaccagaagcaggtgggctttcctcagacaccagatctgcctgcaccttgatcttggacttgccagccttcagaactctaagaaagaaatggtagcatggcttggtctaagttggaaggcctgagaaacaagcacatggtggaactgagttcaaggataaagacttgagaatacctgctcagtggactgagtagggaagatcaaccctcaatgtaggcaggcactatccaatcacctgagggcccagatggaacaaaaaggtggaagaagggtgaattctctcttccagagctgtgacacccttctcatgcccttgtaccacacaactctaggtcctttggcctttggactctgacacttgcaccagtggccctctggggctctcaagcctttagccttgaacttagttacaccatgtgcctccttgtttctcaggccttccaacttggatcaggccatgccaccggcttctctgattctccagcttgcagatggtatattgtgaccctggcatttaataactatgactttggtcttaagcaattttcttcctctgtggattgatatttacatatcaatgtggataataatttcttaccacggtaactgttgtgaggtaaaaatgagttaacataagtaaaaccgagcacatgcaaaccatccgaaatggttaatacttactatttgtacttgaagaaataaatgtttttgacaataaacttcttgtgcagttttcctcaaaaaaatcaa

SEQ ID NO: 371752 - DNA, 1645 bp, Homo sapiens
  misc_feature (1638)..(1638): n is a, c, g, or t
  misc_feature (1641)..(1641): n is a, c, g, or t
  misc_feature (1644)..(1645): n is a, c, g, or t
gttggaaaatcccactttacttcaagtgaagtcactgggttgtccccatgaaatatctccacaatgggtgtgctagacctttactctctgtggcaccaccaagaccccctcaccctgccagagccctctgaagtgtactcagaatggaggggctggaagtggggccagtggtcctggtagtcagcctccccttctgacacaagaattatcgtggaacagcttgtgtgaccgatcaactggtctctccatctttaagccattgtcttgttgactctgttactgcagagtttggggaggtctcatggcttctcgcatcctatttcctgagcttccctgaagccaacttctggccactggtatgtgatgcgagcacagtgcctcctcctgctcctccaggaagcttctgctgattgaacgcaggccagatggcgagatccggagcaaccttcttagatcaagggaagaaaggggcacaagaggggagtaggtaacaagataaaaggagctccctccctgatgactacagagccatcgtggcagccctgggcctccatttcagacgttcatcttgcctaagccaccaccatcagggtctcagtcagtcatcattctcatttactcgggtggctgggtgagggcggaatactaccttccagctgtctgagattaagcctaagccaccaccatcagggtctcagtcagtcatcattctcatttactcgggtggctgggcgagggcggaatactaccttccagctgtctgagattaagcagaacagcagctaaagcagtaacagcaggtctccttcagcagcttgccacagggaagagggtcccgcgtgaaccgaactcaacttccacctgcgcagaggtagctaccatttgcgtagaggtagctgggtctttaaggttagagggaaggcgcagggagggagagacggcgggtgggggttgaacaaagtggagattcacaaaagcagactagggcgggcgacgtgatcagatgacctgtgcgggcggcagcctcctgccctcctccccttcgtgcgccggctggagcgaagagttcttttgacagccgtgagcttccccgccaggaacttactggggctgcatcaccctagaaacgtggctttgggctgtggaaacgctgcctctgtggaagtctctcctcgcgggggtggacgggtcgctgcgcgcccagcgttcttctgcggttctcacagcccgccgccgccgccgcctcggggacctttgcggggaggcctcaggtcagcgccgcccttgcgatggcgggagagcagagcggccccagggcctctgagctccggccccggcacgtcccgccctctcctccgcttgcgggagccggggcgcctcggagggaaaccttccggacacaggccgggagaagaggggccgtggcgccatcgcgcagcttcctggtttcggccatgttttttttttttttgagacggagtttcgctctttttgcccaggctggagggcaatggcgccgtctcggctccctgcagccgccgcctcccgggttgaagggactctccggcctcaggccgcggtgttcttgtaaattagaaccggcctatgcgccaagcgcgggtctcgcggctgcggagngangcnn

SEQ ID NO: 371753 - DNA, 2884 bp, Homo sapiens
gttggaaaatcccactttacttcaagtgaagtcactgggttgtccccatgaaatatctccacaatgggtgtgctagacctttactctctgtggcaccaccaagaccccctcaccctgccagagccctctgaagtgtactcagaatggaggggctggaagtggggccagtggtcctggtagtcagcctccccttctgacacaagaattatcgtggaacagcttgtgtgaccgatcaactggtctctccatctttaagccattgtcttgttgactctgttactgcagagtttggggaggtctcatggcttctcgcatcctatttcctgagcttccctgaagccaacttctggccactggtatgtgatgcgagcacagtgcctcctcctgctcctccaggaagcttctgctgattgaacgcaggccagatggcgagatccggagcaaccttcttagatcaagggaagaaaggggcacaagaggggagtaggtaacaagataaaaggagctccctccctgatgactacagagccatcgtggcagccctgggcctccatttcagacgttcatcttgcctaagccaccaccatcagggtctcagtcagtcatcattctcatttactcgggtggctgggtgagggcggaatactaccttccagctgtctgagattaagcctaagccaccaccatcagggtctcagtcagtcatcattctcatttactcgggtggctgggcgagggcggaatactaccttccagctgtctgagattaagcagaacagcagctaaagcagtaacagcaggtctccttcagcagcttgccacagggaagagggtcccgcgtgaaccgaactcaacttccacctgcgcagaggtagctaccatttgcgtagaggtagctgggtctttaaggttagagggaaggcgcagggagggagagacggcgggtgggggttgaacaaagtggagattcacaaaagcagactagggcgggcgacgtgatcagatgacctgtgcgggcggcagcctcctgccctcctccccttcgtgcgccggctggagcgaagagttcttttgacagccgtgagcttccccgccaggaacttactggggctgcatcaccctagaaacgtggctttgggctgtggaaacgctgcctctgtggaagtctctcctcgcgggggtggacgggtcgctgcgcgcccagcgttcttctgcggttctcacagcccgccgccgccgccgcctcggggacctttgcggggaggcctcaggtaccagtcaggactggtagactttaatgtggagaacttctgaaacagcagttctcaaaatgttacctccagacacacagaatctgcatcacccaggaacttgtaaccatgcaaattctcagccacccagacttcctgcatcagaaactctggggcccagcagcctgtgttttaacaaagcccttcaggctggagtatagtggcatgatcatagatcactgcagcctcaaactcctgggctcaagcgatcctcccacctcagcctccatatagctggtggggaccaagtttctaacacatgaatgttgggagacacattcagaccatcgcagtggccttataaaaagagacacaagagcttgctctctgccatgtgagaataccacaagaagactgtcctcagcaaatcagaaagcgggtggaccctcatcagacaccagatgtgcctgcaccttgatcttggacttgccagccttcagaacagtaagaaagaaatgtgtgttgtttaagccacccagtctatggtaacttgctatagcagcccactaggagaccccaagatatttaaaaactcatcagcacctgctttctgcatctggaccctgatcttctggtgggtttaccagttacttgtagagtgtccctgtgatagttttaggtgtcaacttgacaggattgagggatgcctagatggctggggaagcactgtttctgagaaggaccatgtttttggaggagactgttttatgagtgaatttcaggggacacattcagatcatggcagtggcattataaagagagacacaaaagcttgctctctctctctgccatgtaagactaccacacaaagactgccatctgcaaaccagaagcaggtgggctttcctcagacaccagatctgcctgcaccttgatcttggacttgccagccttcagaactctaagaaagaaatggtagcatggcttggtctaagttggaaggcctgagaaacaagcacatggtggaactgagttcaaggataaagacttgagaatacctgctcagtggactgagtagggaagatcaaccctcaatgtaggcaggcactatccaatcacctgagggcccagatggaacaaaaaggtggaagaagggtgaattctctcttccagagctgtgacacccttctcatgcccttgtaccacacaactctaggtcctttggcctttggactctgacacttgcaccagtggccctctggggctctcaagcctttagccttgaacttagttacaccatgtgcctccttgtttctcaggccttccaacttggatcaggccatgccaccggcttctctgattctccagcttgcagatggtatattgtgaccctggcatttaataactatgactttggtcttaagcaattttcttcctctgtggattgatatttacatatcaatgtggataataatttcttaccacggtaactgttgtgaggtaaaaatgagttaacataagtaaaaccgagcacatgcaaaccatccgaaatggttaatacttactatttgtacttgaagaaataaatgtttttgacaataaacttcttgtgcagttttcctcaaaaaaatcaa

SEQ ID NO: 371754 - DNA, 2395 bp, Homo sapiens
gttggaaaatcccactttacttcaagtgaagtcactgggttgtccccatgaaatatctccacaatgggtgtgctagacctttactctctgtggcaccaccaagaccccctcaccctgccagagccctctgaagtgtactcagaatggaggggctggaagtggggccagtggtcctggtagtcagcctccccttctgacacaagaattatcgtggaacagcttgtgtgaccgatcaactggtctctccatctttaagccattgtcttgttgactctgttactgcagagtttggggaggtctcatggcttctcgcatcctatttcctgagcttccctgaagccaacttctggccactggtatgtgatgcgagcacagtgcctcctcctgctcctccaggaagcttctgctgattgaacgcaggccagatggcgagatccggagcaaccttcttagatcaagggaagaaaggggcacaagaggggagtaggtaacaagataaaaggagctccctccctgatgactacagagccatcgtggcagccctgggcctccatttcagacgttcatcttgcctaagccaccaccatcagggtctcagtcagtcatcattctcatttactcgggtggctgggtgagggcggaatactaccttccagctgtctgagattaagcctaagccaccaccatcagggtctcagtcagtcatcattctcatttactcgggtggctgggcgagggcggaatactaccttccagctgtctgagattaagcagaacagcagctaaagcagtaacagcaggtctccttcagcagcttgccacagggaagagggtcccgcgtgaaccgaactcaacttccacctgcgcagaggtagctaccatttgcgtagaggtagctgggtctttaaggttagagggaaggcgcagggagggagagacggcgggtgggggttgaacaaagtggagattcacaaaagcagactagggcgggcgacgtgatcagatgacctgtgcgggcggcagcctcctgccctcctccccttcgtgcgccggctggagcgaagagttcttttgacagccgtgagcttccccgccaggaacttactggggctgcatcaccctagaaacgtggctttgggctgtggaaacgctgcctctgtggaagtctctcctcgcgggggtggacgggtcgctgcgcgcccagcgttcttctgcggttctcacagcccgccgccgccgccgcctcggggacctttgcggggaggcctcagggcaccttcctcctctctctcaggcacgtcctcgacctcagttgccacgtgcacatgctggtgccttccaggctggagtatagtggcatgatcatagatcactgcagcctcaaactcctgggctcaagcgatcctcccacctcagcctccatatagctggtggggaccaagtttctaacacatgaatgttgggagacacattcagaccatcgcagtggccttataaaaagagacacaagagcttgctctctgccatgtgagaataccacaagaagactgtcctcagcaaatcagaaagcgggtggaccctcatcagacaccagatgtgcctgcaccttgatcttggacttgccagccttcagaacagtaagaaagaaatgtgtgttgtttaagccacccagtctatggtaacttgctatagcagcccactaggagaccccaagatatttaaaaactcatcagcacctgctttctgcatctggaccctgatcttctggtgggtttaccagttacttgtagagtgtccctgtgatagttttaggtgtcaacttgacaggattgagggatgcctagatggctggggaagcactgtttctgagaaggaccatgtttttggaggagactgttttatgagtgaatttcaggggacacattcagatcatggcagtggcattataaagagagacacaaaagcttgctctctctctctgccatgtaagactaccacacaaagactgccatctgcaaaccagaagcaggtgggctttcctcagacaccagatctgcctgcaccttgatcttggacttgcgccttccaacttggatcaggccatgccaccggcttctctgattctccagcttgcagatggtatattgtgaccctggcatttaataactatgactttggtcttaagcaattttcttcctctgtggattgatatttacatatcaatgtggataataatttcttaccacggtaactgttgtgaggtaaaaatgagttaacataagtaaaaccgagcacatgcaaaccatccgaaatggttaatacttactatttgtacttgaagaaataaatgtttttgacaataaacttcttgtgcagttttcctcaaaaaaatcaa

SEQ ID NO: 371755 - DNA, 1143 bp, Homo sapiens
ggtcaccccgcggactggacgggaacctggcggggtcaggtcccgtcaagcagcctggctcatggctgtgtgcggcctggggagccgtcttggcctggggagccgtcttggcctgcgcgggtgcttcggcgccgccaggctcctgtatccccgtttccagagccgcggccctcagggcgtggaagacggggacaggccacagccttcctcgaagacacccaggatccccaagatttacaccaaaacgggagacaaagggttttctagtaccttcacaggagaaaggagacccaaagatgaccaagtgtttgaagccgtgggaactacagatgaattaagttcagctattgggtttgctctggaattagtcacagaaaagggccatacatttgccgaagagcttcagaaaatccagtgcacattgcaggacgtcggctcggccctggcgacaccatgctcctcggcccgggaggctcacttaaagtataccacgttcaaggcggggcccatcctggagctggagcagtggatcgacaagtacaccagccagctcccaccactcacggccttcatcctgccttcgggaggcaagatcagctcggcgctgcatttctgccgggccgtgtgccgccgggccgagagacgtgtggtgcctcttgtccagatgggagagaccgatgcgaacgtggccaagttcttaaacagactcagtgactatctcttcacgctagccagatatgcagccatgaaggaggggaatcaagagaaaatatacaagaaaaatgacccatcggccgagtctgagggactctgaaatcacagaaagtgggagcttggaggatccctccatggcgatggccgtggagagaggagcttgcccttctggggtcctggttcctgaagagctcacccagagaggctcaaagcagccttttgtcccagctcagctttgatctacacctcttgccaccttcctcaagggactgtgaccctttggggattctgtccctgaccctgcttccccaagctctcctgggtcttggagggatgtgggaatgaattggcattgcaggaaagacaggtaaagtgattgctgcaatgagaaggagctgtgcggaaaaggaataaaagttggaaaggctg

SEQ ID NO: 371756 - DNA, 441 bp, Homo sapiens
catcttcatcggccgcatacggcgtgattgattgcggcatcttcatcggcgaaaacggcatcttcatcggccgatgaagatgccgttttcggccgagtctgagggactctgaaatcacagaaagtgggagcttggaggatccctccatggcgatggccgtggagagaggagcttgcccttctggggtcctggttcctgaagagctcacccagagaggctcaaagcagccttttgtcccagctcagctttgatctacacctcttgccaccttcctcaagggactgtgaccctttggggattctgtccctgaccctgcttccccaagctctcctgggtcttggagggatgtgggaatgaattggcattgcaggaaagacaggtaaagtgattgctgcaatgagaaggagctgtgcggaaaaggaataaaagttggaaaggctg

SEQ ID NO: 371757 - DNA, 1286 bp, Homo sapiens
  misc_feature (762)..(763): n is a, c, g, or t
gcctgcgctggcctctggcccatgccatgtgaagctgcctccctctcatccctcacttttcaggtgagcctgtgtgtgccactgaggttagtatactgagtgaaagaggtgagttagtataatgcacagtacatccaatgtgatcccttttgtgactgttgttttttacataagccaaagtttagaaggtggactcaaggatggaccagatcaggatgggccaggtcatgctgtgatcacagacaaccccaaaatctcctgacttatgacaccaaagatggacttgctgttcccacttcatgcccatcacagggtatattctttggctccatgcggccttcattctgggacacaggctgctagtacagctgctgcctggggcaattatcagtcattgtggcagagggaaaagaggtcatggtgaagctcacattggctcctgacgctgccaggggattgtgcagtgtcagtgttgtcgccagtgaggtttacccaagatgtgattattgctgattgaaaacttttcccactaccccaccatgatgacttgaaatatagtcaacattggcagtttttgacagtctttatggagactaaactttgttggtaaataaaagttgaaaaaaaaatgactaggtgcagcggctcacatgtctaatcccagcgctttgggaggccgaggtgggagaatcacttgagctcaggagtttgagaccagcctgagcaacatagcaagacttcatctctactaaaaagaaaacnnagtcgattacaatcaatggcccgggtttacaacgtagggatgggaaaccctggcgtacccaactaatcgcttggggaaatcccctttgccaggtggcgaataagcaaaggccgaacgtaggctttcaaaagttggccacttagggcaatggaaattaggcgtaatattgtaaaatgggtaaatttgtaatcgctatttatccaagggcaaaaggaatctcttaatcaggaatccggataactcaggttgtcttgtcaaagtctctttagaagggttcacctaggggaaaccttttaaggggccctaagtgaaccccttaaatttgggggggccgttataagctccggggccctttaatttgcgtaacctacctgtaagaggcttagggcttttggttcacaggacatcgtttcacgctcgtcacttacggccttgcgatctttctcctttcactactctcctgctgctgtcgttctgatttctcttggtgttgctcactcggagtgctcttccatgtctgccc

SEQ ID NO: 371758 - DNA, 958 bp, Homo sapiens
ggtcaccccgcggactggacgggaacctggcggggtcaggtcccgtcaagcagcctggctcatggctgtgtgcggcctggggagccgtcttggcctggggagccgtcttggcctgcgcgggtgcttcggcgccgccaggctcctgtatccccgtttccagagccgcggccctcagggcgtggaagacggggacaggccacagccttcctcgaagacacccaggatccccaagatttacaccaaaacgggagacaaagggttttctagtaccttcacaggagaaaggagacccaaagatgaccaagtgtttgaagccgtgggaactacagatgaattaagttcagctattgggtttgctctggaattagtcacagaaaagggccatacatttgccgaagagcttcagaaagtgagtaacaccatctcacccaagctgggaatcttcagccccggtggccatcacgggactcagcatccagccaccagttactctttgtgtcacctggggctagttactctccctctgtgagctccatttcttcatctgtaaaatgcggacaggccaggtatggtggctcacacctgcaatctcagctacttgggagactgaggcaggaagatcacttgaggccaggagcctaggtaacataataagaccctgactctacaaaatatttgaaaattagccaggcatagtggtgaatgcctgtagccttagctactcaggaaactgaggtaggaggatctcttgagcccaggaggtcaaggctgcagtgagctgtgatcatgccactgcactcctgcctgggcaagagattgagaccctgtctcaggccgagcaccatggttcaattaagcctgtaatcccagcactttgggcggccaaggtgggagcatcacttcaagccaggagttcaagaccagcctgggcaacttagggagaccctgtctctacaaa

SEQ ID NO: 371759 - DNA, 707 bp, Homo sapiens
gcaacctctgcctcccgggttcaagcgagtctcctcattattactattcttaacacttacctgttcctggctaccatttctccatggcgggcctgactaggtttgctctggaattagtcacagaaaagggccatacatttgccgaagagcttcagaaagtgagtaacaccatctcacccaagctgggaatcttcagccccggtggccatcacgggactcagcatccagccaccagttactctttgtgtcacctggggctagttactctccctctgtgagctccatttcttcatctgtaaaatgcggacaggccaggtatggtggctcacacctgcaatctcagctacttgggagactgaggcaggaagatcacttgaggccaggagcctaggtaacataataagaccctgactctacaaaatatttgaaaattagccaggcatagtggtgaatgcctgtagccttagctactcaggaaactgaggtaggaggatctcttgagcccaggaggtcaaggctgcagtgagctgtgatcatgccactgcactcctgcctgggcaagagattgagaccctgtctcaggccgagcaccatggttcaattaagcctgtaatcccagcactttgggcggccaaggtgggagcatcacttcaagccaggagttcaagaccagcctgggcaacttagggagaccctgtctctacaaa

SEQ ID NO: 371760 - DNA, 2494 bp, Homo sapiens
ggtcaccccgcggactggacgggaacctggcggggtcaggtcccgtcaagcagcctggctcatggctgtgtgcggcctggggagccgtcttggcctggggagccgtcttggcctgcgcgggtgcttcggcgccgccaggctcctgtatccccgtttccagagccgcggccctcagggcgtggaagacggggacaggccacagccttcctcgaagacacccaggatccccaagatttacaccaaaacgggagacaaagggttttctagtaccttcacaggagaaaggagacccaaagatgaccaagtgtttgaagccgtgggaactacagatgaattaagttcagctattgggtttgctctggaattagtcacagaaaagggccatacatttgccgaagagcttcagaaaatccagtgcacattgcaggacgtcggctcggccctggcgacaccatgctcctcggcccgggaggctcacttaaagtataccacgttcaaggcggggcccatcctggagctggagcagtggatcgacaagtacaccagccagctcccaccactcacggccttcatcctgccttcgggaggcaagatcagctcggcgctgcatttctgccgggccgtgtgccgccgggccgagagacgtgtggtgcctcttgtccagatgggagagaccgatgcgaacgtggccaagttcttaaacagactcagtgactatctcttcacgctagccagatatgcagccatgaaggaggggaatcaagagaaaatatacaagaaaaatgacccatcggccgagtctgagggactctgaaatcacagaaagtgggagcttggaggatccctccatggcgatggccgtggagagaggagcttgcccttctggggtcctggttcctgaagagctcacccagagaggctcaaagcagccttttgtcccagctcagctttgatctacacctcttgccaccttcctcaagggactgtgaccctttggggattctgtccctgaccctgcttccccaagctctcctgggtcttggagggatgtgggaatgaattggcattgcaggaaagacaggtaaagtgattgctgcaatgagaaggagctgtgcggaaaaggaataaaagttggaaaggctggagccgtgtgtgtgtgtgtgtgtgtgtgtgtgtgtgtgtgtgtgtgtgtgagagagagccctcccactgccagctcaggttgttcacagatttggaatgggaccagaggcccttgaaaatgtaattgtgatttacctgtgccaaaggtgctttaaatgtcacatttgtaaaggggaaggcggacaagatttggaagtttagtcacctctgagccacccatcaccgccaaagtgtgggggaaggatagctgcagattgacaggcgaggctcagaaactcctggcttagattgaagtgtgtgtgatgggggtgcagcttagaggaccccctctgaaagggatggagatgctgatgagaacaacactaccacttgaaggtgaacattccctgtctggttggactgagtcaagggtctgcggtgcagcatcttcagcttgagaaaatgaggttgtcagtttccagcaaggctgacatccaccagactgatttctccgatgttgcacttggctggcttatgcctctgagatcggtgccacggctgtatttatttcagttgtcactgctgctccctcctgctatgaaacgacactgccagtgccagcagtgtccttgggaaaggcaatatttatgaagggcagaagaggcagccccaagaacctaaagactgcaggctgctaattgcaggaaatgactttggaagggcaggctcttgtccagtttcagggctgaaatgcctggcgaactccattcagccatcacatattgactgagtggctgcttagcatgggccaccgcgctaggctcgggacagctggtctttccggccattgccttcattcttaccacctggcctgcaaagtttgcaggagggccaggtatattcacttgtgtcttctgggtcctttcattgctgacaggctgtgatggccctcttgagccttgggcagggtgggtgaggtgcagatgaccaggagtgtgtgaatgccttccaggaggtggctttgttccgtgcctccctgcccccatcgtcactaccaggtctggtacggagtcggtgctcagtgtttgcaaaacagagctgaaaacggactttgggaggccgaggcaggcagatcacctgaggtcaggagtttgagaccagcctggtcaacatggtaaaaccccatttctgctaaaaaaaaaaaaaaaaaaaaaaattagctgggcatggtggcgggtgcctgtaatcccagctattcaggaggctgaggcaggagaatcacttgaacctacgaggcagaggctgcagtgagccaagatcgtgacacgacactccagcctggctgatagagtgagactccgtcacaaaaaaa

SEQ ID NO: 371761 - DNA, 1628 bp, Homo sapiens
ggtcaccccgcggactggacgggaacctggcggggtcaggtcccgtcaagcagcctggctcatggctgtgtgcggcctggggagccgtcttggcctggggagccgtcttggcctgcgcgggtgcttcggcgccgccaggctcctgtatccccgtttccagagccgcggccctcagggcgtggaagacggggacaggccacagccttcctcgaagacacccaggatccccaagatttacaccaaaacgggagacaaagggttttctagtaccttcacaggagaaaggagacccaaagatgaccaagtgtttgaagccgtgggaactacagatgaattaagttcagctattgggtttgctctggaattagtcacagaaaagggccatacatttgccgaagagcttcagaaaatccagtgcacattgcaggacgtcggctcggccctggcgacaccatgctcctcggcccgggaggctcacttaaagtataccacgttcaaggcggggcccatcctggagctggagcagtggatcgacaagtacaccagccagctcccaccactcacggccttcatcctgccttcgggaggcaagatcagctcggcgctgcatttctgccgggccgtgtgccgccgggccgagagacgtgtggtgcctcttgtccagatgggagagaccgatgcgaacgtggccaagttcttaaacagactcagtgactatctcttcacgctagccagatatgcagccatgaaggaggggaatcaagagaaaatatacaagaaaaatgacccatcggccgagtctgagggactctgaaatcacagaaagtgggagcttggaggatccctccatggcgatggccgtggagagaggagcttgcccttctggggtcctggttcctgaagagctcacccagagaggctcaaagcagccttttgtcccagctcagctttgatctacacctcttgccaccttcctcaagggactgtgaccctttggggattctgtccctgaccctgcttccccaagctctcctgggtcttggagggatgtgggaatgaattggcattgcaggaaagacaggtaaagtgattgctgcaatgagaaggagctgtgcggaaaaggaataaaagttggaaaggctgaaaaaaaaaaaaaaaaaaaaaaaaaaaaaaaaaaaaaaataaaaaaaaaaaaaaaaaaaaaactcctggggggaccctccccgttaaaaaaccattatatgattagtcaaaaaaaaaataaaacccccggggggggcccccgccccaaattcgcctttttgggggcttcttacatttaccgggccgagttttaaaacgtgtaacttggaaaacccttggtttccccacttatgggtttgtataaatccccttttccccttggcgacattccaaaaggcccccccattccgctttacaaaacgttggccaccctatagtggaaggggcacttttatccccttaacctctgttaaaaattcgcttaatttttttttaaaatactcactttttaacccaatggctcaaaatgggaaaccccttttaacacaaaagaatcccccttttgcggtaaggggtgtcccctctggacaaagaagcctcctttt

SEQ ID NO: 371762 - DNA, 2449 bp, Homo sapiens
ggtcaccccgcggactggacgggaacctggcggggtcaggtcccgtcaagcagcctggctcatggctgtgtgcggcctggggagccgtcttggcctggggagccgtcttggcctgcgcgggtgcttcggcgccgccaggctcctgtatccccgtttccagagccgcggccctcagggcgtggaagacggggacaggccacagccttcctcgaagacacccaggatccccaagatttacaccaaaacgggagacaaagggttttctagtaccttcacaggagaaaggagacccaaagatgaccaagtgtttgaagccgtgggaactacagatgaattaagttcagctattgggtttgctctggaattagtcacagaaaagggccatacatttgccgaagagcttcagaaaatccagtgcacattgcaggacgtcggctcggccctggcgacaccatgctcctcggcccgggaggctcacttaatcgggaggcaagatcagctcggcgctgcatttctgccgggccgtgtgccgccgggccgagagacgtgtggtgcctcttgtccagatgggagagaccgatgcgaacgtggccaagttcttaaacagactcagtgactatctcttcacgctagccagatatgcagccatgaaggaggggaatcaagagaaaatatacaagaaaaatgacccatcggccgagtctgagggactctgaaatcacagaaagtgggagcttggaggatccctccatggcgatggccgtggagagaggagcttgcccttctggggtcctggttcctgaagagctcacccagagaggctcaaagcagccttttgtcccagctcagctttgatctacacctcttgccaccttcctcaagggactgtgaccctttggggattctgtccctgaccctgcttccccaagctctcctgggtcttggagggatgtgggaatgaattggcattgcaggaaagacaggtaaagtgattgctgcaatgagaaggagctgtgcggaaaaggaataaaagttggaaaggctggagccgtgtgtgtgtgtgtgtgtgtgtgtgtgtgtgtgtgtgtgtgtgtgagagagagccctcccactgccagctcaggttgttcacagatttggaatgggaccagaggcccttgaaaatgtaattgtgatttacctgtgccaaaggtgctttaaatgtcacatttgtaaaggggaaggcggacaagatttggaagtttagtcacctctgagccacccatcaccgccaaagtgtgggggaaggatagctgcagattgacaggcgaggctcagaaactcctggcttagattgaagtgtgtgtgatgggggtgcagcttagaggaccccctctgaaagggatggagatgctgatgagaacaacactaccacttgaaggtgaacattccctgtctggttggactgagtcaagggtctgcggtgcagcatcttcagcttgagaaaatgaggttgtcagtttccagcaaggctgacatccaccagactgatttctccgatgttgcacttggctggcttatgcctctgagatcggtgccacggctgtatttatttcagttgtcactgctgctccctcctgctatgaaacgacactgccagtgccagcagtgtccttgggaaaggcaatatttatgaagggcagaagaggcagccccaagaacctaaagactgcaggctgctaattgcaggaaatgactttggaagggcaggctcttgtccagtttcagggctgaaatgcctggcgaactccattcagccatcacatattgactgagtggctgcttagcatgggccaccgcgctaggctcgggacagctggtctttccggccatctttcttgctggcaagtcagcaaacattaccttcttagtcacgtgcatatttttgccttcattcttaccacctggcctgcaaagtttgcaggagggccaggtatattcacttgtgtcttctgggtcctttcattgctgacaggctgtgatggccctcttgagccttgggcagggtgggtgaggtgcagatgaccaggagtgtgtgaatgccttccaggaggtggctttgttccgtgcctccctgcccccatcgtcactaccaggtctggtacggagtcggtgctcagtgtttgcaaaacagagctgaaaacggactttgggaggccgaggcaggcagatcacctgaggtcaggagtttgagaccagcctggtcaacatggtaaaaccccatttctgctaaaaaaaaaaaaaaaaaaaaaaattagctgggcatggtggcgggtgcctgtaatcccagctattcaggaggctgaggcaggagaatcacttgaacctacgaggcagaggctgcagtgagccaagatcgtgacacgacactccagcctggctgatagagtgagactccgtcacaaaaaaa

SEQ ID NO: 371763 - DNA, 2478 bp, Homo sapiens
ggaggcattactagttgtcacactgggtgcaggggtgccactggcacctggtgggtggagaccaaaggtgctgtcagcatcctacactgcacaggatgcacaggacagccccgaacacacagaatgatccagaatgtcagtagggcctagtccagcagtgtcagcatcagccagggcaggaactagacctgcagagccccgggcccagcccagcccagccctcctgagtcagaatctgcacgtcgctgagatcccctggtgatgcctgtgcacactgtagtttgggaaacacccaaactgatcacgcacctgagccctgatcactcaaaggtgcaaaaaccggctcagagaggagtccaaagtcatctgccccatggggtagggccggggcaatggcctcatcctgcaggaatggccccagccttgacactggagtagagtccttggcattcacagcagctggcctcgtgtgccatccatcaagtgcaagatggctgggcccccgccctccctgcacaatgtgcccagagtgcgtcatttatatctcctccttgtaggcggatatgggaagacccagttagcgttgatctctcatttcaaaccattctgtttgcttctctctctctgcccctccagactcagtgactatctcttcacgctagccagatatgcagccatgaaggaggggaatcaagagaaaatatacaagaaaaatgacccatcggccgagtctgagggactctgaaatcacagaaagtgggagcttggaggatccctccatggcgatggccgtggagagaggagcttgcccttctggggtcctggttcctgaagagctcacccagagaggctcaaagcagccttttgtcccagctcagctttgatctacacctcttgccaccttcctcaagggactgtgaccctttggggattctgtccctgaccctgcttccccaagctctcctgggtcttggagggatgtgggaatgaattggcattgcaggaaagacaggtaaagtgattgctgcaatgagaaggagctgtgcggaaaaggaataaaagttggaaaggctggagccgtgtgtgtgtgtgtgtgtgtgtgtgtgtgtgtgtgtgtgtgtgtgagagagagccctcccactgccagctcaggttgttcacagatttggaatgggaccagaggcccttgaaaatgtaattgtgatttacctgtgccaaaggtgctttaaatgtcacatttgtaaaggggaaggcggacaagatttggaagtttagtcacctctgagccacccatcaccgccaaagtgtgggggaaggatagctgcagattgacaggcgaggctcagaaactcctggcttagattgaagtgtgtgtgatgggggtgcagcttagaggaccccctctgaaagggatggagatgctgatgagaacaacactaccacttgaaggtgaacattccctgtctggttggactgagtcaagggtctgcggtgcagcatcttcagcttgagaaaatgaggttgtcagtttccagcaaggctgacatccaccagactgatttctccgatgttgcacttggctggcttatgcctctgagatcggtgccacggctgtatttatttcagttgtcactgctgctccctcctgctatgaaacgacactgccagtgccagcagtgtccttgggaaaggcaatatttatgaagggcagaagaggcagccccaagaacctaaagactgcaggctgctaattgcaggaaatgactttggaagggcaggctcttgtccagtttcagggctgaaatgcctggcgaactccattcagccatcacatattgactgagtggctgcttagcatgggccaccgcgctaggctcgggacagctggtctttccggccatctttcttgctggcaagtcagcaaacattaccttcttagtcacgtgcatatttttgccttcattcttaccacctggcctgcaaagtttgcaggagggccaggtatattcacttgtgtcttctgggtcctttcattgctgacaggctgtgatggccctcttgagccttgggcagggtgggtgaggtgcagatgaccaggagtgtgtgaatgccttccaggaggtggctttgttccgtgcctccctgcccccatcgtcactaccaggtctggtacggagtcggtgctcagtgtttgcaaaacagagctgaaaacggactttgggaggccgaggcaggcagatcacctgaggtcaggagtttgagaccagcctggtcaacatggtaaaaccccatttctgctaaaaaaaaaaaaaaaaaaaaaaattagctgggcatggtggcgggtgcctgtaatcccagctattcaggaggctgaggcaggagaatcacttgaacctacgaggcagaggctgcagtgagccaagatcgtgacacgacactccagcctggctgatagagtgagactccgtcacaaaaaaa

SEQ ID NO: 371764 - DNA, 1743 bp, Homo sapiens
ggacgcgtgggtcgacccacgcgtccggcttggaggatccctccatggcgatggccgtggagagaggagcttgcccttctggggtcctggttcctgaagagctcacccagagaggctcaaagcagccttttgtcccagctcagctttgatctacacctcttgccaccttcctcaagggactgtgaccctttggggattctgtccctgaccctgcttccccaagctctcctgggtcttggagggatgtgggaatgaattggcattgcaggaaagacaggtaaagtgattgctgcaatgagaaggagctgtgcggaaaaggaataaaagttggaaaggctggagccgtgtgtgtgtgtgtgtgtgtgtgtgtgtgtgtgtgtgtgtgtgtgagagagagccctcccactgccagctcaggttgttcacagatttggaatgggaccagaggcccttgaaaatgtaattgtgatttacctgtgccaaaggtgctttaaatgtcacatttgtaaaggggaaggcggacaagatttggaagtttagtcacctctgagccacccatcaccgccaaagtgtgggggaaggatagctgcagattgacaggcgaggctcagaaactcctggcttagattgaagtgtgtgtgatgggggtgcagcttagaggaccccctctgaaagggatggagatgctgatgagaacaacactaccacttgaaggtgaacattccctgtctggttggactgagtcaagggtctgcggtgcagcatcttcagcttgagaaaatgaggttgtcagtttccagcaaggctgacatccaccagactgatttctccgatgttgcacttggctggcttatgcctctgagatcggtgccacggctgtatttatttcagttgtcactgctgctccctcctgctatgaaacgacactgccagtgccagcagtgtccttgggaaaggcaatatttatgaagggcagaagaggcagccccaagaacctaaagactgcaggctgctaattgcaggaaatgactttggaagggcaggctcttgtccagtttcagggctgaaatgcctggcgaactccattcagccatcacatattgactgagtggctgcttagcatgggccaccgcgctaggctcgggacagctggtctttccggccatctttcttgctggcaagtcagcaaacattaccttcttagtcacgtgcatatttttgccttcattcttaccacctggcctgcaaagtttgcaggagggccaggtatattcacttgtgtcttctgggtcctttcattgctgacaggctgtgatggccctcttgagccttgggcagggtgggtgaggtgcagatgaccaggagtgtgtgaatgccttccaggaggtggctttgttccgtgcctccctgcccccatcgtcactaccaggtctggtacggagtcggtgctcagtgtttgcaaaacagagctgaaaacggactttgggaggccgaggcaggcagatcacctgaggtcaggagtttgagaccagcctggtcaacatggtaaaaccccatttctgctaaaaaaaaaaaaaaaaaaaaaaattagctgggcatggtggcgggtgcctgtaatcccagctattcaggaggctgaggcaggagaatcacttgaacctacgaggcagaggctgcagtgagccaagatcgtgacacgacactccagcctggctgatagagtgagactccgtcacaaaaaaa

SEQ ID NO: 371765 - DNA, 2547 bp, Homo sapiens
ggtcaccccgcggactggacgggaacctggcggggtcaggtcccgtcaagcagcctggctcatggctgtgtgcggcctggggagccgtcttggcctggggagccgtcttggcctgcgcgggtgcttcggcgccgccaggctcctgtatccccgtttccagagccgcggccctcagggcgtggaagacggggacaggccacagccttcctcgaagacacccaggatccccaagatttacaccaaaacgggagacaaagggttttctagtaccttcacaggagaaaggagacccaaagatgaccaagtgtttgaagccgtgggaactacagatgaattaagttcagctattgggtttgctctggaattagtcacagaaaagggccatacatttgccgaagagcttcagaaaatccagtgcacattgcaggacgtcggctcggccctggcgacaccatgctcctcggcccgggaggctcacttaaagtataccacgttcaaggcggggcccatcctggagctggagcagtggatcgacaagtacaccagccagctcccaccactcacggccttcatcctgccttcgggaggcaagatcagctcggcgctgcatttctgccgggccgtgtgccgccgggccgagagacgtgtggtgcctcttgtccagatgggagagaccgatgcgaacgtggccaagttcttaaacagactcagtgactatctcttcacgctagccagatatgcagccatgaaggaggggaatcaagagaaaatatacaagaaaaatgacccatcggccgagtctgagggactctgaaatcacagaaagtgggagcttggaggatccctccatggcgatggccgtggagagaggagcttgcccttctggggtcctggttcctgaagagctcacccagagaggctcaaagcagccttttgtcccagctcagctttgatctacacctcttgccaccttcctcaagggactgtgaccctttggggattctgtccctgaccctgcttccccaagctctcctgggtcttggagggatgtgggaatgaattggcattgcaggaaagacaggtaaagtgattgctgcaatgagaaggagctgtgcggaaaaggaataaaagttggaaaggctggagccgtgtgtgtgtgtgtgtgtgtgtgtgtgtgtgtgtgtgtgtgtgtgagagagagccctcccactgccagctcaggttgttcacagatttggaatgggaccagaggcccttgaaaatgtaattgtgatttacctgtgccaaaggtgctttaaatgtcacatttgtaaaggggaaggcggacaagatttggaagtttagtcacctctgagccacccatcaccgccaaagtgtgggggaaggatagctgcagattgacaggcgaggctcagaaactcctggcttagattgaagtgtgtgtgatgggggtgcagcttagaggaccccctctgaaagggatggagatgctgatgagaacaacactaccacttgaaggtgaacattccctgtctggttggactgagtcaagggtctgcggtgcagcatcttcagcttgagaaaatgaggttgtcagtttccagcaaggctgacatccaccagactgatttctccgatgttgcacttggctggcttatgcctctgagatcggtgccacggctgtatttatttcagttgtcactgctgctccctcctgctatgaaacgacactgccagtgccagcagtgtccttgggaaaggcaatatttatgaagggcagaagaggcagccccaagaacctaaagactgcaggctgctaattgcaggaaatgactttggaagggcaggctcttgtccagtttcagggctgaaatgcctggcgaactccattcagccatcacatattgactgagtggctgcttagcatgggccaccgcgctaggctcgggacagctggtctttccggccatctttcttgctggcaagtcagcaaacattaccttcttagtcacgtgcatatttttgccttcattcttaccacctggcctgcaaagtttgcaggagggccaggtatattcacttgtgtcttctgggtcctttcattgctgacaggctgtgatggccctcttgagccttgggcagggtgggtgaggtgcagatgaccaggagtgtgtgaatgccttccaggaggtggctttgttccgtgcctccctgcccccatcgtcactaccaggtctggtacggagtcggtgctcagtgtttgcaaaacagagctgaaaacggactttgggaggccgaggcaggcagatcacctgaggtcaggagtttgagaccagcctggtcaacatggtaaaaccccatttctgctaaaaaaaaaaaaaaaaaaaaaaattagctgggcatggtggcgggtgcctgtaatcccagctattcaggaggctgaggcaggagaatcacttgaacctacgaggcagaggctgcagtgagccaagatcgtgacacgacactccagcctggctgatagagtgagactccgtcacaaaaaaa

SEQ ID NO: 371766 - DNA, 760 bp, Homo sapiens
ggtcaccccgcggactggacgggaacctggcggggtcaggtcccgtcaagcagcctggctcatggctgtgtgcggcctggggagccgtcttggcctggggagccgtcttggcctgcgcgggtgcttcggcgccgccaggctcctgtatccccgtttccagagccgcggccctcagggcgtggaagacggggacaggccacagccttcctcgaagacacccaggatccccaagatttacaccaaaacgggagacaaagggttttctagtaccttcacaggagaaaggagacccaaagatgaccaagtgtttgaagccgtgggaactacagatgaattaagttcagctattggccaaagtttagaaggtggactcaaggatggaccagatcaggatgggccaggtcatgctgtgatcacagacaaccccaaaatctcctgacttatgacaccaaagatggacttgctgttcccacttcatgcccatcacagggtttgctctggaattagtcacagaaaagggccatacatttgccgaagagcttcagaaaagtataccacgttcaaggcggggcccatcctggagctggagcagtggatcgacaagtacaccagccagctcccaccactcacggccttcatcctgccttgacagacgctgtcctccagttccccaagtccctccaggtcctcaccggtccctcccagccctgcccactctggagcagcgtgcccggtgggtgtgccgtggcagggctcctgg

SEQ ID NO: 371767 - DNA, 1393 bp, Homo sapiens
ggtcaccccgcggactggacgggaacctggcggggtcaggtcccgtcaagcagcctggctcatggctgtgtgcggcctggggagccgtcttggcctggggagccgtcttggcctgcgcgggtgcttcggcgccgccaggctcctgtatccccgtttccagagccgcggccctcagggcgtggaagacggggacaggccacagccttcctcgaagacacccaggatccccaagatttacaccaaaacgggagacaaagggttttctagtaccttcacaggagaaaggagacccaaagatgaccaagtgtttgaagccgtgggaactacagatgaattaagttcagctattgggtttgctctggaattagtcacagaaaagggccatacatttgccgaagagcttcagaaaatccagtgcacattgcaggacgtcggctcggccctggcgacaccatgctcctcggcccgggaggctcacttaaagtataccacgttcaaggcggggcccatcctggagctggagcagtggatcgacaagtacaccagccagctcccaccactcacggccttcatcctgccttcgggaggcaagatcagctcggcgctgcatttctgccgggccgtgtgccgccgggccgagagacgtgtggtgcctcttgtccagatgggagagaccgatgcgaacgtggccaagttcttaaacagactcagtgactatctcttcacgctagccagatatgcagccatgaaggaggggaatcaagagaaaatatacaagaaaaatgacccatcggccgagtctgagggactctgaaatcacagaaagtgggagcttggaggatccctccatggcgatggccgtggagagaggagcttgcccttctggggtcctggttcctgaagagctcacccagagaggctcaaagcagccttttgtcccagctcagctttgatctacacctcttgccaccttcctcaagggactgtgaccctttggggattctgtccctgaccctgcttccccaagctctcctgggtcttggagggatgtgggaatgaattggcattgcaggaaagacaggtaaagtgattgctgcaatgagaaggagctgtgcggaaaaggaataaaagttggaaaggctggagccgtgtgtgtgtgtgtgtgtgtgtgtgtgtgtgtgtgtgtgtgtgtgagagagagccctcccactgccagctcaggttgttcacagatttggaatgggaccagaggcccttgaaaatgtaattgtgatttacctgtgaaaaaaacaacctccctacctcgaaaaaaaactcgaggggggcccgggcccaatttccccatggggggccattcacattaaatggccgggctttacaacgtcgtactggg

SEQ ID NO: 371768 - DNA, 2634 bp, Homo sapiens
ggtcaccccgcggactggacgggaacctggcggggtcaggtcccgtcaagcagcctggctcatggctgtgtgcggcctggggagccgtcttggcctggggagccgtcttggcctgcgcgggtgcttcggcgccgccaggctcctgtatccccgtttccagagccgcggccctcagggcgtggaagacggggacaggccacagccttcctcgaagacacccaggatccccaagatttacaccaaaacgggagacaaagggttttctagtaccttcacaggagaaaggagacccaaagatgaccaagtgtttgaagccgtgggaactacagatgaattaagttcagctattgggtttgctctggaattagtcacagaaaagggccatacatttgccgaagagcttcagaaaatccagtgcacattgcaggacgtcggctcggccctggcgacaccatgctcctcggcccgggaggctcacttaaagtataccacgttcaaggcggggcccatcctggagctggagcagtggatcgacaagtacaccagccagctcccaccactcacggccttcatcctgccttgacagacgctgtcctccagttccccaagtccctccaggtcctcaccggtccctcccagccctgcccactctggagcagcgtgcccgtcgggaggcaagatcagctcggcgctgcatttctgccgggccgtgtgccgccgggccgagagacgtgtggtgcctcttgtccagatgggagagaccgatgcgaacgtggccaagttcttaaacagactcagtgactatctcttcacgctagccagatatgcagccatgaaggaggggaatcaagagaaaatatacaagaaaaatgacccatcggccgagtctgagggactctgaaatcacagaaagtgggagcttggaggatccctccatggcgatggccgtggagagaggagcttgcccttctggggtcctggttcctgaagagctcacccagagaggctcaaagcagccttttgtcccagctcagctttgatctacacctcttgccaccttcctcaagggactgtgaccctttggggattctgtccctgaccctgcttccccaagctctcctgggtcttggagggatgtgggaatgaattggcattgcaggaaagacaggtaaagtgattgctgcaatgagaaggagctgtgcggaaaaggaataaaagttggaaaggctggagccgtgtgtgtgtgtgtgtgtgtgtgtgtgtgtgtgtgtgtgtgtgtgagagagagccctcccactgccagctcaggttgttcacagatttggaatgggaccagaggcccttgaaaatgtaattgtgatttacctgtgccaaaggtgctttaaatgtcacatttgtaaaggggaaggcggacaagatttggaagtttagtcacctctgagccacccatcaccgccaaagtgtgggggaaggatagctgcagattgacaggcgaggctcagaaactcctggcttagattgaagtgtgtgtgatgggggtgcagcttagaggaccccctctgaaagggatggagatgctgatgagaacaacactaccacttgaaggtgaacattccctgtctggttggactgagtcaagggtctgcggtgcagcatcttcagcttgagaaaatgaggttgtcagtttccagcaaggctgacatccaccagactgatttctccgatgttgcacttggctggcttatgcctctgagatcggtgccacggctgtatttatttcagttgtcactgctgctccctcctgctatgaaacgacactgccagtgccagcagtgtccttgggaaaggcaatatttatgaagggcagaagaggcagccccaagaacctaaagactgcaggctgctaattgcaggaaatgactttggaagggcaggctcttgtccagtttcagggctgaaatgcctggcgaactccattcagccatcacatattgactgagtggctgcttagcatgggccaccgcgctaggctcgggacagctggtctttccggccatctttcttgctggcaagtcagcaaacattaccttcttagtcacgtgcatatttttgccttcattcttaccacctggcctgcaaagtttgcaggagggccaggtatattcacttgtgtcttctgggtcctttcattgctgacaggctgtgatggccctcttgagccttgggcagggtgggtgaggtgcagatgaccaggagtgtgtgaatgccttccaggaggtggctttgttccgtgcctccctgcccccatcgtcactaccaggtctggtacggagtcggtgctcagtgtttgcaaaacagagctgaaaacggactttgggaggccgaggcaggcagatcacctgaggtcaggagtttgagaccagcctggtcaacatggtaaaaccccatttctgctaaaaaaaaaaaaaaaaaaaaaaattagctgggcatggtggcgggtgcctgtaatcccagctattcaggaggctgaggcaggagaatcacttgaacctacgaggcagaggctgcagtgagccaagatcgtgacacgacactccagcctggctgatagagtgagactccgtcacaaaaaaa

SEQ ID NO: 371769 - DNA, 2395 bp, Homo sapiens
ggtcaccccgcggactggacgggaacctggcggggtcaggtcccgtcaagcagcctggctcatggctgtgtgcggcctggggagccgtcttggcctggggagccgtcttggcctgcgcgggtgcttcggcgccgccaggctcctgtatccccgtttccagagccgcggccctcagggcgtggaagacggggacaggccacagccttcctcgaagacacccaggatccccaagatttacaccaaaacgggagacaaagatccagtgcacattgcaggacgtcggctcggccctggcgacaccatgctcctcggcccgggaggctcacttaaagtataccacgttcaaggcggggcccatcctggagctggagcagtggatcgacaagtacaccagccagctcccaccactcacggccttcatcctgccttcgggaggcaagatcagctcggcgctgcatttctgccgggccgtgtgccgccgggccgagagacgtgtggtgcctcttgtccagatgggagagaccgatgcgaacgtggccaagttcttaaacagactcagtgactatctcttcacgctagccagatatgcagccatgaaggaggggaatcaagagaaaatatacaagaaaaatgacccatcggccgagtctgagggactctgaaatcacagaaagtgggagcttggaggatccctccatggcgatggccgtggagagaggagcttgcccttctggggtcctggttcctgaagagctcacccagagaggctcaaagcagccttttgtcccagctcagctttgatctacacctcttgccaccttcctcaagggactgtgaccctttggggattctgtccctgaccctgcttccccaagctctcctgggtcttggagggatgtgggaatgaattggcattgcaggaaagacaggtaaagtgattgctgcaatgagaaggagctgtgcggaaaaggaataaaagttggaaaggctggagccgtgtgtgtgtgtgtgtgtgtgtgtgtgtgtgtgtgtgtgtgtgtgagagagagccctcccactgccagctcaggttgttcacagatttggaatgggaccagaggcccttgaaaatgtaattgtgatttacctgtgccaaaggtgctttaaatgtcacatttgtaaaggggaaggcggacaagatttggaagtttagtcacctctgagccacccatcaccgccaaagtgtgggggaaggatagctgcagattgacaggcgaggctcagaaactcctggcttagattgaagtgtgtgtgatgggggtgcagcttagaggaccccctctgaaagggatggagatgctgatgagaacaacactaccacttgaaggtgaacattccctgtctggttggactgagtcaagggtctgcggtgcagcatcttcagcttgagaaaatgaggttgtcagtttccagcaaggctgacatccaccagactgatttctccgatgttgcacttggctggcttatgcctctgagatcggtgccacggctgtatttatttcagttgtcactgctgctccctcctgctatgaaacgacactgccagtgccagcagtgtccttgggaaaggcaatatttatgaagggcagaagaggcagccccaagaacctaaagactgcaggctgctaattgcaggaaatgactttggaagggcaggctcttgtccagtttcagggctgaaatgcctggcgaactccattcagccatcacatattgactgagtggctgcttagcatgggccaccgcgctaggctcgggacagctggtctttccggccatctttcttgctggcaagtcagcaaacattaccttcttagtcacgtgcatatttttgccttcattcttaccacctggcctgcaaagtttgcaggagggccaggtatattcacttgtgtcttctgggtcctttcattgctgacaggctgtgatggccctcttgagccttgggcagggtgggtgaggtgcagatgaccaggagtgtgtgaatgccttccaggaggtggctttgttccgtgcctccctgcccccatcgtcactaccaggtctggtacggagtcggtgctcagtgtttgcaaaacagagctgaaaacggactttgggaggccgaggcaggcagatcacctgaggtcaggagtttgagaccagcctggtcaacatggtaaaaccccatttctgctaaaaaaaaaaaaaaaaaaaaaaattagctgggcatggtggcgggtgcctgtaatcccagctattcaggaggctgaggcaggagaatcacttgaacctacgaggcagaggctgcagtgagccaagatcgtgacacgacactccagcctggctgatagagtgagactccgtcacaaaaaaa

SEQ ID NO: 371770 - DNA, 2561 bp, Homo sapiens
ggtcaccccgcggactggacgggaacctggcggggtcaggtcccgtcaagcagcctggctcatggctgtgtgcggcctggggagccgtcttggcctggggagccgtcttggcctgcgcgggtgcttcggcgccgccaggctcctgtatccccgtttccagagccgcggccctcagggcgtggaagacggggacaggccacagccttcctcgaagacacccaggatccccaagatttacaccaaaacgggagacaaagggttttctagtaccttcacaggagaaaggagacccaaagatgaccaagtgtttgaagccgtgggaactacagatgaattaagttcagctattgggtttgctctggaattagtcacagaaaagggccatacatttgccgaagagcttcagaaaagtataccacgttcaaggcggggcccatcctggagctggagcagtggatcgacaagtacaccagccagctcccaccactcacggccttcatcctgccttgacagacgctgtcctccagttccccaagtccctccaggtcctcaccggtccctcccagccctgcccactctggagcagcgtgcccgtcgggaggcaagatcagctcggcgctgcatttctgccgggccgtgtgccgccgggccgagagacgtgtggtgcctcttgtccagatgggagagaccgatgcgaacgtggccaagttcttaaacagactcagtgactatctcttcacgctagccagatatgcagccatgaaggaggggaatcaagagaaaatatacaagaaaaatgacccatcggccgagtctgagggactctgaaatcacagaaagtgggagcttggaggatccctccatggcgatggccgtggagagaggagcttgcccttctggggtcctggttcctgaagagctcacccagagaggctcaaagcagccttttgtcccagctcagctttgatctacacctcttgccaccttcctcaagggactgtgaccctttggggattctgtccctgaccctgcttccccaagctctcctgggtcttggagggatgtgggaatgaattggcattgcaggaaagacaggtaaagtgattgctgcaatgagaaggagctgtgcggaaaaggaataaaagttggaaaggctggagccgtgtgtgtgtgtgtgtgtgtgtgtgtgtgtgtgtgtgtgtgtgtgagagagagccctcccactgccagctcaggttgttcacagatttggaatgggaccagaggcccttgaaaatgtaattgtgatttacctgtgccaaaggtgctttaaatgtcacatttgtaaaggggaaggcggacaagatttggaagtttagtcacctctgagccacccatcaccgccaaagtgtgggggaaggatagctgcagattgacaggcgaggctcagaaactcctggcttagattgaagtgtgtgtgatgggggtgcagcttagaggaccccctctgaaagggatggagatgctgatgagaacaacactaccacttgaaggtgaacattccctgtctggttggactgagtcaagggtctgcggtgcagcatcttcagcttgagaaaatgaggttgtcagtttccagcaaggctgacatccaccagactgatttctccgatgttgcacttggctggcttatgcctctgagatcggtgccacggctgtatttatttcagttgtcactgctgctccctcctgctatgaaacgacactgccagtgccagcagtgtccttgggaaaggcaatatttatgaagggcagaagaggcagccccaagaacctaaagactgcaggctgctaattgcaggaaatgactttggaagggcaggctcttgtccagtttcagggctgaaatgcctggcgaactccattcagccatcacatattgactgagtggctgcttagcatgggccaccgcgctaggctcgggacagctggtctttccggccatctttcttgctggcaagtcagcaaacattaccttcttagtcacgtgcatatttttgccttcattcttaccacctggcctgcaaagtttgcaggagggccaggtatattcacttgtgtcttctgggtcctttcattgctgacaggctgtgatggccctcttgagccttgggcagggtgggtgaggtgcagatgaccaggagtgtgtgaatgccttccaggaggtggctttgttccgtgcctccctgcccccatcgtcactaccaggtctggtacggagtcggtgctcagtgtttgcaaaacagagctgaaaacggactttgggaggccgaggcaggcagatcacctgaggtcaggagtttgagaccagcctggtcaacatggtaaaaccccatttctgctaaaaaaaaaaaaaaaaaaaaaaattagctgggcatggtggcgggtgcctgtaatcccagctattcaggaggctgaggcaggagaatcacttgaacctacgaggcagaggctgcagtgagccaagatcgtgacacgacactccagcctggctgatagagtgagactccgtcacaaaaaaa

SEQ ID NO: 371771 - DNA, 4049 bp, Homo sapiens
tacagctgttcctgctgattgctttttaagctaggctcaagtgtggggccacggaatccttcaggtgcccttcaaatcagacattacatttcagctctcagggctagaatgcttccccctcttatcttgggcaggtctttgaagaagccagtttagccttggtaattttgaatttggccatagtatacggaggagagctaggtagctatcaaaacgcttagacaaacgtatggtaaaatgcagcccagcctgaacctccgcaaaacccccaaacctggagcagcaagtgggcaaaggagtgtgtgtttggggcagggtactgagtcccatatgtaatcaagagacctggagggcccaaggaagtcagtgacacccccacaagctacatatcctccaatggattgtggtggtcatctccggctaccgaagccaccttgcttattcccataggcttacaaacattatgatgcttcacacgagttgtgggtgaagtgaaggaattggaaagtcccggtctaaggccctgcaaaactgctgtctggtaaaaacaagtgactatggcaaggccctgaatgtactacgtatagacttaagtcagtatttgtgcctaacagcaaagcatgccacaagaggctcctcaaaagccgggtaattgatgccattgttttcttgacctagttgaagagtcaaagaagagaaggtgatgcagaaacttctttccagtgaagtgacagatccaagcaaggaacacctgcctgtgaggggagcggtaggggagggggtagattcggcagcactcgggtagtggcagggaccacatattgtcggtgttaaccactgttatcactggcccaggtcgagtgaggacgagtcatttccccactaagcacttggggagtggcagggaccacatattgtcagtgttaaccactgttatgactggcccaggtcgggtgacgacgagccatttccgcactattgtcccttcttcctcactgcacccccagccctgcaccctcagctccaaatacacattctcgttcactcaacgtttgttgacacctagcgtgggccctgtgggatggggtaaaagttcggtgttgggaggagccccggtgacagatttttggttttggtggtggcttttgggcaaggacaggtcagttcataaaagatgacgccccaggtctggatcgaattctcctgggagccagaccaaagcaccttcctggactgcaaagtgtggaagccgccgcgggccgggcgcggggaggtgtcatgcgccggaacctgcgcttggggccaagctctggagctgacgcgcaggggcaaggcgccccgcgtcccggactggcggctccgcgcatgctcctcccaccggcgtcgcaggcctcgagaggctccggaagtactgggtgcagcctgatggcgcaggaggtagacacggcacagggcgccgagatgcggcggggcgcgggcgcggctcggggacgcgcttcctggtgctgggccctggcgctgctttggctcgcggtggttccgggctggtcccgggtctcgggcatcccctcccggcgccactggccggtgccctacaagcgctttgacttccgtccaaaacctgatccttattgtcaagctaagtatactttctgtccaactggctcacctatcccagttatggagggtgatgatgacattgaagtttttcgattacaagccccagtatgggaatttaaatatggagacctcctgggacacttgaaaattatgcatgatgccattggattcagaagtacattaactggcaagaactacacaatggaatggtatgaacttttccaacttggcaactgtacatttccccatctccgacctgaaatggatgcccctttctggtgtaatcaaggcgctgcctgcttttttgagggaattgatgatgttcactggaaggaaaatgggacattagttcaagtagcaactatatcaggaaacatgttcaaccaaatggcaaagtgggtgaaacaggacaatgaaacaggaatttattatgagacatggaatgtaaaagccagcccagaaaagggggcagagacatggtttgattcctacgactgttccaaatttgtgttaaggacctttaacaagttggctgaatttggagcagagttcaagaacatagaaaccaactatacaagaatatttctttacagtggagaacctacttatctgggaaatgaaacatctgtttttgggccaacaggaaacaagactcttggtttagccataaaaagattttattaccccttcaaaccacatttgccaactaaagaatttctgttgagtctcttgcaaatttttgatgcagtgattgtgcacaaacagttctatttgttttataattttgaatattggtttttacctatgaaattcccttttattaaaataacatatgaagaaatccctttacctatcagaaacaaaacactctctggtttataaaacaccttaattctactgctcttttttctccaatcaccagcatctgtttttcagggggtgattttacttttgtgaattccttagcctttcttccttggtgcataaagttaaaatgcacatcagcagaattgctgcatattaacatctcaggactcttctcttgtaaagaagctgaaattcgtactatattggccaaagtgagcgagttaggtgatcttggtttcaatttccgagcctttgttaatatggagaattatggttcatatcagttatgtaggacctttggacccagggtcctacagatagatatggtgtgcccagattttaaaaataccttcaaaaataaaaaatacattcagtgacattttcatggtgggagctcttctttctgatatggcagttacactttttcacttaagtgctttagtttagactaactttacaacttctataacttttggaaccaagtttagtatagtctgattacattccattcacctaactttagacattcgtttagacaccataactggagtgattgtgcttctagatgtggcaaatccagtgttaacacatatttctggctgagattttggaactagctagtaactggcttgtgttctttaagcatactaacatcactaaatcttaggatttaggattgctgtaaagatgtaagttgtgtatgtttggcaggtcacattgaatggcagtgataatgattaatcaaagaacaaatgtcatccttgatcttgcctaatgtagtttatgtgccaaactttccagggttttgtagtcacctagattttaagctgatagcatagtgcttcagcggttcttctaaccggggtatgcaggaacatggctgcagacacgtttgggtaaacaggcaccttctgacttcttcattgtttcctgtagttctccctcttcccacaaagctgtcagcgcagtggaagaggttgcacttctccgagagaggacaggtttctgttaagatcaccaagtagctgtgctttaattagagccagacaagctttcaaggtcctttaagtatttgatgatcaactgaacacgtttctattcaaggagaaaacaccattcagtaagaagatggagtagatatcagataaaacaattcacgtttaatatgtaaatgtaccaattatgtgattcagtttcaactttcaagtacttcctgagaggttagtacattattattgagctctcacagaaagcttaatcatagatataattaacctgatccaaatgagtaaagtggaccttagaaaggctaagtgatctttctctggctatccagctagtagtaatgaagtcaggtcttgaaccccggttctgctgactgaattggatgcactatagtacaggcttttagcaccgaagtgtggtcctcagaccagtgcctgccaaccagatgttactggtctgtgaggaaataagtacagatactgacaggaagcttttataaacaatttattggagtgtttttgtttctgttgggtctaattaaaaaaattggagcttgt

SEQ ID NO: 371772 - DNA, 2152 bp, Homo sapiens
tacagctgttcctgctgattgctttttaagctaggctcaagtgtggggccacggaatccttcaggtgcccttcaaatcagacattacatttcagctctcagggctagaatgcttccccctcttatcttgggcaggtctttgaagaagccagtttagccttggtaattttgaatttggccatagtatacggaggagagctaggtagctatcaaaacgcttagacaaacgtatggtaaaatgcagcccagcctgaacctccgcaaaacccccaaacctggagcagcaagtgggcaaaggagtgtgtgtttggggcagggtactgagtcccatatgtaatcaagagacctggagggcccaaggaagtcagtgacacccccacaagctacatatcctccaatggattgtggtggtcatctccggctaccgaagccaccttgcttattcccataggcttacaaacattatgatgcttcacacgagttgtgggtgaagtgaaggaattggaaagtcccggtctaaggccctgcaaaactgctgtctggtaaaaacaagtgactatggcaaggccctgaatgtactacgtatagacttaagtcagtatttgtgcctaacagcaaagcatgccacaagaggctcctcaaaagccgggtaattgatgccattgttttcttgacctagttgaagagtcaaagaagagaaggtgatgcagaaacttctttccagtgaagtgacagatccaagcaaggaacacctgcctgtgaggggagcggtaggggagggggtagattcggcagcactcgggtagtggcagggaccacatattgtcggtgttaaccactgttatcactggcccaggtcgagtgaggacgagtcatttccccactaagcacttggggagtggcagggaccacatattgtcagtgttaaccactgttatgactggcccaggtcgggtgacgacgagccatttccgcactattgtcccttcttcctcactgcacccccagccctgcaccctcagctccaaatacacattctcgttcactcaacgtttgttgacacctagcgtgggccctgtgggatggggtaaaagttcggtgttgggaggagccccggtgacagatttttggttttggtggtggcttttgggcaaggacaggtcagttcataaaagatgacgccccaggtctggatcgaattctcctgggagccagaccaaagcaccttcctggactgcaaagtgtggaagccgccgcgggccgggcgcggggaggtgtcatgcgccggaacctgcgcttggggccaagctctggagctgacgcgcaggggcaaggcgccccgcgtcccggactggcggctccgcgcatgctcctcccaccggcgtcgcaggcctcgagaggctccggaagtactgggtgcagcctgatggcgcaggaggtagacacggcacagggcgccgagatgcggcggggcgcgggcgcggctcggggacgcgcttcctggtgctgggccctggcgctgctttggctcgcggtggttccgggctggtcccgggtctcgggcatcccctcccggcgccactggccggtgccctacaagcgctttgacttccgtccaaaacctgatccttattgtcaagctaagtatactttctgtccaactggctcacctatcccagttatggagggtgatgatgacattgaagtttttcgattacaagccccagtatgggaatttaaatatggagacctcctgggacacttgaaaattatgcatgatgccattggattcagaagtacattaactggcaagaactacacaatggaatggtatgaacttttccaacttggcaactgtacatttccccatctccgacctgaaatggatgcccctttctggtgtaatcaaggcgctgcctgcttttttgagggaattgatgatgttcactggaaggaaaatgggacattagttcaagtagcaactatatcaggtaagttgtgaaaatatagcaatatttgatcattgcatcaaaaaccaaatgaaagaaattgttatacttccattgaaacatttcagtaatgttttacttagaggtcatttgtaaaatgtacttttggaaccattaaactttgggaatttttttcatctctta

SEQ ID NO: 371773 - DNA, 715 bp, Homo sapiens
tgaggtctgtagagctgcttccagagactggcatgggggctcctcacacttattctaagctctaaggaaattatcagcttgtccacataacatgcaggcctcctatttgagatgagccaaataggggtgtagtggccaaagctggggtggatgagggcctggagtttggggccacagagtggatatgacagtagcagcatggaagaacagctgaacagttgttctacttgatatgcatttgtgatgtgccacattttctcctatcaggttacctggacccatgggttgtgtcacagttgcttttatacatgtactgtctttacacagaaaattatgcatgatgccattggattcagaagtacattaactggcaagaactacacaatggaatggtatgaacttttccaacttggcaactgtacatttccccatctccgacctgaaatggatgcccctttctggtgtaatcaaggcgctgcctgcttttttgagggaattgatgatgttcactggaaggaaaatgggacattagttcaagtagcaactatatcaggtaagttgtgaaaatatagcaatatttgatcattgcatcaaaaaccaaatgaaagaaattgttatacttccattgaaacatttcagtaatgttttacttagaggtcatttgtaaaatgtacttttggaaccattaaactttgggaatttttttcatctctta

SEQ ID NO: 371774 - DNA, 1658 bp, Homo sapiens
tcttgtaaagaagctgaaattcgtactatattggccaaagtgagcgagttaggtgatcttggtttcaatttccgagcctttgttaatatggagaattatggtggtttataaaacaccttaattctactgctcttttttctccaatcaccagcatctgtttttcagggggtgattttacttttgtgaattccttagcctttcttccttggtgcataaagttaaaatgcacatcagcagaattgctgcatattaacatctcaggactcttctcttgtaaagaagctgaaattcgtactatattggccaaagtgagcgagttaggtgatcttggtttcaatttccgagcctttgttaatatggagaattatggttcatatcagttatgtaggacctttggacccagggtcctacagatagatatggtgtgcccagattttaaaaataccttcaaaaataaaaaatacattcagtgacattttcatggtgggagctcttctttctgatatggcagttacactttttcacttaagtgctttagtttagactaactttacaacttctataacttttggaaccaagtttagtatagtctgattacattccattcacctaactttagacattcgtttagacaccataactggagtgattgtgcttctagatgtggcaaatccagtgttaacacatatttctggctgagattttggaactagctagtaactggcttgtgttctttaagcatactaacatcactaaatcttaggatttaggattgctgtaaagatgtaagttgtgtatgtttggcaggtcacattgaatggcagtgataatgattaatcaaagaacaaatgtcatccttgatcttgcctaatgtagtttatgtgccaaactttccagggttttgtagtcacctagattttaagctgatagcatagtgcttcagcggttcttctaaccggggtatgcaggaacatggctgcagacacgtttgggtaaacaggcaccttctgacttcttcattgtttcctgtagttctccctcttcccacaaagctgtcagcgcagtggaagaggttgcacttctccgagagaggacaggtttctgttaagatcaccaagtagctgtgctttaattagagccagacaagctttcaaggtcctttaagtatttgatgatcaactgaacacgtttctattcaaggagaaaacaccattcagtaagaagatggagtagatatcagataaaacaattcacgtttaatatgtaaatgtaccaattatgtgattcagtttcaactttcaagtacttcctgagaggttagtacattattattgagctctcacagaaagcttaatcatagatataattaacctgatccaaatgagtaaagtggaccttagaaaggctaagtgatctttctctggctatccagctagtagtaatgaagtcaggtcttgaaccccggttctgctgactgaattggatgcactatagtacaggcttttagcaccgaagtgtggtcctcagaccagtgcctgccaaccagatgttactggtctgtgaggaaataagtacagatactgacaggaagcttttataaacaatttattggagtgtttttgtttctgttgggtctaattaaaaaaattggagcttgt

SEQ ID NO: 371775 - DNA, 544 bp, Homo sapiens
cactccagggaaggagtgagaatcagtgagtgtgttttctggtcccactgatggtaggacaccttgaggtcagtggggaagctggcctgggtagagggctgtgggtgctgggccaggcaagcccatcccttggagaagcagacccagacatggcaggggcaccccagctccgcctgtgtggcctctgggcagctggctttccctaggcacaacacttccctgcatgtatcagtgttggatgtatcatccccctctctggctcctttcacaacccaatacctccccaccacctttaacaccatcccttgagttcattctgttttcctaaaattcagtcacagatgcaccaacaccaatctgctcttcaagatggagttctggcattgccacttcagaaatccaatctgccgtatcctagcctggatgcagtcttctttcctcctgacagcactggtttgatagagcctagtgatctgtttactccctacttccctcgccagactctacacttctgtttttaaaaaaacttcttgaaacttttcta

SEQ ID NO: 371776 - DNA, 532 bp, Homo sapiens
ccttaggcctgttttataaggccactactcatattcacgagggatctgcccttatgacctaatcgtctcccaaaggccccacctccaaataacattactttggaggttaggtctttaacatgaattttggagggacacaaacattccttctatagcactcacacacctatcatgacatctgtggctcttgatgtccctcgggtgggctgtcaggagaatagaaaggtgcctgtgcttcaggcctgagacttctttccgtgtgtaggctcacactgcctgagaaatttgggttccttgtttcgtctttaaacagcttcttcctttactagtcgaggctttttcaggtgcccattgcaggagacccctttgtagagtcacgggggcttaatcagaatccccttctctccatatacccaaccccgtagactgtggtgaggattgaatgagacctacttagcatgattcctgacagagtgtgcactcaagtagatactagctattatcgttactattatttctcttaaaaaagaaa

SEQ ID NO: 371777 - DNA, 3470 bp, Homo sapiens
gtgggtctgcacctggattttggagtcccagtgctgctgcagctctgagcattcccacgtcaccagagaagccggtgggcaatgagatcatgtctgctttcaggttgtggcctggcctgctgatcatgttgggttctctctgccatagaggttcaccgtgtggcctttcaacacacgtagaaataggacacagagctctggagtttcttcagcttcacaatgggcgtgttaactacagagagctgttactagaacaccaggatgcgtatcaggctggaatcgtgtttcctgattgtttttaccctagcatctgcaaaggaggaaaattccatgatgtgtctgagagcactcactggactccgtttcttaatgcaagcgttcattatatccgagagaactatccccttccctgggagaaggacacagagaaactggtagctttcttgtttggaattacttctcacatggcggcagatgtcagctggcatagtctgggccttgaacaaggattccttaggaccatgggagctattgattttcacggctcctattcagaggctcattcggctggtgattttggaggagatgtgttgagccagtttgaatttaattttaattaccttgcacgacgctggtatgtgccagtcaaagatctactgggaatttatgagaaactgtatggtcgaaaagtcatcaccgaaaatgtaatcgttgattgttcacatatccagttcttagaaatgtatggtgagatgctagctgtttccaagttatatcccacttactctacaaagtccccgtttttggtggaacaattccaagagtattttcttggaggactggatgatatggcattttggtccactaatatttaccatctaacaagcttcatgttggagaatgggaccagtgactgcaacctgcctgagaaccctctgttcattgcatgtggcggccagcaaaaccacacccagggctcaaaaatgcagaaaaatgattttcacagaaatttgactacatccctaactgaaagtgttgacaggaatataaactatactgaaagaggagtgttctttagtgtaaattcctggaccccggattccatgtcctttatctacaaggctttggaaaggaacataaggacaatgttcataggtggctctcagttgtcacaaaagcacgtctccagccccttagcatcttacttcttgtcatttccttatgcgaggcttggctgggcaatgacctcagctgacctcaaccaggatgggcacggtgacctcgtggtgggcgcaccaggctacagccgccccggccacatccacatcgggcgcgtgtacctcatctacggcaatgacctgggcctgccacctgttgacctggacctggacaaggaggcccacaggatccttgaaggcttccagccctcaggtcggtttggctcggccttggctgtgttggactttaacgtggacggcgtgcctgacctggccgtgggagctccctcggtgggctccgagcagctcacctacaaaggtgccgtgtatgtctactttggttccaaacaaggaggaatgtcttcttcccctaacatcaccatttcttgccaggacatctactgtaacttgggctggactctcttggctgcagatgtgaatggagacagtgaacccgatctggtcatcggctccccttttgcaccaggtggagggaagcagaagggaattgtggctgcgttttattctggccccagcctgagcgacaaagaaaaactgaacgtggaggcagccaactggacggtgagaggcgaggaagacttctcctggtttggatattcccttcacggtgtcactgtggacaacagaaccttgctgttggttgggagcccgacctggaagaatgccagcaggctgggccatttgttacacatccgagatgagaaaaagagccttgggagggtgtatggctacttcccaccaaacggccaaagctggtttaccatttctggagacaaggcaatggggaaactgggtacttccctttccagtggccacgtactgatgaatgggactctgaaacaagtgctgctggttggagcccctacgtacgatgacgtgtctaaggtggcattcctgaccgtgaccctacaccaaggcggagccactcgcatgtacgcactcatatctgacgcgcagcctctgctgctcagcaccttcagcggagaccgccgcttctcccgatttggtggcgttctgcacttgagtgacctggatgatgatggcttagatgaaatcatcatggcagcccccctgaggatagcagatgtaacctctggactgattgggggagaagacggccgagtatatgtatataatggcaaagagaccacccttggtgacatgactggcaaatgcaaatcatggataactccatgtccagaagaaaaggcccaatatgtattgatttctcctgaagccagctcaaggtttgggagctccctcatcaccgtgaggtccaaggcaaagaaccaagtcgtcattgctgctggaaggagttctttgggagcccgactctccggggcacttcacgtctatagccttggctcagattgaagatttcactgcatttccccactctgcccacctctctcatgctgaatcacatccatggtgagcattttgatggacaaagtggcacatccagtggagcggtggtagatcctgatagacatggggctcctgggagtagagagacacactaacagccacaccctctggaaatctgatacagtaaatatatgactgcaccagaaatatgtgaaatagcagacattctgcttactcatgtctccttccacagtttacttcctcgctccctttgcatctaaacctttcttctttcccaacttattgcctgtagtcagacctgctgtacaacctatttcctcttcctcttgaatgtctttccaatggctggaaaggtccctctgtggttatctgttagaacagtctctgtacacaattcctcctaaaaacatccttttttaaaaaaagaattgttcagccataaagaaagaacaagatcatgccctttgcagggacatggatggagctggaggccattatccttcataaactattgcaggaacagaaaaccaaacactccatattctcacttgtaagtgggagctaaatgagaacacgtggacacatagagggaaacaacacacactggggcctatgagagggcggaaggtgggaggagggagagatcaggaaaaataactaatggatacttagggtgatgaaataatctgtgtaacaaacccccatgacacacctttatgtatgtaacaaaccagcacttcctgcgcatgtacccctgaacttaaaagttaaaaaaaagttgaacttaaaaataacagattggcccatgccaatcaaagtataatagaaagcatagtatacaga

SEQ ID NO: 371778 - DNA, 1031 bp, Homo sapiens
ctttttttatttttggcataagctgatttattatttatgagaactttagtataagaagcatcctgcaatcacaaaagtggaactagttgatattttgaaatcatacttgatttaaccaccttcagaaattctataaaacactagcaacttccttttatcagacttatgaggtagttacattatttttccttttattgacatgattcatcaaaaaattattttatccaagctcataaactaagtcaataaaactgcaaggaaaaatgacaaaaattctatcttatgcctgatcttagtcaaatcaaatgttgccctctgggattccaattcttcatgtcacagttaagtagtacttattatgtattttacagtgatacgacccaaaatagcagcagtgtgctctgaggtgtgccaaaagtgtgccctgtgaaatataagtattatcaaatacaatcttaaaaatcctaagagattcgtaatgctagagggtgctgtatgttcacattccgacaagaacaccatgacgcgtgttcctgacccacagtgtggtggcacaggggccactgcgtgctcgagtctagcccagcctgtcctgttccattctgttctgcagcttccctctaatggcttcccatgaccacacacaggagtggggaaaccttacttgtacttcatcggttttcttccaaatcagcgacgggagtaacatttttattcctatcaccaaaccacctgaaaaatggactcctaaacttcctcatatgacatcacattaggctaatcatgtaccctcaatatcatcagggtaagtgtatttattctgttattattacatttgtagtgcaagagctggacactctagaatcttccatgcacactactttgggaggcttaacaaatgttctagtgcctaactgtacttaacctccagaaaatattttaaaaggtaggtaggatgttaaagaggatggcagctttcaggcttacaaatattagccatttgttttaaacccaaatctctgtggaaatga

SEQ ID NO: 371779 - DNA, 441 bp, Homo sapiens
gagccagcggccgcccacgaagctgtcggtgcgcagcagcgccgcagagaggcccgccaggcgcccagcgtagcagcggagctgggccgggccgggcgcaggcccggaggcagggaccaggccgccggcgcgggggcggaggcggcagcctggaaacgtcgacccgaggcgccgggccccacagctccgcagccaaatgcaggtcgccatggcccgggcaacgacggcgacaggaaacaggcaagcgggcgcgcgcgcacgggaacgcaggggtcgcggggaagcaagaggagcgaggaggcgccggggacgcgcggggaaagcgtgggagctggcggaaggttgcagagccacagagcagcgccctctctccgcgtctttctcgctgcaccgccgcgccgccctctgcaccttgccctaagcgccgcgcggcttctctcc

SEQ ID NO: 371780 - DNA, 2954 bp, Homo sapiens
gagccagcggccgcccacgaagctgtcggtgcgcagcagcgccgcagagaggcccgccaggcgcccagcgtagcagcggagctgggccgggccgggcgcaggcccggaggcagggaccaggccgccggcgcgggggcggaggcggcagcctggaaacgtcgacccgaggcgccgggccccacagctccgcagccaaatgcaggtcgccatggcccgggcaacgacggcgacaggaaacaggttgtggcctggcctgctgatcatgttgggttctctctgccatagaggttcaccgtgtggcctttcaacacacgtagaaataggacacagagctctggagtttcttcagcttcacaatgggcgtgttaactacagagagctgttactagaacaccaggatgcgtatcaggctggaatcgtgtttcctgattgtttttaccctagcatctgcaaaggaggaaaattccatgatgtgtctgagagcactcactggactccgtttcttaatgcaagcgttcattatatccgagagaactatccccttccctgggagaaggacacagagaaactggtagctttcttgtttggaattacttctcacatggcggcagatgtcagctggcatagtctgggccttgaacaaggattccttaggaccatgggagctattgattttcacggctcctattcagaggctcattcggctggtgattttggaggagatgtgttgagccagtttgaatttaattttaattaccttgcacgacgctggtatgtgccagtcaaagatctactgggaatttatgagaaactgtatggtcgaaaagtcatcaccgaaaatgtaatcgttgattgttcacatatccagttcttagaaatgtatggtgagatgctagctgtttccaagttatatcccacttactctacaaagtccccgtttttggtggaacaattccaagagtattttcttggaggactggatgatatggcattttggtccactaatatttaccatctaacaagcttcatgttggagaatgggaccagtgactgcaacctgcctgagaaccctctgttcattgcatgtggcggccagcaaaaccacacccagggctcaaaaatgcagaaaaatgattttcacagaaatttgactacatccctaactgaaagtgttgacaggaatataaactatactgaaagaggagtgttctttagtgtaaattcctggaccccggattccatgtcctttatctacaaggctttggaaaggaacataaggacaatgttcataggtggctctcagttgtcacaaaagcacgtctccagccccttagcatcttacttcttgtcatttccttatgcgaggcttggctgggcaatgacctcagctgacctcaaccaggatgggcacggtgacctcgtggtgggcgcaccaggctacagccgccccggccacatccacatcgggcgcgtgtacctcatctacggcaatgacctgggcctgccacctgttgacctggacctggacaaggaggcccacaggatccttgaaggcttccagccctcaggtcggtttggctcggccttggctgtgttggactttaacgtggacggcgtgcctgacctggccgtgggagctccctcggtgggctccgagcagctcacctacaaaggtgccgtgtatgtctactttggttccaaacaaggaggaatgtcttcttcccctaacatcaccatttcttgccaggacatctactgtaacttgggctggactctcttggctgcagatgtgaatggagacagtgaacccgatctggtcatcggctccccttttgcaccaggtggagggaagcagaagggaattgtggctgcgttttattctggccccagcctgagcgacaaagaaaaactgaacgtggaggcagccaactggacggtgagaggcgaggaagacttctcctggtttggatattcccttcacggtgtcactgtggacaacagaaccttgctgttggttgggagcccgacctggaagaatgccagcaggctgggccatttgttacacatccgagatgagaaaaagagccttgggagggtgtatggctacttcccaccaaacggccaaagctggtttaccatttctggagacaaggcaatggggaaactgggtacttccctttccagtggccacgtactgatgaatgggactctgaaacaagtgctgctggttggagcccctacgtacgatgacgtgtctaaggtggcattcctgaccgtgaccctacaccaaggcggagccactcgcatgtacgcactcatatctgacgcgcagcctctgctgctcagcaccttcagcggagaccgccgcttctcccgatttggtggcgttctgcacttgagtgacctggatgatgatggcttagatgaaatcatcatggcagcccccctgaggatagcagatgtaacctctggactgattgggggagaagacggccgagtatatgtatataatggcaaagagaccacccttggtgacatgactggcaaatgcaaatcatggataactccatgtccagaagaaaaggcccaatatgtattgatttctcctgaagccagctcaaggtttgggagctccctcatcaccgtgaggtccaaggcaaagaaccaagtcgtcattgctgctggaaggagttctttgggagcccgactctccggggcacttcacgtctatagccttggctcagattgaagatttcactgcatttccccactctgcccacctctctcatgctgaatcacatccatggtgagcattttgatggacaaagtggcacatccagtggagcggtggtagatcctgatagacatggggctcctgggagtagagagacacactaacagccacaccctctggaaatctgatacagtaaatatatgactgcaccagaaatatg

SEQ ID NO: 371781 - DNA, 3120 bp, Homo sapiens
gtgggtctgcacctggattttggagtcccagtgctgctgcagctctgagcattcccacgtcaccagagaagccggtgggcaatgagatcatgtctgctttcaggttgtggcctggcctgctgatcatgttgggttctctctgccatagaggttcaccgtgtggcctttcaacacacgtagaaataggacacagagctctggagtttcttcagcttcacaatgggcgtgttaactacagagagctgttactagaacaccaggatgcgtatcaggctggaatcgtgtttcctgattgtttttaccctagcatctgcaaaggaggaaaattccatgatgtgtctgagagcactcactggactccgtttcttaatgcaagcgttcattatatccgagagaactatccccttccctgggagaaggacacagagaaactggtagctttcttgtttggaattacttctcacatggcggcagatgtcagctggcatagtctgggccttgaacaaggattccttaggaccatgggagctattgattttcacggctcctattcagaggctcattcggctggtgattttggaggagatgtgttgagccagtttgaatttaattttaattaccttgcacgacgctggtatgtgccagtcaaagatctactgggaatttatgagaaactgtatggtcgaaaagtcatcaccgaaaatgtaatcgttgattgttcacatatccagttcttagaaatgtatggtgagatgctagctgtttccaagttatatcccacttactctacaaagtccccgtttttggtggaacaattccaagagtattttcttggaggactggatgatatggcattttggtccactaatatttaccatctaacaagcttcatgttggagaatgggaccagtgactgcaacctgcctgagaaccctctgttcattgcatgtggcggccagcaaaaccacacccagggctcaaaaatgcagaaaaatgattttcacagaaatttgactacatccctaactgaaagtgttgacaggaatataaactatactgaaagaggagtgttctttagtgtaaattcctggaccccggattccatgtcctttatctacaaggctttggaaaggaacataaggacaatgttcataggtggctctcagttgtcacaaaagcacgtctccagccccttagcatcttacttcttgtcatttccttatgcgaggcttggctgggcaatgacctcagctgacctcaaccaggatgggcacggtgacctcgtggtgggcgcaccaggctacagccgccccggccacatccacatcgggcgcgtgtacctcatctacggcaatgacctgggcctgccacctgttgacctggacctggacaaggaggcccacaggatccttgaaggcttccagccctcaggtcggtttggctcggccttggctgtgttggactttaacgtggacggcgtgcctgacctggccgtgggagctccctcggtgggctccgagcagctcacctacaaaggtgccgtgtatgtctactttggttccaaacaaggaggaatgtcttcttcccctaacatcaccatttcttgccaggacatctactgtaacttgggctggactctcttggctgcagatgtgaatggagacagtgaacccgatctggtcatcggctccccttttgcaccaggtggagggaagcagaagggaattgtggctgcgttttattctggccccagcctgagcgacaaagaaaaactgaacgtggaggcagccaactggacggtgagaggcgaggaagacttctcctggtttggatattcccttcacggtgtcactgtggacaacagaaccttgctgttggttgggagcccgacctggaagaatgccagcaggctgggccatttgttacacatccgagatgagaaaaagagccttgggagggtgtatggctacttcccaccaaacggccaaagctggtttaccatttctggagacaaggcaatggggaaactgggtacttccctttccagtggccacgtactgatgaatgggactctgaaacaagtgctgctggttggagcccctacgtacgatgacgtgtctaaggtggcattcctgaccgtgaccctacaccaaggcggagccactcgcatgtacgcactcatatctgacgcgcagcctctgctgctcagcaccttcagcggagaccgccgcttctcccgatttggtggcgttctgcacttgagtgacctggatgatgatggcttagatgaaatcatcatggcagcccccctgaggatagcagatgtaacctctggactgattgggggagaagacggccgagtatatgtatataatggcaaagagaccacccttggtgacatgactggcaaatgcaaatcatggataactccatgtccagaagaaaaggcccaatatgtattgatttctcctgaagccagctcaaggtttgggagctccctcatcaccgtgaggtccaaggcaaagaaccaagtcgtcattgctgctggaaggagttctttgggagcccgactctccggggcacttcacgtctatagccttggctcagattgaagatttcactgcatttccccactctgcccacctctctcatgctgaatcacatccatggtgagcattttgatggacaaagtggcacatccagtggagcggtggtagatcctgatagacatggggctcctgggagtagagagacacactaacagccagagcctttcaagcaagcaagcaagagggaaggagggagagagggagagagagagagagagagagagagagagagagagagagagagagagagagagaaaagaagcacgagacgcagagagacgacgacgagaagagacgacgacaggaaacgagacgagagagaccagactatatgtgagagagcacacacgatgtcgcgagcgcgagagagagcgagagagagacacagaagagagagagagagagcgagagagagagagagacgagagagagagagagagagagagagagagagagcagagagagaccagcgagcatattcgccaaaagagacactcaaggtggcccaccc

SEQ ID NO: 371782 - DNA, 2898 bp, Homo sapiens
gagccagcggccgcccacgaagctgtcggtgcgcagcagcgccgcagagaggcccgccaggcgcccagcgtagcagcggagctgggccgggccgggcgcaggcccggaggcagggaccaggccgccggcgcgggggcggaggcggcagcctggaaacgtcgacccgaggcgccgggccccacagctccgcagccaaatgcaggtcgccatggcccgggcaacgacggcgacaggaaacaggttgtggcctggcctgctgatcatgttgggttctctctgccatagaggttcaccgtgtggcctttcaacacacgtagaaatagctgttactagaacaccaggatgcgtatcaggctggaatcgtgtttcctgattgtttttaccctagcatctgcaaaggaggaaaattccatgatgtgtctgagagcactcactggactccgtttcttaatgcaagcgttcattatatccgagagaactatccccttccctgggagaaggacacagagaaactggtagctttcttgtttggaattacttctcacatggcggcagatgtcagctggcatagtctgggccttgaacaaggattccttaggaccatgggagctattgattttcacggctcctattcagaggctcattcggctggtgattttggaggagatgtgttgagccagtttgaatttaattttaattaccttgcacgacgctggtatgtgccagtcaaagatctactgggaatttatgagaaactgtatggtcgaaaagtcatcaccgaaaatgtaatcgttgattgttcacatatccagttcttagaaatgtatggtgagatgctagctgtttccaagttatatcccacttactctacaaagtccccgtttttggtggaacaattccaagagtattttcttggaggactggatgatatggcattttggtccactaatatttaccatctaacaagcttcatgttggagaatgggaccagtgactgcaacctgcctgagaaccctctgttcattgcatgtggcggccagcaaaaccacacccagggctcaaaaatgcagaaaaatgattttcacagaaatttgactacatccctaactgaaagtgttgacaggaatataaactatactgaaagaggagtgttctttagtgtaaattcctggaccccggattccatgtcctttatctacaaggctttggaaaggaacataaggacaatgttcataggtggctctcagttgtcacaaaagcacgtctccagccccttagcatcttacttcttgtcatttccttatgcgaggcttggctgggcaatgacctcagctgacctcaaccaggatgggcacggtgacctcgtggtgggcgcaccaggctacagccgccccggccacatccacatcgggcgcgtgtacctcatctacggcaatgacctgggcctgccacctgttgacctggacctggacaaggaggcccacaggatccttgaaggcttccagccctcaggtcggtttggctcggccttggctgtgttggactttaacgtggacggcgtgcctgacctggccgtgggagctccctcggtgggctccgagcagctcacctacaaaggtgccgtgtatgtctactttggttccaaacaaggaggaatgtcttcttcccctaacatcaccatttcttgccaggacatctactgtaacttgggctggactctcttggctgcagatgtgaatggagacagtgaacccgatctggtcatcggctccccttttgcaccaggtggagggaagcagaagggaattgtggctgcgttttattctggccccagcctgagcgacaaagaaaaactgaacgtggaggcagccaactggacggtgagaggcgaggaagacttctcctggtttggatattcccttcacggtgtcactgtggacaacagaaccttgctgttggttgggagcccgacctggaagaatgccagcaggctgggccatttgttacacatccgagatgagaaaaagagccttgggagggtgtatggctacttcccaccaaacggccaaagctggtttaccatttctggagacaaggcaatggggaaactgggtacttccctttccagtggccacgtactgatgaatgggactctgaaacaagtgctgctggttggagcccctacgtacgatgacgtgtctaaggtggcattcctgaccgtgaccctacaccaaggcggagccactcgcatgtacgcactcatatctgacgcgcagcctctgctgctcagcaccttcagcggagaccgccgcttctcccgatttggtggcgttctgcacttgagtgacctggatgatgatggcttagatgaaatcatcatggcagcccccctgaggatagcagatgtaacctctggactgattgggggagaagacggccgagtatatgtatataatggcaaagagaccacccttggtgacatgactggcaaatgcaaatcatggataactccatgtccagaagaaaaggcccaatatgtattgatttctcctgaagccagctcaaggtttgggagctccctcatcaccgtgaggtccaaggcaaagaaccaagtcgtcattgctgctggaaggagttctttgggagcccgactctccggggcacttcacgtctatagccttggctcagattgaagatttcactgcatttccccactctgcccacctctctcatgctgaatcacatccatggtgagcattttgatggacaaagtggcacatccagtggagcggtggtagatcctgatagacatggggctcctgggagtagagagacacactaacagccacaccctctggaaatctgatacagtaaatatatgactgcaccagaaatatg

SEQ ID NO: 371783 - DNA, 2076 bp, Homo sapiens
gagccagcggccgcccacgaagctgtcggtgcgcagcagcgccgcagagaggcccgccaggcgcccagcgtagcagcggagctgggccgggccgggcgcaggcccggaggcagggaccaggccgccggcgcgggggcggaggcggcagcctggaaacgtcgacccgaggcgccgggccccacagctccgcagccaaatgcaggtcgccatggcccgggcaacgacggcgacaggaaacaggttgtggcctggcctgctgatcatgttgggttctctctgccatagaggttcaccgtgtggcctttcaacacacgtagaaataggacacagagctctggagtttcttcagcttcacaatgggcgtgttaactacagagagctgttactagaacaccaggatgcgtatcaggctggaatcgtgtttcctgattgtttttaccctagcatctgcaaaggaggaaaattccatgatgtgtctgagagcactcactggactccgtttcttaatgcaagcgttcattatatccgagagaactatccccttccctgggagaaggtaggcgtggtcctccaatccttaaaatatttagcaccaaacctgccatgcactgtgtttgcacccgcattgaccccatttgtaccgctctgtaagggctgcccaccattccaccttcagtgtcatgcacattgcttggacatagtagatggctagctaatacttgaattacttataaacacggtttgggatacatcacttcatcattttgctccaatagtaattaatctgaaagcacttccaacacatcgtaaaacgtttccaaaagtccttatggttttgtgtgtgtgtgtgtggttttgtttctgtttttgtgtttttcagacagagtgtcgctctgcactccagcctgggcgacagagcgagactccttctcaaaaaaaaaaaaaaaaaaaaaaaaaagtagaaatgagggtataagggtataattaaaattgattttaaaaagccacacaaacagtaataacattgtctctctcctcaatttttttcttcaggcccaatatgtattgatttctcctgaagccagctcaaggtttgggagctccctcatcaccgtgaggtccaaggcaaagaaccaagtcgtcattgctgctggaaggagttctttgggagcccgactctccggggcacttcacgtctatagccttggctcagattgaagatttcactgcatttccccactctgcccacctctctcatgctgaatcacatccatggtgagcattttgatggacaaagtggcacatccagtggagcggtggtagatcctgatagacatggggctcctgggagtagagagacacactaacagccacaccctctggaaatctgatacagtaaatatatgactgcaccagaaatatgtgaaatagcagacattctgcttactcatgtctccttccacagtttacttcctcgctccctttgcatctaaacctttcttctttcccaacttattgcctgtagtcagacctgctgtacaacctatttcctcttcctcttgaatgtctttccaatggctggaaaggtccctctgtggttatctgttagaacagtctctgtacacaattcctcctaaaaacatccttttttaaaaaaagaattgttcagccataaagaaagaacaagatcatgccctttgcagggacatggatggagctggaggccattatccttcataaactattgcaggaacagaaaaccaaacactccatattctcacttgtaagtgggagctaaatgagaacacgtggacacatagagggaaacaacacacactggggcctatgagagggcggaaggtgggaggagggagagatcaggaaaaataactaatggatacttagggtgatgaaataatctgtgtaacaaacccccatgacacacctttatgtatgtaacaaaccagcacttcctgcgcatgtacccctgaacttaaaagttaaaaaaaagttgaacttaaaaataacagattggcccatgccaatcaaagtataatagaaagcatagtatacaga

SEQ ID NO: 371784 - DNA, 1693 bp, Homo sapiens
gagccagcggccgcccacgaagctgtcggtgcgcagcagcgccgcagagaggcccgccaggcgcccagcgtagcagcggagctgggccgggccgggcgcaggcccggaggcagggaccaggccgccggcgcgggggcggaggcggcagcctggaaacgtcgacccgaggcgccgggccccacagctccgcagccaaatgcaggtcgccatggcccgggcaacgacggcgacaggaaacaggttgtggcctggcctgctgatcatgttgggttctctctgccatagaggttcaccgtgtggcctttcaacacacgtagaaataggacacagagctctggagtttcttcagcttcacaatgggcgtgttaactacagagagctgttactagaacaccaggatgcgtatcaggctggaatcgtgtttcctgattgtttttaccctagcatctgcaaaggaggaaaattccatgatgtgtctgagagcactcactggactccgtttcttaatgcaagcgttcattatatccgagagaactatccccttccctgggagaaggtaggcgtggtcctccaatccttaaaatatttagcaccaaacctgccatgcactgtgtttgcacccgcattgaccccatttgtaccgctctgtaagggctgcccaccattccaccttcagtgtcatgcacattgcttggacatagtagatggctagctaatacttgaattacttataaacacggtttgggatacatcacttcatcattttgctccaatagtaattaatctgaaagcacttccaacacatcgtaaaacgtttccaaaagtccttatggttttgtgtgtgtgtgtgtggttttgtttctgtttttgtgtttttcagacagagtgtcgctctgcactccagcctgggcgacagagcgagactccttctcaaaaaaaaaaaaaaaaaaaaaaaaaagtagaaatgagggtataagggtataattaaaattgattttaaaaagccacacaaacagtaataacattgtctctctcctcaatttttttcttcaggcccaatatgtattgatttctcctgaagccagctcaaggtttgggagctccctcatcaccgtgaggtccaaggcaaagaaccaagtcgtcattgctgctggaaggagttctttgggagcccgactctccggggcacttcacgtctatagccttggctcagattgaagatttcactgcatttccccactctgcccacctctctcatgctgaatcacatccatgcttccctctaatggcttcccatgaccacacacaggagtggggaaaccttacttgtacttcatcggttttcttccaaatcagcgacgggagtaacatttttattcctatcaccaaaccacctgaaaaatggactcctaaacttcctcatatgacatcacattaggctaatcatgtaccctcaatatcatcagggtaagtgtatttattctgttattattacatttgtagtgcaagagctggacactctagaatcttccatgcacactactttgggaggcttaacaaatgttctagtgcctaactgtacttaacctccagaaaatattttaaaaggtaggtaggatgttaaagaggatggcagctttcaggcttacaaatattagccatttgttttaaacccaaatctctgtggaaatga

SEQ ID NO: 371785 - DNA, 370 bp, Homo sapiens
cagcttctaggggaagtccttactattcaagatatgttttccacattgtaccagaactaagcatgcactgccctacttctcctttatgatttatgtgccagaatagggattggggtgagcatccttagctgcggttttcagaacttatagatgtgagaaagcggtctgtaaacaaagggaaagtggcatttgagttcaagccaggggatctggccagtgtcttattcatctttatatttctagagcatagcatgatgcctggactaccataggaactcaatagatgttatgaatgagccatgaattctgtcttgtgtcccttacagaaccaagtcgtcattgctgctggaaggagttctttgggagcccg

SEQ ID NO: 371786 - DNA, 376 bp, Homo sapiens
cagggacatggatggagctggaggccattatccttcataaactattgcaggaacagaaaaccaaacactccatattctcacttgtaagtgggagctaaatgagaacacgtggacacatagagggaaacaacacacactggggcctatgagagggcggaaggtgggaggagggagagatcaggaaaaataactaatggatacttagggtgatgaaataatctgtgtaacaaacccccatgacacacctttatgtatgtaacaaaccagcacttcctgcgcatgtacccctgaacttaaaagttaaaaaaaagttgaacttaaaaataacagattggcccatgccaatcaaagtataatagaaagcatagtatacaga

SEQ ID NO: 371787 - DNA, 166 bp, Homo sapiens
aaaaggatgagttgtcttctttagaaaaactgaacgtggaggcagccaactggacggtgagaggcgaggaagacttctcctggtttggatattcccttcacggtgtcactgtggacaacagaaccttgctgttggttgggagcccgacctggaagaatgccagcag

SEQ ID NO: 371788 - DNA, 1090 bp, Homo sapiens
gtgggtctgcacctggattttggagtcccagtgctgctgcagctctgagcattcccacgtcaccagagaagccggtgggcaatgagatcatgtctgctttcaggttgtggcctggcctgctgatcatgttgggttctctctgccatagaggttcaccgtgtggcctttcaacacacgtagaaataggacacagagctctggagtttcttcagcttcacaatgggcgtgttaactacagagagctgttactagaacaccaggatgcgtatcaggctggaatcgtgtttcctgattgtttttaccctagcatctgcaaaggaggaaaattccatgatgtgtctgagagcactcactggactccgtttcttaatgcaagcgttcattatatccgagagaactatccccttccctgggagaaggacacagagaaactggtagctttcttgtttggaattacttctcacatggcggcagatgtcagctggcatagtctgggccttgaacaaggattccttaggaccatgggagctattgattttcacggctcctattcagaggctcattcggctggtgattttggtactgtttatttacatttgctaaattttctcgtggtatagttcacttataatgacatcactactgtgctttaaatatgtgtgtctttaatattttgctggttgcatgtattttctatttaatgttgcagttcatttagagtagagatgtacctcatttaacatagagatgtatttctaaaaacttgtgtctatatgtatttttttgttaaaaaattctacactttgttgttgacatgtcataattttagaaaaactttacttatacattgggttaaaattcattagctagtgtctcctactttcctaatactttagctttaaactagtaaactccaccttttgcctgtagtagtaaattgcttttaaatatttaaactaggtggtgaatggtgtttattaaacccttatggtcgatatttccttaaagtaaaacaaaaaacacctttggttatatggccagttctttcttaatttatatgtttcactaactaagatttttaaaagataat

SEQ ID NO: 371789 - DNA, 1034 bp, Homo sapiens
gtgggtctgcacctggattttggagtcccagtgctgctgcagctctgagcattcccacgtcaccagagaagccggtgggcaatgagatcatgtctgctttcaggttgtggcctggcctgctgatcatgttgggttctctctgccatagaggttcaccgtgtggcctttcaacacacgtagaaatagctgttactagaacaccaggatgcgtatcaggctggaatcgtgtttcctgattgtttttaccctagcatctgcaaaggaggaaaattccatgatgtgtctgagagcactcactggactccgtttcttaatgcaagcgttcattatatccgagagaactatccccttccctgggagaaggacacagagaaactggtagctttcttgtttggaattacttctcacatggcggcagatgtcagctggcatagtctgggccttgaacaaggattccttaggaccatgggagctattgattttcacggctcctattcagaggctcattcggctggtgattttggtactgtttatttacatttgctaaattttctcgtggtatagttcacttataatgacatcactactgtgctttaaatatgtgtgtctttaatattttgctggttgcatgtattttctatttaatgttgcagttcatttagagtagagatgtacctcatttaacatagagatgtatttctaaaaacttgtgtctatatgtatttttttgttaaaaaattctacactttgttgttgacatgtcataattttagaaaaactttacttatacattgggttaaaattcattagctagtgtctcctactttcctaatactttagctttaaactagtaaactccaccttttgcctgtagtagtaaattgcttttaaatatttaaactaggtggtgaatggtgtttattaaacccttatggtcgatatttccttaaagtaaaacaaaaaacacctttggttatatggccagttctttcttaatttatatgtttcactaactaagatttttaaaagataat

SEQ ID NO: 371790 - DNA, 2817 bp, Homo sapiens
gtgggtctgcacctggattttggagtcccagtgctgctgcagctctgagcattcccacgtcaccagagaagccggtgggcaatgagatcatgtctgctttcaggttgtggcctggcctgctgatcatgttgggttctctctgccatagaggttcaccgtgtggcctttcaacacacgtagaaataggacacagagctctggagtttcttcagcttcacaatgggcgtgttaactacagagagctgttactagaacaccaggatgcgtatcaggctggaatcgtgtttcctgattgtttttaccctagcatctgcaaaggaggaaaattccatgatgtgtctgagagcactcactggactccgtttcttaatgcaagcgttcattatatccgagagaactatccccttccctgggagaaggacacagagaaactggtagctttcttgtttggaattacttctcacatggcggcagatgtcagctggcatagtctgggccttgaacaaggattccttaggaccatgggagctattgattttcacggctcctattcagaggctcattcggctggtgattttggaggagatgtgttgagccagtttgaatttaattttaattaccttgcacgacgctggtatgtgccagtcaaagatctactgggaatttatgagaaactgtatggtcgaaaagtcatcaccgaaaatgtaatcgttgattgttcacatatccagttcttagaaatgtatggtgagatgctagctgtttccaagttatatcccacttactctacaaagtccccgtttttggtggaacaattccaagagtattttcttggaggactggatgatatggcattttggtccactaatatttaccatctaacaagcttcatgttggagaatgggaccagtgactgcaacctgcctgagaaccctctgttcattgcatgtggcggccagcaaaaccacacccagggctcaaaaatgcagaaaaatgattttcacagaaatttgactacatccctaactgaaagtgttgacaggaatataaactatactgaaagaggagtgttctttagtgtaaattcctggaccccggattccatgtcctttatctacaaggctttggaaaggaacataaggacaatgttcataggtggctctcagttgtcacaaaagcacgtctccagccccttagcatcttacttcttgtcatttccttatgcgaggcttggctgggcaatgacctcagctgacctcaaccaggatgggcacggtgacctcgtggtgggcgcaccaggctacagccgccccggccacatccacatcgggcgcgtgtacctcatctacggcaatgacctgggcctgccacctgttgacctggacctggacaaggaggcccacaggatccttgaaggcttccagccctcaggtcggtttggctcggccttggctgtgttggactttaacgtggacggcgtgcctgacctggccgtgggagctccctcggtgggctccgagcagctcacctacaaaggtgccgtgtatgtctactttggttccaaacaaggaggaatgtcttcttcccctaacatcaccatttcttgccaggacatctactgtaacttgggctggactctcttggctgcagatgtgaatggagacagtgaacccgatctggtcatcggctccccttttgcaccaggtggagggaagcagaagggaattgtggctgcgttttattctggccccagcctgagcgacaaagaaaaactgaacgtggaggcagccaactggacggtgagaggcgaggaagacttctcctggtttggatattcccttcacggtgtcactgtggacaacagaaccttgctgttggttgggagcccgacctggaagaatgccagcaggctgggccatttgttacacatccgagatgagaaaaagagccttgggagggtgtatggctacttcccaccaaacggccaaagctggtttaccatttctggagacaaggcaatggggaaactgggtacttccctttccagtggccacgtactgatgaatgggactctgaaacaagtgctgctggttggagcccctacgtacgatgacgtgtctaaggtggcattcctgaccgtgaccctacaccaaggcggagccactcgcatgtacgcactcatatctgacgcgcagcctctgctgctcagcaccttcagcggagaccgccgcttctcccgatttggtggcgttctgcacttgagtgacctggatgatgatggcttagatgaaatcatcatggcagcccccctgaggatagcagatgtaacctctggactgattgggggagaagacggccgagtatatgtatataatggcaaagagaccacccttggtgacatgactggcaaatgcaaatcatggataactccatgtccagaagaaaaggcccaatatgtattgatttctcctgaagccagctcaaggtttgggagctccctcatcaccgtgaggtccaaggcaaagaaccaagtcgtcattgctgctggaaggagttctttgggagcccgactctccggggcacttcacgtctatagccttggctcagattgaagatttcactgcatttccccactctgcccacctctctcatgctgaatcacatccatggtgagcattttgatggacaaagtggcacatccagtggagcggtggtagatcctgatagacatggggctcctgggagtagagagacacactaacagccacaccctctggaaatctgatacagtaaatatatgactgcaccagaaatatg

SEQ ID NO: 371791 - DNA, 3087 bp, Homo sapiens
gtgggtctgcacctggattttggagtcccagtgctgctgcagctctgagcattcccacgtcaccagagaagccggtgggcaatgagatcatgtctgctttcaggttgtggcctggcctgctgatcatgttgggttctctctgccatagaggttcaccgtgtggcctttcaacacacgtagaaataggacacagagctctggagtttcttcagcttcacaatgggcgtgttaactacagagagctgttactagaacaccaggatgcgtatcaggctggaatcgtgtttcctgattgtttttaccctagcatctgcaaaggaggaaaattccatgatgtgtctgagagcactcactggactccgtttcttaatgcaagcgttcattatatccgagagaactatccccttccctgggagaaggacacagagaaactggtagctttcttgtttggaattacttctcacatggcggcagatgtcagctggcatagtctgggccttgaacaaggattccttaggaccatgggagctattgattttcacggctcctattcagaggctcattcggctggtgattttggaggagatgtgttgagccagtttgaatttaattttaattaccttgcacgacgctggtatgtgccagtcaaagatctactgggaatttatgagaaactgtatggtcgaaaagtcatcaccgaaaatgtaatcgttgattgttcacatatccagttcttagaaatgtatggtgagatgctagctgtttccaagttatatcccacttactctacaaagtccccgtttttggtggaacaattccaagagtattttcttggaggactggatgatatggcattttggtccactaatatttaccatctaacaagcttcatgttggagaatgggaccagtgactgcaacctgcctgagaaccctctgttcattgcatgtggcggccagcaaaaccacacccagggctcaaaaatgcagaaaaatgattttcacagaaatttgactacatccctaactgaaagtgttgacaggaatataaactatactgaaagaggagtgttctttagtgtaaattcctggaccccggattccatgtcctttatctacaaggctttggaaaggaacataaggacaatgttcataggtggctctcagttgtcacaaaagcacgtctccagccccttagcatcttacttcttgtcatttccttatgcgaggcttggctgggcaatgacctcagctgacctcaaccaggatgggcacggtgacctcgtggtgggcgcaccaggctacagccgccccggccacatccacatcgggcgcgtgtacctcatctacggcaatgacctgggcctgccacctgttgacctggacctggacaaggaggcccacaggatccttgaaggcttccagccctcaggtcggtttggctcggccttggctgtgttggactttaacgtggacggcgtgcctgacctggccgtgggagctccctcggtgggctccgagcagctcacctacaaaggtgccgtgtatgtctactttggttccaaacaaggaggaatgtcttcttcccctaacatcaccatttcttgccaggacatctactgtaacttgggctggactctcttggctgcagatgtgaatggagacagtgaacccgatctggtcatcggctccccttttgcaccaggtggagggaagcagaagggaattgtggctgcgttttattctggccccagcctgagcgacaaagaaaaactgaacgtggaggcagccaactggacggtgagaggcgaggaagacttctcctggtttggatattcccttcacggtgtcactgtggacaacagaaccttgctgttggttgggagcccgacctggaagaatgccagcaggctgggccatttgttacacatccgagatgagaaaaagagccttgggagggtgtatggctacttcccaccaaacggccaaagctggtttaccatttctggagacaaggcaatggggaaactgggtacttccctttccagtggccacgtactgatgaatgggactctgaaacaagtgctgctggttggagcccctacgtacgatgacgtgtctaaggtggcattcctgaccgtgaccctacaccaaggcggagccactcgcatgtacgcactcatatctgacgcgcagcctctgctgctcagcaccttcagcggagaccgccgcttctcccgatttggtggcgttctgcacttgagtgacctggatgatgatggcttagatgaaatcatcatggcagcccccctgaggatagcagatgtaacctctggactgattgggggagaagacggccgagtatatgtatataatggcaaagagaccacccttggtgacatgactggcaaatgcaaatcatggataactccatgtccagaagaaaaggcccaatatgtattgatttctcctgaagccagctcaaggtttgggagctccctcatcaccgtgaggtccaaggcaaagaaccaagtcgtcattgctgctggaaggagttctttgggagcccgactctccggggcacttcacgtctatagccttggctcagattgaagatttcactgcatttccccactctgcccacctctctcatgctgaatcacatccatgcttccctctaatggcttcccatgaccacacacaggagtggggaaaccttacttgtacttcatcggttttcttccaaatcagcgacgggagtaacatttttattcctatcaccaaaccacctgaaaaatggactcctaaacttcctcatatgacatcacattaggctaatcatgtaccctcaatatcatcagggtaagtgtatttattctgttattattacatttgtagtgcaagagctggacactctagaatcttccatgcacactactttgggaggcttaacaaatgttctagtgcctaactgtacttaacctccagaaaatattttaaaaggtaggtaggatgttaaagaggatggcagctttcaggcttacaaatattagccatttgttttaaacccaaatctctgtggaaatga

SEQ ID NO: 371792 - DNA, 2702 bp, Homo sapiens
  misc_feature (2638)..(2638): n is a, c, g, or t
  misc_feature (2702)..(2702): n is a, c, g, or t
gagccagcggccgcccacgaagctgtcggtgcgcagcagcgccgcagagaggcccgccaggcgcccagcgtagcagcggagctgggccgggccgggcgcaggcccggaggcagggaccaggccgccggcgcgggggcggaggcggcagcctggaaacgtcgacccgaggcgccgggccccacagctccgcagccaaatgcaggtcgccatggcccgggcaacgacggcgacaggaaacaggttgtggcctggcctgctgatcatgttgggttctctctgccatagaggttcaccgtgtggcctttcaacacacgtagaaataggacacagagctctggagtttcttcagcttcacaatgggcgtgttaactacagagagctgttactagaacaccaggatgcgtatcaggctggaatcgtgtttcctgattgtttttaccctagcatctgcaaaggaggaaaattccatgatgtgtctgagagcactcactggactccgtttcttaatgcaagcgttcattatatccgagagaactatccccttccctgggagaaggacacagagaaactggtagctttcttgtttggaattacttctcacatggcggcagatgtcagctggcatagtctgggccttgaacaaggattccttaggaccatgggagctattgattttcacggctcctattcagaggctcattcggctggtgattttggaggagatgtgttgagccagtttgaatttaattttaattaccttgcacgacgctggtatgtgccagtcaaagatctactgggaatttatgagaaactgtatggtcgaaaagtcatcaccgaaaatgtaatcgttgattgttcacatatccagttcttagaaatgtatggtgagatgctagctgtttccaagttatatcccacttactctacaaagtccccgtttttggtggaacaattccaagagtattttcttggaggactggatgatatggcattttggtccactaatatttaccatctaacaagcttcatgttggagaatgggaccagtgactgcaacctgcctgagaaccctctgttcattgcatgtggcggccagcaaaaccacacccagggctcaaaaatgcagaaaaatgattttcacagaaatttgactacatccctaactgaaagtgttgacaggaatataaactatactgaaagaggagtgttctttagtgtaaattcctggaccccggattccatgtcctttatctacaaggctttggaaaggaacataaggacaatgttcataggtggctctcagttgtcacaaaagcacgtctccagccccttagcatcttacttcttgtcatttccttatgcgaggcttggctgggcaatgacctcagctgacctcaaccaggatgggcacggtgacctcgtggtgggcgcaccaggctacagccgccccggccacatccacatcgggcgcgtgtacctcatctacggcaatgacctgggcctgccacctgttgacctggacctggacaaggaggcccacaggatccttgaaggcttccagccctcaggtcggtttggctcggccttggctgtgttggactttaacgtggacggcgtgcctgacctggccgtgggagctccctcggtgggctccgagcagctcacctacaaaggtgccgtgtatgtctactttggttccaaacaaggaggaatgtcttcttcccctaacatcaccatttcttgccaggacatctactgtaacttgggctggactctcttggctgcagatgtgaatggagacagtgaacccgatctggtcatcggctccccttttgcaccaggtggagggaagcagaagggaattgtggctgcgttttattctggccccagcctgagcgacaaagaaaaactgaacgtggaggcagccaactggacggtgagaggcgaggaagacttctcctggtttggatattcccttcacggtgtcactgtggacaacagaaccttgctgttggttgggagcccgacctggaagaatgccagcaggctgggccatttgttacacatccgagatgagaaaaagagccttgggagggtgtatggctacttcccaccaaacggccaaagctggtttaccatttctggagacaaggcaatggggaaactgggtacttccctttccagtggccacgtactgatgaatgggactctgaaacaagtgctgctggttggagcccctacgtacgatgacgtgtctaaggtggcattcctgaccgtgaccctacaccaaggcggagccactcgcatgtacgcactcatatctgacgcgcagcctctgctgctcagcaccttcagcggagaccgccgcttctcccgatttggtggcgttctgcacttgagtgacctggatgatgatggcttagatgaaatcatcatggcagcccccctgaggatagcagatgtaacctctggactgattgggggagaagacggccgagtatatgtatataatggcaaagagaccacccttggtgacatgactggcaaatgcaaatcatggataactccatgtccagaagaaaagcaccgggaggtccaagcaaagaaccaagtcgtcatgctgctggaggagtccttnggaagccgacttttcgggcacttacgttatagccttgctttgagttactacatttccccttgcn

SEQ ID NO: 371793 - DNA, 1227 bp, Homo sapiens
gagccagcggccgcccacgaagctgtcggtgcgcagcagcgccgcagagaggcccgccaggcgcccagcgtagcagcggagctgggccgggccgggcgcaggcccggaggcagggaccaggccgccggcgcgggggcggaggcggcagcctggaaacgtcgacccgaggcgccgggccccacagctccgcagccaaatgcaggtcgccatggcccgggcaacgacggcgacaggaaacaggttgtggcctggcctgctgatcatgttgggttctctctgccatagaggttcaccgtgtggcctttcaacacacgtagaaataggacacagagctctggagtttcttcagcttcacaatgggcgtgttaactacagagagctgttactagaacaccaggatgcgtatcaggctggaatcgtgtttcctgattgtttttaccctagcatctgcaaaggaggaaaattccatgatgtgtctgagagcactcactggactccgtttcttaatgcaagcgttcattatatccgagagaactatccccttccctgggagaaggacacagagaaactggtagctttcttgtttggaattacttctcacatggcggcagatgtcagctggcatagtctgggccttgaacaaggattccttaggaccatgggagctattgattttcacggctcctattcagaggctcattcggctggtgattttggtactgtttatttacatttgctaaattttctcgtggtatagttcacttataatgacatcactactgtgctttaaatatgtgtgtctttaatattttgctggttgcatgtattttctatttaatgttgcagttcatttagagtagagatgtacctcatttaacatagagatgtatttctaaaaacttgtgtctatatgtatttttttgttaaaaaattctacactttgttgttgacatgtcataattttagaaaaactttacttatacattgggttaaaattcattagctagtgtctcctactttcctaatactttagctttaaactagtaaactccaccttttgcctgtagtagtaaattgcttttaaatatttaaactaggtggtgaatggtgtttattaaacccttatggtcgatatttccttaaagtaaaacaaaaaacacctttggttatatggccagttctttcttaatttatatgtttcactaactaagatttttaaaagataat

SEQ ID NO: 371794 - DNA, 308 bp, Homo sapiens
agacgccaaatcagcgaagctggtcagcagcgacacaccataggaggtatgttccacaggttccctgagcacgaaattctagccagacttcccaccctattgggatatcccccgtaagaccttctacatttgggtccggcagtgctccagtcatttactagggccaaggaaaacctggactgcagactccatgtgatgtcagaaagaaggcaagaccaagagggcgaaaaaaaagtagatgctgtcatgctttctgtacagcctgcagaaccatgagctaagtaaacctcttttctttataaattact

SEQ ID NO: 371795 - DNA, 99 bp, Homo sapiens
cgtgcagctggtgagccttcaccatgggcccaggagaagcggatcatatgaacaaggcctggggatgggacagttgagctggggctgcaggggctaagg

SEQ ID NO: 371796 - DNA, 443 bp, Homo sapiens
cgattctcctgcctcagccttccgagtagctgggattacaggcatgtgccaccacgcccggctaattttgtacttttagtagagatggggtttctccatgttggtcaggctggtcttcaactcccgacctcaggtgatccgcccgtcttggcctcccaaagtggtgggattacaggcatgagccaccgcgcctggcctgaaaatttttagtacttttaatatacccttgtgcacaggctagttatgtggaattatttttgacagttttaaatagttggattttgtgtgtaggggtgcaggatcttgctctgttgctggggctggagtgcagtggcgcgatcatagctcactgcagcctcaaactcctgggctcaagagatgcttccatctcagcctctggtgtagcaagcactacaggagcaggccaccacgcccggataatt

SEQ ID NO: 371797 - DNA, 900 bp, Homo sapiens
ttatttattccactttaacggtgattgtgtgcgaggtcctcgtttgtcctttggctttgctccatgtaccctatctcggtgtttttgttaactgtcatttatattcccaaaggattgtctctacattagcaccattttctgacattgacaatggctacggtctatacattgtacccaagtctttgtatcactactatccgggccttttccccctgtctagtagaaatagacttcctgcatcatctaagggtgcgggcccgtctcggcgattatagaacctaggagttgaacagctgaaatcagatgatagcaatggtatagaaaataatgtccccaggcatagaaaaaatgagtctctgggccagtgaatacaaaacatcatgtcgagaatcattggaagatatacagagttcgtatttcagctttgtttatccttcctgttaagagcctctgagtttttagttttaaaaggatgaaaagcttatgcaacatgctcagcaggagcttcatcaacgatatatgtcagatctaaagggtctcactgtgccacccagctggagtatagtggtgcaaacacagcttgctgcaacctcaatctcctggactcgagtgatcctcctgcctcagcttcctgagtaactgggactacaggcgtgtaccaccatgcttggctaattgttaaatgttttgtagagatagggtctcactatgttgcccagactggtctcgaactcctgggctcaagtgatcctctcacctcagatttccaaagtgttggattataggtgtaagccactgagcccagtttgaatgcttttttatatattttttggccatttgtatgtcatctttggagaaatgtctattcaaatcctttgctcattaaaattattttctgat

SEQ ID NO: 371798 - DNA, 4274 bp, Homo sapiens
gagggccgggcgcggtaagagcgtctcgggggagtggggcaaggcggccgggcccctcccattccgccttttcttcagcgtcctacccgcggcactggctgcgagcgccgggccacctgcgagtgtgcgcagggactctggacacccgcggcggcgagctgagggagcagtctccacgaggacccaggcggaccctctggcgccatgcgcgccctccccggcctgctggaggccagggcgcgtacgccccggctgctcctcctccagtgccttctcgctgccgcgcgcccaagctcggcggacggcagtgccccagattcgccttttacaagtccacctctcagagaagaaataatggcaaataacttttccttggagagtcataacatatcactgactgaacattctagtatgccagtagaaaaaaatatcactttagaaaggccttctaatgtaaatctcacatgccagttcacaacatctggggatttgaatgcagtaaatgtgacttggaaaaaagatggtgaacaacttgagaataattatcttgtcagtgcaacaggaagcaccttgtatacccaatacaggttcaccatcattaatagcaaacaaatgggaagttattcttgtttctttcgagaggaaaaggaacaaaggggaacatttaatttcaaagtccctgaacttcatgggaaaaacaagccattgatctcttacgtaggggattctactgtcttgacatgtaaatgtcaaaattgttttcctttaaattggacctggtacagtagtaatgggagtgtaaaggttcctgttggtgttcaaatgaataaatatgtgatcaatggaacatatgctaacgaaacaaagctgaagataacacaacttttggaggaagatggggaatcttactggtgccgtgcactattccaattaggcgagagtgaagaacacattgagcttgtggtgctgagctatttggtgcccctcaaaccatttcttgtaatagtggctgaggtgattcttttagtggccaccattctgctttgtgaaaagtacacacaaaagaaaaagaagcactcagatgaggggaaagaatttgagcagattgaacagctgaaatcagatgatagcaatggtatagaaaataatgtccccaggcatagaaaaaatgagtctctgggccagtgaatacaaaacatcatgtcgagaatcattggaagatatacagagttcgtatttcagctttgtttatccttcctgttaagagcctctgagtttttagttttaaaaggatgaaaagcttatgcaacatgctcagcaggagcttcatcaacgatatatgtcagatctaaaggtatattttcattctgtaattatgttacataaaagcaatgtaaatcagaataaatatgttagaccagaataaaattaattatattctggtcttcaaaggacacacagaacagatatcagcagaatcacttaatacttcatagaacaaaaatcactcaaaacctgtttataaccaaagaattcatgaaaaagaaagcctttgccatttgtcttagaaagttattttttaaaaaaaaatcatacttactattagtatctatggaagtatatgtaacaatttttatgtaaaggtcatctttctgtgatagtgaaaaaatatgtctttactaagttgaaatgaatactttctgcctttgctaatgatagttattctacaatctccacaagaaaaatataccttttatccggaaatattggtttaaggcaaataaataaaactgtgcttgctctaaagctctgcactacaaaagcaaattttccagtctttattccactcataaccactgctttccccaccaggctaaagtgcttcttagtcttaaatagggtttttaacttcataaggtacaccattgtttatgttttagggtgcaggtccatatagtcgtaatacttaaaacactgctacactgatgcttttgtggctcatggtttcctggttctttgatttaacacctggcttcctggtatctatggctggttaaatatctaaacctgcattattagtgctttacaataataattcccttgactgaagtccagaaatactaaagcacttcttttttattgctgtgaatgccttagacttatcttccaaaataggatacttcgtttctattgcatatataactgaaatattttataaactcactgtaatcaaatcttataaaatctgaatcaacatgaaaagttgtcaatgcttgaatgaatactaaaatcataccacaagatactagataacataaatgaccatgaagtgtcccactgctcaaagggcaacaactttaagaacagaagcaaagagtggtggtgtggaacccaagattcttggcgactagggaatttaaaggttggggaggaggaattcaatgatttgacaagaaatactttataaaaatttgctccatgtattggctaagaaaaatataataaaattttggtagtgaaaattgtatcactaatgtttaccaatattactagtatgaataatacacataaggtagtgacttggaagctgctcaatactttgttgctataacaaaatgcaatattttgttgtaaagcatcttaactacacatataagtttgctgaacttgaatacatcccggtaatggcaaacttcattttattcttggttttcattttattctggtctcagggccatacatttattttagtttaattaattattattttgacaacattacttgggtaatatctatataatggtagataaccaatcagttagcttaattaatctaagctatttgaattcagggaaatattagtcaaatctgctgtttgactaaatacaattcaaagcagtgtatttgtgacttggaatatagaacacaaacaaatgtgtaacccatctgcagtatgcattcttccattttaccaccactaaccattgaggctcatacaattttcaagcaacaagcattgcttcccaaaggtaaaataatcaggaatatttctatagtaaatggagtttttaattggcaatactgtttatttttttctagcaaagacaatttatctcagtaaccttaaataggaaaagtactcaaaaattaaagttgacttttggctttttgtagtctctctggaggacttccagaaaattaccactgttggattttaatctgcttccattaaccaatcttacagagatgataaatgaattaactaatattgaccaaatataaattgactgcaaataataagccgcataaaagttgaagtaggaaaactactccaagtttatatattaggcaccttggggaattctcttagtctttccagctaacaaggattttcagcataataagtagatttaatgatggcataaaattcccagatactttcatatacattttttgccaaagtgtaaatcttctccttttgcagtctttttgttattatcccaacatctagctgctcaggccctaatttagaactcattctgatattttcttcttctgtattaattaatacttatgggtcatgaatccctgctcctttgacctttttaatagctcatgaatccatcccattgcctccccaactctgcccacacctgctgcaacactaatgccttgattttcctacctcagtctccttttctattaatccctcttttgcgtggctgcctgagtccactttctcaaacacaaacctcactatgcaactttggaatctctgtaggctcacctttgccatttcttaatattgcattctccaaattgctaatctctatccagtctcttgaactagacttggcacatggagattccgctcagaaagtgctcttcacacttctacctgcttgactaaccccagattatctttcaagactttaatctgatcttgtgtcttagagaagcccccatacctggtagagcatgtaccatcttacatgcttaaataactccacatttatttgtgtttattactctgtgttataaatatacatttgttggtctctctcttggattattttgtttctttgtcctgtaactaccactgaaagggtgcaatacagctttcttgaaatgtgtattgaacggatgaatgtataaataaaaattaaattttgtaaatttctgcttattcttagaaaaagaatctaaattgtgacaaatcagaattgaaaaaagtattctaataaagaaaaacaagcttttataacttcagtatt

SEQ ID NO: 371799 - DNA, 4175 bp, Homo sapiens
gagggccgggcgcggtaagagcgtctcgggggagtggggcaaggcggccgggcccctcccattccgccttttcttcagcgtcctacccgcggcactggctgcgagcgccgggccacctgcgagtgtgcgcagggactctggacacccgcggcggcgagctgagggagcagtctccacgaggacccaggcggaccctctggcgccatgcgcgccctccccggcctgctggaggccagggcgcgtacgccccggctgctcctcctccagtgccttctcgctgccgcgcgcccaagctcggcggacggcagtgccccagattcgccttttacaagtccacctctcagagaagaaataatggcaaataacttttccttggagagtcataacatatcactgactgaacattctagtatgccagtagaaaaaaatatcactttagaaaggccttctaatgtaaatctcacatgccagttcacaacatctggggatttgaatgcagtaaatgtgacttggaaaaaagatggtgaacaacttgagaataattatcttgtcagtgcaacaggaagcaccttgtatacccaatacaggttcaccatcattaatagcaaacaaatgggaagttattcttgtttctttcgagaggaaaaggaacaaaggggaacatttaatttcaaagtccctgaacttcatgggaaaaacaagccattgatctcttacgtaggggattctactgtcttgacatgtaaatgtcaaaattgttttcctttaaattggacctggtacagtagtaatgggagtgtaaaggttcctgttggtgttcaaatgaataaatatgtgatcaatggaacatatgctaacgaaacaaagctgaagataacacaacttttggaggaagatggggaatcttactggtgccgtgcactattccaattaggcgagagtgaagaacacattgagcttgtggtgctgagctatttggtgcccctcaaaccatttcttgtaatagtggctgaggtgattcttttagtggccaccattctgctttgtgaaaagtacacacaaaagaaaaagaagcactcagatgaggggaaagaatttgagcagattgaacagctgaaatcagatgatagcaatggtatagaaaataatgtccccaggcatagaaaaaatgagtctctgggccagtgaatacaaaacatcatgtcgagaatcattggaagatatacagagttcgtatttcagctttgtttatccttcctgttaagagcctctgagtttttagttttaaaaggatgaaaagcttatgcaacatgctcagcaggagcttcatcaacgatatatgtcagatctaaaggtatattttcattctgtaattatgttacataaaagcaatgtaaatcagaataaatatgttagaccagaataaaattaattatattctggtcttcaaaggacacacagaacagatatcagcagaatcacttaatacttcatagaacaaaaatcactcaaaacctgtttataaccaaagaattcatgaaaaagaaagcctttgccatttgtcttagaaagttattttttaaaaaaaaatcatacttactattagtatctatggaagtatatgtaacaatttttatgtaaaggtcatctttctgtgatagtgaaaaaatatgtctttactaagttgaaatgaatactttctgcctttgctaatgatagttattctacaatctccacaagaaaaatataccttttatccggaaatattggtttaaggcaaataaataaaactgtgcttgctctaaagctctgcactacaaaagcaaattttccagtctttattccactcataaccactgctttccccaccaggctaaagtgcttcttagtcttaaatagggtttttaacttcataaggtacaccattgtttatgttttagggtgcaggtccatatagtcgtaatacttaaaacactgctacactgatgcttttgtggctcatggtttcctggttctttgatttaacacctggcttcctggtatctatggctggttaaatatctaaacctgcattattagtgctttacaataataattcccttgactgaagtccagaaatactaaagcacttcttttttattgctgtgaatgccttagacttatcttccaaaataggatacttcgtttctattgcatatataactgaaatattttataaactcactgtaatcaaatcttataaaatctgaatcaacatgaaaagttgtcaatgcttgaatgaatactaaaatcataccacaagatactagataacataaatgaccatgaagtgtcccactgctcaaagggcaacaactttaagaacagaagcaaagagtggtggtgtggaacccaagattcttggcgactagggaatttaaaggttggggaggaggaattcaatgatttgacaagaaatactttataaaaatttgctccatgtattggctaagaaaaatataataaaattttggtagtgaaaattgtatcactaatgtttaccaatattactagtatgaataatacacataaggtagtgacttggaagctgctcaatactttgttgctataacaaaatgcaatattttgttgtaaagcatcttaactacacatataagtttgctgaacttgaatacatcccggtaatggcaaacttcattttattcttggttttcattttattctggtctcagggccatacatttattttagtttaattaattattattttgacaacattacttgggtaatatctatataatggtagataaccaatcagttagcttaattaatctaagctatttgaattcagggaaatattagtcaaatctgctgtttgactaaatacaattcaaagcagtgtatttgtgacttggaatatagaacacaaacaaatgtgtaacccatctgcagtatgcattcttccattttaccaccactaaccattgaggctcatacaattttcaagcaacaagcattgcttcccaaaggtaaaataatcaggaatatttctatagtaaatggagtttttaattggcaatactgtttatttttttctagcaaagacaatttatctcagtaaccttaaataggaaaagtactcaaaaattaaagttgacttttggctttttgtagtctctctggaggacttccagaaaattaccactgttggattttaatctgcttccattaaccaatcttacagagatgataaatgaattaactaatattgaccaaatataaattgactgcaaataataagccgcataaaagttgaagtaggaaaactactccaagtttatatattaggcaccttggggaattctcttagtctttccagctaacaaggattttcagcataataagtagatttaatgatggcataaaattcccagatactttcatatacattttttgccaaagtgtaaatcttctccttttgcagtctttttgttattatcccaacatctagctgctcaggccctaatttagaactcattctgatattttcttcttctgtattaattaatacttatgggtcatgaatccctgctcctttgacctttttaatagctcatgaatccatcccattgcctccccaactctgcccacacctgctgcaacactaatgccttgattttcctacctcagtctccttttctattaatccctcttttgcgtggctgcctgagtccactttctcaaacacaaacctcactatgcaactttggaatctctgtaggctcacctttgccatttcttaatattgcattctccaaattgctaatctctatccagtctcttgaactagacttggcacatggagattccgctcagaaagtgctcttcacacttctacctgcttgactaaccccagattatctttcaagactttaatctgatcttgtgtcttagagaagcccccatacctggtagagcatgtaccatcttacatgcttaaataactccacatttatttgtgtttattactctgtgttataaatatacatttgttggtctctctcttggattattttgtttctttgtcctgtaactaccactgaaagggtgcaatacagctttcttgaaatgtgtattgaacggatgaatgtataaataaaaattaaattttgtaa

SEQ ID NO: 371800 - DNA, 617 bp, Homo sapiens
cgaactctgcattgctgggttagctcccgaacttacgcaggctggttccatccaaacttgtcatgggtggtcagtccactttctcaaacacaaacctcactatgcaactttggaatctctgtaggctcacctttgccatttcttaatattgcattctccaaattgctaatctctatccagtctcttgaactagacttggcacatggagattccgctcagaaagtgctcttcacacttctacctgcttgactaaccccagattatctttcaagactttaatctgatcttgtgtcttagagaagcccccatacctggtagagcatgtaccatcttacatgcttaaataactccacatttatttgtgtttattactctgtgttataaatatacatttgttggtctctctcttggattattttgtttctttgtcctgtaactaccactgaaagggtgcaatacagctttcttgaaatgtgtattgaacggatgaatgtataaataaaaattaaattttgtaaatttctgcttattcttagaaaaagaatctaaattgtgacaaatcagaattgaaaaaagtattctaataaagaaaaacaagcttttataacttcagtatt

SEQ ID NO: 371801 - DNA, 1720 bp, Homo sapiens
gagggccgggcgcggtaagagcgtctcgggggagtggggcaaggcggccgggcccctcccattccgccttttcttcagcgtcctacccgcggcactggctgcgagcgccgggccacctgcgagtgtgcgcagggactctggacacccgcggcggcgagctgagggagcagtctccacgaggacccaggcggaccctctggcgccatgcgcgccctccccggcctgctggaggccagggcgcgtacgccccggctgctcctcctccagtgccttctcgctgccgcgcgcccaagctcggcggacggcagtgccccagattcgccttttacaagtccacctctcagagaagaaataatggcaaataacttttccttggagagtcataacatatcactgactgaacattctagtatgccagtagaaaaaaatatcactttagaaaggccttctaatgtaaatctcacatgccagttcacaacatctggggatttgaatgcagtaaatgtgacttggaaaaaagatggtgaacaacttgagaataattatcttgtcagtgcaacaggaagcaccttgtatacccaatacaggttcaccatcattaatagcaaacaaatgggaagttattcttgtttctttcgagaggaaaaggaacaaaggggaacatttaatttcaaagtccctgaacttcatgggaaaaacaagccattgatctcttacgtaggggattctactgtcttgacatgtaaatgtcaaaattgttttcctttaaattggacctggtacagtagtaatgggagtgtaaaggttcctgttggtgttcaaatgaataaatatgtgatcaatggaacatatgctaacgaaacaaagctgaagataacacaacttttggaggaagatggggaatcttactggtgccgtgcactattccaattaggcgagagtgaagaacacattgagcttgtggtgctgagctatttggtgcccctcaaaccatttcttgtaatagtggctgaggtgattcttttagtggccaccattctgctttgtgaaaagtacacacaaaagaaaaagaagcactcagatgaggggaaagaatttgagcagattgaacagctgaaatcagatgatagcaatggtatagaaaataatgtccccaggcatagaaaaaatgagtctctgggccagtgaatacaaaacatcatgtcgagaatcattggaagatatacagagttcgtatttcagctttgtttatccttcctgttaagagcctctgagtttttagttttaaaaggatgaaaagcttatgcaacatgctcagcaggagcttcatcaacgatatatgtcagatctaaagggtctcactgtgccacccagctggagtatagtggtgcaaacacagcttgctgcaacctcaatctcctggactcgagtgatcctcctgcctcagcttcctgagtaactgggactacaggcgtgtaccaccatgcttggctaattgttaaatgttttgtagagatagggtctcactatgttgcccagactggtctcgaactcctgggctcaagtgatcctctcacctcagatttccaaagtgttggattataggtgtaagccactgagcccagtttgaatgcttttttatatattttttggccatttgtatgtcatctttggagaaatgtctattcaaatcctttgctcattaaaattattttctgat

SEQ ID NO: 371802 - DNA, 4050 bp, Homo sapiens
aattccccaggagtgcagaggttctcagaactgcaatactctgagatgaattttgaaagcaaaagcaacagtggggatcagcatcaacttggattcgccttttacaagtccacctctcagagaagaaataatggcaaataacttttccttggagagtcataacatatcactgactgaacattctagtatgccagtagaaaaaaatatcactttagaaaggccttctaatgtaaatctcacatgccagttcacaacatctggggatttgaatgcagtaaatgtgacttggaaaaaagatggtgaacaacttgagaataattatcttgtcagtgcaacaggaagcaccttgtatacccaatacaggttcaccatcattaatagcaaacaaatgggaagttattcttgtttctttcgagaggaaaaggaacaaaggggaacatttaatttcaaagtccctgaacttcatgggaaaaacaagccattgatctcttacgtaggggattctactgtcttgacatgtaaatgtcaaaattgttttcctttaaattggacctggtacagtagtaatgggagtgtaaaggttcctgttggtgttcaaatgaataaatatgtgatcaatggaacatatgctaacgaaacaaagctgaagataacacaacttttggaggaagatggggaatcttactggtgccgtgcactattccaattaggcgagagtgaagaacacattgagcttgtggtgctgagctatttggtgcccctcaaaccatttcttgtaatagtggctgaggtgattcttttagtggccaccattctgctttgtgaaaagtacacacaaaagaaaaagaagcactcagatgaggggaaagaatttgagcagattgaacagctgaaatcagatgatagcaatggtatagaaaataatgtccccaggcatagaaaaaatgagtctctgggccagtgaatacaaaacatcatgtcgagaatcattggaagatatacagagttcgtatttcagctttgtttatccttcctgttaagagcctctgagtttttagttttaaaaggatgaaaagcttatgcaacatgctcagcaggagcttcatcaacgatatatgtcagatctaaaggtatattttcattctgtaattatgttacataaaagcaatgtaaatcagaataaatatgttagaccagaataaaattaattatattctggtcttcaaaggacacacagaacagatatcagcagaatcacttaatacttcatagaacaaaaatcactcaaaacctgtttataaccaaagaattcatgaaaaagaaagcctttgccatttgtcttagaaagttattttttaaaaaaaaatcatacttactattagtatctatggaagtatatgtaacaatttttatgtaaaggtcatctttctgtgatagtgaaaaaatatgtctttactaagttgaaatgaatactttctgcctttgctaatgatagttattctacaatctccacaagaaaaatataccttttatccggaaatattggtttaaggcaaataaataaaactgtgcttgctctaaagctctgcactacaaaagcaaattttccagtctttattccactcataaccactgctttccccaccaggctaaagtgcttcttagtcttaaatagggtttttaacttcataaggtacaccattgtttatgttttagggtgcaggtccatatagtcgtaatacttaaaacactgctacactgatgcttttgtggctcatggtttcctggttctttgatttaacacctggcttcctggtatctatggctggttaaatatctaaacctgcattattagtgctttacaataataattcccttgactgaagtccagaaatactaaagcacttcttttttattgctgtgaatgccttagacttatcttccaaaataggatacttcgtttctattgcatatataactgaaatattttataaactcactgtaatcaaatcttataaaatctgaatcaacatgaaaagttgtcaatgcttgaatgaatactaaaatcataccacaagatactagataacataaatgaccatgaagtgtcccactgctcaaagggcaacaactttaagaacagaagcaaagagtggtggtgtggaacccaagattcttggcgactagggaatttaaaggttggggaggaggaattcaatgatttgacaagaaatactttataaaaatttgctccatgtattggctaagaaaaatataataaaattttggtagtgaaaattgtatcactaatgtttaccaatattactagtatgaataatacacataaggtagtgacttggaagctgctcaatactttgttgctataacaaaatgcaatattttgttgtaaagcatcttaactacacatataagtttgctgaacttgaatacatcccggtaatggcaaacttcattttattcttggttttcattttattctggtctcagggccatacatttattttagtttaattaattattattttgacaacattacttgggtaatatctatataatggtagataaccaatcagttagcttaattaatctaagctatttgaattcagggaaatattagtcaaatctgctgtttgactaaatacaattcaaagcagtgtatttgtgacttggaatatagaacacaaacaaatgtgtaacccatctgcagtatgcattcttccattttaccaccactaaccattgaggctcatacaattttcaagcaacaagcattgcttcccaaaggtaaaataatcaggaatatttctatagtaaatggagtttttaattggcaatactgtttatttttttctagcaaagacaatttatctcagtaaccttaaataggaaaagtactcaaaaattaaagttgacttttggctttttgtagtctctctggaggacttccagaaaattaccactgttggattttaatctgcttccattaaccaatcttacagagatgataaatgaattaactaatattgaccaaatataaattgactgcaaataataagccgcataaaagttgaagtaggaaaactactccaagtttatatattaggcaccttggggaattctcttagtctttccagctaacaaggattttcagcataataagtagatttaatgatggcataaaattcccagatactttcatatacattttttgccaaagtgtaaatcttctccttttgcagtctttttgttattatcccaacatctagctgctcaggccctaatttagaactcattctgatattttcttcttctgtattaattaatacttatgggtcatgaatccctgctcctttgacctttttaatagctcatgaatccatcccattgcctccccaactctgcccacacctgctgcaacactaatgccttgattttcctacctcagtctccttttctattaatccctcttttgcgtggctgcctgagtccactttctcaaacacaaacctcactatgcaactttggaatctctgtaggctcacctttgccatttcttaatattgcattctccaaattgctaatctctatccagtctcttgaactagacttggcacatggagattccgctcagaaagtgctcttcacacttctacctgcttgactaaccccagattatctttcaagactttaatctgatcttgtgtcttagagaagcccccatacctggtagagcatgtaccatcttacatgcttaaataactccacatttatttgtgtttattactctgtgttataaatatacatttgttggtctctctcttggattattttgtttctttgtcctgtaactaccactgaaagggtgcaatacagctttcttgaaatgtgtattgaacggatgaatgtataaataaaaattaaattttgtaaatttctgcttattcttagaaaaagaatctaaattgtgacaaatcagaattgaaaaaagtattctaataaagaaaaacaagcttttataacttcagtatt

SEQ ID NO: 371803 - DNA, 4112 bp, Homo sapiens
gagggccgggcgcggtaagagcgtctcgggggagtggggcaaggcggccgggcccctcccattccgccttttcttcagcgtcctacccgcggcactggctgcgagcgccgggccacctgcgagtgtgcgcagggactctggacacccgcggcggcgagctgagggagcagtctccacgaggacccaggcggaccctctggcgccatgcgcgccctccccggcctgctggaggccagggcgcgtacgccccggctgctcctcctccagtgccttctcgctgccgcgcgcccaagctcggcggacggcagtgccccagattcgccttttacaagtccacctctcagagaagaaataatggcaaataacttttccttggagagtcataacatatcactgactggaagcaccttgtatacccaatacaggttcaccatcattaatagcaaacaaatgggaagttattcttgtttctttcgagaggaaaaggaacaaaggggaacatttaatttcaaagtccctgaacttcatgggaaaaacaagccattgatctcttacgtaggggattctactgtcttgacatgtaaatgtcaaaattgttttcctttaaattggacctggtacagtagtaatgggagtgtaaaggttcctgttggtgttcaaatgaataaatatgtgatcaatggaacatatgctaacgaaacaaagctgaagataacacaacttttggaggaagatggggaatcttactggtgccgtgcactattccaattaggcgagagtgaagaacacattgagcttgtggtgctgagctatttggtgcccctcaaaccatttcttgtaatagtggctgaggtgattcttttagtggccaccattctgctttgtgaaaagtacacacaaaagaaaaagaagcactcagatgaggggaaagaatttgagcagattgaacagctgaaatcagatgatagcaatggtatagaaaataatgtccccaggcatagaaaaaatgagtctctgggccagtgaatacaaaacatcatgtcgagaatcattggaagatatacagagttcgtatttcagctttgtttatccttcctgttaagagcctctgagtttttagttttaaaaggatgaaaagcttatgcaacatgctcagcaggagcttcatcaacgatatatgtcagatctaaaggtatattttcattctgtaattatgttacataaaagcaatgtaaatcagaataaatatgttagaccagaataaaattaattatattctggtcttcaaaggacacacagaacagatatcagcagaatcacttaatacttcatagaacaaaaatcactcaaaacctgtttataaccaaagaattcatgaaaaagaaagcctttgccatttgtcttagaaagttattttttaaaaaaaaatcatacttactattagtatctatggaagtatatgtaacaatttttatgtaaaggtcatctttctgtgatagtgaaaaaatatgtctttactaagttgaaatgaatactttctgcctttgctaatgatagttattctacaatctccacaagaaaaatataccttttatccggaaatattggtttaaggcaaataaataaaactgtgcttgctctaaagctctgcactacaaaagcaaattttccagtctttattccactcataaccactgctttccccaccaggctaaagtgcttcttagtcttaaatagggtttttaacttcataaggtacaccattgtttatgttttagggtgcaggtccatatagtcgtaatacttaaaacactgctacactgatgcttttgtggctcatggtttcctggttctttgatttaacacctggcttcctggtatctatggctggttaaatatctaaacctgcattattagtgctttacaataataattcccttgactgaagtccagaaatactaaagcacttcttttttattgctgtgaatgccttagacttatcttccaaaataggatacttcgtttctattgcatatataactgaaatattttataaactcactgtaatcaaatcttataaaatctgaatcaacatgaaaagttgtcaatgcttgaatgaatactaaaatcataccacaagatactagataacataaatgaccatgaagtgtcccactgctcaaagggcaacaactttaagaacagaagcaaagagtggtggtgtggaacccaagattcttggcgactagggaatttaaaggttggggaggaggaattcaatgatttgacaagaaatactttataaaaatttgctccatgtattggctaagaaaaatataataaaattttggtagtgaaaattgtatcactaatgtttaccaatattactagtatgaataatacacataaggtagtgacttggaagctgctcaatactttgttgctataacaaaatgcaatattttgttgtaaagcatcttaactacacatataagtttgctgaacttgaatacatcccggtaatggcaaacttcattttattcttggttttcattttattctggtctcagggccatacatttattttagtttaattaattattattttgacaacattacttgggtaatatctatataatggtagataaccaatcagttagcttaattaatctaagctatttgaattcagggaaatattagtcaaatctgctgtttgactaaatacaattcaaagcagtgtatttgtgacttggaatatagaacacaaacaaatgtgtaacccatctgcagtatgcattcttccattttaccaccactaaccattgaggctcatacaattttcaagcaacaagcattgcttcccaaaggtaaaataatcaggaatatttctatagtaaatggagtttttaattggcaatactgtttatttttttctagcaaagacaatttatctcagtaaccttaaataggaaaagtactcaaaaattaaagttgacttttggctttttgtagtctctctggaggacttccagaaaattaccactgttggattttaatctgcttccattaaccaatcttacagagatgataaatgaattaactaatattgaccaaatataaattgactgcaaataataagccgcataaaagttgaagtaggaaaactactccaagtttatatattaggcaccttggggaattctcttagtctttccagctaacaaggattttcagcataataagtagatttaatgatggcataaaattcccagatactttcatatacattttttgccaaagtgtaaatcttctccttttgcagtctttttgttattatcccaacatctagctgctcaggccctaatttagaactcattctgatattttcttcttctgtattaattaatacttatgggtcatgaatccctgctcctttgacctttttaatagctcatgaatccatcccattgcctccccaactctgcccacacctgctgcaacactaatgccttgattttcctacctcagtctccttttctattaatccctcttttgcgtggctgcctgagtccactttctcaaacacaaacctcactatgcaactttggaatctctgtaggctcacctttgccatttcttaatattgcattctccaaattgctaatctctatccagtctcttgaactagacttggcacatggagattccgctcagaaagtgctcttcacacttctacctgcttgactaaccccagattatctttcaagactttaatctgatcttgtgtcttagagaagcccccatacctggtagagcatgtaccatcttacatgcttaaataactccacatttatttgtgtttattactctgtgttataaatatacatttgttggtctctctcttggattattttgtttctttgtcctgtaactaccactgaaagggtgcaatacagctttcttgaaatgtgtattgaacggatgaatgtataaataaaaattaaattttgtaaatttctgcttattcttagaaaaagaatctaaattgtgacaaatcagaattgaaaaaagtattctaataaagaaaaacaagcttttataacttcagtatt

SEQ ID NO: 371804 - DNA, 3040 bp, Homo sapiens
ccgtgtggtacccgaaccgctataacctcctgttcatgacttggctacacaccccttgtaggcaacttctctgtaataagccttaaagatgccttttttactatccctctacatacctcctctcaaaatctttttgctctcacttggactgatcctgacacaggctgctcccaacaactcacctgactgtcctcccccaggggtttagggacagccctcactgaagtataaagcgttgagctcaacgcttaatacttcatagaacaaaaatcactcaaaacctgtttataaccaaagaattcatgaaaaagaaagcctttgccatttgtcttagaaagttattttttaaaaaaaaatcatacttactattagtatctatggaagtatatgtaacaatttttatgtaaaggtcatctttctgtgatagtgaaaaaatatgtctttactaagttgaaatgaatactttctgcctttgctaatgatagttattctacaatctccacaagaaaaatataccttttatccggaaatattggtttaaggcaaataaataaaactgtgcttgctctaaagctctgcactacaaaagcaaattttccagtctttattccactcataaccactgctttccccaccaggctaaagtgcttcttagtcttaaatagggtttttaacttcataaggtacaccattgtttatgttttagggtgcaggtccatatagtcgtaatacttaaaacactgctacactgatgcttttgtggctcatggtttcctggttctttgatttaacacctggcttcctggtatctatggctggttaaatatctaaacctgcattattagtgctttacaataataattcccttgactgaagtccagaaatactaaagcacttcttttttattgctgtgaatgccttagacttatcttccaaaataggatacttcgtttctattgcatatataactgaaatattttataaactcactgtaatcaaatcttataaaatctgaatcaacatgaaaagttgtcaatgcttgaatgaatactaaaatcataccacaagatactagataacataaatgaccatgaagtgtcccactgctcaaagggcaacaactttaagaacagaagcaaagagtggtggtgtggaacccaagattcttggcgactagggaatttaaaggttggggaggaggaattcaatgatttgacaagaaatactttataaaaatttgctccatgtattggctaagaaaaatataataaaattttggtagtgaaaattgtatcactaatgtttaccaatattactagtatgaataatacacataaggtagtgacttggaagctgctcaatactttgttgctataacaaaatgcaatattttgttgtaaagcatcttaactacacatataagtttgctgaacttgaatacatcccggtaatggcaaacttcattttattcttggttttcattttattctggtctcagggccatacatttattttagtttaattaattattattttgacaacattacttgggtaatatctatataatggtagataaccaatcagttagcttaattaatctaagctatttgaattcagggaaatattagtcaaatctgctgtttgactaaatacaattcaaagcagtgtatttgtgacttggaatatagaacacaaacaaatgtgtaacccatctgcagtatgcattcttccattttaccaccactaaccattgaggctcatacaattttcaagcaacaagcattgcttcccaaaggtaaaataatcaggaatatttctatagtaaatggagtttttaattggcaatactgtttatttttttctagcaaagacaatttatctcagtaaccttaaataggaaaagtactcaaaaattaaagttgacttttggctttttgtagtctctctggaggacttccagaaaattaccactgttggattttaatctgcttccattaaccaatcttacagagatgataaatgaattaactaatattgaccaaatataaattgactgcaaataataagccgcataaaagttgaagtaggaaaactactccaagtttatatattaggcaccttggggaattctcttagtctttccagctaacaaggattttcagcataataagtagatttaatgatggcataaaattcccagatactttcatatacattttttgccaaagtgtaaatcttctccttttgcagtctttttgttattatcccaacatctagctgctcaggccctaatttagaactcattctgatattttcttcttctgtattaattaatacttatgggtcatgaatccctgctcctttgacctttttaatagctcatgaatccatcccattgcctccccaactctgcccacacctgctgcaacactaatgccttgattttcctacctcagtctccttttctattaatccctcttttgcgtggctgcctgagtccactttctcaaacacaaacctcactatgcaactttggaatctctgtaggctcacctttgccatttcttaatattgcattctccaaattgctaatctctatccagtctcttgaactagacttggcacatggagattccgctcagaaagtgctcttcacacttctacctgcttgactaaccccagattatctttcaagactttaatctgatcttgtgtcttagagaagcccccatacctggtagagcatgtaccatcttacatgcttaaataactccacatttatttgtgtttattactctgtgttataaatatacatttgttggtctctctcttggattattttgtttctttgtcctgtaactaccactgaaagggtgcaatacagctttcttgaaatgtgtattgaacggatgaatgtataaataaaaattaaattttgtaaatttctgcttattcttagaaaaagaatctaaattgtgacaaatcagaattgaaaaaagtattctaataaagaaaaacaagcttttataacttcagtatt

SEQ ID NO: 371805 - DNA, 1177 bp, Homo sapiens
atcagcaaatagtttttaggtatgttctagtttctttgttctgatatacagagataaaaatccatctagaatagagatatttttagtgctaagaatttttttcttttcttttctttttttttttttgagatgaagtctcgcccttgccttccaggctggagtgcaatggcacgatcttggttcactgcaacctccgcctcctgggttcaagcaattctcctgcctcagcctccggagtagctgggattacacgcacctgccaccatacccagttaatttttgtatttttagtagagacggggtttcaccatgttggtcaggctggtctcgaactcctgacctcagatgatccacctacctcagcctcccaaaatgctgggattacaggtgtgagccaccgcagctggtgaattgtttagagagaatctgaaatgcattatgtggtatttgagagaatgttattgaatttctatctctttttcagtggaagaagttgttccgaatgtaattgaaccttccttcggcctgggtaggatcatgtatacggtatttgaacatacattccatgtacgagaaggagatgaacagagaacattcttcagtttccctgctgtagttgctccattcaaatgttccgtcctcccactgagccaaaaccaggagttcatgccatttgtcaaggaattatcggaagccctgaccaggcatggagtatctcacaaagtagacgattcctctgggtcaatcggaaggcgctatgccaggactgatgagattggcgtggcttttggtgtcaccattgactttgacacagtgaacaagaccccccacactgcaactctgagggaccgtgactcaatgcggcagataagagcagagatctctgagctgcccagcatagtccaagacctagccaatggcaacatcacatgggctgatgtggaggccaggtatcctctgtttgaagggcaagagactggtaaaaaagagacaatcgaggaatgaggacaattttgacaacttttgaccacttgcgctaataaaaaaaaaaaaaactactcttatgtccactttacaaaagaaaacagcattgtgattactcccagggaccgtattttatcttcagtggctgcctgattttacccccacaattaaagttgaaggaatcctgaaaaaa

SEQ ID NO: 371806 - DNA, 657 bp, Homo sapiens
cttaacatctactctttgagcggatttcagagaattcacaatggcagaaattgagcactttgtagatcccagtgagaaagaccaccccaagttccagaatgtggcagaccttcacctttatttgtattcagcaaaagcccaggtcagcggacagtccgctcggaaaatgcgcctgggagatgctgttgaacagggtgtgattaataacacagtattaggctatttcattggccgcatctacctctacctcacgaaggttggaatatctccagataaactccgcttccggcagcacatggagaatgagatggcccattatgcctgtgactgttgggatgcagaatccaaaacatcctacggttggattgagattgttggatgtgctgatcgttcctgttatgacctctcctgtcatgcacgagccaccaaagtcccacttgtagctgagaaacctctgaaagaacccatatcctttctggtcactccaaaaactcaggattcacatgtgaacatcttgctaatgaataagtccaagtctttaccttgttctatggataaatggagatgttttagacactgtagtaacgcttgtttaaacctattattttacctatccctttgttcctttcctattctctgtacttgtagtctgacgtg

SEQ ID NO: 371807 - DNA, 826 bp, Homo sapiens
atcagcaaatagtttttaggtatgttctagtttctttgttctgatatacagagataaaaatccatctagaatagagatatttttagtgctaagaatttttttcttttcttttctttttttttttttgagatgaagtctcgcccttgccttccaggctggagtgcaatggcacgatcttggttcactgcaacctccgcctcctgggttcaagcaattctcctgcctcagcctccggagtagctgggattacacgcacctgccaccatacccagttaatttttgtatttttagtagagacggggtttcaccatgttggtcaggctggtctcgaactcctgacctcagatgatccacctacctcagcctcccaaaatgctgggattacaggtgtgagccaccgcagctggtgaattgtttagagagaatctgaaatgcattatgtggtatttgagagaatgttattgaatttctatctctttttcagtggaagaagttgttccgaatgtaattgaaccttccttcggcctgggtaggatcatgtatacggtatttgaacatacattccatgtacgagaaggagatgaacagagaacagtaagttgttgtgtacagtgtgctgttatagtgtcagaaaataaaaattttctgaattacattgtgaagtacattaataagactctagaatggtcaattagttattactataatctagtgctattaacactcatctttgcttaagtatgtatagacaaaccagtttcctgtgttatcttatttgagctttaggttattctagaagctattgttttagttgcctggtgctctc

SEQ ID NO: 371808 - DNA, 2895 bp, Homo sapiens
gctccccattgtccttgtcaatactgtgagactcatccaatatcctatccacctctacgtagtctggattaaagggctcttcatcctcatggaagaagtgtctcatctgagccagggggggcggcgatttcatcatgctccgagccgggcggcgcgcgccgcttccgtcgccaccctctctggacagcccagggccgcaggctcatgccctctccgcgtccagtgctgcttagaggtgctcgcgccgctctgctgctgctgctgccgccccggctcttagcccgaccctcgctcctgctccgccggtccctcagcgcggcctcctgcgccccgatctccttgcccgccgccgcctcccggagcagcatggacggcgcgggggctgaggaggtgctggcacctctgaggctagcagtgcgccagcagggagatcttgtgcgaaaactcaaagaagataaagcaccccaagtagacgtagacaaagcagtggctgagctcaaagcccgcaagagggttctggaagcaaaggagctggcgttacagcccaaagatgatattgtagaccgagcaaaaatggaagataccctgaagaggaggtttttctatgatcaagcttttgctatttatggaggtgttagtggtctgtatgactttgggccagttggctgtgctttgaagaacaatattattcagacctggaggcagcactttatccaagaggaacagatcctggagatcgattgcaccatgctcacccctgagccagttttaaagacctctggccatgtagacaaatttgctgacttcatggtgaaagacgtaaaaaatggagaatgttttcgtgctgaccatctattaaaagctcatttacagaaattgatgtctgataagaagtgttctgtcgaaaagaaatcagaaatggaaagtgttttggcccagcttgataactatggacagcaagaacttgcggatctttttgtgaactataatgtaaaatctcccattactggaaatgatctatcccctccagtgtcttttaacttaatgttcaagactttcattgggcctggaggaaacatgcctgggtacttgagaccagaaactgcacaggggattttcttgaatttcaaacgacttttggagttcaaccaaggaaagttgccttttgctgctgcccagattggaaattcttttagaaatgagatctcccctcgatctggactgatcagagtcagagaattcacaatggcagaaattgagcactttgtagatcccagtgagaaagaccaccccaagttccagaatgtggcagaccttcacctttatttgtattcagcaaaagcccaggtcagcggacagtccgctcggaaaatgcgcctgggagatgctgttgaacagggtgtgattaataacacagtattaggctatttcattggccgcatctacctctacctcacgaaggttggaatatctccagataaactccgcttccggcagcacatggagaatgagatggcccattatgcctgtgactgttgggatgcagaatccaaaacatcctacggttggattgagattgttggatgtgctgatcgttcctgttatgacctctcctgtcatgcacgagccaccaaagtcccacttgtagctgagaaacctctgaaagaacccaaaacagtcaatgttgttcagtttgaacccagtaagggagcaattggtaaggcatataagaaggatgcaaaactggtgatggagtatcttgccatttgtgatgagtgctacattacagaaatggagatgctgctgaatgagaaaggggaattcacaattgaaactgaagggaaaacatttcagttaacaaaagacatgatcaatgtgaagagattccagaaaacactatatgtggaagaagttgttccgaatgtaattgaaccttccttcggcctgggtaggatcatgtatacggtatttgaacatacattccatgtacgagaaggagatgaacagagaacattcttcagtttccctgctgtagttgctccattcaaatgttccgtcctcccactgagccaaaaccaggagttcatgccatttgtcaaggaattatcggaagccctgaccaggcatggagtatctcacaaagtagacgattcctctgggtcaatcggaaggcgctatgccaggactgatgagattggcgtggcttttggtgtcaccattgactttgacacagtgaacaagaccccccacactgcaactctgagggaccgtgactcaatgcggcagataagagcagagatctctgagctgcccagcatagtccaagacctagccaatggcaacatcacatgggctgatgtggaggccaggtatcctctgtttgaagggcaagagactggtaaaaaagagacaatcgaggaatgaggacaattttgacaacttttgaccacttgcgctaataaaaaaaaaaaaaactactcttatgtccactttacaaaagaaaacagcattgtgattactcccagggaccgtattttatcttcagtggctgcctgattttacccccacaattaaagttgaaggaatcctgaaaaaaaaaaggaaaaaaaaaaaaaagaaaaggcaacacaaagcacaataaaaaaagcaaaagaaaggggggagcaaataaccaccaagggggcaaattacgcaccatttttatagaggcgcccaatggtattatatagagagcgcgcgacaaacaagtggagaaaccacgtgcataaggaccctctgtgggacatagcaaccacacgtagcggaaaaccacggttggtaacgcctcgtgagttcgttaatacggataaacagccgcgacgaccagcgaacaagaaccaactgcaagagcacgac

SEQ ID NO: 371809 - DNA, 2572 bp, Homo sapiens
  misc_feature (2470)..(2470): n is a, c, g, or t
gctccccattgtccttgtcaatactgtgagactcatccaatatcctatccacctctacgtagtctggattaaagggctcttcatcctcatggaagaagtgtctcatctgagccagggggggcggcgatttcatcatgctccgagccgggcggcgcgcgccgcttccgtcgccaccctctctggacagcccagggccgcaggctcatgccctctccgcgtccagtgctgcttagaggtgctcgcgccgctctgctgctgctgctgccgccccggctcttagcccgaccctcgctcctgctccgccggtccctcagcgcggcctcctgcgccccgatctccttgcccgccgccgcctcccggagcagcatggacggcgcgggggctgaggaggtgctggcacctctgaggctagcagtgcgccagcagggagatcttgtgcgaaaactcaaagaagataaagcaccccaagtagacgtagacaaagcagtggctgagctcaaagcccgcaagagggttctggaagcaaaggagctggcgttacagcccaaagatgatattgtagaccgagcaaaaatggaagataccctgaagaggaggtttttctatgatcaagcttttgctatttatggaggtgttagtggtctgtatgactttgggccagttggctgtgctttgaagaacaatattattcagacctggaggcagcactttatccaagaggaacagatcctggagatcgattgcaccatgctcacccctgagccagttttaaagacctctggccatgtagacaaatttgctgacttcatggtgaaagacgtaaaaaatggagaatgttttcgtgctgaccatctattaaaagctcatttacagaaattgatgtctgataagaagtgttctgtcgaaaagaaatcagaaatggaaagtgttttggcccagcttgataactatggacagcaagaacttgcggatctttttgtgaactataatgtaaaatctcccattactggaaatgatctatcccctccagtgtcttttaacttaatgttcaagactttcattgggcctggaggaaacatgcctgggtacttgagaccagaaactgcacaggggattttcttgaatttcaaacgacttttggagttcaaccaaggaaagttgccttttgctgctgcccagattggaaattcttttagaaatgagatctcccctcgatctggactgatcagagtcagagaattcacaatggcagaaattgagcactttgtagatcccagtgagaaagaccaccccaagttccagaatgtggcagaccttcacctttatttgtattcagcaaaagcccaggtcagcggacagtccgctcggaaaatgcgcctgggagatgctgttgaacagggtgtgattaataacacagtattaggctatttcattggccgcatctacctctacctcacgaaggttggaatatctccagataaactccgcttccggcagcacatggagaatgagatggcccattatgcctgtgactgttgggatgcagaatccaaaacatcctacggttggattgagattgttggatgtgctgatcgttcctgttatgacctctcctgtcatgcacgagccaccaaagtcccacttgtagctgagaaacctctgaaagaacccaaaacagtcaatgttgttcagtttgaacccagtaagggagcaattggtaaggcatataagaaggatgcaaaactggtgatggagtatcttgccatttgtgatgagtgctacattacagaaatggagatgctgctgaatgagaaaggggaattcacaattgaaactgaagggaaaacatttcagttaacaaaagacatgatcaatgtgaagagattccagaaaacactatatgtggaagaagttgttccgaatgtaattgaaccttccttcggcctgggtaggatcatgtatacggtatttgaacatacattccatgtacgagaaggagatgaacagagaacattcttcagtttccctgctgtagttgctccattcaaatgttccgtcctcccactgagccaaaaccaggagttcatgccatttgtcaaggaattatcggaagccctgaccaggcatggagtatctcacaaagtagacgattcctctgggtcaatcggaaggcgctatgccaggactgatgagattggcgtggcttttggtgtcaccattgactttgacacagtgaacaagaccccccacactgcaactctgagggaccgtgactcaatgcggcagataagagcagagatctctgagctgcccagcatagtccaagacctagccaatggcaacatcacatgggctgatgtggaggccaggtatcctctgtttgaagggcaagagactggtaaaaaagagacaatcgaggaatgaggacaattttgacaacttttgaccacttgcgctaataaacacaaancctcccattgtccacttacaaaacacagtttggatatccccgggacgtttatatttcaggggctgttttaccccacataaggtagggatctcgaaaacaacc

SEQ ID NO: 371810 - DNA, 2710 bp, Homo sapiens
  misc_feature (253)..(253): n is a, c, g, or t
gtcactcgtataaaaacctatgctttgaaggttctcgtgtgtctcggcctgcaggtctcgctcagagctgtgtccctgaacatccaccctgctggggtggcttgacgcacttctgtgcaaatctgttcgctcgcaaccctacctacctctctcccgaaccggagaaaaccttcggcggggtccttccgggttttgtgtcgaatctgcggcggcgacccggcgccgcgtcacgcggtggtgaatgtgcggcagnacgcgcgccgcgtcgtttacgcggcgatttcatcatgctccgagccgggcggcgcgcgccgcttccgtcgccaccctctctggacagcccagggccgcaggctcatgccctctccgcgtccagtgctgcttagaggtgctcgcgccgctctgctgctgctgctgccgccccggctcttagcccgaccctcgctcctgctccgccggtccctcagcgcggcctcctgcgccccgatctccttgcccgccgccgcctcccggagcagcatggacggcgcgggggctgaggaggtgctggcacctctgaggctagcagtgcgccagcagggagatcttgtgcgaaaactcaaagaagataaagcaccccaagtagacgtagacaaagcagtggctgagctcaaagcccgcaagagggttctggaagcaaaggagctggcgttacagcccaaagatgatattgtagaccgagcaaaaatggaagataccctgaagaggaggtttttctatgatcaagcttttgctatttatggaggtgttagtggtctgtatgactttgggccagttggctgtgctttgaagaacaatattattcagacctggaggcagcactttatccaagaggaacagatcctggagatcgattgcaccatgctcacccctgagccagttttaaagacctctggccatgtagacaaatttgctgacttcatggtgaaagacgtaaaaaatggagaatgttttcgtgctgaccatctattaaaagctcatttacagaaattgatgtctgataagaagtgttctgtcgaaaagaaatcagaaatggaaagtgttttggcccagcttgataactatggacagcaagaacttgcggatctttttgtgaactataatgtaaaatctcccattactggaaatgatctatcccctccagtgtcttttaacttaatgttcaagactttcattgggcctggaggaaacatgcctgggtacttgagaccagaaactgcacaggggattttcttgaatttcaaacgacttttggagttcaaccaaggaaagttgccttttgctgctgcccagattggaaattcttttagaaatgagatctcccctcgatctggactgatcagagtcagagaattcacaatggcagaaattgagcactttgtagatcccagtgagaaagaccaccccaagttccagaatgtggcagaccttcacctttatttgtattcagcaaaagcccaggtcagcggacagtccgctcggaaaatgcgcctgggagatgctgttgaacagggtgtgattaataacacagtattaggctatttcattggccgcatctacctctacctcacgaaggttggaatatctccagataaactccgcttccggcagcacatggagaatgagatggcccattatggttggattgagattgttggatgtgctgatcgttcctgttatgacctctcctgtcatgcacgagccaccaaagtcccacttgtagctgagaaacctctgaaagaacccaaaacagtcaatgttgttcagtttgaacccagtaagggagcaattggtaaggcatataagaaggatgcaaaactggtgatggagtatcttgccatttgtgatgagtgctacattacagaaatggagatgctgctgaatgagaaaggggaattcacaattgaaactgaagggaaaacatttcagttaacaaaagacatgatcaatgtgaagagattccagaaaacactatatgtggaagaagttgttccgaatgtaattgaaccttccttcggcctgggtaggatcatgtatacggtatttgaacatacattccatgtacgagaaggagatgaacagagaacattcttcagtttccctgctgtagttgctccattcaaatgttccgtcctcccactgagccaaaaccaggagttcatgccatttgtcaaggaattatcggaagccctgaccaggcatggagtatctcacaaagtagacgattcctctgggtcaatcggaaggcgctatgccaggactgatgagattggcgtggcttttggtgtcaccattgactttgacacagtgaacaagaccccccacactgcaactctgagggaccgtgactcaatgcggcagataagagcagagatctctgagctgcccagcatagtccaagacctagccaatggcaacatcacatgggctgatgtggaggccaggtatcctctgtttgaagggcaagagactggtaaaaaagagacaatcgaggaatgaggacaattttgacaacttttgaccacttgcgctaataaaaaaaaaaaaaactactcttatgtccactttacaaaagaaaacagcattgtgattactcccagggaccgtattttatcttcagtggctgcctgattttacccccacaattaaagttgaaggaatcctgaaaaaa

SEQ ID NO: 371811 - DNA, 1963 bp, Homo sapiens
actatgataggtagcgaggctgggtggcttggctgtgctttgaagaacaatattattcagacctggaggcagcactttatccaagaggaacagatcctggagatcgattgcaccatgctcacccctgagccagttttaaagacctctggccatgtagacaaatttgctgacttcatggtgaaagacgtaaaaaatggagaatgttttcgtgctgaccatctattaaaagctcatttacagaaattgatgtctgataagaagtgttctgtcgaaaagaaatcagaaatggaaagtgttttggcccagcttgataactatggacagcaagaacttgcggatctttttgtgaactataatgtaaaatctcccattactggaaatgatctatcccctccagtgtcttttaacttaatgttcaagactttcattgggcctggaggaaacatgcctgggtacttgagaccagaaactgcacaggggattttcttgaatttcaaacgacttttggagttcaaccaaggaaagttgccttttgctgctgcccagattggaaattcttttagaaatgagatctcccctcgatctggactgatcagagtcagagaattcacaatggcagaaattgagcactttgtagatcccagtgagaaagaccaccccaagttccagaatgtggcagaccttcacctttatttgtattcagcaaaagcccaggtcagcggacagtccgctcggaaaatgcgcctgggagatgctgttgaacagggtgtgattaataacacagtattaggctatttcattggccgcatctacctctacctcacgaaggttggaatatctccagataaactccgcttccggcagcacatggagaatgagatggcccattatgcctgtgactgttgggatgcagaatccaaaacatcctacggttggattgagattgttggatgtgctgatcgttcctgttatgacctctcctgtcatgcacgagccaccaaagtcccacttgtagctgagaaacctctgaaagaacccaaaacagtcaatgttgttcagtttgaacccagtaagggagcaattggtaaggcatataagaaggatgcaaaactggtgatggagtatcttgccatttgtgatgagtgctacattacagaaatggagatgctgctgaatgagaaaggggaattcacaattgaaactgaagggaaaacatttcagttaacaaaagacatgatcaatgtgaagagattccagaaaacactatatgtggaagaagttgttccgaatgtaattgaaccttccttcggcctgggtaggatcatgtatacggtatttgaacatacattccatgtacgagaaggagatgaacagagaacattcttcagtttccctgctgtagttgctccattcaaatgttccgtcctcccactgagccaaaaccaggagttcatgccatttgtcaaggaattatcggaagccctgaccaggcatggagtatctcacaaagtagacgattcctctgggtcaatcggaaggcgctatgccaggactgatgagattggcgtggcttttggtgtcaccattgactttgacacagtgaacaagaccccccacactgcaactctgagggaccgtgactcaatgcggcagataagagcagagatctctgagctgcccagcatagtccaagacctagccaatggcaacatcacatgggctgatgtggaggccaggtatcctctgtttgaagggcaagagactggtaaaaaagagacaatcgaggaatgaggacaattttgacaacttttgaccacttgcgctaataaaaaaaaaaaaaactactcttatgtccactttacaaaagaaaacagcattgtgattactcccagggaccgtattttatcttcagtggctgcctgattttacccccacaattaaagttgaaggaatcctgaaaaaa

SEQ ID NO: 371812 - DNA, 3044 bp, Homo sapiens
  misc_feature (253)..(253): n is a, c, g, or t
gtcactcgtataaaaacctatgctttgaaggttctcgtgtgtctcggcctgcaggtctcgctcagagctgtgtccctgaacatccaccctgctggggtggcttgacgcacttctgtgcaaatctgttcgctcgcaaccctacctacctctctcccgaaccggagaaaaccttcggcggggtccttccgggttttgtgtcgaatctgcggcggcgacccggcgccgcgtcacgcggtggtgaatgtgcggcagnacgcgcgccgcgtcgtttacgcggcgatttcatcatgctccgagccgggcggcgcgcgccgcttccgtcgccaccctctctggacagcccagggccgcaggctcatgccctctccgcgtccagtgctgcttagaggtgctcgcgccgctctgctgctgctgctgccgccccggctcttagcccgaccctcgctcctgctccgccggtccctcagcgcggcctcctgcgccccgatctccttgcccgccgccgcctcccggagcagcatggacggcgcgggggctgaggaggtgctggcacctctgaggctagcagtgcgccagcagggagatcttgtgcgaaaactcaaagaagataaagcaccccaagtagacgtagacaaagcagtggctgagctcaaagcccgcaagagggttctggaagcaaaggagctggcgttacagcccaaagatgatattgtagaccgagcaaaaatggaagataccctgaagaggaggtttttctatgatcaagcttttgctatttatggaggtgttagtggtctgtatgactttgggccagttggctgtgctttgaagaacaatattattcagacctggaggcagcactttatccaagaggaacagatcctggagatcgattgcaccatgctcacccctgagccagttttaaagacctctggccatgtagacaaatttgctgacttcatggtgaaagacgtaaaaaatggagaatgttttcgtgctgaccatctattaaaagctcatttacagaaattgatgtctgataagaagtgttctgtcgaaaagaaatcagaaatggaaagtgttttggcccagcttgataactatggacagcaagaacttgcggatctttttgtgaactataatgtaaaatctcccattactggaaatgatctatcccctccagtgtcttttaacttaatgttcaagactttcattgggcctggaggaaacatgcctgggtacttgagaccagaaactgcacaggggattttcttgaatttcaaacgacttttggagttcaaccaaggaaagttgccttttgctgctgcccagattggaaattcttttagaaatgagatctcccctcgatctggactgatcagagtcagagaattcacaatggcagaaattgagcactttgtagatcccagtgagaaagaccaccccaagttccagaatgtggcagaccttcacctttatttgtattcagcaaaagcccaggtcagcggacagtccgctcggaaaatgcgcctgggagatgctgttgaacagggtgtgattaataacacagtattaggctatttcattggccgcatctacctctacctcacgaaggttggaatatctccagataaactccgcttccggcagcacatggagaatgagatggcccattatgcctgtgactgttgggatgcagaatccaaaacatcctacggttggattgagattgttggatgtgctgatcgttcctgttatgacctctcctgtcatgcacgagccaccaaagtcccacttgtagctgagaaacctctgaaagaacccaaaacagtcaatgttgttcagtttgaacccagtaagggagcaattggtaaggcatataagaaggatgcaaaactggtgatggagtatcttgccatttgtgatgagtgctacattacagaaatggagatgctgctgaatgagaaaggggaattcacaattgaaactgaagggaaaacatttcagttaacaaaagacatgatcaatgtgaagagattccagaaaacactatatgtggaagaagttgttccgaatgtaattgaaccttccttcggcctgggtaggatcatgtatacggtatttgaacatacattccatgtacgagaaggagatgaacagagaacattcttcagtttccctgctgtagttgctccattcaaatgttccgtcctcccactgagccaaaaccaggagttcatgccatttgtcaaggaattatcggaagccctgaccaggcatggagtatctcacaaagtagacgattcctctgggtcaatcggaaggcgctatgccaggactgatgagattggcgtggcttttggtgtcaccattgactttgacacagtgaacaagaccccccacactgcaactctgagggaccgtgactcaatgcggcagataagagcagagatctctgagctgcccagcatagtccaagacctagccaatggcaacatcacatgggctgatgtggaggccaggtatcctctgtttgaagggcaagagactggtgatggagtatcttgccatttgtgatgagtgctacgttacagaaagtggagatgctgctgatatgagacaggggaattcacaattgaaactggagggaaaacatttcagttaggcaaaagacatgatcaatgtgaagagattccagaagacactatatgtggaagaagttgttccgaatgtaattgaaccttccttcggcctgggtaggatcatgtatacggtatttgaacatacattccatgtacgagaaggagatgaacagagaacattcttcagatttgccctgctgtagtttgctcccattcaaatgttccgtcctcccaactgaggccaaaaccaggagttcatgccattgtccacggattatcggaagcccctgacaggcatggagtctctcacaaagtagagattctctgggtcaacaggaaggggtatgccggactgttgaattgcgtggtttgggggaccactggttgatggggagagaccca

SEQ ID NO: 371813 - DNA, 2094 bp, Homo sapiens
  misc_feature (253)..(253): n is a, c, g, or t
gtcactcgtataaaaacctatgctttgaaggttctcgtgtgtctcggcctgcaggtctcgctcagagctgtgtccctgaacatccaccctgctggggtggcttgacgcacttctgtgcaaatctgttcgctcgcaaccctacctacctctctcccgaaccggagaaaaccttcggcggggtccttccgggttttgtgtcgaatctgcggcggcgacccggcgccgcgtcacgcggtggtgaatgtgcggcagnacgcgcgccgcgtcgtttacgcggcgatttcatcatgctccgagccgggcggcgcgcgccgcttccgtcgccaccctctctggacagcccagggccgcaggctcatgccctctccgcgtccagtgctgcttagaggtgctcgcgccgctctgctgctgctgctgccgccccggctcttagcccgaccctcgctcctgctccgccggtccctcagcgcggcctcctgcgccccgatctccttgcccgccgccgcctcccggagcagcatggacggcgcgggggctgaggaggtgctggcacctctgaggctagcagtgcgccagcagggagatcttgtgcgaaaactcaaagaagataaagcaccccaagtagacgtagacaaagcagtggctgagctcaaagcccgcaagagggttctggaagcaaaggagctggcgttacagcccaaagatgatattgtagaccgagcaaaaatggaagataccctgaagaggaggtttttctatgatcaagcttttgctatttatggaggtgttagtggtctgtatgactttgggccagttggctgtgctttgaagaacaatattattcagacctggaggcagcactttatccaagaggaacagatcctggagatcgattgcaccatgctcacccctgagccagttttaaagacctctggccatgtagacaaatttgctgacttcatggtgaaagacgtaaaaaatggagaatgttttcgtgctgaccatctattaaaagctcatttacagaaattgatgtctgataagaagtgttctgtcgaaaagaaatcagaaatggaaagtgttttggcccagcttgataactatggacagcaagaacttgcggatctttttgtgaactataatgtaaaatctcccattactggaaatgatctatcccctccagtgtcttttaacttaatgttcaagactttcattgggcctggaggaaacatgcctgggtacttgagaccagaaactgcacaggggattttcttgaatttcaaacgacttttggagttcaaccaaggaaagttgccttttgctgctgcccagattggaaattcttttagaaatgagatctcccctcgatctggactgatcagagtcagagaattcacaatggcagaaattgagcactttgtagatcccagtgagaaagaccaccccaagttccagaatgtggcagaccttcacctttatttgtattcagcaaaagcccaggtcagcggacagtccgctcggaaaatgcgcctgggagatgctgttgaacagggtgtgattaataacacagtattaggctatttcattggccgcatctacctctacctcacgaaggttggaatatctccagataaactccgcttccggcagcacatggagaatgagatggcccattatgcctgtgactgttgggatgcagaatccaaaacatcctacggttggattgagattgttggatgtgctgatcgttcctgttatgacctctcctgtcatgcacgagccaccaaagtcccacttgtagctgagaaacctctgaaagaacccaaaacagtcaatgttgttcagtttgaacccagtaagggagcaattggtaaggcatataagaaggatgcaaaactggtgatggagtatcttgccatttgtgatgagtgctacattacagaaatggagatgctgctgaatgagaaaggggaattcacaattgaaactggagggaaaacatttcagttaacgtgttccgaattgtattgaaactttctttcggccgggtaggaacatgtttaccggatttggacatacatttcatgtacgaaa

SEQ ID NO: 371814 - DNA, 1287 bp, Homo sapiens
attatggtcggggcctttcggtcggaaccgtctttttgcacagaggttccaacactacgaacacgggcgtggaagatgctggcgcacagggtgtgattaataacacagtattaggctatttcattggccgcatctacctctacctcacgaaggttggaatatctccagataaactccgcttccggcagcacatggagaatgagatggcccattatgcctgtgactgttgggatgcagaatccaaaacatcctacggttggattgagattgttggatgtgctgatcgttcctgttatgacctctcctgtcatgcacgagccaccaaagtcccacttgtagctgagaaacctctgaaagaacccaaaacagtcaatgttgttcagtttgaacccagtaagggagcaattggtaaggcatataagaaggatgcaaaactggtgatggagtatcttgccatttgtgatgagtgctacattacagaaatggagatgctgctgaatgagaaaggggaattcacaattgaaactgaagggaaaacatttcagttaacaaaagacatgatcaatgtgaagagattccagaaaacactatatgtggaagaagttgttccgaatgtaattgaaccttccttcggcctgggtaggatcatgtatacggtatttgaacatacattccatgtacgagaaggagatgaacagagaacattcttcagtttccctgctgtagttgctccattcaaatgttccgtcctcccactgagccaaaaccaggagttcatgccatttgtcaaggaattatcggaagccctgaccaggcatggagtatctcacaaagtagacgattcctctgggtcaatcggaaggcgctatgccaggactgatgagattggcgtggcttttggtgtcaccattgactttgacacagtgaacaagaccccccacactgcaactctgagggaccgtgactcaatgcggcagataagagcagagatctctgagctgcccagcatagtccaagacctagccaatggcaacatcacatgggctgatgtggaggccaggtatcctctgtttgaagggcaagagactggtaaaaaagagacaatcgaggaatgaggacaattttgacaacttttgaccacttgcgctaataaaaaaaaaaaaaactactcttatgtccactttacaaaagaaaacagcattgtgattactcccagggaccgtattttatcttcagtggctgcctgattttacccccacaattaaagttgaaggaatcctgaaaaaa

SEQ ID NO: 371815 - DNA, 1392 bp, Homo sapiens
  misc_feature (253)..(253): n is a, c, g, or t
gtcactcgtataaaaacctatgctttgaaggttctcgtgtgtctcggcctgcaggtctcgctcagagctgtgtccctgaacatccaccctgctggggtggcttgacgcacttctgtgcaaatctgttcgctcgcaaccctacctacctctctcccgaaccggagaaaaccttcggcggggtccttccgggttttgtgtcgaatctgcggcggcgacccggcgccgcgtcacgcggtggtgaatgtgcggcagnacgcgcgccgcgtcgtttacgcggcgatttcatcatgctccgagccgggcggcgcgcgccgcttccgtcgccaccctctctggacagcccagggccgcaggctcatgccctctccgcgtccagtgctgcttagaggtgctcgcgccgctctgctgctgctgctgccgccccggctcttagcccgaccctcgctcctgctccgccggtccctcagcgcggcctcctgcgccccgatctccttgcccgccgccgcctcccggagcagcatggacggcgcgggggctgaggaggtgctggcacctctgaggctagcagtgcgccagcagggagatcttgtgcgaaaactcaaagaagataaagcaccccaagtagacgtagacaaagcagtggctgagctcaaagcccgcaagagggttctggaagcaaaggagctggcgttacagcccaaagatgatattgtagaccgagcaaaaatggaagataccctgaagaggaggtttttctatgatcaagcttttgctatttatggaggtgttagtggtctgtatgactttgggccagttggctgtgctttgaagaacaatattattcagacctggaggcagcactttatccaagaggaacagatcctggagatcgattgcaccatgctcacccctgagccagttttaaagacctctggccatgtagacaaatttgctgacttcatggtgaaagacgtaaaaaatggagaatgttttcgtgctgaccatctattaaaagctcatttacagaaattgatgtctgataagaagtgttctgtcgaaaagaaatcagaaatggaaagtgttttggcccagcttgataactatggacagcaagaacttgcggatctttttgtgaactataatgtaaaatctcccattactggaaatgatctatcccctccagtgtcttttaacttaatgttcaagactttcattgggcctggaggaaacatgcctggtcttgagaccgctggcggggattctgaattcaacgcttggggtcacccaggaatgcctgggcgccatgggacttgaaggacccgccgggggtaacacgaatacgcggaatgctgtaccaggacccctatgggagccttataacaaggcccaccg

SEQ ID NO: 371816 - DNA, 736 bp, Homo sapiens
  misc_feature (6)..(6): n is a, c, g, or t
  misc_feature (16)..(16): n is a, c, g, or t
  misc_feature (26)..(26): n is a, c, g, or t
ggagcngcggcccccncccattggcnccgaggtccccgacgtcaccgcgacccccgcgaggctgcttttcttcgcgcccacccgccgcgcggcgccgcttgaggagatggaagccccggccgctgacgccatcatgtcgcccgaagaggagctggacgggtacgagccggagcctctcgggaagcggccggctccgtcctcccactgagccaaaaccaggagttcatgccatttgtcaaggaattatcggaagccctgaccaggcatggagtatctcacaaagtagacgattcctctgggtcaatcggaaggcgctatgccaggactgatgagattggcgtggcttttggtgtcaccattgactttgacacagtgaacaagaccccccacactgcaactctgagggaccgtgactcaatgcggcagataagagcagagatctctgagctgcccagcatagtccaagacctagccaatggcaacatcacatgggctgatgtggaggccaggtatcctctgtttgaagggcaagagactggtaaaaaagagacaatcgaggaatgaggacaattttgacaacttttgaccacttgcgctaataaaaaaaaaaaaaactactcttatgtccactttacaaaagaaaacagcattgtgattactcccagggaccgtattttatcttcagtggctgcctgattttacccccacaattaaagttgaaggaatcctgaaaaaa

SEQ ID NO: 371817 - DNA, 1960 bp, Homo sapiens
ctgggattacaggcatgagccactgtgtccagccttatttttgctttctttgatttctgagttactcagaaactatttcagggcagtttaagaaggctgtactttttagtgtaggtatatggaacatctttttttgttttgtactatttcttttggacatatgtttgtgagctaattaaacttttctgtttcacttggtcactgaggttcataggtttttctcttaaaagacagaatgggctttggtttgggtcactgccacttgtttgaatatttaggtagtctccacagaaagtcttttatgtggaaccaaaaaattaccgtcttttatatacagtagctttcagaatgctttcacatcatttgacttttttagtaacgggcttgtgaagcaagcagagcaggtggtagagacctgctttttaggtggagaaactaaggttcagaaagagttcatgacttggcctaaattcggagctgaaaccaggtgtttctgatgctggttctgcttctcttttgccatactgcttttcatgtcatgttttctggcattttggtaatgacgttatgcttgaacacttgctgaatattaacctcttttggtttgggatattagcatttagatatttacaaattaacatatttggatttttttctttttaaatcatccagttcttcagtttccctgctgtagttgctccattcaaatgttccgtcctcccactgagccaaaaccaggagttcatgccatttgtcaaggaattatgtaagcaaattcaattgggtaaactccatgggaacaccatcaaggagactgaattttaggaaatgtatcatttatttcaataaaaatatagactgaataaagaatataaatgattttataaagagtacatgattttagcctgtactcttatttctaagcgagaggatatgcttgctcagatgttttattctggcatttgagtgaggcaaggtaggacccaagagtcagatttaaaaattatttacttctcatactgaccttggtgccaagttcatcgagggaacctgagtggagtgtagcaaccataatggatctacagccacagaatccacagccctgaaaggaatcctggtggtcatctggcacatccacttatttcagagctgggaaatggggagagtccattgacctgcttagagccataaaaatagaggtggtggagtcaggactcaccttctggccttggctcttggtcccatatttgttccccctatagctgtatcagatggaggtatgagtgaagatttggattcccgcaagggatttattaaactttagggatatttctttctcttgcaactcaacttgtggctttcttgtcttggtcccatttataagtctcctgagcttgtaagacagtagttagataacactgggcttaactccattgttttatttttaatttactttgtttattttggatagcggaagccctgaccaggcatggagtatctcacaaagtagacgattcctctgggtcaatcggaaggcgctatgccaggactgatgagattggcgtggcttttggtgtcaccattgactttgacacagtgaacaagaccccccacactgcaactctgagggaccgtgactcaatgcggcagataagagcagagatctctgagctgcccagcatagtccaagacctagccaatggcaacatcacatgggctgatgtggaggccaggtatcctctgtttgaagggcaagagactggtaaaaaagagacaatcgaggaatgaggacaattttgacaacttttgaccacttgcgctaataaaaaaaaaaaaaactactcttatgtccactttacaaaagaaaacagcattgtgattactcccagggaccgtattttatcttcagtggctgcctgattttacccccacaattaaagttgaaggaatcctgaaaaaa

SEQ ID NO: 371818 - DNA, 644 bp, Homo sapiens
taaaagacactggaggggatagatcatttccagtaatgggagattttacattatagttcacaaaaagatccgcaagttcttgctgtccatagttatcaagcccgtcctcccactgagccaaaaccaggagttcatgccatttgtcaaggaattatcggaagccctgaccaggcatggagtatctcacaaagtagacgattcctctgggtcaatcggaaggcgctatgccaggactgatgagattggcgtggcttttggtgtcaccattgactttgacacagtgaacaagaccccccacactgcaactctgagggaccgtgactcaatgcggcagataagagcagagatctctgagctgcccagcatagtccaagacctagccaatggcaacatcacatgggctgatgtggaggccaggtatcctctgtttgaagggcaagagactggtaaaaaagagacaatcgaggaatgaggacaattttgacaacttttgaccacttgcgctaataaaaaaaaaaaaaactactcttatgtccactttacaaaagaaaacagcattgtgattactcccagggaccgtattttatcttcagtggctgcctgattttacccccacaattaaagttgaaggaatcctgaaaaaa

SEQ ID NO: 371819 - DNA, 698 bp, Homo sapiens
gctccccattgtccttgtcaatactgtgagactcatccaatatcctatccacctctacgtagtctggattaaagggctcttcatcctcatggaagaagtgtctcatctgagccagggggggcggcgatttcatcatgctccgagccgggcggcgcgcgccgcttccgtcgccaccctctctggacagcccagggccgcaggctcatgccctctccgcgtccagtgctgcttagaggtgctcgcgccgctctgctgctgctgctgccgccccggctcttagcccgaccctcgctcctgctccgccggtccctcagcgcggcctcctgcgccccgatctccttgcccgccgccgcctcccggagcagcatggacggcgcgggggctgaggaggtgctggcacctctgaggctagcagtgcgccagcagggagatcttgtgcgaaaactcaaagaagataaagcaccccaagtagacgtagacaaagcagtggctgagctcaaagcccgcaagagggttctggaagcaaaggagctggcgttacagcccaaagatgatattgtagaccgagcaaaaatggaagataccctgaagaggaggtttttctatgatcaagcttttgctatttatggaggtgttacggtgggtctggtattgacctttttgggggggcccaagttttgggccttttgttttggcct

SEQ ID NO: 371820 - DNA, 631 bp, Homo sapiens
cagtagccttggtcagagctctccagtttgccagtcttatgtaattccctcacacgagttacttgactgagtcctgtttgttctaatagttaaatttaatacacatgaagtaacttcaagggacatggagatttagaaaagttaggaaaggctttgtggcagaattgagttgtctgggggaactggtgggcgttttgggctagaagagcatgaacccatgcctggcatgacattgtttggctctgtgtaaggtttcctgagttcaggatgaatcttcttcttaaaaatctgaacaagttggttgatacttggcttctctttccttgtctctagatctctgagctgcccagcatagtccaagacctagccaatggcaacatcacatgggctgatgtggaggccaggtatcctctgtttgaagggcaagagactggtaaaaaagagacaatcgaggaatgaggacaattttgacaacttttgaccacttgcgctaataaaaaaaaaaaaaactactcttatgtccactttacaaaagaaaacagcattgtgattactcccagggaccgtattttatcttcagtggctgcctgattttacccccacaattaaagttgaaggaatcctgaaaaaa

SEQ ID NO: 371821 - DNA, 2749 bp, Homo sapiens
  misc_feature (253)..(253): n is a, c, g, or t
gtcactcgtataaaaacctatgctttgaaggttctcgtgtgtctcggcctgcaggtctcgctcagagctgtgtccctgaacatccaccctgctggggtggcttgacgcacttctgtgcaaatctgttcgctcgcaaccctacctacctctctcccgaaccggagaaaaccttcggcggggtccttccgggttttgtgtcgaatctgcggcggcgacccggcgccgcgtcacgcggtggtgaatgtgcggcagnacgcgcgccgcgtcgtttacgcggcgatttcatcatgctccgagccgggcggcgcgcgccgcttccgtcgccaccctctctggacagcccagggccgcaggctcatgccctctccgcgtccagtgctgcttagaggtgctcgcgccgctctgctgctgctgctgccgccccggctcttagcccgaccctcgctcctgctccgccggtccctcagcgcggcctcctgcgccccgatctccttgcccgccgccgcctcccggagcagcatggacggcgcgggggctgaggaggtgctggcacctctgaggctagcagtgcgccagcagggagatcttgtgcgaaaactcaaagaagataaagcaccccaagtagacgtagacaaagcagtggctgagctcaaagcccgcaagagggttctggaagcaaaggagctggcgttacagcccaaagatgatattgtagaccgagcaaaaatggaagataccctgaagaggaggtttttctatgatcaagcttttgctatttatggaggtgttagtggtctgtatgactttgggccagttggctgtgctttgaagaacaatattattcagacctggaggcagcactttatccaagaggaacagatcctggagatcgattgcaccatgctcacccctgagccagttttaaagacctctggccatgtagacaaatttgctgacttcatggtgaaagacgtaaaaaatggagaatgttttcgtgctgaccatctattaaaagctcatttacagaaattgatgtctgataagaagtgttctgtcgaaaagaaatcagaaatggaaagtgttttggcccagcttgataactatggacagcaagaacttgcggatctttttgtgaactataatgtaaaatctcccattactggaaatgatctatcccctccagtgtcttttaacttaatgttcaagactttcattgggcctggaggaaacatgcctgggtacttgagaccagaaactgcacaggggattttcttgaatttcaaacgacttttggagttcaaccaaggaaagttgccttttgctgctgcccagattggaaattcttttagaaatgagatctcccctcgatctggactgatcagagtcagagaattcacaatggcagaaattgagcactttgtagatcccagtgagaaagaccaccccaagttccagaatgtggcagaccttcacctttatttgtattcagcaaaagcccaggtcagcggacagtccgctcggaaaatgcgcctgggagatgctgttgaacagggtgtgattaataacacagtattaggctatttcattggccgcatctacctctacctcacgaaggttggaatatctccagataaactccgcttccggcagcacatggagaatgagatggcccattatgcctgtgactgttgggatgcagaatccaaaacatcctacggttggattgagattgttggatgtgctgatcgttcctgttatgacctctcctgtcatgcacgagccaccaaagtcccacttgtagctgagaaacctctgaaagaacccaaaacagtcaatgttgttcagtttgaacccagtaagggagcaattggtaaggcatataagaaggatgcaaaactggtgatggagtatcttgccatttgtgatgagtgctacattacagaaatggagatgctgctgaatgagaaaggggaattcacaattgaaactgaagggaaaacatttcagttaacaaaagacatgatcaatgtgaagagattccagaaaacactatatgtggaagaagttgttccgaatgtaattgaaccttccttcggcctgggtaggatcatgtatacggtatttgaacatacattccatgtacgagaaggagatgaacagagaacattcttcagtttccctgctgtagttgctccattcaaatgttccgtcctcccactgagccaaaaccaggagttcatgccatttgtcaaggaattatcggaagccctgaccaggcatggagtatctcacaaagtagacgattcctctgggtcaatcggaaggcgctatgccaggactgatgagattggcgtggcttttggtgtcaccattgactttgacacagtgaacaagaccccccacactgcaactctgagggaccgtgactcaatgcggcagataagagcagagatctctgagctgcccagcatagtccaagacctagccaatggcaacatcacatgggctgatgtggaggccaggtatcctctgtttgaagggcaagagactggtaaaaaagagacaatcgaggaatgaggacaattttgacaacttttgaccacttgcgctaataaaaaaaaaaaaaactactcttatgtccactttacaaaagaaaacagcattgtgattactcccagggaccgtattttatcttcagtggctgcctgattttacccccacaattaaagttgaaggaatcctgaaaaaa

SEQ ID NO: 371822 - DNA, 2596 bp, Homo sapiens
gctccccattgtccttgtcaatactgtgagactcatccaatatcctatccacctctacgtagtctggattaaagggctcttcatcctcatggaagaagtgtctcatctgagccagggggggcggcgatttcatcatgctccgagccgggcggcgcgcgccgcttccgtcgccaccctctctggacagcccagggccgcaggctcatgccctctccgcgtccagtgctgcttagaggtgctcgcgccgctctgctgctgctgctgccgccccggctcttagcccgaccctcgctcctgctccgccggtccctcagcgcggcctcctgcgccccgatctccttgcccgccgccgcctcccggagcagcatggacggcgcgggggctgaggaggtgctggcacctctgaggctagcagtgcgccagcagggagatcttgtgcgaaaactcaaagaagataaagcaccccaagtagacgtagacaaagcagtggctgagctcaaagcccgcaagagggttctggaagcaaaggagctggcgttacagcccaaagatgatattgtagaccgagcaaaaatggaagataccctgaagaggaggtttttctatgatcaagcttttgctatttatggaggtgttagtggtctgtatgactttgggccagttggctgtgctttgaagaacaatattattcagacctggaggcagcactttatccaagaggaacagatcctggagatcgattgcaccatgctcacccctgagccagttttaaagacctctggccatgtagacaaatttgctgacttcatggtgaaagacgtaaaaaatggagaatgttttcgtgctgaccatctattaaaagctcatttacagaaattgatgtctgataagaagtgttctgtcgaaaagaaatcagaaatggaaagtgttttggcccagcttgataactatggacagcaagaacttgcggatctttttgtgaactataatgtaaaatctcccattactggaaatgatctatcccctccagtgtcttttaacttaatgttcaagactttcattgggcctggaggaaacatgcctgggtacttgagaccagaaactgcacaggggattttcttgaatttcaaacgacttttggagttcaaccaaggaaagttgccttttgctgctgcccagattggaaattcttttagaaatgagatctcccctcgatctggactgatcagagtcagagaattcacaatggcagaaattgagcactttgtagatcccagtgagaaagaccaccccaagttccagaatgtggcagaccttcacctttatttgtattcagcaaaagcccaggtcagcggacagtccgctcggaaaatgcgcctgggagatgctgttgaacagggtgtgattaataacacagtattaggctatttcattggccgcatctacctctacctcacgaaggttggaatatctccagataaactccgcttccggcagcacatggagaatgagatggcccattatgcctgtgactgttgggatgcagaatccaaaacatcctacggttggattgagattgttggatgtgctgatcgttcctgttatgacctctcctgtcatgcacgagccaccaaagtcccacttgtagctgagaaacctctgaaagaacccaaaacagtcaatgttgttcagtttgaacccagtaagggagcaattggtaaggcatataagaaggatgcaaaactggtgatggagtatcttgccatttgtgatgagtgctacattacagaaatggagatgctgctgaatgagaaaggggaattcacaattgaaactgaagggaaaacatttcagttaacaaaagacatgatcaatgtgaagagattccagaaaacactatatgtggaagaagttgttccgaatgtaattgaaccttccttcggcctgggtaggatcatgtatacggtatttgaacatacattccatgtacgagaaggagatgaacagagaacattcttcagtttccctgctgtagttgctccattcaaatgttccgtcctcccactgagccaaaaccaggagttcatgccatttgtcaaggaattatcggaagccctgaccaggcatggagtatctcacaaagtagacgattcctctgggtcaatcggaaggcgctatgccaggactgatgagattggcgtggcttttggtgtcaccattgactttgacacagtgaacaagaccccccacactgcaactctgagggaccgtgactcaatgcggcagataagagcagagatctctgagctgcccagcatagtccaagacctagccaatggcaacatcacatgggctgatgtggaggccaggtatcctctgtttgaagggcaagagactggtaaaaaagagacaatcgaggaatgaggacaattttgacaacttttgaccacttgcgctaataaaaaaaaaaaaaactactcttatgtccactttacaaaagaaaacagcattgtgattactcccagggaccgtattttatcttcagtggctgcctgattttacccccacaattaaagttgaaggaatcctgaaaaaa

SEQ ID NO: 371823 - DNA, 2618 bp, Homo sapiens
gctccccattgtccttgtcaatactgtgagactcatccaatatcctatccacctctacgtagtctggattaaagggctcttcatcctcatggaagaagtgtctcatctgagccagggggggcggcgatttcatcatgctccgagccgggcggcgcgcgccgcttccgtcgccaccctctctggacagcccagggccgcaggctcatgccctctccgcgtccagtgctgcttagaggtgctcgcgccgctctgctgctgctgctgccgccccggctcttagcccgaccctcgctcctgctccgccggtccctcagcgcggcctcctgcgccccgatctccttgcccgccgccgcctcccggagcagcatggacggcgcgggggctgaggaggtgctggcacctctgaggctagcagtgcgccagcagggagatcttgtgcgaaaactcaaagaagataaagcaccccaagtagacgtagacaaagcagtggctgagctcaaagcccgcaagagggttctggaagcaaaggagctggcgttacagcccaaagatgatattgtagaccgagcaaaaatggaagataccctgaagaggaggtttttctatgatcaagcttttgctatttatggaggtgttagtggtctgtatgactttgggccagttggctgtgctttgaagaacaatattattcagacctggaggcagcactttatccaagaggaacagatcctggagatcgattgcaccatgctcacccctgagccagttttaaagacctctggccatgtagacaaatttgctgacttcatggtgaaagacgtaaaaaatggagaatgttttcgtgctgaccatctattaaaagctcatttacagaaattgatgtctgataagaagtgttctgtcgaaaagaaatcagaaatggaaagtgttttggcccagcttgataactatggacagcaagaacttgcggatctttttgtgaactataatgtaaaatctcccattactggaaatgatctatcccctccagtgtcttttaacttaatgttcaagactttcattgggcctggaggaaacatgcctgggtacttgagaccagaaactgcacaggggattttcttgaatttcaaacgacttttggagttcaaccaaggaaagttgccttttgctgctgcccagattggaaattcttttagaaatgagatctcccctcgatctggactgatcagagtcagagaattcacaatggcagaaattgagcactttgtagatcccagtgagaaagaccaccccaagttccagaatgtggcagaccttcacctttatttgtattcagcaaaagcccaggtcagcggacagtccgctcggaaaatgcgcctgggagatgctgttgaacagggtgtgattaataacacagtattaggctatttcattggccgcatctacctctacctcacgaaggttggaatatctccagataaactccgcttccggcagcacatggagaatgagatggcccattatgcctgtgactgttgggatgcagaatccaaaacatcctacggttggattgagattgttggatgtgctgatcgttcctgttatgacctctcctgtcatgcacgagccaccaaagtcccacttgtagctgagaaacctctgaaagaacccaaaacagtcaatgttgttcagtttgaacccagtaagggagcaattggtaaggcatataagaaggatgcaaaactggtgatggagtatcttgccatttgtgatgagtgctacattacagaaatggagatgctgctgaatgagaaaggggaattcacaattgaaactgaagggaaaacatttcagttaacaaaagacatgatcaatgtgaagagattccagaaaacactatatgtggaagaagttgttccgaatgtaattgaaccttccttcggcctgggtaggatcatgtatacggtatttgaacatacattccatgtacgagaaggagatgaacagagaacattcttcagtttccctgctgtagttgctccattcaaatgttccgtcctcccactgagccaaaaccaggagttcatgccatttgtcaaggaattatcggaagccctgaccaggcatggagtatctcacaaagtagacgattcctctgggtcaatcggaaggcgctatgccaggactgatgagattggcgtggcttttggtgtcaccattgactttgacacagtgaacaagaccccccacactgcaactctgagggaccgtgactcaatgcggcagataagagcagagatctctgagctgcccagcatagtccaagacctagccaatggcaacatcacatgggctgatgtggaggccaggtatcctctgtttgaagggcaagagactggtaaaaaagagacaatcgaggaatgaggacaattttgacaacttttgaccacttgcgctaataaaaaaaaaaaaaactactcttatgtccactttacaaaagaaaacagcattgtgattactcccagggaccgtattttatcttcagtggctgcctgattttacccccacaattaaagttgaaggaatcctgaaaaaatcctgaacaaacttgtgatcta

SEQ ID NO: 371824 - DNA, 2188 bp, Homo sapiens
  misc_feature (8)..(8): n is a, c, g, or t
  misc_feature (40)..(41): n is a, c, g, or t
  misc_feature (44)..(44): n is a, c, g, or t
gtgggggngaaagaaaattacggctaggtacgaggctggnngtngagtaaagcaccccaagtagacgtagacaaagcagtggctgagctcaaagcccgcaagagggttctggaagcaaaggagctggcgttacagcccaaagatgatattgtagaccgagcaaaaatggaagataccctgaagaggaggtttttctatgatcaagcttttgctatttatggaggtgttagtggtctgtatgactttgggccagttggctgtgctttgaagaacaatattattcagacctggaggcagcactttatccaagaggaacagatcctggagatcgattgcaccatgctcacccctgagccagttttaaagacctctggccatgtagacaaatttgctgacttcatggtgaaagacgtaaaaaatggagaatgttttcgtgctgaccatctattaaaagctcatttacagaaattgatgtctgataagaagtgttctgtcgaaaagaaatcagaaatggaaagtgttttggcccagcttgataactatggacagcaagaacttgcggatctttttgtgaactataatgtaaaatctcccattactggaaatgatctatcccctccagtgtcttttaacttaatgttcaagactttcattgggcctggaggaaacatgcctgggtacttgagaccagaaactgcacaggggattttcttgaatttcaaacgacttttggagttcaaccaaggaaagttgccttttgctgctgcccagattggaaattcttttagaaatgagatctcccctcgatctggactgatcagagtcagagaattcacaatggcagaaattgagcactttgtagatcccagtgagaaagaccaccccaagttccagaatgtggcagaccttcacctttatttgtattcagcaaaagcccaggtcagcggacagtccgctcggaaaatgcgcctgggagatgctgttgaacagggtgtgattaataacacagtattaggctatttcattggccgcatctacctctacctcacgaaggttggaatatctccagataaactccgcttccggcagcacatggagaatgagatggcccattatgcctgtgactgttgggatgcagaatccaaaacatcctacggttggattgagattgttggatgtgctgatcgttcctgttatgacctctcctgtcatgcacgagccaccaaagtcccacttgtagctgagaaacctctgaaagaacccaaaacagtcaatgttgttcagtttgaacccagtaagggagcaattggtaaggcatataagaaggatgcaaaactggtgatggagtatcttgccatttgtgatgagtgctacattacagaaatggagatgctgctgaatgagaaaggggaattcacaattgaaactgaagggaaaacatttcagttaacaaaagacatgatcaatgtgaagagattccagaaaacactatatgtggaagaagttgttccgaatgtaattgaaccttccttcggcctgggtaggatcatgtatacggtatttgaacatacattccatgtacgagaaggagatgaacagagaacattcttcagtttccctgctgtagttgctccattcaaatgttccgtcctcccactgagccaaaaccaggagttcatgccatttgtcaaggaattatcggaagccctgaccaggcatggagtatctcacaaagtagacgattcctctgggtcaatcggaaggcgctatgccaggactgatgagattggcgtggcttttggtgtcaccattgactttgacacagtgaacaagaccccccacactgcaactctgagggaccgtgactcaatgcggcagataagagcagagatctctgagctgcccagcatagtccaagacctagccaatggcaacatcacatgggctgatgtggaggccaggtatcctctgtttgaagggcaagagactggtaaaaaagagacaatcgaggaatgaggacaattttgacaacttttgaccacttgcgctaataaaaaaaaaaaaaactactcttatgtccactttacaaaagaaaacagcattgtgattactcccagggaccgtattttatcttcagtggctgcctgattttacccccacaattaaagttgaaggaatcctgaaaaaa

SEQ ID NO: 371825 - DNA, 3060 bp, Homo sapiens
  misc_feature (253)..(253): n is a, c, g, or t
  misc_feature (2775)..(2775): n is a, c, g, or t
  misc_feature (2815)..(2815): n is a, c, g, or t
  misc_feature (2825)..(2825): n is a, c, g, or t
  misc_feature (2843)..(2844): n is a, c, g, or t
gtcactcgtataaaaacctatgctttgaaggttctcgtgtgtctcggcctgcaggtctcgctcagagctgtgtccctgaacatccaccctgctggggtggcttgacgcacttctgtgcaaatctgttcgctcgcaaccctacctacctctctcccgaaccggagaaaaccttcggcggggtccttccgggttttgtgtcgaatctgcggcggcgacccggcgccgcgtcacgcggtggtgaatgtgcggcagnacgcgcgccgcgtcgtttacgcggcgatttcatcatgctccgagccgggcggcgcgcgccgcttccgtcgccaccctctctggacagcccagggccgcaggctcatgccctctccgcgtccagtgctgcttagaggtgctcgcgccgctctgctgctgctgctgccgccccggctcttagcccgaccctcgctcctgctccgccggtccctcagcgcggcctcctgcgccccgatctccttgcccgccgccgcctcccggagcagcatggacggcgcgggggctgaggaggtgctggcacctctgaggctagcagtgcgccagcagggagatcttgtgcgaaaactcaaagaagataaagcaccccaagtagacgtagacaaagcagtggctgagctcaaagcccgcaagagggttctggaagcaaaggagctggcgttacagcccaaagatgatattgtagaccgagcaaaaatggaagataccctgaagaggaggtttttctatgatcaagcttttgctatttatggaggtgttagtggtctgtatgactttgggccagttggctgtgctttgaagaacaatattattcagacctggaggcagcactttatccaagaggaacagatcctggagatcgattgcaccatgctcacccctgagccagttttaaagacctctggccatgtagacaaatttgctgacttcatggtgaaagacgtaaaaaatggagaatgttttcgtgctgaccatctattaaaagctcatttacagaaattgatgtctgataagaagtgttctgtcgaaaagaaatcagaaatggaaagtgttttggcccagcttgataactatggacagcaagaacttgcggatctttttgtgaactataatgtaaaatctcccattactggaaatgatctatcccctccagtgtcttttaacttaatgttcaagactttcattgggcctggaggaaacatgcctgggtacttgagaccagaaactgcacaggggattttcttgaatttcaaacgacttttggagttcaaccaaggaaagttgccttttgctgctgcccagattggaaattcttttagaaatgagatctcccctcgatctggactgatcagagtcagagaattcacaatggcagaaattgagcactttgtagatcccagtgagaaagaccaccccaagttccagaatgtggcagaccttcacctttatttgtattcagcaaaagcccaggtcagcggacagtccgctcggaaaatgcgcctgggagatgctgttgaacagggtgtgattaataacacagtattaggctatttcattggccgcatctacctctacctcacgaaggttggaatatctccagataaactccgcttccggcagcacatggagaatgagatggcccattatgcctgtgactgttgggatgcagaatccaaaacatcctacggttggattgagattgttggatgtgctgatcgttcctgttatgacctctcctgtcatgcacgagccaccaaagtcccacttgtagctgagaaacctctgaaagaacccaaaacagtcaatgttgttcagtttgaacccagtaagggagcaattggtaaggcatataagaaggatgcaaaactggtgatggagtatcttgccatttgtgatgagtgctacattacagaaatggagatgctgctgaatgagaaaggggaattcacaattgaaactgaagggaaaacatttcagttaacaaaagacatgatcaatgtgaagagattccagaaaacactatatgtggaagaagttgttccgaatgtaattgaaccttccttcggcctgggtaggatcatgtatacggtatttgaacatacattccatgtacgagaaggagatgaacagagaacattcttcagtttccctgctgtagttgctccattcaaatgttccgtcctcccactgagccaaaaccaggagttcatgccatttgtcaaggaattatcggaagccctgaccaggcatggagtatctcacaaagtagacgattcctctgggtcaatcggaaggcgctatgccaggactgatgagattggcgtggcttttggtgtcaccattgactttgacacagtgaacaagaccccccacactgcaactctgagggaccgtgactcaatgcggcagataagagcagagatctctgagctgcccagcatagtccaagacctagccaatggcaacatcacatgggctgatgtggaggccaggtatcctctgttttaccagtctcttgcaagaaggaagctcctgcccctcctaaagctgaagccaaagcgaaggctttaaaggccaagaaggcagtgttgaaaggtgtccacagccacaaaaagaagaagatccgcacgtcacccaccttccggcggccgaagacactgcgactccggagacagcccaaatatcctcggaagagcgctcccaggagaaacaagcttgaccactatgctatcatcaagtttccgntgaccactgagtctgccatgaagaagatagaagacaaaanacacttgtgntcattgtggatgttaaanncaacaagcaccagattaaaaaggctgtgaggaagctgttgacattgatgtggccaaggtcaacaaccttgattacggcttgatggagagaagaagggatatgttctggtggatcctgataacgatgctttgggatgttggcacaaaaatgggatcatctagagtgagttcagatagctaattctgaatatatatatatatataattagtacacata

SEQ ID NO: 371826 - DNA, 3454 bp, Homo sapiens
  misc_feature (253)..(253): n is a, c, g, or t
gtcactcgtataaaaacctatgctttgaaggttctcgtgtgtctcggcctgcaggtctcgctcagagctgtgtccctgaacatccaccctgctggggtggcttgacgcacttctgtgcaaatctgttcgctcgcaaccctacctacctctctcccgaaccggagaaaaccttcggcggggtccttccgggttttgtgtcgaatctgcggcggcgacccggcgccgcgtcacgcggtggtgaatgtgcggcagnacgcgcgccgcgtcgtttacgcggcgatttcatcatgctccgagccgggcggcgcgcgccgcttccgtcgccaccctctctggacagcccagggccgcaggctcatgccctctccgcgtccagtgctgcttagaggtgctcgcgccgctctgctgctgctgctgccgccccggctcttagcccgaccctcgctcctgctccgccggtccctcagcgcggcctcctgcgccccgatctccttgcccgccgccgcctcccggagcagcatggacggcgcgggggctgaggaggtgctggcacctctgaggctagcagtgcgccagcagggagatcttgtgcgaaaactcaaagaagataaagcaccccaagtagacgtagacaaagcagtggctgagctcaaagcccgcaagagggttctggaagcaaaggagctggcgttacagcccaaagatgatattgtagaccgagcaaaaatggaagataccctgaagaggaggtttttctatgatcaagcttttgctatttatggaggtgttagtggtctgtatgactttgggccagttggctgtgctttgaagaacaatattattcagacctggaggcagcactttatccaagaggaacagatcctggagatcgattgcaccatgctcacccctgagccagttttaaagacctctggccatgtagacaaatttgctgacttcatggtgaaagacgtaaaaaatggagaatgttttcgtgctgaccatctattaaaagctcatttacagaaattgatgtctgataagaagtgttctgtcgaaaagaaatcagaaatggaaagtgttttggcccagcttgataactatggacagcaagaacttgcggatctttttgtgaactataatgtaaaatctcccattactggaaatgatctatcccctccagtgtcttttaacttaatgttcaagactttcattgggcctggaggaaacatgcctgggtacttgagaccagaaactgcacaggggattttcttgaatttcaaacgacttttggagttcaaccaaggaaagttgccttttgctgctgcccagattggaaattcttttagaaatgagatctcccctcgatctggactgatcagagtcagagaattcacaatggcagaaattgagcactttgtagatcccagtgagaaagaccaccccaagttccagaatgtggcagaccttcacctttatttgtattcagcaaaagcccaggtcagcggacagtccgctcggaaaatgcgcctgggagatgctgttgaacagggtgtgattaataacacagtattaggctatttcattggccgcatctacctctacctcacgaaggttggaatatctccagataaactccgcttccggcagcacatggagaatgagatggcccattatgcctgtgactgttgggatgcagaatccaaaacatcctacggttggattgagattgttggatgtgctgatcgttcctgttatgacctctcctgtcatgcacgagccaccaaagtcccacttgtagctgagaaacctctgaaagaacccaaaacagtcaatgttgttcagtttgaacccagtaagggagcaattggtaaggcatataagaaggatgcaaaactggtgatggagtatcttgccatttgtgatgagtgctacattacagaaatggagatgctgctgaatgagaaaggggaattcacaattgaaactgaagggaaaacatttcagttaacaaaagacatgatcaatgtgaagagattccagaaaacactatatgtggaagaagttgttccgaatgtaattgaaccttccttcggcctgggtaggatcatgtatacggtatttgaacatacattccatgtacgagaaggagatgaacagagaacattcttcagtttccctgctgtagttgctccattcaaatgttccgtcctcccactgagccaaaaccaggagttcatgccatttgtcaaggaattatgtaagcaaattcaattgggtaaactccatgggaacaccatcaaggagactgaattttaggaaatgtatcatttatttcaataaaaatatagactgaataaagaatataaatgattttataaagagtacatgattttagcctgtactcttatttctaagcgagaggatatgcttgctcagatgttttattctggcatttgagtgaggcaaggtaggacccaagagtcagatttaaaaattatttacttctcatactgaccttggtgccaagttcatcgagggaacctgagtggagtgtagcaaccataatggatctacagccacagaatccacagccctgaaaggaatcctggtggtcatctggcacatccacttatttcagagctgggaaatggggagagtccattgacctgcttagagccataaaaatagaggtggtggagtcaggactcaccttctggccttggctcttggtcccatatttgttccccctatagctgtatcagatggaggtatgagtgaagatttggattcccgcaagggatttattaaactttagggatatttctttctcttgcaactcaacttgtggctttcttgtcttggtcccatttataagtctcctgagcttgtaagacagtagttagataacactgggcttaactccattgttttatttttaatttactttgtttattttggatagcggaagccctgaccaggcatggagtatctcacaaagtagacgattcctctgggtcaatcggaaggcgctatgccaggactgatgagattggcgtggcttttggtgtcaccattgactttgacacagtgaacaagaccccccacactgcaactctgagggaccgtgactcaatgcggcagataagagcagagatctctgagctgcccagcatagtccaagacctagccaatggcaacatcacatgggctgatgtggaggccaggtatcctctgtttgaagggcaagagactggtaaaaaagagacaatcgaggaatgaggacaattttgacaacttttgaccacttgcgctaataaaaaaaaaaaaaactactcttatgtccactttacaaaagaaaacagcattgtgattactcccagggaccgtattttatcttcagtggctgcctgattttacccccacaattaaagttgaaggaatcctgaaaaaa

SEQ ID NO: 371827 - DNA, 2027 bp, Homo sapiens
  misc_feature (253)..(253): n is a, c, g, or t
gtcactcgtataaaaacctatgctttgaaggttctcgtgtgtctcggcctgcaggtctcgctcagagctgtgtccctgaacatccaccctgctggggtggcttgacgcacttctgtgcaaatctgttcgctcgcaaccctacctacctctctcccgaaccggagaaaaccttcggcggggtccttccgggttttgtgtcgaatctgcggcggcgacccggcgccgcgtcacgcggtggtgaatgtgcggcagnacgcgcgccgcgtcgtttacgcggcgatttcatcatgctccgagccgggcggcgcgcgccgcttccgtcgccaccctctctggacagcccagggccgcaggctcatgccctctccgcgtccagtgctgcttagaggtgctcgcgccgctctgctgctgctgctgccgccccggctcttagcccgaccctcgctcctgctccgccggtccctcagcgcggcctcctgcgccccgatctccttgcccgccgccgcctcccggagcagcatggacggcgcgggggctgaggaggtgctggcacctctgaggctagcagtgcgccagcagggagatcttgtgcgaaaactcaaagaagataaagcaccccaagtagacgtagacaaagcagtggctgagctcaaagcccgcaagagggttctggaagcaaaggagctggcgttacagcccaaagatgatattgtagaccgagcaaaaatggaagataccctgaagaggaggtttttctatgatcaagcttttgctatttatggaggtgttagtggtctgtatgactttgggccagttggctgtgctttgaagaacaatattattcagacctggaggcagcactttatccaagaggaacagatcctggagatcgattgcaccatgctcacccctgagccagttttaaagacctctggccatgtagacaaatttgctgacttcatggtgaaagacgtaaaaaatggagaatgttttcgtgctgaccatctattaaaagctcatttacagaaattgatgtctgataagaagtgttctgtcgaaaagaaatcagaaatggaaagtgttttggcccagcttgataactatggacagcaagaacttgcggatctttttgtgaactataatgtaaaatctcccattactggaaatgatctatcccctccagtgtcttttaacttaatgttcaagactttcattgggcctggaggaaacatgcctgggtacttgagaccagaaactgcacaggggattttcttgaatttcaaacgacttttggagttcaaccaaggaaagttgccttttgagaattcacaatggcagaaattgagcactttgtagatcccagtgagaaagaccaccccaagttccagaatgtggcagaccttcacctttatttgtattcagcaaaagcccaggtcagcggacagtccgctcggaaaatgcgcctgggagatgctgttgaacagggtgtgattaataacacagtattaggctatttcattggccgcatctacctctacctcacgaaggttggaatatctccagataaactccgcttccggcagcacatggagaatgagatggcccattatgcctgtgactgttgggatgcagaatccaaaacatcctacggttggattgagattgttggatgtgctgatcgttcctgttatgacctctcctgtcatgcacgagccaccaaagtcccacttgtagctgagaaacctctgaaagaacccaaaacagtcaatgttgttcagtttgaacccagtaagggagcaattggtaaggcatataagaaggatgcaaaactggtgatggagtatcttgccatttgtgatgagtgctacattacagaaatggagatgctgctgaatgagaaaggggaattcacaattgaaactggagggaaaacatttcagttaacgtgttccgaattgtattgaaactttctttcggccgggtaggaacatgtttaccggatttggacatacatttcatgtacgaaa

SEQ ID NO: 371828 - DNA, 1255 bp, Homo sapiens
ctgggattacaggcatgagccactgtgtccagccttatttttgctttctttgatttctgagttactcagaaactatttcagggcagtttaagaaggctgtactttttagtgtaggtatatggaacatctttttttgttttgtactatttcttttggacatatgtttgtgagctaattaaacttttctgtttcacttggtcactgaggttcataggtttttctcttaaaagacagaatgggctttggtttgggtcactgccacttgtttgaatatttaggtagtctccacagaaagtcttttatgtggaaccaaaaaattaccgtcttttatatacagtagctttcagaatgctttcacatcatttgacttttttagtaacgggcttgtgaagcaagcagagcaggtggtagagacctgctttttaggtggagaaactaaggttcagaaagagttcatgacttggcctaaattcggagctgaaaccaggtgtttctgatgctggttctgcttctcttttgccatactgcttttcatgtcatgttttctggcattttggtaatgacgttatgcttgaacacttgctgaatattaacctcttttggtttgggatattagcatttagatatttacaaattaacatatttggatttttttctttttaaatcatccagttcttcagtttccctgctgtagttgctccattcaaatgttccgtcctcccactgagccaaaaccaggagttcatgccatttgtcaaggaattatcggaagccctgaccaggcatggagtatctcacaaagtagacgattcctctgggtcaatcggaaggcgctatgccaggactgatgagattggcgtggcttttggtgtcaccattgactttgacacagtgaacaagaccccccacactgcaactctgagggaccgtgactcaatgcggcagataagagcagagatctctgagctgcccagcatagtccaagacctagccaatggcaacatcacatgggctgatgtggaggccaggtatcctctgtttgaagggcaagagactggtaaaaaagagacaatcgaggaatgaggacaattttgacaacttttgaccacttgcgctaataaaaaaaaaaaaaactactcttatgtccactttacaaaagaaaacagcattgtgattactcccagggaccgtattttatcttcagtggctgcctgattttacccccacaattaaagttgaaggaatcctgaaaaaa

SEQ ID NO: 371829 - DNA, 778 bp, Homo sapiens
gaagacctgatccatgtgagaaaattcccgtagaaagagctgatagtgtcggcatgaagtacgttcccgtagagtagtaatttgaacccttctccatttacggatcgtcgtggttaccgatctagtcgtcctagcgttcagtgtgagacaatagcattcacagagatatggatgaagggcgcctcgaaggcatgtacccagtgatcctaggctcggccgagtgtgctatctcaggccgtcctcccactgagccaaaaccaggagttcatgccatttgtcaaggaattatcggaagccctgaccaggcatggagtatctcacaaagtagacgattcctctgggtcaatcggaaggcgctatgccaggactgatgagattggcgtggcttttggtgtcaccattgactttgacacagtgaacaagaccccccacactgcaactctgagggaccgtgactcaatgcggcagataagagcagagatctctgagctgcccagcatagtccaagacctagccaatggcaacatcacatgggctgatgtggaggccaggtatcctctgtttgaagggcaagagactggtaaaaaagagacaatcgaggaatgaggacaattttgacaacttttgaccacttgcgctaataaaaaaaaaaaaaactactcttatgtccactttacaaaagaaaacagcattgtgattactcccagggaccgtattttatcttcagtggctgcctgattttacccccacaattaaagttgaaggaatcctgaaaaaa

SEQ ID NO: 371830 - DNA, 508 bp, Homo sapiens
tcaggaggctgatctccttcatttggggcaggttctataggatatagctctcgaaagaatgagatacaagtcagcagatatttattaggcacttatgacattaccaaccttagttaccagccttaggtgaatgtctcccaggagctttagaaggcacttgaatcatgagacatttcccccatctctgaaaagcatgaagaatgtgtgtggggagggtgaagggcttggcagagagaaagaggacactgaaggtgatcagcccctctctccacctccagcatattgggaaggcatccgtcttcatctcattaccaactcgtcaaaacagcaccatctggtcacctgttttgcagaggcagcccccatttccacttttaacagcattgcatggagcaggggatagtgggggaaaccagtggctgggagtcctatgccactctcaacatgaatgcttacaggtacgctggcacacactaccaatgaaaaggcttttttaaaataatgaaaa

SEQ ID NO: 371831 - DNA, 1235 bp, Homo sapiens
ggttctggctactgaatgatcccacagctgaggtctattgtcatcgctccacttctatttttagcagcactaaaaacattcccaaaaaaaatgttttttagctttttaactgtagattcaccactaagaaattggcattggaacagtccacagagcttattcaaatttcacccattttacatgcactcatttgtgttgcatgtgatatatagttctatttcattttatcacctgtgtagatggatgaaaacagcaacataagcaagatacagagctgttccgtcatcacagagctctgccatactatccttttatagccatctctacctctgtcccccatttctaacccctggaaaccactaatctgttcttcataattttcttatttcaagaatcttacgtaaataggatcacgaagtataacctttgagaatggccttttcactccattcccttgagatacatccaggtagttgcatgtatcaatagttaattcctttttattgctacacagtactccatagtatgaatatactatgtacatagcatatatatttatagtttaaccattcaccttgaacattttggttgtttccagtttgggggcattaacaataaagctgatctgaacaatcaggtataatagtccccctttatctttgaagattatatcccaagactcccagtgagtgtctgaaaccatggatagtatatacactatccatatgtgctatatgtactatatgtcctctatatattttttctatacatacatacctttgatgtttaattaagcactgcaagaaactgacagcaataaatagaacaattatactgtaattaaatgaatgtggcctcaaaatgtactgttctcacatattttcagactgtgggtaactgaaactgcataaagcaaaactggctgggtgcggtggtgcacacctgtaatcccaggactttggcaggctggtctcgaactcctgacctcaagcgattcgcccacctcgacctcccaaagtgctgggattacaggcgtgagccactgcacccagctgaacacaatctgtaccttccatgtactgatttatgtctttgtctgtaactcctgtccacctaaaatgtacaaaaccaaactgtaattctactgtctcaggcacactttctcaggacctcttgagcctgtgttccccaggccatggtcactcatattggctcaaaataaatctctttaaaac

SEQ ID NO: 371832 - DNA, 842 bp, Homo sapiens
  misc_feature (53)..(53): n is a, c, g, or t
ataaccctctccactcgcagttgtgcgccggtgggcgcccgcggtgcacctcnaggcgagacttgaaatctgtgctttgagggacactgtggctgtttacctgacacccgaaagcaagtcaagttttaagcaggctttggaagccctgccccagctttccagtggagcagataaaaagttactggaagagctcctgaacaagttcaagagtagcatgcacttgcagctcacctgtttccaagcagcttcttcaaccatgatgaaaacataaatatctgccacataaaagaagtccaggaaaataacacgtaataagactgttcactctctaagtaccctaaaggtatttggtgtattaaacattgggtttgccatttttctcttttttcttcctctgacttcgaaaattgttggtatacatttcaaccaaaatgacctcatttgaaatgcccaggaagtatttgttttgccattcttactagatcagatcctgtatgactttaaaatacattttaaaatatattttgcatctcagcagaaggttgagtgctgcaggaagagctgcttctgcagggagttttctggaatggcgtggcacatattgaagcatttctcagtgtcccgttcacggaagcgcaggcagctcccacgacacacggagagactgactgatacgagatttggaaagctatgtagacatctttggagctcttactgtcctaaactgtacagctgtgcttaaaacccttatttcatataaatggccttaagttttctaattcaagcgggtttttggaaaaatttatggtctccattaaaatacatattacaactggggtaga

SEQ ID NO: 371833 - DNA, 3232 bp, Homo sapiens
ccgcggagtcttcggcgagacctaccgggccctgtctgtgccggccgtgagctgcggcaggacggctggagattacttctctaacaggatcaccagtttgctccacaaagcacaatgtctcgatcacgacaacccccccttgtgaccggcatctctccaaatgaagggataccatggacgaaggtcacaatcaggggagaaaatctggggactggccccaccgacctcataggcttgaccatttgtggacataattgcctcctgacggcagaatggatgtctgcaagtaaaatagtatgtcgagtgggacaagccaaaaatgacaaaggagacattattgtcaccactaagtcaggtggcagaggaacctcaacagtctctttcaagctactcaaacctgagaaaataggcattttggatcagtctgctgtgtgggttgatgaaatgaattattatgatatgcgcactgacaggaacaaaggaattccgcccttgtccttacgtcctgctaacccgcttggcattgagattgaaaaaagtaaattttcgcagaaggacttagaaatgctattccatggaatgagtgctgattttacaagtgagaatttctcagcagcctggtatcttatagagaatcactcaaacaccagttttgagcagctcaaaatggcagtcaccaacctaaagagacaggctaacaagaagagtgagggcagcctggcctatgtgaaaggcggtctcagtacattcttcgaagcacaggatgccctctcagccatccatcaaaaactagaagcagatggaacggaaaaagtagaaggatccatgacgcagaaactggagaatgttctgaacagagcaagtaatactgcagacacattgtttcaagaagtattaggtcggaaagacaaggcagattccactagaaatgcactcaatgtgcttcagcgatttaagtttcttttcaaccttcctctaaatattgaaaggaatattcaaaagggtgattatgatgtggttattaatgattatgaaaaggccaagtcactttttgggaaaacggaggtgcaagttttcaagaaatattatgctgaagtagaaacaaggattgaagctttaagagaattacttctggataaattgcttgagacaccatcaactttacatgaccaaaaacgttacataaggtacctgtctgaccttcatgcgtctggtgaccctgcttggcaatgcattggagcccaacacaagtggatccttcagctcatgcacagttgcaaagagggctacgtgaaagatctgaaaggtaacccaggcctgcacagtcccatgttggatcttgataatgatacacgtccctcagtgttgggccatctcagtcagacagcgtccctgaagaggggcagcagctttcagtctggtcgagacgacacgtggagatacaaaactccccacagggtggcctttgttgaaaaattgacaaaactcgtcttgagccagctgcctaacttctggaaactctggatctcctacgttaatggaagcctcttcagtgagactgctgagaagtcaggccagattgaaagatcaaagaatgtaaggcaaagacaaaatgattttaagaaaatgattcaggaagtaatgcactccctggtgaagcttacccgcggagccctgcttcccctcagcatccgggatggggaagccaagcagtacggaggctgggaggtgaagtgcgagctctccggacagtggctcgctcacgccatccagactgtaagacttactcatgaatcgttgactgcccttgaaattcctaatgacctgttacagactatccaggatctcatcttggatctccgagtacgttgcgtaatggccacgttgcagcacacggcggaagaaataaagagattagctgaaaaagaagactggattgttgacaatgaaggactgacttctctaccatgtcagtttgaacagtgcatcgtgtgttctctgcagtcactgaagggggttctggagtgcaagccgggagaggccagtgtcttccaacaacctaaaacacaggaggaggtttgccagctaagcatcaatataatgcaggtttttatatactgtctggaacagttgagcaccaagcctgatgcagatatagatactacacatctctctgttgatgtttcttcccctgacttgtttggaagtatccatgaagacttcagcttgacctcagaacagcgccttttgatagtcctaagtaattgctgctatctagaacgtcacaccttcctaaatatcgcagaacattttgaaaagcacaacttccagggaatagaaaaaatcacacaggttagcatggcctcattgaaagaactagatcaaagactctttgaaaattacatcgagttgaaagcagatcccatcgttggctccttagaacctggaatttatgcaggatattttgattggaaggactgcctgcctccaacaggtgtcagaaactatttaaaagaagcactggtgaatataattgccgtgcatgcagaggtgttcaccatttccaaagaactggtccctcgggtactatccaaggtgatagaagcagtttctgaagagctcagtcgactgatgcagtgtgtttcatccttcagcaaaaatggagctttacaggcgagacttgaaatctgtgctttgagggacactgtggctgtttacctgacacccgaaagcaagtcaagttttaagcaggctttggaagccctgccccagctttccagtggagcagataaaaagttactggaagagctcctgaacaagttcaagagtagcatgcacttgcagctcacctgtttccaagcagcttcttcaaccatgatgaaaacataaatatctgccacataaaagaagtccaggaaaataacacagaaggttgagtgctgcaggaagagctgcttctgcagggagttttctggaatggcgtggcacatattgaagcatttctcagtgtcccgttcacggaagcgcaggcagctcccacgacacacggagagactgactgatacgagatttggaaagctatgtagacatctttggagctcttactgtcctaaactgtacagctgtgcttaaaacccttatttcatataaatggccttaagttttctaattcaagcgggtttttggaaaaatttatggtctccattaaaatacatattacaactggggtaga

SEQ ID NO: 371834 - DNA, 3786 bp, Homo sapiens
ccgcggagtcttcggcgagacctaccgggccctgtctgtgccggccgtgagctgcggcaggacggctggagattacttctctaacaggatcaccagtttgctccacaaagcacaatgtctcgatcacgacaacccccccttgtgaccggcatctctccaaatgaagggataccatggacgaaggtcacaatcaggggagaaaatctggggactggccccaccgacctcataggcttgaccatttgtggacataattgcctcctgacggcagaatggatgtctgcaagtaaaatagtatgtcgagtgggacaagccaaaaatgacaaaggagacattattgtcaccactaagtcaggtggcagaggaacctcaacagtctctttcaagctactcaaacctgagaaaataggcattttggatcagtctgctgtgtgggttgatgaaatgaattattatgatatgcgcactgacaggaacaaaggaattccgcccttgtccttacgtcctgctaacccgcttggcattgagattgaaaaaagtaaattttcgcagaaggacttagaaatgctattccatggaatgagtgctgattttacaagtgagaatttctcagcagcctggtatcttatagagaatcactcaaacaccagttttgagcagctcaaaatggcagtcaccaacctaaagagacaggctaacaagaagagtgagggcagcctggcctatgtgaaaggcggtctcagtacattcttcgaagcacaggatgccctctcagccatccatcaaaaactagaagcagatggaacggaaaaagtagaaggatccatgacgcagaaactggagaatgttctgaacagagcaagtaatactgcagacacattgtttcaagaagtattaggtcggaaagacaaggcagattccactagaaatgcactcaatgtgcttcagcgatttaagtttcttttcaaccttcctctaaatattgaaaggaatattcaaaagggtgattatgatgtggttattaatgattatgaaaaggccaagtcactttttgggaaaacggaggtgcaagttttcaagaaatattatgctgaagtagaaacaaggattgaagctttaagagaattacttctggataaattgcttgagacaccatcaactttacatgaccaaaaacgttacataaggtacctgtctgaccttcatgcgtctggtgaccctgcttggcaatgcattggagcccaacacaagtggatccttcagctcatgcacagttgcaaagagggctacgtgaaagatctgaaaggtaacccaggcctgcacagtcccatgttggatcttgataatgatacacgtccctcagtgttgggccatctcagtcagacagcgtccctgaagaggggcagcagctttcagtctggtcgagacgacacgtggagatacaaaactccccacagggtggcctttgttgaaaaattgacaaaactcgtcttgagccagctgcctaacttctggaaactctggatctcctacgttaatggaagcctcttcagtgagactgctgagaagtcaggccagattgaaagatcaaagaatgtaaggcaaagacaaaatgattttaagaaaatgattcaggaagtaatgcactccctggtgaagcttacccgcggagccctgcttcccctcagcatccgggatggggaagccaagcagtacggaggctgggaggtgaagtgcgagctctccggacagtggctcgctcacgccatccagactgtaagacttactcatgaatcgttgactgcccttgaaattcctaatgacctgttacagactatccaggatctcatcttggatctccgagtacgttgcgtaatggccacgttgcagcacacggcggaagaaataaagagattagctgaaaaagaagactggattgttgacaatgaaggactgacttctctaccatgtcagtttgaacagtgcatcgtgtgttctctgcagtcactgaagggggttctggagtgcaagccgggagaggccagtgtcttccaacaacctaaaacacaggaggaggtttgccagctaagcatcaatataatgcaggtttttatatactgtctggaacagttgagcaccaagcctgatgcagatatagatactacacatctctctgttgatgtttcttcccctgacttgtttggaagtatccatgaagacttcagcttgacctcagaacagcgccttttgatagtcctaagtaattgctgctatctagaacgtcacaccttcctaaatatcgcagaacattttgaaaagcacaacttccagggaatagaaaaaatcacacaggttagcatggcctcattgaaagaactagatcaaagactctttgaaaattacatcgagttgaaagcagatcccatcgttggctccttagaacctggaatttatgcaggatattttgattggaaggactgcctgcctccaacaggtgtcagaaactatttaaaagaagcactggtgaatataattgccgtgcatgcagaggtgttcaccatttccaaagaactggtccctcgggtactatccaaggtgatagaagcagtttctgaagagctcagtcgactgatgcagtgtgtttcatccttcagcaaaaatggagctttacaggcgagacttgaaatctgtgctttgagggacactgtggctgtttacctgacacccgaaagcaagtcaagttttaagcaggctttggaagccctgccccagctttccagtggagcagataaaaagttactggaagagctcctgaacaagttcaagagtagcatgcacttgcagctcacctgtttccaagcagcttcttcaaccatgatgaaaacataaatatctgccacataaaagaagtccaggaaaataacacgtaataagactgttcactctctaagtaccctaaaggtatttggtgtattaaacattgggtttgccatttttctcttttttcttcctctgacttcgaaaattgttggtatacatttcaaccaaaatgacctcatttgaaatgcccaggaagtatttgttttgccattcttactagatcagatcctgtatgactttaaaatacattttaaaatatattttgcatctcagcagaaggttgagtgctgcaggaagagctgcttctgcagggagttttctggaatggcgtggcacatattgaagcatttctcagtgtcccgttcacggaagcgcaggcagctcccacgacacacggagagactgactgatacgagatttggaaagctatgtagacatctttggagctcttactgtcctaaactgtacagctgtgcttaaaacccttatttcatataaatggccttaagttttctaattcaagcgggtttttggaaaaatttatggtctccattaaaatacatattacaactggggtagaaaaaaaaaaaaaaaaaaaaaaaaaaaaaaaaagggggggggcaaaaaatttcccccggggggccccagtttttcgcctgttcccgctttttttttccaaaggggcccccctatggggagccgtaataatagaagaggcacgcgcgcgtgtttacacgcgtcgggcgggaaacaactgccttgggctttttgaaggaccccttcttctgtgcggggcctttttgggccccccccaggatttaggctgggaatatactttccggtctttgtgtttacccgcgctttctctgtgaattgctctggtttttatacggtgtctacatatgg

SEQ ID NO: 371835 - DNA, 1683 bp, Homo sapiens
ggccgtcggctatctgtcgggctgtaaaacaagtgtctccgtcctggaggttactggaagagctcctgaacaagttcaagagtagcatgcacttgcagctcacctgtttccaagcagcttcttcaaccatgatgaaaacataaatatctgccacataaaagaagtccaggaaaataacacgtaataagactgttcactctctaagtaccctaaaggtatttggtgtattaaacattgggtttgccatttttctcttttttcttcctctgacttcgaaaattgttggtatacatttcaaccaaaatgacctcatttgaaatgcccaggaagtatttgttttgccattcttactagatcagatcctgtatgactttaaaatacattttaaaatatattttgcatctcagcagaaggttgagtgctgcaggaagagctgcttctgcagggagttttctggaatggcgtggcacatattgaagcatttctcagtgtcccgttcacggaagcgcaggcagctcccacgacacacggagagactgactgatacgagatttggaaagctatgtagacatctttggagctcttactgtcctaaactgtacagctgtgcttaaaacccttatttcatataaatggccttaagttttctaattcaagcgggtttttggaaaaatttatggtctccattaaaatacatattacaactggggtagattatttgtggtccaggtgtctgtgatttaactttgcgttttgctatctgatttttatttttcacagggctaagcatgagctttcattctcactcactcttaatttgtcgtgcgtcactacacatgcacgtgttgcagtccctgaggccctgtgtgttatctgtgatggagtgtgaatgtgtaacgggcactgtgttacactctcaggtgttggcggggcggtcgcagacttcagggtcccctaacggaaaggccaggctccgcgtggacggccaactccctgcccgctccttcagcaggtgactgtctctgccacttcttacctgctgaaggatcttgctcagtagctggaacaatgctgctgtcacacagtctcttctctgaaacttcaggatgctccttggtcaccaggcaatgggagctgtagaccagccgcatgcacttgccccacattcactgctgactggcttcactggaataggttcaggtcaccgggacttctctcagagtcagcagcccacccaactccctcataccgtcgcatctgaaaattttcagagaggaattctctttgtagtcggcttgtcagggttttcaagtttttctatggttatttttaaatctctttttttaaatgctaaaattaatgtcctcattaatgcaagtaattttagagcacagtgtagccatgtacagtttccattatttaaaataaataaatgtgttggttcatttggtgtatggggggacatcatggtaactggaaatgaaagtttaatctttcacaaatgtgcttgataaagctgttaagaattgtctttcctaagtatgttaactgttgtatctaactcaactgtgagctaagtttaaaaactgcaatcatgaatgtttgtgatattttaaatatctactacagcacattcagccaataaagaatctgcctttaatgtaagttgtaatttacttgaca

SEQ ID NO: 371836 - DNA, 3267 bp, Homo sapiens
ccgcggagtcttcggcgagacctaccgggccctgtctgtgccggccgtgagctgcggcaggacggctggagattacttctctaacaggatcaccagtttgctccacaaagcacaatgtctcgatcacgacaacccccccttgtgaccggcatctctccaaatgaagggataccatggacgaaggtcacaatcaggggagaaaatctggggactggccccaccgacctcataggcttgaccatttgtggacataattgcctcctgacggcagaatggatgtctgcaagtaaaatagtatgtcgagtgggacaagccaaaaatgacaaaggagacattattgtcaccactaagtcaggtggcagaggaacctcaacagtctctttcaagctactcaaacctgagaaaataggcattttggatcagtctgctgtgtgggttgatgaaatgaattattatgatatgcgcactgacaggaacaaaggaattccgcccttgtccttacgtcctgctaacccgcttggcattgagattgaaaaaagtaaattttcgcagaaggacttagaaatgctattccatggaatgagtgctgattttacaagtgagaatttctcagcagcctggtatcttatagagaatcactcaaacaccagttttgagcagctcaaaatggcagtcaccaacctaaagagacaggctaacaagaagagtgagggcagcctggcctatgtgaaaggcggtctcagtacattcttcgaagcacaggatgccctctcagccatccatcaaaaactagaagcagatggaacggaaaaagtagaaggatccatgacgcagaaactggagaatgttctgaacagagcaagtaatactgcagacacattgtttcaagaagtattaggtcggaaagacaaggcagattccactagaaatgcactcaatgtgcttcagcgatttaagtttcttttcaaccttcctctaaatattgaaaggaatattcaaaagggtgattatgatgtggttattaatgattatgaaaaggccaagtcactttttgggaaaacggaggtgcaagttttcaagaaatattatgctgaagtagaaacaaggattgaagctttaagagaattacttctggataaattgcttgagacaccatcaactttacatgaccaaaaacgttacataaggtacctgtctgaccttcatgcgtctggtgaccctgcttggcaatgcattggagcccaacacaagtggatccttcagctcatgcacagttgcaaagagggctacgtgaaagatctgaaaggtaacccaggcctgcacagtcccatgttggatcttgataatgatacacgtccctcagtgttgggccatctcagtcagacagcgtccctgaagaggggcagcagctttcagtctggtcgagacgacacgtggagatacaaaactccccacagggtggcctttgttgaaaaattgacaaaactcgtcttgagccagctgcctaacttctggaaactctggatctcctacgttaatggaagcctcttcagtgagactgctgagaagtcaggccagattgaaagatcaaagaatgtaaggcaaagacaaaatgattttaagaaaatgattcaggaagtaatgcactccctggtgaagcttacccgcggagccctgcttcccctcagcatccgggatggggaagccaagcagtacggaggctgggaggtgaagtgcgagctctccggacagtggctcgctcacgccatccagactgtaagacttactcatgaatcgttgactgcccttgaaattcctaatgacctgttacagactatccaggatctcatcttggatctccgagtacgttgcgtaatggccacgttgcagcacacggcggaagaaataaagagattagctgaaaaagaagactggattgttgacaatgaaggactgacttctctaccatgtcagtttgaacagtgcatcgtgtgttctctgcagtcactgaagggggttctggagtgcaagccgggagaggccagtgtcttccaacaacctaaaacacaggaggaggtttgccagctaagcatcaatataatgcaggtttttatatactgtctggaacagttgagcaccaagcctgatgcagatatagatactacacatctctctgttgatgtttcttcccctgacttgtttggaagtatccatgaagacttcagcttgacctcagaacagcgccttttgatagtcctaagtaattgctgctatctagaacgtcacaccttcctaaatatcgcagaacattttgaaaagcacaacttccagggaatagaaaaaatcacacaggttagcatggcctcattgaaagaactagatcaaagactctttgaaaattacatcgagttgaaagcagatcccatcgttggctccttagaacctggaatttatgcaggatattttgattggaaggactgcctgcctccaacaggtgtcagaaactatttaaaagaagcactggtgaatataattgccgtgcatgcagaggtgttcaccatttccaaagaactggtccctcgggtactatccaaggtgatagaagcagtttctgaagagctcagtcgactgatgcagtgtgtttcatccttcagcaaaaatggagctttacaggcgagacttgaaatctgtgctttgagggacactgtggctgtttacctgacacccgaaagcaagtcaagttttaagcaggctttggaagccctgccccagctttccagtggagcagataaaaagttactggaagagctcctgaacaagttcaagagtagcatgcacttgcagctcacctgtttccaagcagcttcttcaaccatgatgaaaacataaatatctgccacataaaagaagtccaggaaaataacacgtaataagactgttcactctctaagtaccctaaagagaaggttgagtgctgcaggaagagctgcttctgcagggagttttctggaatggcgtggcacatattgaagcatttctcagtgtcccgttcacggaagcgcaggcagctcccacgacacacggagagactgactgatacgagatttggaaagctatgtagacatctttggagctcttactgtcctaaactgtacagctgtgcttaaaacccttatttcatataaatggccttaagttttctaattcaagcgggtttttggaaaaatttatggtctccattaaaatacatattacaactggggtaga

SEQ ID NO: 371837 - DNA, 2767 bp, Homo sapiens
ccgcggagtcttcggcgagacctaccgggccctgtctgtgccggccgtgagctgcggcaggacggctggagattacttctctaacaggatcaccagtttgctccacaaagcacaatgtctcgatcacgacaacccccccttgtgaccggcatctctccaaatgaagggataccatggacgaaggtcacaatcaggggagaaaatctggggactggccccaccgacctcataggcttgaccatttgtggacataattgcctcctgacggcagaatggatgtctgcaagtaaaatagtatgtcgagtgggacaagccaaaaatgacaaaggagacattattgtcaccactaagtcaggtggcagaggaacctcaacagtctctttcaagctactcaaacctgagaaaataggcattttggatcagtctgctgtgtgggttgatgaaatgaattattatgatatgcgcactgacaggaacaaaggaattccgcccttgtccttacgtcctgctaacccgcttggcattgagattgaaaaaagtaaattttcgcagaaggacttagaaatgctattccatggaatgagtgctgattttacaagtgagaatttctcagcagcctggtatcttatagagaatcactcaaacaccagttttgagcagctcaaaatggcagtcaccaacctaaagagacaggctaacaagaagagtgagggcagcctggcctatgtgaaaggcggtctcagtacattcttcgaagcacaggatgccctctcagccatccatcaaaaactagaagcagatggaacggaaaaagtagaaggatccatgacgcagaaactggagaatgttctgaacagagcaagtaatactgcagacacattgtttcaagaagtattaggtcggaaagacaaggcagattccactagaaatgcactcaatgtgcttcagcgatttaagtttcttttcaaccttcctctaaatattgaaaggaatattcaaaagggtgattatgatgtggttattaatgattatgaaaaggccaagtcactttttgggaaaacggaggtgcaagttttcaagaaatattatgctgaagtagaaacaaggattgaagctttaagagaattacttctggataaattgcttgagacaccatcaactttacatgaccaaaaacgttacataaggtacctgtctgaccttcatgcgtctggtgaccctgcttggcaatgcattggagcccaacacaagtggatccttcagctcatgcacagttgcaaagagggctacgtgaaagatctgaaaggtaacccaggcctgcacagtcccatgttggatcttgataatgatacacgtccctcagtgttgggccatctcagtcagacagcgtccctgaagaggggcagcagctttcagtctggtcgagacgacacgtggagatacaaaactccccacagggtggcctttgttgaaaaattgacaaaactcgtcttgagccagctgcctaacttctggaaactctggatctcctacgttaatggaagcctcttcagtgagactgctgagaagtcaggccagattgaaagatcaaagaatgtaaggcaaagacaaaatgattttaagaaaatgattcaggaagtaatgcactccctggtgaagcttacccgcggagccctgcttcccctcagcatccgggatggggaagccaagcagtacggaggctgggaggtgaagtgcgagctctccggacagtggctcgctcacgccatccagactgtaagacttactcatgaatcgttgactgcccttgaaattcctaatgacctgttacagactatccaggatctcatcttggatctccgagtacgttgcgtaatggccacgttgcagcacacggcggaagaaataaagagattagctgaaaaagaagactggattgttgacaatgaaggactgacttctctaccatgtcagtttgaacagtgcatcgtgtgttctctgcagtcactgaagggggttctggagtgcaagccgggagaggccagtgtcttccaacaacctaaaacacaggaggaggtttgccagctaagcatcaatataatgcaggtttttatatactgtctggaacagttgagcaccaagcctgatgcagatatagatactacacatctctctgttgatgtttcttcccctgacttgtttggaagtatccatgaagacttcagcttgacctcagaacagcgccttttgatagtcctaagtaattgctgctatctagaacgtcacaccttcctaaatatcgcagaacattttgaaaagcacaacttccagggaatagaaaaaatcacacaggttagcatggcctcattgaaagaactagatcaaagactctttgaaaattacatcgagttgaaagcagatcccatcgttggctccttagaacctggaatttatgcaggatattttgattggaaggactgcctgcctccaacagttctgggacacatgtgcagagcgtgcaggtttcttacatagatacagatgtgccgtggtgtttggtagtcatgggacgaccagaggcaggagccatgctgacctcttcacaagatgacacctctacgtaattacagtcattgccgagtctggtggttcttccccatacgtaaatgtcctaatgaatgaccgaataaggattataagacatttttctttccactcagcatatattgctcttacttttctatcaataaaaaaataaatccataag

SEQ ID NO: 371838 - DNA, 199 bp, Homo sapiens
tgaaatgaattattatgatatgcgcactgacaggaacaaaggaattccgcccttgtccttacgtcctgctaacccgcttggcattgagattgaaaagtgagtaccatcttgctttcagtcttctttatttttcagttcctgaaaagttttatatacttacaggaaagggactcaaactccagaaacatcccaggaaaca

SEQ ID NO: 371839 - DNA, 3460 bp, Homo sapiens
ccgcggagtcttcggcgagacctaccgggccctgtctgtgccggccgtgagctgcggcaggacggctggagattacttctctaacaggatcaccagtttgctccacaaagcacaatgtctcgatcacgacaacccccccttgtgaccggcatctctccaaatgaagggataccatggacgaaggtcacaatcaggggagaaaatctggggactggccccaccgacctcataggcttgaccatttgtggacataattgcctcctgacggcagaatggatgtctgcaagtaaaatagtatgtcgagtgggacaagccaaaaatgacaaaggagacattattgtcaccactaagtcaggtggcagaggaacctcaacagtctctttcaagctactcaaacctgagaaaataggcattttggatcagtctgctgtgtgggttgatgaaatgaattattatgatatgcgcactgacaggaacaaaggaattccgcccttgtccttacgtcctgctaacccgcttggcattgagattgaaaaaagtaaattttcgcagaaggacttagaaatgctattccatggaatgagtgctgattttacaagtgagaatttctcagcagcctggtatcttatagagaatcactcaaacaccagttttgagcagctcaaaatggcagtcaccaacctaaagagacaggctaacaagaagagtgagggcagcctggcctatgtgaaaggcggtctcagtacattcttcgaagcacaggatgccctctcagccatccatcaaaaactagaagcagatggaacggaaaaagtagaaggatccatgacgcagaaactggagaatgttctgaacagagcaagtaatactgcagacacattgtttcaagaagtattaggtcggaaagacaaggcagattccactagaaatgcactcaatgtgcttcagcgatttaagtttcttttcaaccttcctctaaatattgaaaggaatattcaaaagggtgattatgatgtggttattaatgattatgaaaaggccaagtcactttttgggaaaacggaggtgcaagttttcaagaaatattatgctgaagtagaaacaaggattgaagctttaagagaattacttctggataaattgcttgagacaccatcaactttacatgaccaaaaacgttacataaggtacctgtctgaccttcatgcgtctggtgaccctgcttggcaatgcattggagcccaacacaagtggatccttcagctcatgcacagttgcaaagagggctacgtgaaagatctgaaaggtaacccaggcctgcacagtcccatgttggatcttgataatgatacacgtccctcagtgttgggccatctcagtcagacagcgtccctgaagaggggcagcagctttcagtctggtcgagacgacacgtggagatacaaaactccccacagggtggcctttgttgaaaaattgacaaaactcgtcttgagccagctgcctaacttctggaaactctggatctcctacgttaatggaagcctcttcagtgagactgctgagaagtcaggccagattgaaagatcaaagaatgtaaggcaaagacaaaatgattttaagaaaatgattcaggaagtaatgcactccctggtgaagcttacccgcggagccctgcttcccctcagcatccgggatggggaagccaagcagtacggaggctgggaggtgaagtgcgagctctccggacagtggctcgctcacgccatccagactgtaagacttactcatgaatcgttgactgcccttgaaattcctaatgacctgttacagactatccaggatctcatcttggatctccgagtacgttgcgtaatggccacgttgcagcacacggcggaagaaataaagagattagctgaaaaagaagactggattgttgacaatgaaggactgacttctctaccatgtcagtttgaacagtgcatcgtgtgttctctgcagtcactgaagggggttctggagtgcaagccgggagaggccagtgtcttccaacaacctaaaacacaggaggaggtttgccagctaagcatcaatataatgcaggtttttatatactgtctggaacagttgagcaccaagcctgatgcagatatagatactacacatctctctgttgatgtttcttcccctgacttgtttggaagtatccatgaagacttcagcttgacctcagaacagcgccttttgatagtcctaagtaattgctgctatctagaacgtcacaccttcctaaatatcgcagaacattttgaaaagcacaacttccagggaatagaaaaaatcacacaggttagcatggcctcattgaaagaactagatcaaagactctttgaaaattacatcgagttgaaagcagatcccatcgttggctccttagaacctggaatttatgcaggatattttgattggaaggactgcctgcctccaacaggtgtcagaaactatttaaaagaagcactggtgaatataattgccgtgcatgcagaggtgttcaccatttccaaagaactggtccctcgggtactatccaaggtgatagaagcagtttctgaagagctcagtcgactgatgcagtgtgtttcatccttcagcaaaaatggagctttacaggcgagacttgaaatctgtgctttgagggacactgtggctgtttacctgacacccgaaagcaagtcaagttttaagcaggctttggaagccctgccccagctttccagtggagcagataaaaagttactggaagagctcctgaacaagttcaagagtagcatgcacttgcagctcacctgtttccaagcagcttcttcaaccatgatgaaaacataaatatctgccacataaaagaagtccaggaaaataacacgtaataagactgttcactctctaagtaccctaaaggtatttggtgtattaaacattgggtttgccatttttctcttttttcttcctctgacttcgaaaattgttggtatacatttcaaccaaaatgacctcatttgaaatgcccaggaagtatttgttttgccattcttactagatcagatcctgtatgactttaaaatacattttaaaatatattttgcatctcagcagaaggttgagtgctgcaggaagagctgcttctgcagggagttttctggaatggcgtggcacatattgaagcatttctcagtgtcccgttcacggaagcgcaggcagctcccacgacacacggagagactgactgatacgagatttggaaagctatgtagacatctttggagctcttactgtcctaaactgtacagctgtgcttaaaacccttatttcatataaatggccttaagttttctaattcaagcgggtttttggaaaaatttatggtctccattaaaatacatattacaactggggtaga

SEQ ID NO: 371840 - DNA, 545 bp, Homo sapiens
accggatggccaagccctgaccacgcttaccagtgaagtcttacgagatcaggtgaaatgctggaacagtgagccggagaaaagaccctccctttaccacctgagtgagattgtggagaatctgctgcctggccaatataaaaaaaaaaaaaatcgatgtcgactcgagtcaccaggtcaccgcggacgaactgcggatccgatgtgtgggcgtacgggcaagtactcatgccgattcatcacctccacgatgtcgactcgagtcaccaggtcaccgcggacgaactgcggatccgatgtgtgggcgtacggtgtatggggggacatcatggtaactggaaatgaaagtttaatctttcacaaatgtgcttgataaagctgttaagaattgtctttcctaagtatgttaactgttgtatctaactcaactgtgagctaagtttaaaaactgcaatcatgaatgtttgtgatattttaaatatctactacagcacattcagccaataaagaatctgcctttaatgtaagttgtaatttacttgaca

SEQ ID NO: 371841 - DNA, 4429 bp, Homo sapiens
ccgcggagtcttcggcgagacctaccgggccctgtctgtgccggccgtgagctgcggcaggacggctggagattacttctctaacaggatcaccagtttgctccacaaagcacaatgtctcgatcacgacaacccccccttgtgaccggcatctctccaaatgaagggataccatggacgaaggtcacaatcaggggagaaaatctggggactggccccaccgacctcataggcttgaccatttgtggacataattgcctcctgacggcagaatggatgtctgcaagtaaaatagtatgtcgagtgggacaagccaaaaatgacaaaggagacattattgtcaccactaagtcaggtggcagaggaacctcaacagtctctttcaagctactcaaacctgagaaaataggcattttggatcagtctgctgtgtgggttgatgaaatgaattattatgatatgcgcactgacaggaacaaaggaattccgcccttgtccttacgtcctgctaacccgcttggcattgagattgaaaaaagtaaattttcgcagaaggacttagaaatgctattccatggaatgagtgctgattttacaagtgagaatttctcagcagcctggtatcttatagagaatcactcaaacaccagttttgagcagctcaaaatggcagtcaccaacctaaagagacaggctaacaagaagagtgagggcagcctggcctatgtgaaaggcggtctcagtacattcttcgaagcacaggatgccctctcagccatccatcaaaaactagaagcagatggaacggaaaaagtagaaggatccatgacgcagaaactggagaatgttctgaacagagcaagtaatactgcagacacattgtttcaagaagtattaggtcggaaagacaaggcagattccactagaaatgcactcaatgtgcttcagcgatttaagtttcttttcaaccttcctctaaatattgaaaggaatattcaaaagggtgattatgatgtggttattaatgattatgaaaaggccaagtcactttttgggaaaacggaggtgcaagttttcaagaaatattatgctgaagtagaaacaaggattgaagctttaagagaattacttctggataaattgcttgagacaccatcaactttacatgaccaaaaacgttacataaggtacctgtctgaccttcatgcgtctggtgaccctgcttggcaatgcattggagcccaacacaagtggatccttcagctcatgcacagttgcaaagagggctacgtgaaagatctgaaaggtaacccaggcctgcacagtcccatgttggatcttgataatgatacacgtccctcagtgttgggccatctcagtcagacagcgtccctgaagaggggcagcagctttcagtctggtcgagacgacacgtggagatacaaaactccccacagggtggcctttgttgaaaaattgacaaaactcgtcttgagccagctgcctaacttctggaaactctggatctcctacgttaatggaagcctcttcagtgagactgctgagaagtcaggccagattgaaagatcaaagaatgtaaggcaaagacaaaatgattttaagaaaatgattcaggaagtaatgcactccctggtgaagcttacccgcggagccctgcttcccctcagcatccgggatggggaagccaagcagtacggaggctgggaggtgaagtgcgagctctccggacagtggctcgctcacgccatccagactgtaagacttactcatgaatcgttgactgcccttgaaattcctaatgacctgttacagactatccaggatctcatcttggatctccgagtacgttgcgtaatggccacgttgcagcacacggcggaagaaataaagagattagctgaaaaagaagactggattgttgacaatgaaggactgacttctctaccatgtcagtttgaacagtgcatcgtgtgttctctgcagtcactgaagggggttctggagtgcaagccgggagaggccagtgtcttccaacaacctaaaacacaggaggaggtttgccagctaagcatcaatataatgcaggtttttatatactgtctggaacagttgagcaccaagcctgatgcagatatagatactacacatctctctgttgatgtttcttcccctgacttgtttggaagtatccatgaagacttcagcttgacctcagaacagcgccttttgatagtcctaagtaattgctgctatctagaacgtcacaccttcctaaatatcgcagaacattttgaaaagcacaacttccagggaatagaaaaaatcacacaggttagcatggcctcattgaaagaactagatcaaagactctttgaaaattacatcgagttgaaagcagatcccatcgttggctccttagaacctggaatttatgcaggatattttgattggaaggactgcctgcctccaacaggtgtcagaaactatttaaaagaagcactggtgaatataattgccgtgcatgcagaggtgttcaccatttccaaagaactggtccctcgggtactatccaaggtgatagaagcagtttctgaagagctcagtcgactgatgcagtgtgtttcatccttcagcaaaaatggagctttacaggcgagacttgaaatctgtgctttgagggacactgtggctgtttacctgacacccgaaagcaagtcaagttttaagcaggctttggaagccctgccccagctttccagtggagcagataaaaagttactggaagagctcctgaacaagttcaagagtagcatgcacttgcagctcacctgtttccaagcagcttcttcaaccatgatgaaaacataaatatctgccacataaaagaagtccaggaaaataacacgtaataagactgttcactctctaagtaccctaaaggtatttggtgtattaaacattgggtttgccatttttctcttttttcttcctctgacttcgaaaattgttggtatacatttcaaccaaaatgacctcatttgaaatgcccaggaagtatttgttttgccattcttactagatcagatcctgtatgactttaaaatacattttaaaatatattttgcatctcagcagaaggttgagtgctgcaggaagagctgcttctgcagggagttttctggaatggcgtggcacatattgaagcatttctcagtgtcccgttcacggaagcgcaggcagctcccacgacacacggagagactgactgatacgagatttggaaagctatgtagacatctttggagctcttactgtcctaaactgtacagctgtgcttaaaacccttatttcatataaatggccttaagttttctaattcaagcgggtttttggaaaaatttatggtctccattaaaatacatattacaactggggtagattatttgtggtccaggtgtctgtgatttaactttgcgttttgctatctgatttttatttttcacagggctaagcatgagctttcattctcactcactcttaatttgtcgtgcgtcactacacatgcacgtgttgcagtccctgaggccctgtgtgttatctgtgatggagtgtgaatgtgtaacgggcactgtgttacactctcaggtgttggcggggcggtcgcagacttcagggtcccctaacggaaaggccaggctccgcgtggacggccaactccctgcccgctccttcagcaggtgactgtctctgccacttcttacctgctgaaggatcttgctcagtagctggaacaatgctgctgtcacacagtctcttctctgaaacttcaggatgctccttggtcaccaggcaatgggagctgtagaccagccgcatgcacttgccccacattcactgctgactggcttcactggaataggttcaggtcaccgggacttctctcagagtcagcagcccacccaactccctcataccgtcgcatctgaaaattttcagagaggaattctctttgtagtcggcttgtcagggttttcaagtttttctatggttatttttaaatctctttttttaaatgctaaaattaatgtcctcattaatgcaagtaattttagagcacagtgtagccatgtacagtttccattatttaaaataaataaatgtgttggttcatttggtgtatggggggacatcatggtaactggaaatgaaagtttaatctttcacaaatgtgcttgataaagctgttaagaattgtctttcctaagtatgttaactgttgtatctaactcaactgtgagctaagtttaaaaactgcaatcatgaatgtttgtgatattttaaatatctactacagcacattcagccaataaagaatctgcctttaatgtaagttgtaatttacttgaca

SEQ ID NO: 371842 - DNA, 2901 bp, Homo sapiens
  misc_feature (2887)..(2887): n is a, c, g, or t
ccgcggagtcttcggcgagacctaccgggccctgtctgtgccggccgtgagctgcggcaggacggctggagattacttctctaacaggatcaccagtttgctccacaaagcacaatgtctcgatcacgacaacccccccttgtgaccggcatctctccaaatgaagggataccatggacgaaggtcacaatcaggggagaaaatctggggactggccccaccgacctcataggcttgaccatttgtggacataattgcctcctgacggcagaatggatgtctgcaagtaaaatagtatgtcgagtgggacaagccaaaaatgacaaaggagacattattgtcaccactaagtcaggtggcagaggaacctcaacagtctctttcaagctactcaaacctgagaaaataggcattttggatcagtctgctgtgtgggttgatgaaatgaattattatgatatgcgcactgacaggaacaaaggaattccgcccttgtccttacgtcctgctaacccgcttggcattgagattgaaaaaagtaaattttcgcagaaggacttagaaatgctattccatggaatgagtgctgattttacaagtgagaatttctcagcagcctggtatcttatagagaatcactcaaacaccagttttgagcagctcaaaatggcagtcaccaacctaaagagacaggctaacaagaagagtgagggcagcctggcctatgtgaaaggcggtctcagtacattcttcgaagcacaggatgccctctcagccatccatcaaaaactagaagcagatggaacggaaaaagtagaaggatccatgacgcagaaactggagaatgttctgaacagagcaagtaatactgcagacacattgtttcaagaagtattaggtcggaaagacaaggcagattccactagaaatgcactcaatgtgcttcagcgatttaagtttcttttcaaccttcctctaaatattgaaaggaatattcaaaagggtgattatgatgtggttattaatgattatgaaaaggccaagtcactttttgggaaaacggaggtgcaagttttcaagaaatattatgctgaagtagaaacaaggattgaagctttaagagaattacttctggataaattgcttgagacaccatcaactttacatgaccaaaaacgttacataaggtacctgtctgaccttcatgcgtctggtgaccctgcttggcaatgcattggagcccaacacaagtggatccttcagctcatgcacagttgcaaagagggctacgtgaaagatctgaaaggtaacccaggcctgcacagtcccatgttggatcttgataatgatacacgtccctcagtgttgggccatctcagtcagacagcgtccctgaagaggggcagcagctttcagtctggtcgagacgacacgtggagatacaaaactccccacagggtggcctttgttgaaaaattgacaaaactcgtcttgagccagctgcctaacttctggaaactctggatctcctacgttaatggaagcctcttcagtgagactgctgagaagtcaggccagattgaaagatcaaagaatgtaaggcaaagacaaaatgattttaagaaaatgattcaggaagtaatgcactccctggtgaagcttacccgcggagccctgcttcccctcagcatccgggatggggaagccaagcagtacggaggctgggaggtgaagtgcgagctctccggacagtggctcgctcacgccatccagactgtaagacttactcatgaatcgttgactgcccttgaaattcctaatgacctgttacagactatccaggatctcatcttggatctccgagtacgttgcgtaatggccacgttgcagcacacggcggaagaaataaagagattagctgaaaaagaagactggattgttgacaatgaaggactgacttctctaccatgtcagtttgaacagtgcatcgtgtgttctctgcagtcactgaagggggttctggagtgcaagccgggagaggccagtgtcttccaacaacctaaaacacaggaggaggtttgccagctaagcatcaatataatgcaggtttttatatactgtctggaacagttgagcaccaagcctgatgcagatatagatactacacatctctctgttgatgtttcttcccctgacttgtttggaagtatccatgaagacttcagcttgacctcagaacagcgccttttgatagtcctaagtaattgctgctatctagaacgtcacaccttcctaaatatcgcagaacattttgaaaagcacaacttccagggaatagaaaaaatcacacaggttagcatggcctcattgaaagaactagatcaaagactctttgaaaattacatcgagttgaaagcagatcccatcgttggctccttagaacctggaatttatgcagaaatgagatgttggaaggccttccaacatctcatttcttagaaagacttgacttttgtttagtctttctaagaaatagatcatggagccaagtgaagtgcactttgtcaaatgtaagggtctgctttgttcttgttgcttttctgttttttaaccttttgttccgccatttaaaaaaagaaaaaaaaaagcttatgtttcttgtcaaatgcagaaatgttccttccgccactcgctgaagttttgcattctggcttgtgcagtttttattgtctgtgtcagacgtacagccagacatgttctctattggcatttttccgattctgttcagatgacagcgaccgccttttcattccccccgccacctgtactcaccctcacgctctttgaagaaatgagatgttggaaggggggatcctctagagcgacngcaggcaggagttg

SEQ ID NO: 371843 - DNA, 1558 bp, Homo sapiens
ccgcggagtcttcggcgagacctaccgggccctgtctgtgccggccgtgagctgcggcaggacggctggagattacttctctaacaggatcaccagtttgctccacaaagcacaatgtctcgatcacgacaacccccccttgtgaccggcatctctccaaatgaagggataccatggacgaaggtcacaatcaggggagaaaatctggggactggccccaccgacctcataggcttgaccatttgtggacataattgcctcctgacggcagaatggatgtctgcaagtaaaatagtatgtcgagtgggacaagccaaaaatgacaaaggagacattattgtcaccactaagtcaggtggcagaggaacctcaacagtctctttcaagctactcaaacctgagaaaataggcattttggatcagtctgctgtgtgggttgatgaaatgaattattatgatatgcgcactgacaggaacaaaggaattccgcccttgtccttacgtcctgctaacccgcttggcattgagattgaaaaaagtaaattttcgcagaaggacttagaaatgctattccatggaatgagtgctgattttacaagtgagaatttctcagcagcctggtatcttatagagaatcactcaaacaccagttttgagcagctcaaaatggcagtcaccaacctaaagagacaggctaacaagaagagtgagggcagcctggcctatgtgaaaggcggtctcagtacattcttcgaagcacaggatgccctctcagccatccatcaaaaactagaagcagatggaacggaaaaagtagaaggatccatgacgcagaaactggagaatgttctgaacagagcaagtaatactgcagacacattgtttcaagaagtattaggtcggaaagacaaggcagattccactagaaatgcactcaatgtgcttcagcgatttaagtttcttttcaaccttcctctaaatattgaaaggaatattcaaaagggtgattatgatgtggttattaatgattatgaaaaggccaagtcactttttgggaaaacggaggtgcaagttttcaagaaatattatgctgaagtagaaacaaggattgaagctttaagagaattacttctggataaattgcttgagacaccatcaactttacatgaccaaaaacgttacataaggtacctgtctgaccttcatgcgtctggtgaccctgcttggcaatgcattggagcccaacacaagtggatccttcagctcatgcacagttgcaaagagggctacgtgaaagatctgaaagatcacacaggccaaaaaggctatgtgaaaaggaccttgtcaatttgtgattgtagcagctggttcttttccactgccctggcttactgtgcatctggaagaagacttctggcagccggaagtcatttcatgtctaaacttgtccccatccttcatagaaaaaaaattttgatgatgaatgtcaaacacacattgaatgctaactttacttggtaattaaaaatactgataattgtaagtacttttgttctgt

SEQ ID NO: 371844 - DNA, 291 bp, Homo sapiens
tgctaatcttcctaatcttatctctagctgctggactcacacaaaccaaactccatccagtctaatcaagtttgcgagcaggtctgtgttttcccactgcgatggccctgcttctgccatctttgaatattctccacccatctccatctatcaaaatccttcgtattcccaaaggcctttgtcagaatctgctcttctcctttttcttcctctgaattacttactgccttgtgccttatcaacctgggagacataagtcctagctctttgtataactccacacttatctgc

SEQ ID NO: 371845 - DNA, 1899 bp, Homo sapiens
ccggccagagcctcaagcttcgctgctgggcagttggctggaggggctgctgctgggaacacctggagtctccgcgggcagatctcatattttggattctggatatattataatgagtgacactttgacagcggatgtcattggtcgaagagttgaagttaatggagaacatgcaacagtacgttttgctggtgttgtccctcccgtggcaggaccctggttaggagtagaatgggacaatcccgagagaggaaagcatgatgggagccacgaagggactgtgtattttaaatgcaggcacccgacaggaggatcctttattcgtccgaacaaggtaaattttggaacagactttcttactgcaattaagaaccgctatgtgttagaagatggaccagaggaagatagaaaagagcaaattgttacaattggaaataaacctgtggagactatcggttttgactctattatgaaacagcaaagtcagctgagcaagttgcaagaagtttctctgaggaactgtgcagtaagttgtgctggtgaaaaaggaggagttgctgaagcatgtcctaatatcagaaaggtagatttgtcaaaaaacctgttgtcatcatgggatgaagtgatacacattgctgatcagctcagacacctggaagtccttaatgtcagtgaaaataaactaaaatttccctccggttcagtattaactggaacgctttctgtactgaaggttttagtcctcaatcaaacaggaataacgtgggctgaggtgctgcggtgtgtcgcggggtgcccaggcctggaggaactctaccttgagtctaacaacattttcatttccgaaaggccaacagatgttctccagacagtcaagttattagatctttcctctaatcaattaattgatgaaaatcagctgtatctgatagcccacctgcccaggttagaacaattaatcctctctgacactggaatttcttctctacattttccggatgctggaattgggtgcaaaacgtccatgttcccatccttgaagtacctggtagtaaacgacaatcagatatcacaatggtcgtttttcaatgagctagagaagttaccaagtctacgggctttgtcctgcctaagaaaccccctgaccaaagaggacaaagaagcagagacggcgcgactactcattatcgccagcattggccagctgaagacgctgaacaaatgtgagattctccccgaggagaggcggagagctgagcttgactaccgaaaagcttttggaaatgagtggaaacaggctggtggacataaggatccggaaaaaaacagactcagcgaagaattcctcacagcccatcccagataccagttcctctgcctgaaatatggtgcacctgaagattgggaactcaaaacacagcaaccacttatgctgaaaaaccagctactaacactgaagataaaataccctcatcaacttgatcagaaagtcctggagaaacaactgccgggctccatgacaattcaaaaggtgaagggattgctgtcacgtcttctcaaagttcctgtgtcagaccttctgttgtcctatgaaagtcccaaaaagccgggcagagaaatcgagctggaaaatgacctaaagtcattacagttttattctgtggaaaatggagattgtctattagtgcgatggtgacaaccaactaataaaatttaaagaccacactgcttatcgtgtctggggttcaccggaaataaatgattcactggaacaattctactgtcaaaacaaagggggtttacaacttgtcctaagtataacaagggatgtattttttgttgggaagtgaccatttctaggcttatacataatagcaataataaaggctttgaacctac

SEQ ID NO: 371846 - DNA, 949 bp, Homo sapiens
ccggccagagcctcaagcttcgctgctgggcagttggctggaggggctgctgctgggaacacctggagtctccgcgggcagatctcatattttggattctggatatattataatgagtgacactttgacagcggatgtcattggtcgaagagttgaagttaatggagaacatgcaacagtacgttttgctggtgttgtccctcccgtggcaggcacccgacaggaggatcctttattcgtccgaacaaggtaaattttggaacagactttcttactgcaattaagaaccgctatgtgttagaagatggaccagaggaagatagaaaagagcaaattgttacaattggaaataaacctgtggagactatcggttttgactctattatgaaacagcaaagtcagctgagcaagttgcaagaagtttctctgaggaactgtgcagtaagttgtgctggtgaaaaaggaggagttgctgaagcatgtcctaatatcagaaaggtagatttgtcaaaaaacctgttgtcatcatgggatgaagtgatacacattgctgatcagctcagacacctggaagtccttaatgtcagtgaaaataaactaaaatttccctccggttcagtattaactggaacgctttctgtactgaaggttttagtcctcaatcaaacaggaataacgtgggctgaggtgctgcggtgtgtcgcggggtgcccaggcctggaggaactctaccttgagtctaacaacattttcatttccgaaaggccaacagatgttctccagacagtcaagttattagatctttcctctaatcaattaattgatgaaaatcagctgtatctgatagcccacctgcccaggttagaacaattaatcctctctgacactggaatttcttctctacattttccggatgctggaattggtatataagattagtaaagttccc

SEQ ID NO: 371847 - DNA, 1814 bp, Homo sapiens
ccggccagagcctcaagcttcgctgctgggcagttggctggaggggctgctgctgggaacacctggagtctccgcgggcagatctcatattttggattctggatatattataatgagtgacactttgacagcggatgtcattggtcgaagagttgaagttaatggagaacatgcaacagtacgttttgctggtgttgtccctcccgtggcaggcacccgacaggaggatcctttattcgtccgaacaaggtaaattttggaacagactttcttactgcaattaagaaccgctatgtgttagaagatggaccagaggaagatagaaaagagcaaattgttacaattggaaataaacctgtggagactatcggttttgactctattatgaaacagcaaagtcagctgagcaagttgcaagaagtttctctgaggaactgtgcagtaagttgtgctggtgaaaaaggaggagttgctgaagcatgtcctaatatcagaaaggtagatttgtcaaaaaacctgttgtcatcatgggatgaagtgatacacattgctgatcagctcagacacctggaagtccttaatgtcagtgaaaataaactaaaatttccctccggttcagtattaactggaacgctttctgtactgaaggttttagtcctcaatcaaacaggaataacgtgggctgaggtgctgcggtgtgtcgcggggtgcccaggcctggaggaactctaccttgagtctaacaacattttcatttccgaaaggccaacagatgttctccagacagtcaagttattagatctttcctctaatcaattaattgatgaaaatcagctgtatctgatagcccacctgcccaggttagaacaattaatcctctctgacactggaatttcttctctacattttccggatgctggaattgggtgcaaaacgtccatgttcccatccttgaagtacctggtagtaaacgacaatcagatatcacaatggtcgtttttcaatgagctagagaagttaccaagtctacgggctttgtcctgcctaagaaaccccctgaccaaagaggacaaagaagcagagacggcgcgactactcattatcgccagcattggccagctgaagacgctgaacaaatgtgagattctccccgaggagaggcggagagctgagcttgactaccgaaaagcttttggaaatgagtggaaacaggctggtggacataaggatccggaaaaaaacagactcagcgaagaattcctcacagcccatcccagataccagttcctctgcctgaaatatggtgcacctgaagattgggaactcaaaacacagcaaccacttatgctgaaaaaccagctactaacactgaagataaaataccctcatcaacttgatcagaaagtcctggagaaacaactgccgggctccatgacaattcaaaaggtgaagggattgctgtcacgtcttctcaaagttcctgtgtcagaccttctgttgtcctatgaaagtcccaaaaagccgggcagagaaatcgagctggaaaatgacctaaagtcattacagttttattctgtggaaaatggagattgtctattagtgcgatggtgacaaccaactaataaaatttaaagaccacactgcttatcgtgtctggggttcaccggaaataaatgattcactggaacaattctactgtcaaaacaaagggggtttacaacttgtcctaagtataacaagggatgtattttttgttgggaagtgaccatttctaggcttatacataatagcaataataaaggctttgaacctac

SEQ ID NO: 371848 - DNA, 1757 bp, Homo sapiens
ccggccagagcctcaagcttcgctgctgggcagttggctggaggggctgctgctgggaacacctggagtctccgcgggcagatctcatattttggattctggatatattataatgagtgacactttgacagcggatgtcattggtcgaagagttgaagttaatggagaacatgcaacagtacgttttgctggtgttgtccctcccgtggcaggaccctggttaggagtagaatgggacaatcccgagagaggaaagcatgatgggagccacgaagggactgtgtattttaaatgcaggcacccgacaggaggatcctttattcgtccgaacaaggtaaattttggaacagactttcttactgcaattaagaaccgctatgtgttagaagatggaccagaggaagatagaaaagagcaaattgttacaattggaaataaacctgtggagactatcggttttgactctattatgaaacagcaaagtcagctgagcaagttgcaagaagtttctctgaggaactgtgcagtaagttgtgctggtgaaaaaggaggagttgctgaagcatgtcctaatatcagaaaggtagatttgtcaaaaaacctgttgtcatcatgggatgaagtgatacacattgctgatcagctcagacacctggaagtccttaatgtcagtgaaaataaactaaaatttccctccggttcagtattaactggaacgctttctgtactgaaggttttagtcctcaatcaaacaggaataacgtgggctgaggccaacagatgttctccagacagtcaagttattagatctttcctctaatcaattaattgatgaaaatcagctgtatctgatagcccacctgcccaggttagaacaattaatcctctctgacactggaatttcttctctacattttccggatgctggaattgtggtcgtttttcaatgagctagagaagttaccaagtctacgggctttgtcctgcctaagaaaccccctgaccaaagaggacaaagaagcagagacggcgcgactactcattatcgccagcattggccagctgaagacgctgaacaaatgtgagattctccccgaggagaggcggagagctgagcttgactaccgaaaagcttttggaaatgagtggaaacaggctggtggacataaggatccggaaaaaaacagactcagcgaagaattcctcacagcccatcccagataccagttcctctgcctgaaatatggtgcacctgaagattgggaactcaaaacacagcaaccacttatgctgaaaaaccagctactaacactgaagataaaataccctcatcaacttgatcagaaagtcctggagaaacaactgccgggctccatgacaattcaaaaggtgaagggattgctgtcacgtcttctcaaagttcctgtgtcagaccttctgttgtcctatgaaagtcccaaaaagccgggcagagaaatcgagctggaaaatgacctaaagtcattacagttttattctgtggaaaatggagattgtctattagtgcgatggtgacaaccaactaataaaatttaaagaccacactgcttatcgtgtctggggttcaccggaaataaatgattcactggaacaattctactgtcaaaacaaagggggtttacaacttgtcctaagtataacaagggatgtattttttgttgggaagtgaccatttctaggcttatacataatagcaataataaaggctttgaacctac

SEQ ID NO: 371849 - DNA, 1176 bp, Homo sapiens
gaaacagccagcagaggccgcctgagcctgaaccgagtttctcttccaggtgctgcggtgtgtcgcggggtgcccaggcctggaggaactctaccttgagtctaacaacattttcatttccgaaaggccaacagatgttctccagacagtcaagttattagatctttcctctaatcaattaattgatgaaaatcagctgtatctgatagcccacctgcccaggttagaacaattaatcctctctgacactggaatttcttctctacattttccggatgctggaattgggtgcaaaacgtccatgttcccatccttgaagtacctggtagtaaacgacaatcagatatcacaatggtcgtttttcaatgagctagagaagttaccaagtctacgggctttgtcctgcctaagaaaccccctgaccaaagaggacaaagaagcagagacggcgcgactactcattatcgccagcattggccagctgaagacgctgaacaaatgtgagattctccccgaggagaggcggagagctgagcttgactaccgaaaagcttttggaaatgagtggaaacaggctggtggacataaggatccggaaaaaaacagactcagcgaagaattcctcacagcccatcccagataccagttcctctgcctgaaatatggtgcacctgaagattgggaactcaaaacacagcaaccacttatgctgaaaaaccagctactaacactgaagataaaataccctcatcaacttgatcagaaagtcctggagaaacaactgccgggctccatgacaattcaaaaggtgaagggattgctgtcacgtcttctcaaagttcctgtgtcagaccttctgttgtcctatgaaagtcccaaaaagccgggcagagaaatcgagctggaaaatgacctaaagtcattacagttttattctgtggaaaatggagattgtctattagtgcgatggtgacaaccaactaataaaatttaaagaccacactgcttatcgtgtctggggttcaccggaaataaatgattcactggaacaattctactgtcaaaacaaagggggtttacaacttgtcctaagtataacaagggatgtattttttgttgggaagtgaccatttctaggcttatacataatagcaataataaaggctttgaacctac

SEQ ID NO: 371850 - DNA, 1499 bp, Homo sapiens
ccggccagagcctcaagcttcgctgctgggcagttggctggaggggctgctgctgggaacacctggagtctccgcgggcagatctcatattttggattctggatatattataatgagtgacactttgacagcggatgtcattggtcgaagagttgaagttaatggagaacatgcaacagtacgttttgctggtgttgtccctcccgtggcaggcacccgacaggaggatcctttattcgtccgaacaaggtaaattttggaacagactttcttactgcaattaagaaccgctatgtgttagaagatggaccagaggaagatagaaaagagcaaattgttacaattggaaataaacctgtggagactatcggttttgactctattatgaaacagcaaagatatcagaaaggtagatttgtcaaaaaacctgttgtcatcatgggatgaagtgatacacattgctgatcagctcagacacctggaagtccttaatgtcagtgaaaataaactaaaatttccctccggttcagtattaactggaacgctttctgtactgaaggttttagtcctcaatcaaacaggaataacgtgggctgaggtgctgcggtgtgtcgcggggtgcccaggcctggaggaactctaccttgagtctaacaacattttcatttccgaaagtggtcgtttttcaatgagctagagaagttaccaagtctacgggctttgtcctgcctaagaaaccccctgaccaaagaggacaaagaagcagagacggcgcgactactcattatcgccagcattggccagctgaagacgctgaacaaatgtgagattctccccgaggagaggcggagagctgagcttgactaccgaaaagcttttggaaatgagtggaaacaggctggtggacataaggatccggaaaaaaacagactcagcgaagaattcctcacagcccatcccagataccagttcctctgcctgaaatatggtgcacctgaagattgggaactcaaaacacagcaaccacttatgctgaaaaaccagctactaacactgaagataaaataccctcatcaacttgatcagaaagtcctggagaaacaactgccgggctccatgacaattcaaaaggtgaagggattgctgtcacgtcttctcaaagttcctgtgtcagaccttctgttgtcctatgaaagtcccaaaaagccgggcagagaaatcgagctggaaaatgacctaaagtcattacagttttattctgtggaaaatggagattgtctattagtgcgatggtgacaaccaactaataaaatttaaagaccacactgcttatcgtgtctggggttcaccggaaataaatgattcactggaacaattctactgtcaaaacaaagggggtttacaacttgtcctaagtataacaagggatgtattttttgttgggaagtgaccatttctaggcttatacataatagcaataataaaggctttgaacctac

SEQ ID NO: 371851 - DNA, 2083 bp, Homo sapiens
ttaactgtttcaatacatacaaaaaggccagtttttattctaaaataaagaacatttattatcacaagttggataaaaacacacagcttttacaaaaatgatttttgatagaaaaatatgtttgaatacactgtgatatttgtaggaacaccacactattgctgtatctccagctaaagcttcaaggaaactctatttcttataatcaaaatatccactatttaccacaacccgtctttggaaagaagttcatagtgtattctgaacaaaccaaagcatttactcggaagttacattcccatgcctggcagtcacttgtgtatgtttaatacagttacacatgatgtaattacagaatggcggcgctggaagggaccttgtagatcatttagttggcaccctaattttacagagggggaactaaggccagagttgagagatgtcctcaggatacctgagtcccattccagtgttcgttcagtaattcataaggaagtcatcataaaggtttaaaaagaaaacgttaatgactcgctccctttattcttctgtgctgagagtatcattctggtttattcagattaagaaagaaatacactactgaaatggtatgaaactcactgtcaaagggcacttaggtccgttggctccgtttcccacagttccccaaatgaacaggtggtacaagactcaggctttcccctaattacttacttgggtaaagtgacttgggtaaaatgaaagatacagccaggcgctgggctcatgcttgtaatcccagcactttggggggccaaggcgggcggatcacgaggtcaggagttcaagaccagcctggccaacatggtgaaaccccgtctctactaaaaatacaaaagttagctgggtgtggtgatgggcaccagctactcaggaggctgaggcaggagaattgtttgaacccgggaagcggaggttgcagtgagccgagattacaccattgcactccagcctgggcgacagagcaagacttacttaagtaagtaagtaagtcagtctcaaaaaaaaaaaaaaaaaaaaaaagacagatacagctatcattgcaatgatactgtggtctcatcacatgagctagttttacaggtaactgtcatttgagagaacgaatggacttttcttgtcttttgataggctccatgacaattcaaaaggtgaagggattgctgtcacgtcttctcaaagttcctgtgtcagaccttctgttgtcctatgaaagtcccaaagtaagttgcccagcaaaatacaaagtcaaagtcaagcttagtcctcgtattatgacattaaactgtctctagatagcaacagtttgattctaaatggagaccatgggtctgtttgtttgattttaagggtaagctactgcctggggacggggtgggggaagagtatgtgtagcatgctttatcggatctgtcttaatcacatccttccccaccttcgttctaattttagaagccgggcagagaaatcgagctggaaaatgacctaaagtcattacagttttattctgtggaaaatggagattgtctattagtgcgatggtgacaaccaactaataaaatttaaagaccacactgcttatcgtgtctggggttcaccggaaataaatgattcactggaacaattctactgtcaaaacaaagggggtttacaacttgtcctaagtataacaagggatgtattttttgttgggaagtgaccatttctaggcttatacataatagcaataataaaggctttgaacctactaaaaaaattttctgatcttatttcatatttatttttacagctcatcactgcatttcatgataagatttaaatattaaatagaaagaaactagctagcctaataaaatctgaacacagttaatatctgtcataagactagttttaatggaattctctattgaaactactattttaaagggttactagaaatgatttggttggtcattttgggaaatgtcccttaaacttggggagacatcctctactatgtataacaatatgctattatctgtcttctcagttgcactatttctaa

SEQ ID NO: 371852 - DNA, 1787 bp, Homo sapiens
ttaactgtttcaatacatacaaaaaggccagtttttattctaaaataaagaacatttattatcacaagttggataaaaacacacagcttttacaaaaatgatttttgatagaaaaatatgtttgaatacactgtgatatttgtaggaacaccacactattgctgtatctccagctaaagcttcaaggaaactctatttcttataatcaaaatatccactatttaccacaacccgtctttggaaagaagttcatagtgtattctgaacaaaccaaagcatttactcggaagttacattcccatgcctggcagtcacttgtgtatgtttaatacagttacacatgatgtaattacagaatggcggcgctggaagggaccttgtagatcatttagttggcaccctaattttacagagggggaactaaggccagagttgagagatgtcctcaggatacctgagtcccattccagtgttcgttcagtaattcataaggaagtcatcataaaggtttaaaaagaaaacgttaatgactcgctccctttattcttctgtgctgagagtatcattctggtttattcagattaagaaagaaatacactactgaaatggtatgaaactcactgtcaaagggcacttaggtccgttggctccgtttcccacagttccccaaatgaacaggtggtacaagactcaggctttcccctaattacttacttgggtaaagtgacttgggtaaaatgaaagatacagccaggcgctgggctcatgcttgtaatcccagcactttggggggccaaggcgggcggatcacgaggtcaggagttcaagaccagcctggccaacatggtgaaaccccgtctctactaaaaatacaaaagttagctgggtgtggtgatgggcaccagctactcaggaggctgaggcaggagaattgtttgaacccgggaagcggaggttgcagtgagccgagattacaccattgcactccagcctgggcgacagagcaagacttacttaagtaagtaagtaagtcagtctcaaaaaaaaaaaaaaaaaaaaaaagacagatacagctatcattgcaatgatactgtggtctcatcacatgagctagttttacaggtaactgtcatttgagagaacgaatggacttttcttgtcttttgataggctccatgacaattcaaaaggtgaagggattgctgtcacgtcttctcaaagttcctgtgtcagaccttctgttgtcctatgaaagtcccaaagtaagttgcccagcaaaatacaaagtcaaagtcaagcttagtcctcgtattatgacattaaactgtctctagatagcaacagtttgattctaaatggagaccatgggtctgtttgtttgattttaagggtaagctactgcctggggacggggtgggggaagagtatgtgtagcatgctttatcggatctgtcttaatcacatccttccccaccttcgttctaattttagaagccgggcagagaaatcgagctggaaaatgacctaaagtcattacagttttattctgtggaaaatggagattgtctattagtgcgatggtgacaaccaactaataaaatttaaagaccacactgcttatcgtgtctggggttcaccggaaataaatgattcactggaacaattctactgtcaaaacaaagggggtttacaacttgtcctaagtataacaagggatgtattttttgttgggaagtgaccatttctaggcttatacataatagcaataataaaggctttgaacctac

SEQ ID NO: 371853 - DNA, 2375 bp, Homo sapiens
  misc_feature (1)..(1): n is a, c, g, or t
ncgttatagacctggctcccgtgcaagccgctgtcgcccgcgcctcgcggggttttccaccccctcttccgcccgcgcttttttttgggggacaccccgcgccgtcggtccgcccgtgtgtttctgtgaaccgtcgtggaccgttgcattcttcactcgtggtggcgccgcgcccccccacgcctgtgttttgaacctttttctgttcgggcggcgcgcgccccaccactatctttgtttgtgttcgttggtcttttcggctgacgactggtgttttttggtgtcttgtgtgtgtgttttttttttttttttttttttgtttttttttattctaaaataaagaacatttattatcacaagttggataaaaacacacagcttttacaaaaatgatttttgatagaaaaatatgtttgaatacactgtgatatttgtaggaacaccacactattgctgtatctccagctaaagcttcaaggaaactctatttcttataatcaaaatatccactatttaccacaacccgtctttggaaagaagttcatagtgtattctgaacaaaccaaagcatttactcggaagttacattcccatgcctggcagtcacttgtgtatgtttaatacagttacacatgatgtaattacagaatggcggcgctggaagggaccttgtagatcatttagttggcaccctaattttacagagggggaactaaggccagagttgagagatgtcctcaggatacctgagtcccattccagtgttcgttcagtaattcataaggaagtcatcataaaggtttaaaaagaaaacgttaatgactcgctccctttattcttctgtgctgagagtatcattctggtttattcagattaagaaagaaatacactactgaaatggtatgaaactcactgtcaaagggcacttaggtccgttggctccgtttcccacagttccccaaatgaacaggtggtacaagactcaggctttcccctaattacttacttgggtaaagtgacttgggtaaaatgaaagatacagccaggcgctgggctcatgcttgtaatcccagcactttggggggccaaggcgggcggatcacgaggtcaggagttcaagaccagcctggccaacatggtgaaaccccgtctctactaaaaatacaaaagttagctgggtgtggtgatgggcaccagctactcaggaggctgaggcaggagaattgtttgaacccgggaagcggaggttgcagtgagccgagattacaccattgcactccagcctgggcgacagagcaagacttacttaagtaagtaagtaagtcagtctcaaaaaaaaaaaaaaaaaaaaaaagacagatacagctatcattgcaatgatactgtggtctcatcacatgagctagttttacaggtaactgtcatttgagagaacgaatggacttttcttgtcttttgataggctccatgacaattcaaaaggtgaagggattgctgtcacgtcttctcaaagttcctgtgtcagaccttctgttgtcctatgaaagtcccaaagtaagttgcccagcaaaatacaaagtcaaagtcaagcttagtcctcgtattatgacattaaactgtctctagatagcaacagtttgattctaaatggagaccatgggtctgtttgtttgattttaagggtaagctactgcctggggacggggtgggggaagagtatgtgtagcatgctttatcggatctgtcttaatcacatccttccccaccttcgttctaattttagaagccgggcagagaaatcgagctggaaaatgacctaaagtcattacagttttattctgtggaaaatggagattgtctattagtgcgatggtgacaaccaactaataaaatttaaagaccacactgcttatcgtgtctggggttcaccggaaataaatgattcactggaacaattctactgtcaaaacaaagggggtttacaacttgtcctaagtataacaagggatgtattttttgttgggaagtgaccatttctaggcttatacataatagcaataataaaggctttgaacctactaaaaaaattttctgatcttatttcatatttatttttacagctcatcactgcatttcatgataagatttaaatattaaatagaaagaaactagctagcctaataaaatctgaacacagttaatatctgtcataagactagttttaatggaattctctattgaaactactattttaaagggttactagaaatgatttggttggtcattttgggaaatgtcccttaaacttggggagacatcctctactatgtataacaatatgctattatctgtcttctcagttgcactatttctaa

SEQ ID NO: 371854 - DNA, 1164 bp, Homo sapiens
ccggccagagcctcaagcttcgctgctgggcagttggctggaggggctgctgctgggaacacctggagtctccgcgggcagatctcatattttggattctggatatattataatgagtgacactttgacagcggatgtcattggtcgaagagttgaagttaatggagaacatgcaacagtacgttttgctggtgttgtccctcccgtggcaggaccctggttaggagtagaatgggacaatcccgagagaggaaagcatgatgggagccacgaagggactgtgtattttaaatgcaggcacccgacaggaggatcctttattcgtccgaacaaggtaaattttggaacagactttcttactgcaattaagaaccgctatgtgttagaagatggaccagaggaagatagaaaagagcaaattgttacaattggaaataaacctgtggagactatcggttttgactctattatgaaacagcaaagtcagctgagcaagttgcaagaagtttctctgaggaactgtgcagtaagttgtgctggtgaaaaaggaggagttgctgaagcatgtcctaatatcagaaaggtagatttgtcaaaaaacctgttgtcatcatgggatgaagtgatacacattgctgatcagctcagacacctggaagtccttaatgtcagtgaaaataaactaaaatttccctccggttcagtattaactggaacgctttctgtactgaaggttttagtcctcaatcaaacaggaataacgtgggctgaggtgctgcggtgtgtcgcggggtgcccaggcctggaggaactctaccttgagtctaacaacattttcatttccgaaaggccaacagatgttctccagacagtcaagttattagatctttcctctaatcaattaattgatgaaaatcagctgtatctgatagcccacctgcccaggtaatttgcccctaaatgcctgatacaatagtgttcagtcaattcttagtgaagcagttttcatatgctatgtatgctttctcaatagaaacgtggtaacaatgatggaatttctaaattgagtaattccctttgggaaattttcatttgaattcatttagaaaatttacttgtgaaccctgtataatgtggactatgtctgtaccagataatttgaag

SEQ ID NO: 371855 - DNA, 1018 bp, Homo sapiens
tactgagcacccagcctggcactgcacggtctggtggaaacgtgagaagtgtcctgtggatcgtgtctcaggtggcaccaggtttctgtcagcgcagaaagagaactgttaccaaaggtgacactcggggaaaacatttgaagtatttgaaggcagtcttctcttgctagttttgagtcaggacacctaaggaacaatgatgtaatacacatgtaaacatgttgcttttcatttgttgtcttttgttgagtttcactggtcattaacaatgagctagataagctacagagtctgcagctctgggtagatagaagattctgcccttggaagtggtcgttgtccatcactcctaaaaatcacactgaataaaggcagctccatgtgtcctgggaaaggcacaggctctctggacgcttacctatcctttgtttgtttgtttgttttgtttttacttatagtggcctttggtttatcattcatctcttttgctttcttaaacagaatatggtgcacctgaagattgggaactcaaaacacagcaaccacttatgctgaaaaaccagctactaacactgaagataaaataccctcatcaacttgatcagaaagtcctggagaaacaactgccgggctccatgacaattcaaaaggtgaagggattgctgtcacgtcttctcaaagttcctgtgtcagaccttctgttgtcctatgaaagtcccaaaaagccgggcagagaaatcgagctggaaaatgacctaaagtcattacagttttattctgtggaaaatggagattgtctattagtgcgatggtgacaaccaactaataaaatttaaagaccacactgcttatcgtgtctggggttcaccggaaataaatgattcactggaacaattctactgtcaaaacaaagggggtttacaacttgtcctaagtataacaagggatgtattttttgttgggaagtgaccatttctaggcttatacataatagcaataataaaggctttgaacctac

SEQ ID NO: 371856 - DNA, 1758 bp, Homo sapiens
  misc_feature (19)..(19): n is a, c, g, or t
gaggtgactctaaggatcncacaaccatagaatggcggcgctggaagggaccttgtagatcatttagttggcaccctaattttacagagggggaactaaggccagagttgagagatgtcctcaggatacctgagtcccattccagtgttcgttcagtaattcataaggaagtcatcataaaggtttaaaaagaaaacgttaatgactcgctccctttattcttctgtgctgagagtatcattctggtttattcagattaagaaagaaatacactactgaaatggtatgaaactcactgtcaaagggcacttaggtccgttggctccgtttcccacagttccccaaatgaacaggtggtacaagactcaggctttcccctaattacttacttgggtaaagtgacttgggtaaaatgaaagatacagccaggcgctgggctcatgcttgtaatcccagcactttggggggccaaggcgggcggatcacgaggtcaggagttcaagaccagcctggccaacatggtgaaaccccgtctctactaaaaatacaaaagttagctgggtgtggtgatgggcaccagctactcaggaggctgaggcaggagaattgtttgaacccgggaagcggaggttgcagtgagccgagattacaccattgcactccagcctgggcgacagagcaagacttacttaagtaagtaagtaagtcagtctcaaaaaaaaaaaaaaaaaaaaaaagacagatacagctatcattgcaatgatactgtggtctcatcacatgagctagttttacaggtaactgtcatttgagagaacgaatggacttttcttgtcttttgataggctccatgacaattcaaaaggtgaagggattgctgtcacgtcttctcaaagttcctgtgtcagaccttctgttgtcctatgaaagtcccaaagtaagttgcccagcaaaatacaaagtcaaagtcaagcttagtcctcgtattatgacattaaactgtctctagatagcaacagtttgattctaaatggagaccatgggtctgtttgtttgattttaagggtaagctactgcctggggacggggtgggggaagagtatgtgtagcatgctttatcggatctgtcttaatcacatccttccccaccttcgttctaattttagaagccgggcagagaaatcgagctggaaaatgacctaaagtcattacagttttattctgtggaaaatggagattgtctattagtgcgatggtgacaaccaactaataaaatttaaagaccacactgcttatcgtgtctggggttcaccggaaataaatgattcactggaacaattctactgtcaaaacaaagggggtttacaacttgtcctaagtataacaagggatgtattttttgttgggaagtgaccatttctaggcttatacataatagcaataataaaggctttgaacctactaaaaaaattttctgatcttatttcatatttatttttacagctcatcactgcatttcatgataagatttaaatattaaatagaaagaaactagctagcctaataaaatctgaacacagttaatatctgtcataagactagttttaatggaattctctattgaaactactattttaaagggttactagaaatgatttggttggtcattttgggaaatgtcccttaaacttggggagacatcctctactatgtataacaatatgctattatctgtcttctcagttgcactatttctaa

SEQ ID NO: 371857 - DNA, 1846 bp, Homo sapiens
  misc_feature (80)..(80): n is a, c, g, or t
tgacagcatagaagatcaggactggggggtaggctaggatgtgggggcaatgaatgaagcgaacagattttcgttcattntggttctcagagttgttataattttttatttttatgggcttggtgagggaggtagggaccttgtagatcatttagttggcaccctaattttacagagggggaactaaggccagagttgagagatgtcctcaggatacctgagtcccattccagtgttcgttcagtaattcataaggaagtcatcataaaggtttaaaaagaaaacgttaatgactcgctccctttattcttctgtgctgagagtatcattctggtttattcagattaagaaagaaatacactactgaaatggtatgaaactcactgtcaaagggcacttaggtccgttggctccgtttcccacagttccccaaatgaacaggtggtacaagactcaggctttcccctaattacttacttgggtaaagtgacttgggtaaaatgaaagatacagccaggcgctgggctcatgcttgtaatcccagcactttggggggccaaggcgggcggatcacgaggtcaggagttcaagaccagcctggccaacatggtgaaaccccgtctctactaaaaatacaaaagttagctgggtgtggtgatgggcaccagctactcaggaggctgaggcaggagaattgtttgaacccgggaagcggaggttgcagtgagccgagattacaccattgcactccagcctgggcgacagagcaagacttacttaagtaagtaagtaagtcagtctcaaaaaaaaaaaaaaaaaaaaaaagacagatacagctatcattgcaatgatactgtggtctcatcacatgagctagttttacaggtaactgtcatttgagagaacgaatggacttttcttgtcttttgataggctccatgacaattcaaaaggtgaagggattgctgtcacgtcttctcaaagttcctgtgtcagaccttctgttgtcctatgaaagtcccaaagtaagttgcccagcaaaatacaaagtcaaagtcaagcttagtcctcgtattatgacattaaactgtctctagatagcaacagtttgattctaaatggagaccatgggtctgtttgtttgattttaagggtaagctactgcctggggacggggtgggggaagagtatgtgtagcatgctttatcggatctgtcttaatcacatccttccccaccttcgttctaattttagaagccgggcagagaaatcgagctggaaaatgacctaaagtcattacagttttattctgtggaaaatggagattgtctattagtgcgatggtgacaaccaactaataaaatttaaagaccacactgcttatcgtgtctggggttcaccggaaataaatgattcactggaacaattctactgtcaaaacaaagggggtttacaacttgtcctaagtataacaagggatgtattttttgttgggaagtgaccatttctaggcttatacataatagcaataataaaggctttgaacctactaaaaaaattttctgatcttatttcatatttatttttacagctcatcactgcatttcatgataagatttaaatattaaatagaaagaaactagctagcctaataaaatctgaacacagttaatatctgtcataagactagttttaatggaattctctattgaaactactattttaaagggttactagaaatgatttggttggtcattttgggaaatgtcccttaaacttggggagacatcctctactatgtataacaatatgctattatctgtcttctcagttgcactatttctaa

SEQ ID NO: 371858 - DNA, 1543 bp, Homo sapiens
tactgagcacccagcctggcactgcacggtctggtggaaacgtgagaagtgtcctgtggatcgtgtctcaggtggcaccaggtttctgtcagcgcagaaagagaactgttaccaaaggtgacactcggggaaaacatttgaagtatttgaaggcagtcttctcttgctagttttgagtcaggacacctaaggaacaatgatgtaatacacatgtaaacatgttgcttttcatttgttgtcttttgttgagtttcactggtcattaacaatgagctagataagctacagagtctgcagctctgggtagatagaagattctgcccttggaagtggtcgttgtccatcactcctaaaaatcacactgaataaaggcagctccatgtgtcctgggaaaggcacaggctctctggacgcttacctatcctttgtttgtttgtttgttttgtttttacttatagtggcctttggtttatcattcatctcttttgctttcttaaacagaatatggtgcacctgaagattgggaactcaaaacacagcaaccacttatgctgaaaaaccagctactaacactgaagataaaataccctcatcaacttgatcagaaagtcctggagaaacaactgccgggctccatgacaattcaaaaggtgaagggattgctgtcacgtcttctcaaagttcctgtgtcagaccttctgttgtcctatgaaagtcccaaagtaagttgcccagcaaaatacaaagtcaaagtcaagcttagtcctcgtattatgacattaaactgtctctagatagcaacagtttgattctaaatggagaccatgggtctgtttgtttgattttaagggtaagctactgcctggggacggggtgggggaagagtatgtgtagcatgctttatcggatctgtcttaatcacatccttccccaccttcgttctaattttagaagccgggcagagaaatcgagctggaaaatgacctaaagtcattacagttttattctgtggaaaatggagattgtctattagtgcgatggtgacaaccaactaataaaatttaaagaccacactgcttatcgtgtctggggttcaccggaaataaatgattcactggaacaattctactgtcaaaacaaagggggtttacaacttgtcctaagtataacaagggatgtattttttgttgggaagtgaccatttctaggcttatacataatagcaataataaaggctttgaacctactaaaaaaattttctgatcttatttcatatttatttttacagctcatcactgcatttcatgataagatttaaatattaaatagaaagaaactagctagcctaataaaatctgaacacagttaatatctgtcataagactagttttaatggaattctctattgaaactactattttaaagggttactagaaatgatttggttggtcattttgggaaatgtcccttaaacttggggagacatcctctactatgtataacaatatgctattatctgtcttctcagttgcactatttctaa

SEQ ID NO: 371859 - DNA, 429 bp, Homo sapiens
ttcacggtgaaaaaattttattttccatacaggccaacagatgttctccagacagtcaagttattagatctttcctctaatcaattaattgatgaaaatcagctgtatctgatagcccacctgcccaggtaatttgcccctaaatgcctgatacaatagtgttcagtcaattcttagtgaagcagttttcatatgctatgtatgctttctcaatagaaacgtggtaacaatgatggaatttctaaattgagtaattccctttgggaaattttcatttgaattcatttagaaaatttacttgtgaaccctgtataatgtggactatgtctgtaccagataatttgaagaatgaataatttgaccctggtgataatgcggaaagtcttcattcattaaactccgggcagtagaccgtgtctctttcctctg

SEQ ID NO: 371860 - DNA, 414 bp, Homo sapiens
tgggattaaaaacccagggtgtaggaaaaaaatttacaaaccgagtctggttgataccccatagcattttacattgttctgtgtaatcaaattgtacattttgaatttcaggttagaacaattaatcctctctgacactggaatttcttctctacattttccggatgctggaattggtatataagattagtaaagttccccactgcccccccacactatacttcagctactttcacttctactgtgtaacttcattcctctttttatagggtgcaaaacgtccatgttcccatccttgaagtacctggtagtaaacgacaatcagatatcacaagtaagagctgctcggagtatgcccagcacactgttgcctctttccactctcatggcagagtttggaggttccttctacca

SEQ ID NO: 371861 - DNA, 2195 bp, Homo sapiens
ccggccagagcctcaagcttcgctgctgggcagttggctggaggggctgctgctgggaacacctggagtctccgcgggcagatctcatattttggattctggatatattataatgagtgacactttgacagcggatgtcattggtcgaagagttgaagttaatggagaacatgcaacagtacgttttgctggtgttgtccctcccgtggcaggaccctggttaggagtagaatgggacaatcccgagagaggaaagcatgatgggagccacgaagggactgtgtattttaaatgcaggcacccgacaggaggatcctttattcgtccgaacaaggtaaattttggaacagactttcttactgcaattaagaaccgctatgtgttagaagatggaccagaggaagatagaaaagagcaaattgttacaattggaaataaacctgtggagactatcggttttgactctattatgaaacagcaaagtcagctgagcaagttgcaagaagtttctctgaggaactgtgcagtaagttgtgctggtgaaaaaggaggagttgctgaagcatgtcctaatatcagaaaggtagatttgtcaaaaaacctgttgtcatcatgggatgaagtgatacacattgctgatcagctcagacacctggaagtccttaatgtcagtgaaaataaactaaaatttccctccggttcagtattaactggaacgctttctgtactgaaggttttagtcctcaatcaaacaggaataacgtgggctgaggtgctgcggtgtgtcgcggggtgcccaggcctggaggaactctaccttgagtctaacaacattttcatttccgaaaggccaacagatgttctccagacagtcaagttattagatctttcctctaatcaattaattgatgaaaatcagctgtatctgatagcccacctgcccaggttagaacaattaatcctctctgacactggaatttcttctctacattttccggatgctggaattgggtgcaaaacgtccatgttcccatccttgaagtacctggtagtaaacgacaatcagatatcacaatggtcgtttttcaatgagctagagaagttaccaagtctacgggctttgtcctgcctaagaaaccccctgaccaaagaggacaaagaagcagagacggcgcgactactcattatcgccagcattggccagctgaagacgctgaacaaatgtgagattctccccgaggagaggcggagagctgagcttgactaccgaaaagcttttggaaatgagtggaaacaggctggtggacataaggatccggaaaaaaacagactcagcgaagaattcctcacagcccatcccagataccagttcctctgcctgaaatatggtgcacctgaagattgggaactcaaaacacagcaaccacttatgctgaaaaaccagctactaacactgaagataaaataccctcatcaacttgatcagaaagtcctggagaaacaactgccgggctccatgacaattcaaaaggtgaagggattgctgtcacgtcttctcaaagttcctgtgtcagaccttctgttgtcctatgaaagtcccaaaaagccgggcagagaaatcgagctggaaaatgacctaaagtcattacagttttattctgtggaaaatggagattgtctattagtgcgatggtgacaaccaactaataaaatttaaagaccacactgcttatcgtgtctggggttcaccggaaataaatgattcactggaacaattctactgtcaaaacaaagggggtttacaacttgtcctaagtataacaagggatgtattttttgttgggaagtgaccatttctaggcttatacataatagcaataataaaggctttgaacctactaaaaaaattttctgatcttatttcatatttatttttacagctcatcactgcatttcatgataagatttaaatattaaatagaaagaaactagctagcctaataaaatctgaacacagttaatatctgtcataagactagttttaatggaattctctattgaaactactattttaaagggttactagaaatgatttggttggtcattttgggaaatgtcccttaaacttggggagacatcctctactatgtataacaatatgctattatctgtcttctcagttgcactatttctaa

SEQ ID NO: 371862 - DNA, 1822 bp, Homo sapiens
ccggccagagcctcaagcttcgctgctgggcagttggctggaggggctgctgctgggaacacctggagtctccgcgggcagatctcatattttggattctggatatattataatgagtgacactttgacagcggatgtcattggtcgaagagttgaagttaatggagaacatgcaacagtacgttttgctggtgttgtccctcccgtggcaggaccctggttaggagtagaatgggacaatcccgagagaggaaagcatgatgggagccacgaagggactgtgtattttaaatgcaggcacccgacaggaggatcctttattcgtccgaacaaggtaaattttggaacagactttcttactgcaattaagaaccgctatgtgttagaagatggaccagaggaagatagaaaagagcaaattgttacaattggaaataaacctgtggagactatcggttttgactctattatgaaacagcaaagtcagctgagcaagttgcaagaagtttctctgaggaactgtgcagtaagttgtgctggtgaaaaaggaggagttgctgaagcatgtcctaatatcagaaaggtagatttgtcaaaaaacctgttgtcatcatgggatgaagtgatacacattgctgatcagctcagacacctggaagtccttaatgtcagtgaaaataaactaaaatttccctccggttcagtattaactggaacgctttctgtactgaaggttttagtcctcaatcaaacaggaataacgtgggctgaggccaacagatgttctccagacagtcaagttattagatctttcctctaatcaattaattgatgaaaatcagctgtatctgatagcccacctgcccaggttagaacaattaatcctctctgacactggaatttcttctctacattttccggatgctggaattgggtgcaaaacgtccatgttcccatccttgaagtacctggtagtaaacgacaatcagatatcacaatggtcgtttttcaatgagctagagaagttaccaagtctacgggctttgtcctgcctaagaaaccccctgaccaaagaggacaaagaagcagagacggcgcgactactcattatcgccagcattggccagctgaagacgctgaacaaatgtgagattctccccgaggagaggcggagagctgagcttgactaccgaaaagcttttggaaatgagtggaaacaggctggtggacataaggatccggaaaaaaacagactcagcgaagaattcctcacagcccatcccagataccagttcctctgcctgaaatatggtgcacctgaagattgggaactcaaaacacagcaaccacttatgctgaaaaaccagctactaacactgaagataaaataccctcatcaacttgatcagaaagtcctggagaaacaactgccgggctccatgacaattcaaaaggtgaagggattgctgtcacgtcttctcaaagttcctgtgtcagaccttctgttgtcctatgaaagtcccaaaaagccgggcagagaaatcgagctggaaaatgacctaaagtcattacagttttattctgtggaaaatggagattgtctattagtgcgatggtgacaaccaactaataaaatttaaagaccacactgcttatcgtgtctggggttcaccggaaataaatgattcactggaacaattctactgtcaaaacaaagggggtttacaacttgtcctaagtataacaagggatgtattttttgttgggaagtgaccatttctaggcttatacataatagcaataataaaggctttgaacctac

SEQ ID NO: 371863 - DNA, 1491 bp, Homo sapiens
ctgggaaggggggtggggtatgcttctccaaggcgtggagattttgggggccagtggtcccacatgagtgcactggctgagctctggcctctcagctcggcatgtttgtacgcacttcctgggacatacgttgaccggcatatgcaaccacgttgcttgagccatggcccgccgtgggccgtacgatcggtgactgagacataagtatcccatgtagccaaactgagtgtcctacatgagaggcacacgtggcatttcgcccgatgaaaataaactaaaatttccctccggttcagtattaactggaacgctttctgtactgaaggttttagtcctcaatcaaacaggaataacgtgggctgaggtgctgcggtgtgtcgcggggtgcccaggcctggaggaactctaccttgagtctaacaacattttcatttccgaaaggccaacagatgttctccagacagtcaagttattagatctttcctctaatcaattaattgatgaaaatcagctgtatctgatagcccacctgcccaggttagaacaattaatcctctctgacactggaatttcttctctacattttccggatgctggaattgggtgcaaaacgtccatgttcccatccttgaagtacctggtagtaaacgacaatcagatatcacaatggtcgtttttcaatgagctagagaagttaccaagtctacgggctttgtcctgcctaagaaaccccctgaccaaagaggacaaagaagcagagacggcgcgactactcattatcgccagcattggccagctgaagacgctgaacaaatgtgagattctccccgaggagaggcggagagctgagcttgactaccgaaaagcttttggaaatgagtggaaacaggctggtggacataaggatccggaaaaaaacagactcagcgaagaattcctcacagcccatcccagataccagttcctctgcctgaaatatggtgcacctgaagattgggaactcaaaacacagcaaccacttatgctgaaaaaccagctactaacactgaagataaaataccctcatcaacttgatcagaaagtcctggagaaacaactgccgggctccatgacaattcaaaaggtgaagggattgctgtcacgtcttctcaaagttcctgtgtcagaccttctgttgtcctatgaaagtcccaaaaagccgggcagagaaatcgagctggaaaatgacctaaagtcattacagttttattctgtggaaaatggagattgtctattagtgcgatggtgacaaccaactaataaaatttaaagaccacactgcttatcgtgtctggggttcaccggaaataaatgattcactggaacaattctactgtcaaaacaaagggggtttacaacttgtcctaagtataacaagggatgtattttttgttgggaagtgaccatttctaggcttatacataatagcaataataaaggctttgaacctac

SEQ ID NO: 371864 - DNA, 2424 bp, Homo sapiens
ccggccagagcctcaagcttcgctgctgggcagttggctggaggggctgctgctgggaacacctggagtctccgcgggcagatctcatattttggattctggatatattataatgagtgacactttgacagcggatgtcattggtcgaagagttgaagttaatggagaacatgcaacagtacgttttgctggtgttgtccctcccgtggcaggaccctggttaggagtagaatgggacaatcccgagagaggaaagcatgatgggagccacgaagggactgtgtattttaaatgcaggcacccgacaggaggatcctttattcgtccgaacaaggtaaattttggaacagactttcttactgcaattaagaaccgctatgtgttagaagatggaccagaggaagatagaaaagagcaaattgttacaattggaaataaacctgtggagactatcggttttgactctattatgaaacagcaaagtcagctgagcaagttgcaagaagtttctctgaggaactgtgcagtaagttgtgctggtgaaaaaggaggagttgctgaagcatgtcctaatatcagaaaggtagatttgtcaaaaaacctgttgtcatcatgggatgaagtgatacacattgctgatcagctcagacacctggaagtccttaatgtcagtgaaaataaactaaaatttccctccggttcagtattaactggaacgctttctgtactgaaggttttagtcctcaatcaaacaggaataacgtgggctgaggtgctgcggtgtgtcgcggggtgcccaggcctggaggaactctaccttgagtctaacaacattttcatttccgaaaggccaacagatgttctccagacagtcaagttattagatctttcctctaatcaattaattgatgaaaatcagctgtatctgatagcccacctgcccaggttagaacaattaatcctctctgacactggaatttcttctctacattttccggatgctggaattgggtgcaaaacgtccatgttcccatccttgaagtacctggtagtaaacgacaatcagatatcacaatggtcgtttttcaatgagctagagaagttaccaagtctacgggctttgtcctgcctaagaaaccccctgaccaaagaggacaaagaagcagagacggcgcgactactcattatcgccagcattggccagctgaagacgctgaacaaatgtgagattctccccgaggagaggcggagagctgagcttgactaccgaaaagcttttggaaatgagtggaaacaggctggtggacataaggatccggaaaaaaacagactcagcgaagaattcctcacagcccatcccagataccagttcctctgcctgaaatatggtgcacctgaagattgggaactcaaaacacagcaaccacttatgctgaaaaaccagctactaacactgaagataaaataccctcatcaacttgatcagaaagtcctggagaaacaactgccgggctccatgacaattcaaaaggtgaagggattgctgtcacgtcttctcaaagttcctgtgtcagaccttctgttgtcctatgaaagtcccaaagtaagttgcccagcaaaatacaaagtcaaagtcaagcttagtcctcgtattatgacattaaactgtctctagatagcaacagtttgattctaaatggagaccatgggtctgtttgtttgattttaagggtaagctactgcctggggacggggtgggggaagagtatgtgtagcatgctttatcggatctgtcttaatcacatccttccccaccttcgttctaattttagaagccgggcagagaaatcgagctggaaaatgacctaaagtcattacagttttattctgtggaaaatggagattgtctattagtgcgatggtgacaaccaactaataaaatttaaagaccacactgcttatcgtgtctggggttcaccggaaataaatgattcactggaacaattctactgtcaaaacaaagggggtttacaacttgtcctaagtataacaagggatgtattttttgttgggaagtgaccatttctaggcttatacataatagcaataataaaggctttgaacctactaaaaaaattttctgatcttatttcatatttatttttacagctcatcactgcatttcatgataagatttaaatattaaatagaaagaaactagctagcctaataaaatctgaacacagttaatatctgtcataagactagttttaatggaattctctattgaaactactattttaaagggttactagaaatgatttggttggtcattttgggaaatgtcccttaaacttggggagacatcctctactatgtataacaatatgctattatctgtcttctcagttgcactatttctaa

SEQ ID NO: 371865 - DNA, 1472 bp, Homo sapiens
ccggccagagcctcaagcttcgctgctgggcagttggctggaggggctgctgctgggaacacctggagtctccgcgggcagatctcatattttggattctggatatattataatgagtgacactttgacagcggatgtcattggtcgaagagttgaagttaatggagaacatgcaacagtacgttttgctggtgttgtccctcccgtggcaggaccctggttaggagtagaatgggacaatcccgagagaggaaagcatgatgggagccacgaagggactgtgtattttaaatgcaggcacccgacaggaggatcctttattcgtccgaacaaggtaaattttggaacagactttcttactgcaattaagaaccgctatgtgttagaagatggaccagaggaagatagaaaagagcaaattgttacaattggaaataaacctgtggagactatcggttttgactctattatgaaacagcaaagtcagctgagcaagttgcaagaagtttctctgaggaactgtgcagtaagttgtgctggtgaaaaaggaggagttgctgaagcatgtcctaatatcagaaaggtagatttgtcaaaaaacctgttgtcatcatgggatgaagtgatacacattgctgatcagctcagacacctggaagtccttaatgtcagtgaaaataaactaaaatttccctccggttcagtattaactggaacgctttctgtactgaaggttttagtcctcaatcaaacaggaataacgtgggctgaggtgctgcggtgtgtcgcggggtgcccaggcctggaggaactctaccttgagtctaacaacattttcatttccgaaaggccaacagatgttctccagacagtcaagttattagatctttcctctaatcaattaattgatgaaaatcagctgtatctgatagcccacctgcccaggttagaacaattaatcctctctgacactggaatttcttctctacattttccggatgctggaattgggtgcaaaacgtccatgttcccatccttgaagtacctggtagtaaacgacaatcagatatcacaatggtcgtttttcaatgagctagagaagttaccaagtctacgggctttgtcctgcctaagaaaccccctgaccaaagaggacaaagaagcagagacggcgcgactactcattatcgccagcattggccagctgaagacgctgaacaaatgtgagattctccccgaggagaggcggagagctgagcttgactaccgaaaagcttttggaaatgagtggaaacaggctggtggacataaggatccggaaaaaaacagactcagcgaagaattcctcacagcccatcccagataccagttcctctgcctgaaatatggtgcacctgaagattgggaactcaaaacacagcaaccacttatgctgaaaaaccagctactaacactgatagattaagcggggc

SEQ ID NO: 371866 - DNA, 150 bp, Homo sapiens
ttgtacatgtgcttctatgttttctaatgtgtatttaatgaagcttcccatgtgccaggtatcttcaaagccctagagacatggtggtcaatgtgggtggccaggccccagctcttgtgcagcttacatcaagaagggtttatgaggagt

SEQ ID NO: 371867 - DNA, 3948 bp, Homo sapiens
tccatcccacatggcggcgctcctgaggagactgctgcagcgcgagaggccttcggcggcctctggccgccccgtaggacggcgcgaggccaacctgggcactgatgccggggttgcggtgcgagtgcggttcgctcccagccccacaggcttcttgcacctgggtggcctccgcactgccttgtacaactacatctttgctaagaagtaccaggggagcttcatcctgaggctagaggacacagatcagactcgcgttgtgcctggggcagcagagaatattgaggacatgctggagtgggcaggcatcccgcctgatgagagcccccgccggggcggtcctgctgggccctaccagcaatctcagcggttggagctgtatgcccaggccacagaagcgctgctgaagaccggagctgcttacccctgtttctgctcaccccagcggctggagctcctgaagaaggaggccttgcggaaccaccagacgccccggtatgacaatcggtgcaggaacatgagccaggagcaggtggcccagaagctggccaaggaccccaagcctgcgatccgcttccgcctggagcaggtggtgccagccttccaggacctggtgtatggctggaataggcatgaagtggccagcgtggagggagacccagtcatcatgaagagcgacggcttccccacataccacctggcctgcgtggtggacgaccaccacatgggcatcagccacgtgctgcgaggctctgagtggctcgtctccactgccaagcacctgctcctctaccaggccctgggctggcagccaccccacttcgcccacctgcccctgctcctcaacagggatggcagcaagctctccaagaggcaaggggacgttttcctggagcactttgctgctgatggcttcctgcccgattccttgttggacatcatcaccaactgtggctcaggttttgcagagaaccaaatgggcaggaccctgccggagctgatcacacagttcaacctgacacaggtcacctgtcactcagccctgctggacctggagaagctcccagaattcaacagactgcacctccagcggctggtgagcaatgagagccagaggcgccagctggtggggaagctgcaggtccttgtggaggaggcctttggttgccagctgcaaaacagggatgtcctcaacccagtctacgtggagaggatcctcctgctgagacagggtcacatttgccgcctgcaggacttggtgtccccagtatactcttacctgtggactcgccctgcagtaggtcgagcacagctggacgccatctcggagaaggtggatgtgattgccaagcgtgtgctggggcttctagaaagatctggtatgagcttaactcaggatatgctgaatggagaactgaagaagctatcagaaggtctggaaggcaccaagtacagtaatgtgatgaaactccttcggatggccctcagtggacagcagcaaggacctcctgtagctgagatgatgttggccttgggaccaaaggaagtacgggaacggatccagaaggtggtttccagctagggagaggatgtgtcgggcagtggagatcgccctaagaacctgtgagcttagaaacagctttcagagaccagaaggaggcctggggcccgtcgggaagtttgctgaaggaactaagagtggaaacaatctctgactgcacacaagtgcatttgtgatccaccacaggcacgtttttgtcaattggctggggaagcccaacccatctaacctcctggactctggaaaggcattctccgggtctggtttctcacacattacacagcagaggtttggagttagttcacagaaaagttaacatcccggaacagtgcagaaggcttgggtttcagtttgctagggcccccataacaaaatgccacagaaccaggtggtttaaacagatttattttctcacatttggaggctagaagttcaagatcaaggtgtcagcaggcctggtttttcctagaggcctcttttgttggcttgcagacagctgtcttctcactgtgtccttgtgcggtcttccctccatgcacacacatctctagtttcattatgtgcccaacgttcctcttctaagaacaccagttggactggattttaactttaaccagcctcatttaagttaatcacctctttaaatgctcaatctccaagtacagtctcattctgaggttccaggggtttctcaacgtaagaatttagggggacagaattcagcccgtagcagctgggcagcaggactcatgggtcccagttctcaggccccaaggactcagagcagcaaaggatacgtgacacaagcagggctgaactggacaccagactttctttggggttgtaaaaggagaagtgtgactccactgccaagggtaagcactcttgtcttatgctaccctttattcttgaaccttggggcagcctgtgtctcccttccctaaacgtcatctgttccgtttttccagtcttccagacctggtccttggactggagaccttcacccttcctattttgtggctttctcttcaaatccacctcgtccttcctccatgacttataagtcatcatctctgctggtttctgaaatgagatatgcttcttggggtcttcagtgaagaggaatagcaagtgaaaggaggatggtggcagggtacatgaacccctaccaggcttctaggcttcccctgcatggcagccagcctctaagttggcccccaaccatccctgccttcttctattcacacccttgtgtggttccttcccacattgaataggcctgacttgtgtaaccactacactattgaagaaatgagagtttgacttctgagggtaagtcataaaatacatcgtggcttctgtcttgttttctttgatcgcttactttgggggaagccagcttccaggtcatgaaaatactcaagcagccttatggagtgctccacatgacaagggatggaggcctcccaccaatagccatgggagtgtgcaatcttgaaagctggtccttcaattccagccaagcattcacatgaccgcaatcctagctgatctcgcttgtgacctctatgggagaccctaagccagaaccactcagagaagctgctctggaacgtcagacacacatgaactgtgagatagtaaacgtttattgtttaaagctacttggtttggggataatttgcgtttcagcagtagacaatatatttattttgtccaggggagtggaaaggcgattacagagtttgttgagccccatagagtcctagtctttgcttaaagaaatataccagttctttctaatacagaatccattaagttcgttggttgcaaacaatagaaaccaactctgcctcacttatgtttattggaggccataagagagccacagcatctaccaaaaagccaaaaaaaaaacaggttttggaaaagacaggaactagctacaggagctaatggccaatcttgtctgagttctttgatggcgacacatgaactacagccgttttgttgttgttaatttctccgtgttttcccctcagttttggatgactctgctcaaggttcagattctgaggagcaagtatctgttgggctatctgaggtcctgctaccattccttggccagtaataggtagtttcacagggattatatgcaatggaggaaaagttgttctcaaggaaaactagggagctttctccagaagatgatgtaatggcagaaacaacaggtggttgaccacagaaggggacaataataatacttgtaatttattgtgcgcttatatgagcctcaccctctcccaggtgtcagataatgctcgtaaatgccttagtccatcatctcagtaaattttttttataacactaaaaaaagaagcagtatt

SEQ ID NO: 371868 - DNA, 3642 bp, Homo sapiens
taaaattggaacgatacagagaagattagcatggcccctgcgcaaggatgacacgcaaattcgtgaagcgttccatattattgaaaaaaaaagaaagaaaaaccccaagactattttgagatgtgtgttctaatctcagcggctggagctcctgaagaaggaggccttgcggaaccaccagacgccccggtatgacaatcggtgcaggaacatgagccaggagcaggtggcccagaagctggccaaggaccccaagcctgcgatccgcttccgcctggagcaggtggtgccagccttccaggacctggtgtatggctggaataggcatgaagtggccagcgtggagggagacccagtcatcatgaagagcgacggcttccccacataccacctggcctgcgtggtggacgaccaccacatgggcatcagccacgtgctgcgaggctctgagtggctcgtctccactgccaagcacctgctcctctaccaggccctgggctggcagccaccccacttcgcccacctgcccctgctcctcaacagggatggcagcaagctctccaagaggcaaggggacgttttcctggagcactttgctgctgatggcttcctgcccgattccttgttggacatcatcaccaactgtggctcaggttttgcagagaaccaaatgggcaggaccctgccggagctgatcacacagttcaacctgacacaggtcacctgtcactcagccctgctggacctggagaagctcccagaattcaacagactgcacctccagcggctggtgagcaatgagagccagaggcgccagctggtggggaagctgcaggtccttgtggaggaggcctttggttgccagctgcaaaacagggatgtcctcaacccagtctacgtggagaggatcctcctgctgagacagggtcacatttgccgcctgcaggacttggtgtccccagtatactcttacctgtggactcgccctgcagtaggtcgagcacagctggacgccatctcggagaaggtggatgtgattgccaagcgtgtgctggggcttctagaaagatctggtatgagcttaactcaggatatgctgaatggagaactgaagaagctatcagaaggtctggaaggcaccaagtacagtaatgtgatgaaactccttcggatggccctcagtggacagcagcaaggacctcctgtagctgagatgatgttggccttgggaccaaaggaagtacgggaacggatccagaaggtggtttccagctagggagaggatgtgtcgggcagtggagatcgccctaagaacctgtgagcttagaaacagctttcagagaccagaaggaggcctggggcccgtcgggaagtttgctgaaggaactaagagtggaaacaatctctgactgcacacaagtgcatttgtgatccaccacaggcacgtttttgtcaattggctggggaagcccaacccatctaacctcctggactctggaaaggcattctccgggtctggtttctcacacattacacagcagaggtttggagttagttcacagaaaagttaacatcccggaacagtgcagaaggcttgggtttcagtttgctagggcccccataacaaaatgccacagaaccaggtggtttaaacagatttattttctcacatttggaggctagaagttcaagatcaaggtgtcagcaggcctggtttttcctagaggcctcttttgttggcttgcagacagctgtcttctcactgtgtccttgtgcggtcttccctccatgcacacacatctctagtttcattatgtgcccaacgttcctcttctaagaacaccagttggactggattttaactttaaccagcctcatttaagttaatcacctctttaaatgctcaatctccaagtacagtctcattctgaggttccaggggtttctcaacgtaagaatttagggggacagaattcagcccgtagcagctgggcagcaggactcatgggtcccagttctcaggccccaaggactcagagcagcaaaggatacgtgacacaagcagggctgaactggacaccagactttctttggggttgtaaaaggagaagtgtgactccactgccaagggtaagcactcttgtcttatgctaccctttattcttgaaccttggggcagcctgtgtctcccttccctaaacgtcatctgttccgtttttccagtcttccagacctggtccttggactggagaccttcacccttcctattttgtggctttctcttcaaatccacctcgtccttcctccatgacttataagtcatcatctctgctggtttctgaaatgagatatgcttcttggggtcttcagtgaagaggaatagcaagtgaaaggaggatggtggcagggtacatgaacccctaccaggcttctaggcttcccctgcatggcagccagcctctaagttggcccccaaccatccctgccttcttctattcacacccttgtgtggttccttcccacattgaataggcctgacttgtgtaaccactacactattgaagaaatgagagtttgacttctgagggtaagtcataaaatacatcgtggcttctgtcttgttttctttgatcgcttactttgggggaagccagcttccaggtcatgaaaatactcaagcagccttatggagtgctccacatgacaagggatggaggcctcccaccaatagccatgggagtgtgcaatcttgaaagctggtccttcaattccagccaagcattcacatgaccgcaatcctagctgatctcgcttgtgacctctatgggagaccctaagccagaaccactcagagaagctgctctggaacgtcagacacacatgaactgtgagatagtaaacgtttattgtttaaagctacttggtttggggataatttgcgtttcagcagtagacaatatatttattttgtccaggggagtggaaaggcgattacagagtttgttgagccccatagagtcctagtctttgcttaaagaaatataccagttctttctaatacagaatccattaagttcgttggttgcaaacaatagaaaccaactctgcctcacttatgtttattggaggccataagagagccacagcatctaccaaaaagccaaaaaaaaaacaggttttggaaaagacaggaactagctacaggagctaatggccaatcttgtctgagttctttgatggcgacacatgaactacagccgttttgttgttgttaatttctccgtgttttcccctcagttttggatgactctgctcaaggttcagattctgaggagcaagtatctgttgggctatctgaggtcctgctaccattccttggccagtaataggtagtttcacagggattatatgcaatggaggaaaagttgttctcaaggaaaactagggagctttctccagaagatgatgtaatggcagaaacaacaggtggttgaccacagaaggggacaataataatacttgtaatttattgtgcgcttatatgagcctcaccctctcccaggtgtcagataatgctcgtaaatgccttagtccatcatctcagtaaattttttttataacactaaaaaaagaagcagtatt

SEQ ID NO: 371869 - DNA, 3855 bp, Homo sapiens
tccatcccacatggcggcgctcctgaggagactgctgcagcgcgagaggccttcggcggcctctggccgccccgtaggacggcgcgaggccaacctgggcactgatgccggggttgcggtgcgagtgcggttcgctcccagccccacaggcttcttgcacctgggtggcctccgcactgccttgtacaactacatctttgctaagaagtaccaggggagcttcatcctgaggctagaggacacagatcagactcgcgttgtgcctggggcagcagagaatattgaggacatgctggagtgggcaggcatcccgcctgatgagagcccccgccggggcggtcctgctgggccctaccagcaatctcagcggttggagctgtatgcccaggccacagaagcgctgctgaagaccggagctgcttacccctgtttctgctcaccccagcggctggagctcctgaagaaggaggccttgcggaaccaccagacgccccggtatgacaatcggtgcaggaacatgagccaggagcaggtggcccagaagctggccaaggaccccaagcctgcgatccgcttccgcctggagcaggtggtgccagccttccaggacctggtgtatggctggaataggcatgaagtggccagcgtggagggagacccagtcatcatgaagagcgacggcttccccacataccacctggcctgcgtggtggacgaccaccacatgggcatcagccacgtgctgcgaggctctgagtggctcgtctccactgccaagcacctgctcctctaccaggccctgggctggcagccaccccacttcgcccacctgcccctgctcctcaacagggatggcagcaagctctccaagaggcaaggggacgttttcctggagcactttgctgctgatggcttcctgcccgattccttgttggacatcatcaccaactgtggctcaggttttgcagagaaccaaatgggcaggaccctgccggagctgatcacacagttcaacctgacacaggtcacctgtcactcagccctgctggacctggagaagctcccagaattcaacagactgcacctccagcggctggtgagcaatgagagccagaggcgccagctggtggggaagctgcaggtccttgtggaggaggcctttggttgccagctgcaaaacagggatgtcctcaacccagtctacgtggagaggatcctcctgctgagacagggtcacatttgccgcctgcaggacttggtgtccccagtatactcttacctgtggactcgccctgcagtaggtcgagcacagctggacgccatctcggagaaggtggatgtgattgccaagcgtgtgctggggcttctagaaagatctggtatgagcttaactcaggatatgctgaatggagaactgaagaagctatcagaaggtctggaaggcaccaagtacagtaatgtgatgaaactccttcggatggccctcagtggacagcagcaaggacctcctgtagctgagatgatgttggccttgggaccaaaggaagtacgggaacggatccagaaggtggtttccagctagggagaggatgtgtcgggcagtggagatcgccctaagaacctgtgagcttagaaacagctttcagagaccagaaggaggcctggggcccgtcgggaagtttgctgaaggaactaagagtggaaacaatctctgactgcacacaagtgcatttgtgatccaccacaggcacgtttttgtcaattggctggggaagcccaacccatctaacctcctggactctggaaaggcattctccgggtctggtttctcacacattacacagcagaggtttggagttagttcacagaaaagttaacatcccggaacagtgcagaaggcttgggtttcagtttgctagggcccccataacaaaatgccacagaaccaggtggtttaaacagatttattttctcacatttggaggctagaagttcaagatcaaggtgtcagcaggcctggtttttcctagaggcctcttttgttggcttgcagacagctgtcttctcactgtgtccttgtgcggtcttccctccatgcacacacatctctagtttcattatgtgcccaacgttcctcttctaagaacaccagttggactggattttaactttaaccagcctcatttaagttaatcacctctttaaatgctcaatctccaagtacagtctcattctgaggttccaggggtttctcaacgtaagaatttagggggacagaattcagcccgtagcagctgggcagcaggactcatgggtcccagttctcaggccccaaggactcagagcagcaaaggatacgtgacacaagcagggctgaactggacaccagactttctttggggttgtaaaaggagaagtgtgactccactgccaaggtcttccagacctggtccttggactggagaccttcacccttcctattttgtggctttctcttcaaatccacctcgtccttcctccatgacttataagtcatcatctctgctggtttctgaaatgagatatgcttcttggggtcttcagtgaagaggaatagcaagtgaaaggaggatggtggcagggtacatgaacccctaccaggcttctaggcttcccctgcatggcagccagcctctaagttggcccccaaccatccctgccttcttctattcacacccttgtgtggttccttcccacattgaataggcctgacttgtgtaaccactacactattgaagaaatgagagtttgacttctgagggtaagtcataaaatacatcgtggcttctgtcttgttttctttgatcgcttactttgggggaagccagcttccaggtcatgaaaatactcaagcagccttatggagtgctccacatgacaagggatggaggcctcccaccaatagccatgggagtgtgcaatcttgaaagctggtccttcaattccagccaagcattcacatgaccgcaatcctagctgatctcgcttgtgacctctatgggagaccctaagccagaaccactcagagaagctgctctggaacgtcagacacacatgaactgtgagatagtaaacgtttattgtttaaagctacttggtttggggataatttgcgtttcagcagtagacaatatatttattttgtccaggggagtggaaaggcgattacagagtttgttgagccccatagagtcctagtctttgcttaaagaaatataccagttctttctaatacagaatccattaagttcgttggttgcaaacaatagaaaccaactctgcctcacttatgtttattggaggccataagagagccacagcatctaccaaaaagccaaaaaaaaaacaggttttggaaaagacaggaactagctacaggagctaatggccaatcttgtctgagttctttgatggcgacacatgaactacagccgttttgttgttgttaatttctccgtgttttcccctcagttttggatgactctgctcaaggttcagattctgaggagcaagtatctgttgggctatctgaggtcctgctaccattccttggccagtaataggtagtttcacagggattatatgcaatggaggaaaagttgttctcaaggaaaactagggagctttctccagaagatgatgtaatggcagaaacaacaggtggttgaccacagaaggggacaataataatacttgtaatttattgtgcgcttatatgagcctcaccctctcccaggtgtcagataatgctcgtaaatgccttagtccatcatctcagtaaattttttttataacactaaaaaaagaagcagtatt

SEQ ID NO: 371870 - DNA, 3894 bp, Homo sapiens
tccatcccacatggcggcgctcctgaggagactgctgcagcgcgagaggccttcggcggcctctggccgccccgtaggacggcgcgaggccaacctgggcactgatgccggggttgcggtgcgagtgcggttcgctcccagccccacaggcttcttgcacctgggtggcctccgcactgccttgtacaactacatctttgctaagaagtaccaggggagcttcatcctgaggctagaggacacagatcagactcgcgttgtgcctggggcagcagagaatattgaggacatgctggagtgggcaggcatcccgcctgatgagagcccccgccggggcggtcctgctgggccctaccagcaatctcagcggttggagctgtatgcccaggccacagaagcgctgctgaagaccggagctgcttacccctgtttctgctcaccccagcggctggagctcctgaagaaggaggccttgcggaaccaccagacgccccggtatgacaatcggtgcaggaacatgagccaggagcaggtggcccagaagctggccaaggaccccaagcctgcgatccgcttccgcctggagcaggtggtgccagccttccaggacctggtgtatggctggaataggcatgaagtggccagcgtggagggagacccagtcatcatgaagagcgacggcttccccacataccacctggcctgcgtggtggacgaccaccacatgggcatcagccacgtgctgcgaggctctgagtggctcgtctccactgccaagcacctgctcctctaccaggccctgggctggcagccaccccacttcgcccacctgcccctgctcctcaacagggatggcagcaagctctccaagaggcaaggggacgttttcctggagcactttgctgctgatggcttcctgcccgattccttgttggacatcatcaccaactgtggctcaggttttgcagagaaccaaatgggcaggaccctgccggagctgatcacacagttcaacctgacacaggtcacctgtcactcagccctgctggacctggagaagctcccagaattcaacagactgcacctccagcggctggtgagcaatgagagccagaggcgccagctggtggggaagctgcaggtccttgtggaggaggcctttggttgccagctgcaaaacagggatgtcctcaacccagtctacgtggagaggatcctcctgctgagacagggtcacatttgccgcctgcaggacttggtgtccccagtatactcttacctgtggactcgccctgcagtaggtcgagcacagctggacgccatctcggagaaggtggatgtgattgccaagcgtgtgctggggcttctagaaagatctggtatgagcttaactcaggatatgctgaatggagaactgaagaagctatcagaaggtctggaaggcaccaagtacagtaatgtgatgaaactccttcggatggccctcagtggacagcagcaaggacctcctgtagctgagatgatgttggccttgggaccaaaggaagtacgggaacggatccagaaggtggtttccagctagggagaggatgtgtcgggcagtggagatcgccctaagaacctgtgagcttagaaacagctttcagagaccagaaggaggcctggggcccgtcgggaagtttgctgaaggaactaagagtggaaacaatctctgactgcacacaagtgcatttgtgatccaccacaggcacgtttttgtcaattggctggggaagcccaacccatctaacctcctggactctggaaaggcattctccgggtctggtttctcacacattacacagcagaggtttggagttagttcacagaaaagttaacatcccggaacagtgcagaaggcttgggtttcagtttgctagggcccccataacaaaatgccacagaaccaggtggtttaaacagatttattttctcacatttggaggctagaagttcaagatcaaggtgtcagcaggcctggtttttcctagaggcctcttttgttggcttgcagacagctgtcttctcactgtgtccttgtgcggtcttccctccatgcacacacatctctagtttcattatgtgcccaacgttcctcttctaagaacaccagttggactggattttaactttaaccagcctcatttaagttaatcacctctttaaatgctcaatctccaagtacagtctcattctgaggttccaggggtttctcaacgtaagaatttagggggacagaattcagcccgtagcagctgggcagcaggactcatgggtcccagttctcaggccccaaggactcagagcagcaaaggatacgtgacacaagcagggctgaactggacaccagactttctttggggttgtcctttattcttgaaccttggggcagcctgtgtctcccttccctaaacgtcatctgttccgtttttccagtcttccagacctggtccttggactggagaccttcacccttcctattttgtggctttctcttcaaatccacctcgtccttcctccatgacttataagtcatcatctctgctggtttctgaaatgagatatgcttcttggggtcttcagtgaagaggaatagcaagtgaaaggaggatggtggcagggtacatgaacccctaccaggcttctaggcttcccctgcatggcagccagcctctaagttggcccccaaccatccctgccttcttctattcacacccttgtgtggttccttcccacattgaataggcctgacttgtgtaaccactacactattgaagaaatgagagtttgacttctgagggtaagtcataaaatacatcgtggcttctgtcttgttttctttgatcgcttactttgggggaagccagcttccaggtcatgaaaatactcaagcagccttatggagtgctccacatgacaagggatggaggcctcccaccaatagccatgggagtgtgcaatcttgaaagctggtccttcaattccagccaagcattcacatgaccgcaatcctagctgatctcgcttgtgacctctatgggagaccctaagccagaaccactcagagaagctgctctggaacgtcagacacacatgaactgtgagatagtaaacgtttattgtttaaagctacttggtttggggataatttgcgtttcagcagtagacaatatatttattttgtccaggggagtggaaaggcgattacagagtttgttgagccccatagagtcctagtctttgcttaaagaaatataccagttctttctaatacagaatccattaagttcgttggttgcaaacaatagaaaccaactctgcctcacttatgtttattggaggccataagagagccacagcatctaccaaaaagccaaaaaaaaaacaggttttggaaaagacaggaactagctacaggagctaatggccaatcttgtctgagttctttgatggcgacacatgaactacagccgttttgttgttgttaatttctccgtgttttcccctcagttttggatgactctgctcaaggttcagattctgaggagcaagtatctgttgggctatctgaggtcctgctaccattccttggccagtaataggtagtttcacagggattatatgcaatggaggaaaagttgttctcaaggaaaactagggagctttctccagaagatgatgtaatggcagaaacaacaggtggttgaccacagaaggggacaataataatacttgtaatttattgtgcgcttatatgagcctcaccctctcccaggtgtcagataatgctcgtaaatgccttagtccatcatctcagtaaattttttttataacactaaaaaaagaagcagtatt

SEQ ID NO: 371871 - DNA, 423 bp, Homo sapiens
ccttccctaaacgtcatctgttccgtttttccagtcttccagacctggtccttggactggagaccttcacccttcctattttgtggctttctcttcaaatccacctcgtccttcctccatgacttataagtcatcatctctgctggtttctgaaatgagatatgcttcttggggtcttcagtgaagaggaatagcaagtgaaaggaggatggtggcagggtacatgaacccctaccaggcttctaggcttcccctgcatggcagccagcctctaagttggcccccaaccatccctgccttcttctattcacacccttgtgtggttccttcccacattgaataggcctgacttgtgtaaccactacactattgaagaaatgagagtttgacttctgagggtaagtcataaaatacatcgtggct

SEQ ID NO: 371872 - DNA, 167 bp, Homo sapiens
gctgtgtgcaccttagctgtcattattccctgtgttccaggcatcccgcctgatgagagcccccgccggggcggtcctgctgggccctaccagcaatctcagcggttggagctgtatgcccaggccacagaagcgctgctgaagaccggagctgcttacccctgttt

SEQ ID NO: 371873 - DNA, 4124 bp, Homo sapiens
gctgaggtgcaggagcggaaataattcaaattgccaggagtttcttgtgttttttgtgccatcccatctctttcgatcttttttttcatgcattccatacatgtgcattgatgacaacctgtgtaacaggtgttgtagacgctgggatacagtgatcattgagaaaggtaggggccttgctctgtggaagtctgcattctagtggctgccgcagacacttataaaaaataagtgtaattttagagtcacatgtgccatgcgggaagtgaaacaggataggagactggggattaagaaggacgctccagaaggctttactgagcaggcttcttgcacctgggtggcctccgcactgccttgtacaactacatctttgctaagaagtaccaggggagcttcatcctgaggctagaggacacagatcagactcgcgttgtgcctggggcagcagagaatattgaggacatgctggagtgggcaggcatcccgcctgatgagagcccccgccggggcggtcctgctgggccctaccagcaatctcagcggttggagctgtatgcccaggccacagaagcgctgctgaagaccggagctgcttacccctgtttctgctcaccccagcggctggagctcctgaagaaggaggccttgcggaaccaccagacgccccggtatgacaatcggtgcaggaacatgagccaggagcaggtggcccagaagctggccaaggaccccaagcctgcgatccgcttccgcctggagcaggtggtgccagccttccaggacctggtgtatggctggaataggcatgaagtggccagcgtggagggagacccagtcatcatgaagagcgacggcttccccacataccacctggcctgcgtggtggacgaccaccacatgggcatcagccacgtgctgcgaggctctgagtggctcgtctccactgccaagcacctgctcctctaccaggccctgggctggcagccaccccacttcgcccacctgcccctgctcctcaacagggatggcagcaagctctccaagaggcaaggggacgttttcctggagcactttgctgctgatggcttcctgcccgattccttgttggacatcatcaccaactgtggctcaggttttgcagagaaccaaatgggcaggaccctgccggagctgatcacacagttcaacctgacacaggtcacctgtcactcagccctgctggacctggagaagctcccagaattcaacagactgcacctccagcggctggtgagcaatgagagccagaggcgccagctggtggggaagctgcaggtccttgtggaggaggcctttggttgccagctgcaaaacagggatgtcctcaacccagtctacgtggagaggatcctcctgctgagacagggtcacatttgccgcctgcaggacttggtgtccccagtatactcttacctgtggactcgccctgcagtaggtcgagcacagctggacgccatctcggagaaggtggatgtgattgccaagcgtgtgctggggcttctagaaagatctggtatgagcttaactcaggatatgctgaatggagaactgaagaagctatcagaaggtctggaaggcaccaagtacagtaatgtgatgaaactccttcggatggccctcagtggacagcagcaaggacctcctgtagctgagatgatgttggccttgggaccaaaggaagtacgggaacggatccagaaggtggtttccagctagggagaggatgtgtcgggcagtggagatcgccctaagaacctgtgagcttagaaacagctttcagagaccagaaggaggcctggggcccgtcgggaagtttgctgaaggaactaagagtggaaacaatctctgactgcacacaagtgcatttgtgatccaccacaggcacgtttttgtcaattggctggggaagcccaacccatctaacctcctggactctggaaaggcattctccgggtctggtttctcacacattacacagcagaggtttggagttagttcacagaaaagttaacatcccggaacagtgcagaaggcttgggtttcagtttgctagggcccccataacaaaatgccacagaaccaggtggtttaaacagatttattttctcacatttggaggctagaagttcaagatcaaggtgtcagcaggcctggtttttcctagaggcctcttttgttggcttgcagacagctgtcttctcactgtgtccttgtgcggtcttccctccatgcacacacatctctagtttcattatgtgcccaacgttcctcttctaagaacaccagttggactggattttaactttaaccagcctcatttaagttaatcacctctttaaatgctcaatctccaagtacagtctcattctgaggttccaggggtttctcaacgtaagaatttagggggacagaattcagcccgtagcagctgggcagcaggactcatgggtcccagttctcaggccccaaggactcagagcagcaaaggatacgtgacacaagcagggctgaactggacaccagactttctttggggttgtaaaaggagaagtgtgactccactgccaagggtaagcactcttgtcttatgctaccctttattcttgaaccttggggcagcctgtgtctcccttccctaaacgtcatctgttccgtttttccagtcttccagacctggtccttggactggagaccttcacccttcctattttgtggctttctcttcaaatccacctcgtccttcctccatgacttataagtcatcatctctgctggtttctgaaatgagatatgcttcttggggtcttcagtgaagaggaatagcaagtgaaaggaggatggtggcagggtacatgaacccctaccaggcttctaggcttcccctgcatggcagccagcctctaagttggcccccaaccatccctgccttcttctattcacacccttgtgtggttccttcccacattgaataggcctgacttgtgtaaccactacactattgaagaaatgagagtttgacttctgagggtaagtcataaaatacatcgtggcttctgtcttgttttctttgatcgcttactttgggggaagccagcttccaggtcatgaaaatactcaagcagccttatggagtgctccacatgacaagggatggaggcctcccaccaatagccatgggagtgtgcaatcttgaaagctggtccttcaattccagccaagcattcacatgaccgcaatcctagctgatctcgcttgtgacctctatgggagaccctaagccagaaccactcagagaagctgctctggaacgtcagacacacatgaactgtgagatagtaaacgtttattgtttaaagctacttggtttggggataatttgcgtttcagcagtagacaatatatttattttgtccaggggagtggaaaggcgattacagagtttgttgagccccatagagtcctagtctttgcttaaagaaatataccagttctttctaatacagaatccattaagttcgttggttgcaaacaatagaaaccaactctgcctcacttatgtttattggaggccataagagagccacagcatctaccaaaaagccaaaaaaaaaacaggttttggaaaagacaggaactagctacaggagctaatggccaatcttgtctgagttctttgatggcgacacatgaactacagccgttttgttgttgttaatttctccgtgttttcccctcagttttggatgactctgctcaaggttcagattctgaggagcaagtatctgttgggctatctgaggtcctgctaccattccttggccagtaataggtagtttcacagggattatatgcaatggaggaaaagttgttctcaaggaaaactagggagctttctccagaagatgatgtaatggcagaaacaacaggtggttgaccacagaaggggacaataataatacttgtaatttattgtgcgcttatatgagcctcaccctctcccaggtgtcagataatgctcgtaaatgccttagtccatcatctcagtaaattttttttataacactaaaaaaagaagcagtatt

SEQ ID NO: 371874 - DNA, 3363 bp, Homo sapiens
tccatcccacatggcggcgctcctgaggagactgctgcagcgcgagaggccttcggcggcctctggccgccccgtaggacggcgcgaggccaacctgggcactgatgccggggttgcggtgcgagtgcggttcgctcccagccccacaggcttcttgcacctgggtggcctccgcactgccttgtacaactacatctttgctaagaagtaccaggggagcttcatcctgaggctagaggacacagatcagactcgcgttgtgcctggggcagcagagaatattgaggacatgctggagtgggcaggcatcccgcctgatgagagcccccgccggggcggtcctgctgggccctaccagcaatctcagcggttggagctgtatgcccaggccacagaagcgctgctgaagaccggagctgcttacccctgtttctgctcaccccagcggctggagctcctgaagaaggaggccttgcggaaccaccagacgccccggtatgacaatcggtgcaggaacatgagccaggagcaggtggcccagaagctggccaaggaccccaagcctgcgatccgcttccgcctggagcaggtggtgccagccttccaggacctggtgtatggctggaataggcatgaagtggccagcgtggagggagacccagtcatcatgaagagcgacggcttccccacataccacctggcctgcgtggtggacgaccaccacatgggcatcagccacgtgctgcgaggctctgagtggctcgtctccactgccaagcacctgctcctctaccaggccctgggctggcagccaccccacttcgcccacctgcccctgctcctcaacagggatggcagcaagctctccaagaggcaaggggacgttttcctggagcactttgctgctgatggcttcctgcccgattccttgttggacatcatcaccaactgtggctcaggttttgcagagaaccaaatgggcaggaccctgccggagctgatcacacagttcaacctgacacaggtcacctgtcactcagccctgctggacctggagaagctcccagaattcaacagactgcacctccagcggctggtgagcaatgagagccagaggcgccagctggtggggaagctgcaggtccttgtggaggaggcctttggttgccagctgcaaaacagggatgtcctcaacccagtctacgtggagaggatcctcctgctgagacagggtcacatttgccgcctgcaggacttggtgtccccagtatactcttacctgtggactcgccctgcagtaggtcgagcacagctggacgccatctcggagaaggtggatgtgattgccaagcgtgtgctggggcttctagaaagatctggtatgagcttaactcaggatatgctgaatggagaactgaagaagctatcagaaggtctggaaggcaccaagtacagtaatgtgatgaaactccttcggatggccctcagtggacagcagcaaggacctcctgtagctgagatgatgttggccttgggaccaaaggaagtacgggaacggatccagaaggtggtttccagctagggagaggatgtgtcgggcagtggagatcgccctaagaacctgtgagcttagaaacagctttcagagaccagaaggaggcctggggcccgtcgggaagtttgctgaaggaactaagagtggaaacaatctctgactgcacacaagtgcatttgtgatccaccacaggcacgtttttgtcaattggctggggaagcccaacccatctaacctcctggactctggaaaggcattctccgggtctggtttctcacacattacacagcagaggtttggagttagttcacagaaaagttaacatcccggaacagtgcagaaggcttgggtttcagtttgctagggcccccataacaaaatgccacagaaccaggtggtttaaacagatttattttctcacatttggaggctagaagttcaagatcaaggtgtcagcaggcctggtttttcctagaggcctcttttgttggcttgcagacagctgtcttctcactgtgtccttgtgcggtcttccctccatgcacacacatctctagtttcattatgtgcccaacgttcctcttctaagaacaccagttggactggattttaactttaaccagcctcatttaagttaatcacctctttaaatgctcaatctccaagtacagtctcattctgaggttccaggggtttctcaacgtaagaatttagggggacagaattcagcccgtagcagctgggcagcaggactcatgggtcccagttctcaggccccaaggactcagagcagcaaaggatacgtgacacaagcagggctgaactggacaccagactttctttggggttgtaaaaggagaagtgtgactccactgccaagggtaagcactcttgtcttatgctaccctttattcttgaaccttggggcagcctgtgtctcccttccctaaacgtcatctgttccgtttttccagtcttccagacctggtccttggactggagaccttcacccttcctattttgtggctttctcttcaaatccacctcgtccttcctccatgacttataagtcatcatctctgctggtttctgaaatgagatatgcttcttggggtcttcagtgaagaggaatagcaagtgaaaggaggatggtggcagggtacatgaacccctaccaggcttctaggcttcccctgcatggcagccagcctctaagttggcccccaaccatccctgccttcttctattcacacccttgtgtggttccttcccacattgaataggcctgacttgtgtaaccactacactattgaagaaatgagagtttgacttctgagggtaagtcataaaatacatcgtggcttctgtcttgttttctttgatcgcttactttgggggaagccagcttccaggtcatgaaaatactcaagcagccttatggagtgctccacatgacaagggatggaggcctcccaccaatagccatgggagtgtgcaatcttgaaagctggtccttcaattccagccaagcattcacatgaccgcaatcctagctgatctcgcttgtgacctctatgggagaccctaagccagaaccactcagagaagctgctctggaacgtcagacacacatgaactgtgagatagtaaacgtttattgtttaaagctacttggtttggggataatttgcgtttcagcagtagacaatatatttattttgtccaggggagtggaaaggcgattacagagtttgttgagccccatagagtcctagtctttgcttaaagaaatataccagttctttcta

SEQ ID NO: 371875 - DNA, 2947 bp, Homo sapiens
tccatcccacatggcggcgctcctgaggagactgctgcagcgcgagaggccttcggcggcctctggccgccccgtaggacggcgcgaggccaacctgggcactgatgccggggttgcggtgcgagtgcggttcgctcccagccccacaggcttcttgcacctgggtggcctccgcactgccttgtacaactacatctttgctaagaagtaccaggggagcttcatcctgaggctagaggacacagatcagactcgcgttgtgcctggggcagcagagaatattgaggacatgctggagtgggcaggcatcccgcctgatgagagcccccgccggggcggtcctgctgggccctaccagcaatctcagcggttggagctgtatgcccaggccacagaagcgctgctgaagaccggagctgcttacccctgtttctgctcaccccagcggctggagctcctgaagaaggaggccttgcggaaccaccagacgccccggtatgacaatcggtgcaggaacatgagccaggagcaggtggcccagaagctggccaaggaccccaagcctgcgatccgcttccgcctggagcaggtggtgccagccttccaggacctggtgtatggctggaataggcatgaagtggccagcgtggagggagacccagtcatcatgaagagcgacggcttccccacataccacctggcctgcgtggtggacgaccaccacatgggcatcagccacgtgctgcgaggctctgagtggctcgtctccactgccaagcacctgctcctctaccaggccctgggctggcagccaccccacttcgcccacctgcccctgctcctcaacagggatggcagcaagctctccaagaggcaaggggacgttttcctggagcactttgctgctgatggcttcctgcccgattccttgttggacatcatcaccaactgtggctcaggttttgcagagaaccaaatgggcaggaccctgccggagctgatcacacagttcaacctgacacaggtcacctgtcactcagccctgctggacctggagaagctcccagaattcaacagactgcacctccagcggctggtgagcaatgagagccagaggcgccagctggtggggaagctgcaggtccttgtggaggaggcctttggttgccagctgcaaaacagggatgtcctcaacccagtctacgtggagaggatcctcctgctgagacagggtcacatttgccgcctgcaggacttggtgtccccagtatactcttacctgtggactcgccctgcagtaggtcgagcacagctggacgccatctcggagaaggtggatgtgattgccaagcgtgtgctggggcttctagaaagatctggtatgagcttaactcaggatatgctgaatggagaactgaagaagctatcagaaggtctggaaggcaccaagtacagtaatgtgatgaaactccttcggatggccctcagtggacagcagcaaggacctcctgtagctgagatgatgttggccttgggaccaaaggaagtacgggaacggatccagaaggtggtttccagctagggagaggatgtgtcgggcagtggagatcgccctaagaacctgtgagcttagaaacagctttcagagaccagaaggaggcctggggcccttcagtgaagaggaatagcaagtgaaaggaggatggtggcagggtacatgaacccctaccaggcttctaggcttcccctgcatggcagccagcctctaagttggcccccaaccatccctgccttcttctattcacacccttgtgtggttccttcccacattgaataggcctgacttgtgtaaccactacactattgaagaaatgagagtttgacttctgagggtaagtcataaaatacatcgtggcttctgtcttgttttctttgatcgcttactttgggggaagccagcttccaggtcatgaaaatactcaagcagccttatggagtgctccacatgacaagggatggaggcctcccaccaatagccatgggagtgtgcaatcttgaaagctggtccttcaattccagccaagcattcacatgaccgcaatcctagctgatctcgcttgtgacctctatgggagaccctaagccagaaccactcagagaagctgctctggaacgtcagacacacatgaactgtgagatagtaaacgtttattgtttaaagctacttggtttggggataatttgcgtttcagcagtagacaatatatttattttgtccaggggagtggaaaggcgattacagagtttgttgagccccatagagtcctagtctttgcttaaagaaatataccagttctttctaatacagaatccattaagttcgttggttgcaaacaatagaaaccaactctgcctcacttatgtttattggaggccataagagagccacagcatctaccaaaaagccaaaaaaaaaacaggttttggaaaagacaggaactagctacaggagctaatggccaatcttgtctgagttctttgatggcgacacatgaactacagccgttttgttgttgttaatttctccgtgttttcccctcagttttggatgactctgctcaaggttcagattctgaggagcaagtatctgttgggctatctgaggtcctgctaccattccttggccagtaataggtagtttcacagggattatatgcaatggaggaaaagttgttctcaaggaaaactagggagctttctccagaagatgatgtaatggcagaaacaacaggtggttgaccacagaaggggacaataataatacttgtaatttattgtgcgcttatatgagcctcaccctctcccaggtgtcagataatgctcgtaaatgccttagtccatcatctcagtaaattttttttataacactaaaaaaagaagcagtatt

SEQ ID NO: 371876 - DNA, 1022 bp, Homo sapiens
gtactctgagtccggagtttgtgttctttaatacataggctacccaagttctgtgagttttgagtataactcagaattcagtagataacagcatcaaaacggttaaactataggtggcatatgctcacactactgtaattccaactaattcaattattcaactgctatccactttagcattcacattctgatttgaggaagtgtgttgtaaccataatattacattttcaaacagaacctttttaaagtttctgtgcttttatctttggtaatccagttagtaaagttcagtctctgagtgttaaaatgacatatcagttctgttcaaagatacgaatttttatgtgtttatataaaaatactatctactttcttttttaggtaactcagcagttgaaggcgcgattcttaccaagtccagttgttattaagaaacgtattgaaggacttattgagagagaatatttggcacgaacacctgaggatcgcaaagtatacacatatgtagcataaaatgcgttcagaaatttgatttattcttggactgtactcttcgcatggactgggaagttcttttaaatcattaaatattaagacgaccatctcttctattaaattacagtacatgttctagaccattgagatcaagcctttactccctttgagagtttccaacatcagttgattgagcttcaggctttacaacgtttatccctgtagagatcatctttacagttcctcgggaaaatgtgaatgtgctgcgttttgttttctcaccatagagaaaagagcttgggacttgaccacagtctaaatggtacaactgccagatgtagtcttctggttgccagtcgaggacacttgactccttaattgcattgaattcatccactatgtagcattttcttttgaaaattctgatctaccaatagtgacaaacatttgtatttttcttgaatttaatggaagtccaaccatggtaagtcaacttcctgtggttaggtatgagttgtttcctgatg

SEQ ID NO: 371877 - DNA, 4174 bp, Homo sapiens
aggagaaggaggaggaggaggacgacgttcggcctgcgcagtgagatgtttgtccggtcgccgccgccgccgccatcgcggaggagcgcgataaagggagccgagccggacgtgagggggaccccgcggagccgccgcgccagcgcagccccccagccgcatcggagtcgccagagtccgagccgccgccgccgccgccgccgcccccgccgccgccgcggctgcccaggggccggccagctccccagccctgcccgggggtcgcgccgccgccgcccccagcgtcgcccctagcctgcctgcccgccttaaatgtgacaccggcgtcgcggagcgcgacctgaagccgccgccggggaggggacgagcaccatgtcgaatctgagcaaaggcacgggcagccggaaggacaccaagatgcggatccgggcctttccgatgaccatggatgaaaaatatgtaaacagcatttgggaccttctgaaaaatgcaattcaagaaatccagcgtaagaataacagtggtcttagttttgaggagctctatagaaatgcatatacaatggttttgcataaacatggagaaaagctctacactggactaagagaagttgttaccgaacatctcataaataaggtgcgagaagatgtactaaattcattgaataacaactttcttcaaacgctaaatcaagcttggaatgatcatcaaacagctatggtgatgattagagacatactaatgtacatggaccgtgtgtatgtacaacaaaataatgtggagaacgtctacaatttgggattaattatttttcgagatcaagttgtacgttatgggtgtattagggatcatctacggcaaactctattggatatgattgcaagagagcggaaaggagaagtcgtagacagaggcgcaataagaaatgcttgccagatgttaatgattttaggtctcgaaggaagatcagtctatgaagaagattttgaggctccttttttggaaatgtctgcagaattttttcagatggaaagccagaaatttttagcagaaaatagtgcttcagtatatataaagaaagtagaagctagaattaatgaagaaatagaacgagtgatgcactgccttgacaaatcaacggaagaaccaattgtaaaggtggttgaaagggaactcatttccaagcacatgaagactatagtagaaatggagaattctgggctagtacatatgttgaaaaatggaaagacagaagaccttggttgcatgtacaagttatttagtcgtgtgccaaatggtttgaaaacaatgtgtgagtgtatgagttcctatttgagggagcaaggtaaagctcttgtttctgaagaaggagaaggaaagaatcctgttgactatatccagggcttattggatctgaagagtaggttcgatcgcttcctcctggaatcattcaacaatgaccgtctctttaaacaaactattgcgggtgactttgagtattttctcaacctcaactccaggtctcctgaatacctctcattatttattgatgataagctgaaaaagggagtcaaagggctaacagaacaagaagtagaaacaatattggataaagcaatggtcctttttaggtttatgcaagaaaaagatgtatttgaacgttattataaacaacacttggcaaggagacttctcacaaataaaagtgtttctgatgactctgaaaaaaacatgatatctaagttaaagactgaatgtggatgtcagttcacgtcaaaactggaaggaatgtttagggatatgagcatctcaaacacaacgatggatgaattcaggcaacatctacaggcaactggtgtatctttaggtggtgttgatcttacagtccgggtgctcacgacaggatattggcccactcagtcagccacaccaaagtgcaacatcccaccagcaccaagacatgcttttgagatattcagaaggttctacttagccaaacacagtggtcgacagctcacactccagcatcatatgggttctgcagatctcaatgccacattttatggaccagttaaaaaggaagatggatctgaagttggtgttggaggtgcacaagtaactggctctaatacacggaagcacatattgcaagtttccactttccagatgaccatattaatgctctttaataatagagaaaaatacacatttgaggaaattcagcaagagacagatatccctgaaagagagcttgttagagccctacagtccctcgcctgtggtaaaccaacacagcgggttcttacaaaagaacccaaatcaaaggaaatagaaaatggtcatatatttacagttaatgatcaattcacatccaaactacacagagtcaagattcaaacagttgctgccaaacaaggtgaatccgacccagagaggaaagaaacaaggcagaaagtagacgacgacagaaaacatgagatagaagctgctatagtgcggataatgaaatctagaaagaagatgcagcacaatgttctagtagcggaggtaactcagcagttgaaggcgcgattcttaccaagtccagttgttattaagaaacgtattgaaggacttattgagagagaatatttggcacgaacacctgaggatcgcaaagtatacacatatgtagcataaaatgcgttcagaaatttgatttattcttggactgtactcttcgcatggactgggaagttcttttaaatcattaaatattaagacgaccatctcttctattaaattacagtacatgttctagaccattgagatcaagcctttactccctttgagagtttccaacatcagttgattgagcttcaggctttacaacgtttatccctgtagagatcatctttacagttcctcgggaaaatgtgaatgtgctgcgttttgttttctttactgtatgaaaacaggaaaataaaagagaaatttagaaaatacagctcattacaataaaattgttggatttcatttccccaggtcttcagtgttgatgtaaatgtgttttgtagtgttgcttagcactttgcgcattgtgtaagttgggtaacaaaaatggcaaaagaaatgcagatttcccagttatcttgctctgaagacatttctttagctagtcttatttaattttaaaggtttgataaatatacaaagacccaagcatacaatttgagcatgctgtattctaccacttgcacttactcatcttctagccttatgaccaggaacctttgttttgggctcaagtacacatcctgatttggtttctccctgttgtaatttgagatttcccaaattaagtcttataatgattaggttttgttctgagttatttctagagaaagaaagtattttagtatgtgtaaattgtacaataatttttttgctgttgtactcactgctaatagtggattgtatagggtggtgtttttatttcatttattgtagacaaaaataatgaatttagtatacacatacccactaattcaagtatgtcagagcacaaagttggcagctggttatatttaattcagcccctctgaaaagcacatacagtctatactttgtttataaataccctaggtcctccctgcccctaaatatatattttggtgaagctgtggtgcactattaattttctgtttcaaaatgcaatctaaagatgcaataaatatgatgaccttgatagttttaatgaaatcttcaattcttgcagctgtgttttggaaagtgattaagcaatatttctcaaacctgatgattcttggatatttagctattgtcctccaaagagtcatcgtttcacgttttcaaacatgtgctttgtgctgaagattcttgtcagatatcctgtgcttccagagtatttttatcttcaattttatttaattttgtttcattttgttttcataagacaatgtttcagatatgtaatggggcaaaccactatagatttctgttggatagaaaaatgaaatgttactaataagtttaaattgacccttcgttgactatcagtactgttgatacatttattagaatgtatgtctcagaagatggtttctgtttaaatttatggtcaagttacaacaactgaattctaatatggattaaaaactccacataaatattt

SEQ ID NO: 371878 - DNA, 3548 bp, Homo sapiens
aggagaaggaggaggaggaggacgacgttcggcctgcgcagtgagatgtttgtccggtcgccgccgccgccgccatcgcggaggagcgcgataaagggagccgagccggacgtgagggggaccccgcggagccgccgcgccagcgcagccccccagccgcatcggagtcgccagagtccgagccgccgccgccgccgccgccgcccccgccgccgccgcggctgcccaggggccggccagctccccagccctgcccgggggtcgcgccgccgccgcccccagcgtcgcccctagcctgcctgcccgccttaaatgtgacaccggcgtcgcggagcgcgacctgaagccgccgccggggaggggacgagcaccatgtcgaatctgagcaaaggcacgggcagccggaaggacaccaagatgcggatccgggcctttccgatgaccatggatgaaaaatatgtaaacagcatttgggaccttctgaaaaatgcaattcaagaaatccagcgtaagaataacagtggtcttagttttgaggagctctatagaaatgcatatacaatggttttgcataaacatggagaaaagctctacactggactaagagaagttgttaccgaacatctcataaataaggtgcgagaagatgtactaaattcattgaataacaactttcttcaaacgctaaatcaagcttggaatgatcatcaaacagctatggtgatgattagagacatactaatgtacatggaccgtgtgtatgtacaacaaaataatgtggagaacgtctacaatttgggattaattatttttcgagatcaagttgtacgttatgggtgtattagggatcatctacggcaaactctattggatatgattgcaagagagcggaaaggagaagtcgtagacagaggcgcaataagaaatgcttgccagatgttaatgattttaggtctcgaaggaagatcagtctatgaagaagattttgaggctccttttttggaaatgtctgcagaattttttcagatggaaagccagaaatttttagcagaaaatagtgcttcagtatatataaagaaagtagaagctagaattaatgaagaaatagaacgagtgatgcactgccttgacaaatcaacggaagaaccaattgtaaaggtggttgaaagggaactcatttccaagcacatgaagactatagtagaaatggagaattctgggctagtacatatgttgaaaaatggaaagacagaagaccttggttgcatgtacaagttatttagtcgtgtgccaaatggtttgaaaacaatgtgtgagtgtatgagttcctatttgagggagcaaggtaaagctcttgtttctgaagaaggagaaggaaagaatcctgttgactatatccagggcttattggatctgaagagtaggttcgatcgcttcctcctggaatcattcaacaatgaccgtctctttaaacaaactattgcgggtgactttgagtattttctcaacctcaactccaggtctcctgaatacctctcattatttattgatgataagctgaaaaagggagtcaaagggctaacagaacaagaagtagaaacaatattggataaagcaatggtcctttttaggtttatgcaagaaaaagatgtatttgaacgttattataaacaacacttggcaaggagacttctcacaaataaaagtgtttctgatgactctgaaaaaaacatgatatctaagttaaagactgaatgtggatgtcagttcacgtcaaaactggaaggaatgtttagggatatgagcatctcaaacacaacgatggatgaattcaggcaacatctacaggcaactggtgtatctttaggtggtgttgatcttacagtccgggtgctcacgacaggatattggcccactcagtcagccacaccaaagtgcaacatcccaccagcaccaagacatgcttttgagatattcagaaggttctacttagccaaacacagtggtcgacagctcacactccagcatcatatgggttctgcagatctcaatgccacattttatggaccagttaaaaaggaagatggatctgaagttggtgttggaggtgcacaagtaactggctctaatacacggaagcacatattgcaagtttccactttccagatgaccatattaatgctctttaataatagagaaaaatacacatttgaggaaattcagcaagagacagatatccctgaaagagagcttgttagagccctacagtccctcgcctgtggtaaaccaacacagcgggttcttacaaaagaacccaaatcaaaggaaatagaaaatggtcatatatttacagttaatgatcaattcacatccaaactacacagagtcaagattcaaacagttgctgccaaacaaggtgaatccgacccagagaggaaagaaacaaggcagaaagtagacgacgacagaaaacatgagatagaagctgctatagtgcggataatgaaatctagaaagaagatgcagcacaatgttctagtagcggaggtaactcagcagttgaaggcgcgattcttaccaagtccagttgttattaagaaacgtattgaaggacttattgagagagaatatttggcacgaacacctgaggatcgcaaagtatacacatatgtagcataaaatgcgttcagaaatttgatttattcttggactgtactcttcgcatggactgggaagttcttttaaatcattaaatattaagacgaccatctcttctattaaattacagtacatgttctagaccattgagatcaagcctttactccctttgagagtttccaacatcagttgattgagcttcaggctttacaacgtttatccctgtagagatcatctttacagttcctcgggaaaatgtgaatgtgctgcgttttgttttctttactgtatgaaaacaggaaaataaaagagaaatttagaaaatacagctcattacaataaaattgttggatttcatttccccaggtcttcagtgttgatgtaaatgtgttttgtagtgttgcttagcactttgcgcattgtgtaagttgggtaacaaaaatggcaaaagaaatgcagatttcccagttatcttgctctgaagacatttctttagctagtcttatttaattttaaaggtttgataaatatacaaagacccaagcatacaatttgagcatgctgtattctaccacttgcacttactcatcttctagccttatgaccaggaacctttgttttgggctcaagtacacatcctgatttggtttctccctgttgtaatttgagatttcccaaattaagtcttataatgattaggttttgttctgagttatttctagagaaagaaagtattttagtatgtgtaaattgtacaataatttttttgctgttgtactcactgctaatagtggattgtccttagggggggttaaggttcccgttatattagacgagcaatcctgtggcatatataaaaaacccgccctagggtggaaaataaaaaagtg

SEQ ID NO: 371879 - DNA, 3141 bp, Homo sapiens
aggagaaggaggaggaggaggacgacgttcggcctgcgcagtgagatgtttgtccggtcgccgccgccgccgccatcgcggaggagcgcgataaagggagccgagccggacgtgagggggaccccgcggagccgccgcgccagcgcagccccccagccgcatcggagtcgccagagtccgagccgccgccgccgccgccgccgcccccgccgccgccgcggctgcccaggggccggccagctccccagccctgcccgggggtcgcgccgccgccgcccccagcgtcgcccctagcctgcctgcccgccttaaatgtgacaccggcgtcgcggagcgcgacctgaagccgccgccggggaggggacgagcaccatgtcgaatctgagcaaaggcacgggcagccggaaggacaccaagatgcggatccgggcctttccgatgaccatggatgaaaaatatgtaaacagcatttgggaccttctgaaaaatgcaattcaagaaatccagcgtaagaataacagtggtcttagttttgaggagctctatagaaatgcatatacaatggttttgcataaacatggagaaaagctctacactggactaagagaagttgttaccgaacatctcataaataaggaataatacataagtgatgttgtgtcctcagtgcatcacatcaggaggcacttgatgtcagtttatcccattattggtgatgttaactttgatcattggtgtccgccagatttctccactgtaaaggtgcgagaagatgtactaaattcattgaataacaactttcttcaaacgctaaatcaagcttggaatgatcatcaaacagctatggtgatgattagagacatactaatgtacatggaccgtgtgtatgtacaacaaaataatgtggagaacgtctacaatttgggattaattatttttcgagatcaagttgtacgttatgggtgtattagggatcatctacggcaaactctattggatatgattgcaagagagcggaaaggagaagtcgtagacagaggcgcaataagaaatgcttgccagatgttaatgattttaggtctcgaaggaagatcagtctatgaagaagattttgaggctccttttttggaaatgtctgcagaattttttcagatggaaagccagaaatttttagcagaaaatagtgcttcagtatatataaagaaagtagaagctagaattaatgaagaaatagaacgagtgatgcactgccttgacaaatcaacggaagaaccaattgtaaaggtggttgaaagggaactcatttccaagcacatgaagactatagtagaaatggagaattctgggctagtacatatgttgaaaaatggaaagacagaagaccttggttgcatgtacaagttatttagtcgtgtgccaaatggtttgaaaacaatgtgtgagtgtatgagttcctatttgagggagcaaggtaaagctcttgtttctgaagaaggagaaggaaagaatcctgttgactatatccagggcttattggatctgaagagtaggttcgatcgcttcctcctggaatcattcaacaatgaccgtctctttaaacaaactattgcgggtgactttgagtattttctcaacctcaactccaggtctcctgaatacctctcattatttattgatgataagctgaaaaagggagtcaaagggctaacagaacaagaagtagaaacaatattggataaagcaatggtcctttttaggtttatgcaagaaaaagatgtatttgaacgttattataaacaacacttggcaaggagacttctcacaaataaaagtgtttctgatgactctgaaaaaaacatgatatctaagttaaagactgaatgtggatgtcagttcacgtcaaaactggaaggaatgtttagggatatgagcatctcaaacacaacgatggatgaattcaggcaacatctacaggcaactggtgtatctttaggtggtgttgatcttacagtccgggtgctcacgacaggatattggcccactcagtcagccacaccaaagtgcaacatcccaccagcaccaagacatgcttttgagatattcagaaggttctacttagccaaacacagtggtcgacagctcacactccagcatcatatgggttctgcagatctcaatgccacattttatggaccagttaaaaaggaagatggatctgaagttggtgttggaggtgcacaagtaactggctctaatacacggaagcacatattgcaagtttccactttccagatgaccatattaatgctctttaataatagagaaaaatacacatttgaggaaattcagcaagagacagatatccctgaaagagagcttgttagagccctacagtccctcgcctgtggtaaaccaacacagcgggttcttacaaaagaacccaaatcaaaggaaatagaaaatggtcatatatttacagttaatgatcaattcacatccaaactacacagagtcaagattcaaacagttgctgccaaacaaggtgaatccgacccagagaggaaagaaacaaggcagaaagtagacgacgacagaaaacatgagatagaagctgctatagtgcggataatgaaatctagaaagaagatgcagcacaatgttctagtagcggaggtaactcagcagttgaaggcgcgattcttaccaagtccagttgttattaagaaacgtattgaaggacttattgagagagaatatttggcacgaacacctgaggatcgcaaagtatacacatatgtagcataaaatgcgttcagaaatttgatttattcttggactgtactcttcgcatggactgggaagttcttttaaatcattaaatattaagacgaccatctcttctattaaattacagtacatgttctagaccattgagatcaagcctttactccctttgagagtttccaacatcagttgattgagcttcaggctttacaacgtttatccctgtagagatcatctttacagttcctcgggaaaatgtgaatgtgctgcgttttgttttctttactgtatgaaaacaggaaaataaaagagaaatttagaaaatacagctcattacaataaaattgttggatttca

SEQ ID NO: 371880 - DNA, 2961 bp, Homo sapiens
aggagaaggaggaggaggaggacgacgttcggcctgcgcagtgagatgtttgtccggtcgccgccgccgccgccatcgcggaggagcgcgataaagggagccgagccggacgtgagggggaccccgcggagccgccgcgccagcgcagccccccagccgcatcggagtcgccagagtccgagccgccgccgccgccgccgccgcccccgccgccgccgcggctgcccaggggccggccagctccccagccctgcccgggggtcgcgccgccgccgcccccagcgtcgcccctagcctgcctgcccgccttaaatgtgacaccggcgtcgcggagcgcgacctgaagccgccgccggggaggggacgagcaccatgtcgaatctgagcaaaggcacgggcagccggaaggacaccaagatgcggatccgggcctttccgatgaccatggatgaaaaatatgtaaacagcatttgggaccttctgaaaaatgcaattcaagaaatccagcgtaagaataacagtggtcttagttttgaggagctctatagaaatgcatatacaatggttttgcataaacatggagaaaagctctacactggactaagagaagttgttaccgaacatctcataaataaggtgcgagaagatgtactaaattcattgaataacaactttcttcaaacgctaaatcaagcttggaatgatcatcaaacagctatggtgatgattagagacatactaatgtacatggaccgtgtgtatgtacaacaaaataatgtggagaacgtctacaatttgggattaattatttttcgagatcaagttgtacgttatgggtgtattagggatcatctacggcaaactctattggatatgattgcaagagagcggaaaggagaagtcgtagacagaggcgcaataagaaatgcttgccagatgttaatgattttaggtctcgaaggaagatcagtctatgaagaagattttgaggctccttttttggaaatgtctgcagaattttttcagatggaaagccagaaatttttagcagaaaatagtgcttcagtatatataaagaaagtagaagctagaattaatgaagaaatagaacgagtgatgcactgccttgacaaatcaacggaagaaccaattgtaaaggtggttgaaagggaactcatttccaagcacatgaagactatagtagaaatggagaattctgggctagtacatatgttgaaaaatggaaagacagaagaccttggttgcatgtacaagttatttagtcgtgtgccaaatggtttgaaaacaatgtgtgagtgtatgagttcctatttgagggagcaaggtaaagctcttgtttctgaagaaggagaaggaaagaatcctgttgactatatccagggcttattggatctgaagagtaggttcgatcgcttcctcctggaatcattcaacaatgaccgtctctttaaacaaactattgcgggtgactttgagtattttctcaacctcaactccaggtctcctgaatacctctcattatttattgatgataagctgaaaaagggagtcaaagggctaacagaacaagaagtagaaacaatattggataaagcaatggtcctttttaggtttatgcaagaaaaagatgtatttgaacgttattataaacaacacttggcaaggagacttctcacaaataaaagtgtttctgatgactctgaaaaaaacatgatatctaagttaaagactgaatgtggatgtcagttcacgtcattcaggcaacatctacaggcaactggtgtatctttaggtggtgttgatcttacagtccgggtgctcacgacaggatattggcccactcagtcagccacaccaaagtgcaacatcccaccagcaccaagacatgcttttgagatattcagaaggttctacttagccaaacacagtggtcgacagctcacactccagcatcatatgggttctgcagatctcaatgccacattttatggaccagttaaaaaggaagatggatctgaagttggtgttggaggtgcacaagtaactggctctaatacacggaagcacatattgcaagtttccactttccagatgaccatattaatgctctttaataatagagaaaaatacacatttgaggaaattcagcaagagacagatatccctgaaagagagcttgttagagccctacagtccctcgcctgtggtaaaccaacacagcgggttcttacaaaagaacccaaatcaaaggaaatagaaaatggtcatatatttacagttaatgatcaattcacatccaaactacacagagtcaagattcaaacagttgctgccaaacaaggtgaatccgacccagagaggaaagaaacaaggcagaaagtagacgacgacagaaaacatgagatagaagctgctatagtgcggataatgaaatctagaaagaagatgcagcacaatgttctagtagcggaggtaactcagcagttgaaggcgcgattcttaccaagtccagttgttattaagaaacgtattgaaggacttattgagagagaatatttggcacgaacacctgaggatcgcaaagtatacacatatgtagcataaaatgcgttcagaaatttgatttattcttggactgtactcttcgcatggactgggaagttcttttaaatcattaaatattaagacgaccatctcttctattaaattacagtacatgttctagaccattgagatcaagcctttactccctttgagagtttccaacatcagttgattgagcttcaggctttacaacgtttatccctgtagagatcatctttacagttcctcgggaaaatgtgaatgtgctgcgttttgttttctttactgtatgaaaacaggaaaataaaagagaaatttagaaaatacagctcattacaataaaattgttggatttca

SEQ ID NO: 371881 - DNA, 1953 bp, Homo sapiens
tccgtctcaaaagaaaaaaaaaatagaaataaaaaaataaagtaagggcaatggcctttttactgtttggattataacaaattattgccttttgtttgcacagttgaggctttcagtgagcttaaatgaaaaattccgtcttttggctgtgtaagtttttgcctgcatatgcaaaggcttcataaaataatctctgtgactaaaatttcatttcatctgttctcaatcatcccttaacccagcgctatattaccttatgcctccaattcagtggtagccctctacggaatagaattccactccaacccctcattcatgatgcactaaatgagaatgtaagaatgatgctactgtgtgaagtaggagacactttctcaaaccgtatccctttttttgatgtatgtcaaccagatatctatgttttcaaacaatagtgtttttaagctgtaaatgaaccgtagtactgcttttgtagaactaaaattgtataattgttacatcatcttaattttgcagctaacagaacaagaagtagaaacaatattggataaagcaatggtcctttttaggtttatgcaagaaaaagatgtatttgaacgttattataaacaacacttggcaaggagacttctcacaaataaaagtgtttctgatgactctgaaaaaaacatgatatctaagttaaagactgaatgtggatgtcagttcacgtcaaaactggaaggaatgtttagggatatgagcatctcaaacacaacgatggatgaattcaggcaacatctacaggcaactggtgtatctttaggtggtgttgatcttacagtccgggtgctcacgacaggatattggcccactcagtcagccacaccaaagtgcaacatcccaccagcaccaagacatgcttttgagatattcagaaggttctacttagccaaacacagtggtcgacagctcacactccagcatcatatgggttctgcagatctcaatgccacattttatggaccagttaaaaaggaagatggatctgaagttggtgttggaggtgcacaagtaactggctctaatacacggaagcacatattgcaagtttccactttccagatgaccatattaatgctctttaataatagagaaaaatacacatttgaggaaattcagcaagagacagatatccctgaaagagagcttgttagagccctacagtccctcgcctgtggtaaaccaacacagcgggttcttacaaaagaacccaaatcaaaggaaatagaaaatggtcatatatttacagttaatgatcaattcacatccaaactacacagagtcaagattcaaacagttgctgccaaacaaggtgaatccgacccagagaggaaagaaacaaggcagaaagtagacgacgacagaaaacatgagatagaagctgctatagtgcggataatgaaatctagaaagaagatgcagcacaatgttctagtagcggaggtaactcagcagttgaaggcgcgattcttaccaagtccagttgttattaagaaacgtattgaaggacttattgagagagaatatttggcacgaacacctgaggatcgcaaagtatacacatatgtagcataaaatgcgttcagaaatttgatttattcttggactgtactcttcgcatggactgggaagttcttttaaatcattaaatattaagacgaccatctcttctattaaattacagtacatgttctagaccattgagatcaagcctttactccctttgagagtttccaacatcagttgattgagcttcaggctttacaacgtttatccctgtagagatcatctttacagttcctcgggaaaatgtgaatgtgctgcgttttgttttctttactgtatgaaaacaggaaaataaaagagaaatttagaaaatacagctcattacaataaaattgttggatttca

SEQ ID NO: 371882 - DNA, 3312 bp, Homo sapiens
aggagaaggaggaggaggaggacgacgttcggcctgcgcagtgagatgtttgtccggtcgccgccgccgccgccatcgcggaggagcgcgataaagggagccgagccggacgtgagggggaccccgcggagccgccgcgccagcgcagccccccagccgcatcggagtcgccagagtccgagccgccgccgccgccgccgccgcccccgccgccgccgcggctgcccaggggccggccagctccccagccctgcccgggggtcgcgccgccgccgcccccagcgtcgcccctagcctgcctgcccgccttaaatgtgacaccggcgtcgcggagcgcgacctgaagccgccgccggggaggggacgagcaccatgtcgaatctgagcaaaggcacgggcagccggaaggacaccaagatgcggatccgggcctttccgatgaccatggatgaaaaatatgtaaacagcatttgggaccttctgaaaaatgcaattcaagaaatccagcgtaagaataacagtggtcttagttttgaggagctctatagaaatgcatatacaatggttttgcataaacatggagaaaagctctacactggactaagagaagttgttaccgaacatctcataaataaggtgcgagaagatgtactaaattcattgaataacaactttcttcaaacgctaaatcaagcttggaatgatcatcaaacagctatggtgatgattagagacatactaatgtacatggaccgtgtgtatgtacaacaaaataatgtggagaacgtctacaatttgggattaattatttttcgagatcaagttgtacgttatgggtgtattagggatcatctacggcaaactctattggatatgattgcaagagagcggaaaggagaagtcgtagacagaggcgcaataagaaatgcttgccagatgttaatgattttaggtctcgaaggaagatcagtctatgaagaagattttgaggctccttttttggaaatgtctgcagaattttttcagatggaaagccagaaatttttagcagaaaatagtgcttcagtatatataaagaaagtagaagctagaattaatgaagaaatagaacgagtgatgcactgccttgacaaatcaacggaagaaccaattgtaaaggtggttgaaagggaactcatttccaagcacatgaagactatagtagaaatggagaattctgggctagtacatatgttgaaaaatggaaagacagaagaccttggttgcatgtacaagttatttagtcgtgtgccaaatggtttgaaaacaatgtgtgagtgtatgagttcctatttgagggagcaaggtaaagctcttgtttctgaagaaggagaaggaaagaatcctgttgactatatccagggcttattggatctgaagagtaggttcgatcgcttcctcctggaatcattcaacaatgaccgtctctttaaacaaactattgcgggtgactttgagtattttctcaacctcaactccaggtctcctgaatacctctcattatttattgatgataagctgaaaaagggagtcaaagggctaacagaacaagaagtagaaacaatattggataaagcaatggtcctttttaggtttatgcaagaaaaagatgtatttgaacgttattataaacaacacttggcaaggagacttctcacaaataaaagtgtttctgatgactctgaaaaaaacatgatatctaagttaaagactgaatgtggatgtcagttcacgtcaaaactggaaggaatgtttagggatatgagcatctcaaacacaacgatggatgaattcaggcaacatctacaggcaactggtgtatctttaggtggtgttgatcttacagtccgggtgctcacgacaggatattggcccactcagtcagccacaccaaagtgcaacatcccaccagcaccaagacatgcttttgagatattcagaaggttctacttagccaaacacagtggtcgacagctcacactccagcatcatatgggttctgcagatctcaatgccacattttatggaccagttaaaaaggaagatggatctgaagttggtgttggaggtgcacaagtaactggctctaatacacggaagcacatattgcaagtttccactttccagatgaccatattaatgctctttaataatagagaaaaatacacatttgaggaaattcagcaagagacagatatccctgaaagagagcttgttagagccctacagtccctcgcctgtggtaaaccaacacagcgggttcttacaaaagaacccaaatcaaaggaaatagaaaatggtcatatatttacagttaatgatcaattcacatccaaactacacagagtcaagattcaaacagttgctgccaaacaaggtgaatccgacccagagaggaaagaaacaaggcagaaagtagacgacgacagaaaacatgagatagaagctgctatagtgcggataatgaaatctagaaagaagatgcagcacaatgttctagtagcggaggtaactcagcagttgaaggcgcgattcttaccaagtccagttgttattaagaaacgtattgaaggacttattgagagagaatatttggcacgaacacctgaggatcgcaaagtatacacatatgtagcataaaatgcgttcagaaatttgatttattcttggactgtactcttcgcatggactgggaagttcttttaaatcattaaatattaagacgaccatctcttctattaaattacagtacatgttctagaccattgagatcaagcctttactccctttgagagtttccaacatcagttgattgagcttcaggctttacaacgtttatccctgtagagatcatctttacagttcctcgggaaaatgtgaatgtgctgcgttttgttttctttactgtatgaaaacaggaaaataaaagagaaatttagaaaatacagctcattacaataaaattgttggatttcaaaaaaaaaaaaaaaaaaaaaaaaaaaaaaattttttggggggctgggcccggaaaaagtttttaaaacctcttggttgggcgcgcgcgggggccacagtatgttaatgtgaacacttggcacaaaggtggtcaccaagaaaaaatcccggggcaacagatcactgggctgggtttcccacccaattaaaaaacgccgcggggggaaccgcgcttcgtttttgaacaattcccagagggggtccagagggcacaggggttgctacaacagggggtccaagagcgccgaattaaatacg

SEQ ID NO: 371883 - DNA, 3091 bp, Homo sapiens
aggagaaggaggaggaggaggacgacgttcggcctgcgcagtgagatgtttgtccggtcgccgccgccgccgccatcgcggaggagcgcgataaagggagccgagccggacgtgagggggaccccgcggagccgccgcgccagcgcagccccccagccgcatcggagtcgccagagtccgagccgccgccgccgccgccgccgcccccgccgccgccgcggctgcccaggggccggccagctccccagccctgcccgggggtcgcgccgccgccgcccccagcgtcgcccctagcctgcctgcccgccttaaatgtgacaccggcgtcgcggagcgcgacctgaagccgccgccggggaggggacgagcaccatgtcgaatctgagcaaaggcacgggcagccggaaggacaccaagatgcggatccgggcctttccgatgaccatggatgaaaaatatgtaaacagcatttgggaccttctgaaaaatgcaattcaagaaatccagcgtaagaataacagtggtcttagttttgaggagctctatagaaatgcatatacaatggttttgcataaacatggagaaaagctctacactggactaagagaagttgttaccgaacatctcataaataaggtgcgagaagatgtactaaattcattgaataacaactttcttcaaacgctaaatcaagcttggaatgatcatcaaacagctatggtgatgattagagacatactaatgtacatggaccgtgtgtatgtacaacaaaataatgtggagaacgtctacaatttgggattaattatttttcgagatcaagttgtacgttatgggtgtattagggatcatctacggcaaactctattggatatgattgcaagagagcggaaaggagaagtcgtagacagaggcgcaataagaaatgcttgccagatgttaatgattttaggtctcgaaggaagatcagtctatgaagaagattttgaggctccttttttggaaatgtctgcagaattttttcagatggaaagccagaaatttttagcagaaaatagtgcttcagtatatataaagaaagtagaagctagaattaatgaagaaatagaacgagtgatgcactgccttgacaaatcaacggaagaaccaattgtaaaggtggttgaaagggaactcatttccaagcacatgaagactatagtagaaatggagaattctgggctagtacatatgttgaaaaatggaaagacagaagaccttggttgcatgtacaagttatttagtcgtgtgccaaatggtttgaaaacaatgtgtgagtgtatgagttcctatttgagggagcaaggtaaagctcttgtttctgaagaaggagaaggaaagaatcctgttgactatatccagggcttattggatctgaagagtaggttcgatcgcttcctcctggaatcattcaacaatgaccgtctctttaaacaaactattgcgggtgactttgagtattttctcaacctcaactccaggtctcctgaatacctctcattatttattgatgataagctgaaaaagggagtcaaagggctaacagaacaagaagtagaaacaatattggataaagcaatggtcctttttaggtttatgcaagaaaaagatgtatttgaacgttattataaacaacacttggcaaggagacttctcacaaataaaagtgtttctgatgactctgaaaaaaacatgatatctaagttaaagactgaatgtggatgtcagttcacgtcaaaactggaaggaatgtttagggatatgagcatctcaaacacaacgatggatgaattcaggcaacatctacaggcaactggtgtatctttaggtggtgttgatcttacagtccgggtgctcacgacaggatattggcccactcagtcagccacaccaaagtgcaacatcccaccagcaccaagacatgcttttgagatattcagaaggttctacttagccaaacacagtggtcgacagctcacactccagcatcatatgggttctgcagatctcaatgccacattttatggaccagttaaaaaggaagatggatctgaagttggtgttggaggtgcacaagtaactggctctaatacacggaagcacatattgcaagtttccactttccagatgaccatattaatgctctttaataatagagaaaaatacacatttgaggaaattcagcaagagacagatatccctgaaagagagcttgttagagccctacagtccctcgcctgtggtaaaccaacacagcgggttcttacaaaagaacccaaatcaaaggaaatagaaaatggtcatatatttacagttaatgatcaattcacatccaaactacacagagtcaagattcaaacagttgctgccaaacaaggtgaatccgacccagagaggaaagaaacaaggcagaaagtagacgacgacagaaaacatgagatagaagctgctatagtgcggataatgaaatctagaaagaagatgcagcacaatgttctagtagcggaggtaactcagcagttgaaggcgcgattcttaccaagtccagttgttattaagaaacgtattgaaggacttattgagagagaatatttggcacgaacacctgaggatcgcaaagtatacacatatgtagcataaaatgcgttcagaaatttgatttattcttggactgtactcttcgcatggactgggaagttcttttaaatcattaaatattaagacgaccatctcttctattaaattacagtacatgttctagaccattgagatcaagcctttactccctttgagagtttccaacatcagttgattgagcttcaggctttacaacgtttatccctgtagagatcatctttacagttcctcgggaaaatgtgaatgtgctgcgttttgttttctttactgtatgaaaacaggaaaataaaagagaaatttagaaaatacagctcattacaataaaattgttggatttcacaaaaaaaaagagaatatgtagaaaataaaaaaaagaaaggaaatggaatggtggagggaaaaagatgaaagaaaa

SEQ ID NO: 371884 - DNA, 2713 bp, Homo sapiens
  misc_feature (2551)..(2551): n is a, c, g, or t
  misc_feature (2555)..(2556): n is a, c, g, or t
  misc_feature (2559)..(2560): n is a, c, g, or t
  misc_feature (2567)..(2568): n is a, c, g, or t
  misc_feature (2570)..(2570): n is a, c, g, or t
  misc_feature (2573)..(2573): n is a, c, g, or t
  misc_feature (2576)..(2576): n is a, c, g, or t
aggagaaggaggaggaggaggacgacgttcggcctgcgcagtgagatgtttgtccggtcgccgccgccgccgccatcgcggaggagcgcgataaagggagccgagccggacgtgagggggaccccgcggagccgccgcgccagcgcagccccccagccgcatcggagtcgccagagtccgagccgccgccgccgccgccgccgcccccgccgccgccgcggctgcccaggggccggccagctccccagccctgcccgggggtcgcgccgccgccgcccccagcgtcgcccctagcctgcctgcccgccttaaatgtgacaccggcgtcgcggagcgcgacctgaagccgccgccggggaggggacgagcaccatgtcgaatctgagcaaaggcacgggcagccggaaggacaccaagatgcggatccgggcctttccgatgaccatggatgaaaaatatgtaaacagcatttgggaccttctgaaaaatgcaattcaagaaatccagcgtaagaataacagtggtcttagttttgaggagctctatagaaatgcatatacaatggttttgcataaacatggagaaaagctctacactggactaagagaagttgttaccgaacatctcataaataaggtgcgagaagatgtactaaattcattgaataacaactttcttcaaacgctaaatcaagcttggaatgatcatcaaacagctatggtgatgattagagacatactaatgtacatggaccgtgtgtatgtacaacaaaataatgtggagaacgtctacaatttgggattaattatttttcgagatcaagttgtacgttatgggtgtattagggatcatctacggcaaactctattggatatgattgcaagagagcggaaaggagaagtcgtagacagaggcgcaataagaaatgcttgccagatgttaatgattttaggtctcgaaggaagatcagtctatgaagaagattttgaggctccttttttggaaatgtctgcagaattttttcagatggaaagccagaaatttttagcagaaaatagtgcttcagtatatataaagaaagtagaagctagaattaatgaagaaatagaacgagtgatgcactgccttgacaaatcaacggaagaaccaattgtaaaggtggttgaaagggaactcatttccaagcacatgaagactatagtagaaatggagaattctgggctagtacatatgttgaaaaatggaaagacagaagaccttggttgcatgtacaagttatttagtcgtgtgccaaatggtttgaaaacaatgtgtgagtgtatgagttcctatttgagggagcaaggtaaagctcttgtttctgaagaaggagaaggaaagaatcctgttgactatatccagggcttattggatctgaagagtaggttcgatcgcttcctcctggaatcattcaacaatgaccgtctctttaaacaaactattgcgggtgactttgagtattttctcaacctcaactccaggtctcctgaatacctctcattatttattgatgataagctgaaaaagggagtcaaagggctaacagaacaagaagtagaaacaatattggataaagcaatggtcctttttaggtttatgcaagaaaaagatgtatttgaacgttattataaacaacacttggcaaggagacttctcacaaataaaagtgtttctgatgactctgaaaaaaacatgatatctaagttaaagactgaatgtggatgtcagttcacgtcaaaactggaaggaatgtttagggatatgagcatctcaaacacaacgatggatgaattcaggcaacatctacaggcaactggtgtatctttaggtggtgttgatcttacagtccgggtgctcacgacaggatattggcccactcagtcagccacaccaaagtgcaacatcccaccagcaccaagacatgcttttgagatattcagaaggttctacttagccaaacacagtggtcgacagctcacactccagcatcatatgggttctgcagatctcaatgccacattttatggaccagttaaaaaggaagatggatctgaagttggtgttggaggtgcacaagtaactggctctaatacacggaagcacatattgcaagtttccactttccagatgaccatattaatgctctttaataatagagaaaaatacacatttgaggaaattcagcaagagacagatatccctgaaagagagcttgttagagccctacagtccctcgcctgtggtaaaccaacacagcgggttcttacaaaagaacccaaatcaaaggaaatagaaaatggtcatatatttacagttaatgatcaattcacatccaaactacacagagtcaagattcaaacagttgctgccaaacaaggtgaatccgacccagagaggaaagaaacaaggcagaaagtagacgacgacagaaaacatgagatagaagctgctatagtgcggataatgaaatctagaaagaagatgcagcacaatgttctagtagcggaggtanctcnncanntgaaggnncnatnttncccagtcccatggtattaagcacggtttgaggcctttggacacacacttcgggcgcaccttgggctcacgttcaccttgtgctacggcgccagattgatattggacagacttcatgcgggcgactaacccatcacac

SEQ ID NO: 371885 - DNA, 2570 bp, Homo sapiens
aggagaaggaggaggaggaggacgacgttcggcctgcgcagtgagatgtttgtccggtcgccgccgccgccgccatcgcggaggagcgcgataaagggagccgagccggacgtgagggggaccccgcggagccgccgcgccagcgcagccccccagccgcatcggagtcgccagagtccgagccgccgccgccgccgccgccgcccccgccgccgccgcggctgcccaggggccggccagctccccagccctgcccgggggtcgcgccgccgccgcccccagcgtcgcccctagcctgcctgcccgccttaaatgtgacaccggcgtcgcggagcgcgacctgaagccgccgccggggaggggacgagcaccatgtcgaatctgagcaaaggcacgggcagccggaaggacaccaagatgcggatccgggcctttccgatgaccatggatgaaaaatatgtaaacagcatttgggaccttctgaaaaatgcaattcaagaaatccagcgtaagaataacagtggtcttagttttgaggagctctatagaaatgcatatacaatggttttgcataaacatggagaaaagctctacactggactaagagaagttgttaccgaacatctcataaataaggtgcgagaagatgtactaaattcattgaataacaactttcttcaaacgctaaatcaagcttggaatgatcatcaaacagctatggtgatgattagagacatactaatgtacatggaccgtgtgtatgtacaacaaaataatgtggagaacgtctacaatttgggattaattatttttcgagatcaagttgtacgttatgggtgtattagggatcatctacggcaaactctattggatatgattgcaagagagcggaaaggagaagtcgtagacagaggcgcaataagaaatgcttgccagatgttaatgattttaggtctcgaaggaagatcagtctatgaagaagattttgaggctccttttttggaaatgtctgcagaattttttcagatggaaagccagaaatttttagcagaaaatagtgcttcagtatatataaagaaagtagaagctagaattaatgaagaaatagaacgagtgatgcactgccttgacaaatcaacggaagaaccaattgtaaaggtggttgaaagggaactcatttccaagcacatgaagactatagtagaaatggagaattctgggctagtacatatgttgaaaaatggaaagacagaagaccttggttgcatgtacaagttatttagtcgtgtgccaaatggtttgaaaacaatgtgtgagtgtatgagttcctatttgagggagcaaggtaaagctcttgtttctgaagaaggagaaggaaagaatcctgttgactatatccagggcttattggatctgaagagtaggttcgatcgcttcctcctggaatcattcaacaatgaccgtctctttaaacaaactattgcgggtgactttgagtattttctcaacctcaactccaggtctcctgaatacctctcattatttattgatgataagctgaaaaagggagtcaaagggctaacagaacaagaagtagaaacaatattggataaagcaatggtcctttttaggtttatgcaagaaaaagatgtatttgaacgttattataaacaacacttggcaaggagacttctcacaaataaaagtgtttctgatgactctgaaaaaaacatgatatctaagttaaagactgaatgtggatgtcagttcacgtcaaaactggaaggaatgtttagggatatgagcatctcaaacacaacgatggatgaattcaggcaacatctacaggcaactggtgtatctttaggtggtgttgatcttacagtccgggtgctcacgacaggatattggcccactcagtcagccacaccaaagtgcaacatcccaccagcaccaagacatgcttttgagatattcagaaggttctacttagccaaacacagtggtcgacagctcacactccagcatcatatgggttctgcagatctcaatgccacattttatggaccagttaaaaaggaagatggatctgaagttggtgttggaggtgcacaagtaactggctctaatacacggaagcacatattgcaagtttccactttccagatgaccatattaatgctctttaataatagagaaaaatacacatttgaggaaattcagcaagagacagatatccctgaaagagagcttgttagagccctacagtccctcgcctgtggtaaaccaacacagcgggttcttacaaaagaacccaaatcaaaggaaatagaaaatggtcatatatttacagttaatgatcaattcacatccaaactacacagagtcaagattcaaacagttgctgccaaacaaggtgaatccgacccagagaggaaagaaacaaggcagaaagtagacgacgacagaaaacatgagatagaagctgctatagtgcggataatgaaatctagaaagaagatgcagcacaatgttctagtagcggaggtgaggactcttcactactgggc

SEQ ID NO: 371886 - DNA, 2582 bp, Homo sapiens
aggagaaggaggaggaggaggacgacgttcggcctgcgcagtgagatgtttgtccggtcgccgccgccgccgccatcgcggaggagcgcgataaagggagccgagccggacgtgagggggaccccgcggagccgccgcgccagcgcagccccccagccgcatcggagtcgccagagtccgagccgccgccgccgccgccgccgcccccgccgccgccgcggctgcccaggggccggccagctccccagccctgcccgggggtcgcgccgccgccgcccccagcgtcgcccctagcctgcctgcccgccttaaatgtgacaccggcgtcgcggagcgcgacctgaagccgccgccggggaggggacgagcaccatgtcgaatctgagcaaaggcacgggcagccggaaggacaccaagatgcggatccgggcctttccgatgaccatggatgaaaaatatgtaaacagcatttgggaccttctgaaaaatgcaattcaagaaatccagcgtaagaataacagtggtcttagttttgaggagctctatagaaatgcatatacaatggttttgcataaacatggagaaaagctctacactggactaagagaagttgttaccgaacatctcataaataaggtgcgagaagatgtactaaattcattgaataacaactttcttcaaacgctaaatcaagcttggaatgatcatcaaacagctatggtgatgattagagacatactaatgtacatggaccgtgtgtatgtacaacaaaataatgtggagaacgtctacaatttgggattaattatttttcgagatcaagttgtacgttatgggtgtattagggatcatctacggcaaactctattggatatgattgcaagagagcggaaaggagaagtcgtagacagaggcgcaataagaaatgcttgccagatgttaatgattttaggtctcgaaggaagatcagtctatgaagaagattttgaggctccttttttggaaatgtctgcagaattttttcagatggaaagccagaaatttttagcagaaaatagtgcttcagtatatataaagaaagtagaagctagaattaatgaagaaatagaacgagtgatgcactgccttgacaaatcaacggaagaaccaattgtaaaggtggttgaaagggaactcatttccaagcacatgaagactatagtagaaatggagaattctgggctagtacatatgttgaaaaatggaaagacagaagaccttggttgcatgtacaagttatttagtcgtgtgccaaatggtttgaaaacaatgtgtgagtgtatgagttcctatttgagggagcaaggtaaagctcttgtttctgaagaaggagaaggaaagaatcctgttgactatatccagggcttattggatctgaagagtaggttcgatcgcttcctcctggaatcattcaacaatgaccgtctctttaaacaaactattgcgggtgactttgagtattttctcaacctcaactccaggtctcctgaatacctctcattatttattgatgataagctgaaaaagggagtcaaagggctaacagaacaagaagtagaaacaatattggataaagcaatggtcctttttaggtttatgcaagaaaaagatgtatttgaacgttattataaacaacacttggcaaggagacttctcacaaataaaagtgtttctgatgactctgaaaaaaacatgatatctaagttaaagactgaatgtggatgtcagttcacgtcaaaactggaaggaatgtttagggatatgagcatctcaaacacaacgatggatgaattcaggcaacatctacaggcaactggtgtatctttaggtggtgttgatcttacagtccgggtgctcacgacaggatattggcccactcagtcagccacaccaaagtgcaacatcccaccagcaccaagacatgcttttgagatattcagaaggttctacttagccaaacacagtggtcgacagctcacactccagcatcatatgggttctgcagatctcaatgccacattttatggaccagttaaaaaggaagatggatctgaagttggtgttggaggtgcacaagtaactggctctaatacacggaagcacatattgcaagtttccactttccagatgaccatattaatgctctttaataatagagaaaaatacacatttgaggaaattcagcaagagacagatatccctgaaagagagcttgttagagccctacagtccctcgcctgtggtaaaccaacacagcgggttcttacaaaagaacccaaatcaaaggaaatagaaaatggtcatatatttacagttaatgatcaattcacatccaaactacacagagtcaagattcaaacagttgctgccaaacaaggtgaatccgacccagagaggaaagaaacaaggcagaaagtcctttgcatagcttgtgccaactaggatggattctccagagggtgcccagaacaggaagaagggagcagcagctttcaggaggtctatctctatctgttccgtgcgatcagcatggccgctaccga

SEQ ID NO: 371887 - DNA, 2659 bp, Homo sapiens
  misc_feature (2497)..(2497): n is a, c, g, or t
  misc_feature (2501)..(2502): n is a, c, g, or t
  misc_feature (2505)..(2506): n is a, c, g, or t
  misc_feature (2513)..(2514): n is a, c, g, or t
  misc_feature (2516)..(2516): n is a, c, g, or t
  misc_feature (2519)..(2519): n is a, c, g, or t
  misc_feature (2522)..(2522): n is a, c, g, or t
aggagaaggaggaggaggaggacgacgttcggcctgcgcagtgagatgtttgtccggtcgccgccgccgccgccatcgcggaggagcgcgataaagggagccgagccggacgtgagggggaccccgcggagccgccgcgccagcgcagccccccagccgcatcggagtcgccagagtccgagccgccgccgccgccgccgccgcccccgccgccgccgcggctgcccaggggccggccagctccccagccctgcccgggggtcgcgccgccgccgcccccagcgtcgcccctagcctgcctgcccgccttaaatgtgacaccggcgtcgcggagcgcgacctgaagccgccgccggggaggggacgagcaccatgtcgaatctgagcaaaggcacgggcagccggaaggacaccaagatgcggatccgggcctttccgatgaccatggatgaaaaatatgtaaacagcatttgggaccttctgaaaaatgcaattcaagaaatccagcgtaagaataacagtggtcttagttttgaggagctctatagaaatgcatatacaatggttttgcataaacatggagaaaagctctacactggactaagagaagttgttaccgaacatctcataaataaggtgcgagaagatgtactaaattcattgaataacaactttcttcaaacgctaaatcaagcttggaatgatcatcaaacagctatggtgatgattagagacatactaatgtacatggaccgtgtgtatgtacaacaaaataatgtggagaacgtctacaatttgggattaattatttttcgagatcaagttgtacgttatgggtgtattagggatcatctacggcaaactctattggatatgattgcaagagagcggaaaggagaagtcgtagacagaggcgcaataagaaatgcttgccagatgttaatgattttaggtctcgaaggaagatcagtctatgaagaagattttgaggctccttttttggaaatgtctgcagaattttttcagatggaaagccagaaatttttagcagaaaatagtgcttcagtatatataaagaaagtagaagctagaattaatgaagaaatagaacgagtgatgcactgccttgacaaatcaacggaagaaccaattgtaaaggtggttgaaagggaactcatttccaagcacatgaagactatagtagaaatggagaattctgggctagtacatatgttgaaaaatggaaagacagaagaccttggttgcatgtacaagttatttagtcgtgtgccaaatggtttgaaaacaatgtgtgagtgtatgagttcctatttgagggagcaaggtaaagctcttgtttctgaagaaggagaaggaaagaatcctgttgactatatccagggcttattggatctgaagagtaggttcgatcgcttcctcctggaatcattcaacaatgaccgtctctttaaacaaactattgcgggtgactttgagtattttctcaacctcaactccaggtctcctgaatacctctcattatttattgatgataagctgaaaaagggagtcaaagggctaacagaacaagaagtagaaacaatattggataaagcaatggtcctttttaggtttatgcaagaaaaagatgtatttgaacgttattataaacaacacttggcaaggagacttctcacaaataaaagtgtttctgatgactctgaaaaaaacatgatatctaagttaaagactgaatgtggatgtcagttcacgtcattcaggcaacatctacaggcaactggtgtatctttaggtggtgttgatcttacagtccgggtgctcacgacaggatattggcccactcagtcagccacaccaaagtgcaacatcccaccagcaccaagacatgcttttgagatattcagaaggttctacttagccaaacacagtggtcgacagctcacactccagcatcatatgggttctgcagatctcaatgccacattttatggaccagttaaaaaggaagatggatctgaagttggtgttggaggtgcacaagtaactggctctaatacacggaagcacatattgcaagtttccactttccagatgaccatattaatgctctttaataatagagaaaaatacacatttgaggaaattcagcaagagacagatatccctgaaagagagcttgttagagccctacagtccctcgcctgtggtaaaccaacacagcgggttcttacaaaagaacccaaatcaaaggaaatagaaaatggtcatatatttacagttaatgatcaattcacatccaaactacacagagtcaagattcaaacagttgctgccaaacaaggtgaatccgacccagagaggaaagaaacaaggcagaaagtagacgacgacagaaaacatgagatagaagctgctatagtgcggataatgaaatctagaaagaagatgcagcacaatgttctagtagcggaggtanctcnncanntgaaggnncnatnttncccagtcccatggtattaagcacggtttgaggcctttggacacacacttcgggcgcaccttgggctcacgttcaccttgtgctacggcgccagattgatattggacagacttcatgcgggcgactaacccatcacac

SEQ ID NO: 371888 - DNA, 2637 bp, Homo sapiens
aggagaaggaggaggaggaggacgacgttcggcctgcgcagtgagatgtttgtccggtcgccgccgccgccgccatcgcggaggagcgcgataaagggagccgagccggacgtgagggggaccccgcggagccgccgcgccagcgcagccccccagccgcatcggagtcgccagagtccgagccgccgccgccgccgccgccgcccccgccgccgccgcggctgcccaggggccggccagctccccagccctgcccgggggtcgcgccgccgccgcccccagcgtcgcccctagcctgcctgcccgccttaaatgtgacaccggcgtcgcggagcgcgacctgaagccgccgccggggaggggacgagcaccatgtcgaatctgagcaaaggcacgggcagccggaaggacaccaagatgcggatccgggcctttccgatgaccatggatgaaaaatatgtaaacagcatttgggaccttctgaaaaatgcaattcaagaaatccagcgtaagaataacagtggtcttagttttgaggagctctatagaaatgcatatacaatggttttgcataaacatggagaaaagctctacactggactaagagaagttgttaccgaacatctcataaataaggtgcgagaagatgtactaaattcattgaataacaactttcttcaaacgctaaatcaagcttggaatgatcatcaaacagctatggtgatgattagagacatactaatgtacatggaccgtgtgtatgtacaacaaaataatgtggagaacgtctacaatttgggattaattatttttcgagatcaagttgtacgttatgggtgtattagggatcatctacggcaaactctattggatatgattgcaagagagcggaaaggagaagtcgtagacagaggcgcaataagaaatgcttgccagatgttaatgattttaggtctcgaaggaagatcagtctatgaagaagattttgaggctccttttttggaaatgtctgcagaattttttcagatggaaagccagaaatttttagcagaaaatagtgcttcagtatatataaagaaagtagaagctagaattaatgaagaaatagaacgagtgatgcactgccttgacaaatcaacggaagaaccaattgtaaaggtggttgaaagggaactcatttccaagcacatgaagactatagtagaaatggagaattctgggctagtacatatgttgaaaaatggaaagacagaagaccttggttgcatgtacaagttatttagtcgtgtgccaaatggtttgaaaacaatgtgtgagtgtatgagttcctatttgagggagcaaggtaaagctcttgtttctgaagaaggagaaggaaagaatcctgttgactatatccagggcttattggatctgaagagtaggttcgatcgcttcctcctggaatcattcaacaatgaccgtctctttaaacaaactattgcgggtgactttgagtattttctcaacctcaactccaggtctcctgaatacctctcattatttattgatgataagctgaaaaagggagtcaaagggctaacagaacaagaagtagaaacaatattggataaagcaatggtcctttttaggtttatgcaagaaaaagatgtatttgaacgttattataaacaacacttggcaaggagacttctcacaaataaaagtgtttctgatgactctgaaaaaaacatgatatctaagttaaagactgaatgtggatgtcagttcacgtcaaaactggaaggaatgtttagggatatgagcatctcaaacacaacgatggatgaattcaggcaacatctacaggcaactggtgtaagattctgcgttaatttctacttagatattcatgtaaagtcttttgtaatgggtatattttcatccacttagcagatgacagttgtttctttaaatgtcattagtgacaacatgtgttttatctgtgagtacttaattttccttcacattgcctcttattctgtgtttatgttaaaactttttattcttttaaaatttagttgtttcttcccacttgaaggaatacactgacaatttaataaagagaattattctgttgttaataaagataatacaaatctattataaaaaaaaaaaaaaaaaaaaaaaaaaaaaaaaaaaaaaaaaacaaaaaaaaaaaaaaacaaaaaaataacaaaaaaaaacaaaaaaaaaaaaaaaaaaacaaaacaaaaaaaaacaaagagagggccgacggaaaaaaacgataattcatcgaggaatcacgagcaaacaatcaaacaactacacatacagaaagaagaaagggcagatcaacaaacaggagcacttaaaaaaagaaacagacgaaggaaaccagacagaaacaaacaacagacaagaaaacagacaaaacaaacaaaagaagacaaccaaaacaagaacaaacacaaaacaaagcaagaaataacacaaaaacgaagcacagcacccaacagaaagacagataacacacaaagcaacaaaacagaagccacccagacacgaacacaatcaaaagaaaagaaaagagaaacaataaagacaagagacaaacaacgaaaaacacccaagcaa

SEQ ID NO: 371889 - DNA, 992 bp, Homo sapiens
gcagtggctcaatctcgtctcattgcaacctccacctcctgggttcaagtgattctcttactcatcttctagccttatgaccaggaacctttgttttgggctcaagtacacatcctgatttggtttctccctgttgtaatttgagatttcccaaattaagtcttataatgattaggttttgttctgagttatttctagagaaagaaagtattttagtatgtgtaaattgtacaataatttttttgctgttgtactcactgctaatagtggattgtatagggtggtgtttttatttcatttattgtagacaaaaataatgaatttagtatacacatacccactaattcaagtatgtcagagcacaaagttggcagctggttatatttaattcagcccctctgaaaagcacatacagtctatactttgtttataaataccctaggtcctccctgcccctaaatatatattttggtgaagctgtggtgcactattaattttctgtttcaaaatgcaatctaaagatgcaataaatatgatgaccttgatagttttaatgaaatcttcaattcttgcagctgtgttttggaaagtgattaagcaatatttctcaaacctgatgattcttggatatttagctattgtcctccaaagagtcatcgtttcacgttttcaaacatgtgctttgtgctgaagattcttgtcagatatcctgtgcttccagagtatttttatcttcaattttatttaattttgtttcattttgttttcataagacaatgtttcagatatgtaatggggcaaaccactatagatttctgttggatagaaaaatgaaatgttactaataagtttaaattgacccttcgttgactatcagtactgttgatacatttattagaatgtatgtctcagaagatggtttctgtttaaatttatggtcaagttacaacaactgaattctaatatggattaaaaactccacataaatattt

SEQ ID NO: 371890 - DNA, 762 bp, Homo sapiens
gaagactatagggaagaatagagtaagactcctaaagattggaatctggtatgaatttgtgatgaggttgtgacataaaaagcataataaaatatatgacaagaaatggttagataacagaactctagggagatttttggcaaggagattttaggaactgacatcctagtggtacttttaaattatttatttcactgactgaatcttggcagtacatactcttgtctcctcataaagccttagagattacagctacattttgagttagtaagacaacagatacctatctgagataattttggtgagttttaacttggagccatggtaataaaataatcaattgacctctgatagtcataagcaatgaaaattatttactggtaattttactactgaatattttcagctactgtttttcttccaggtaagaaattatattctgcataaaaacaaaatcaactttattatctcaaagttaaattcctcatttttgaaaaggataatttagtattcaagtaaacattaagacagtttctgaatgcgtacttgaattaataagtgtgtatattcagaggctgaaattggtttttatctgtggattacattgaattataataagcttgcttataaaccaaattttaaaattagatttatgataaatgtctttatttctattttagttgctgccaaacaaggtgaatccgacccagagaggaaagaaacaaggcagaaagtagacgacgacagaaaacatgagataga

SEQ ID NO: 371891 - DNA, 621 bp, Homo sapiens
aagaagaatgctatttcacatataaggaaactgaggcacagaggttaaatatttatcccaggtcacccagtttgttagggagctgggattggagcccaggtaattgactccaaaatcagtattctcaaccattattcaaagttggggaagggaaggtgtagtaggaaattcagcagtagcatgaagccagtcttacaggcccttgtaacttactataagaatataggattttactctgacaatgatgtcaagtcactggagggttgggaaatacctaggaagttgatttatgttctggagatcagaagaggagtctgtactatacatatacatttgatactcttctgtgtataggttatagcttaaaatatttctactagcctataacatttctttgatttaaattaaagattccacttcattattttattaaacagatatgtgcatgcctgtatatacgagtgtgtggatgtgtgtgtgcaaactaatgaactcttctgttactaggtgcgagaagatgtactaaattcattgaataacaactttcttcaaacgctaaatcaagcttggaatgatcatcaaacagctatggtgatgattagagacatactaatgtacatg

SEQ ID NO: 371892 - DNA, 7000 bp, Homo sapiens
aggagaaggaggaggaggaggacgacgttcggcctgcgcagtgagatgtttgtccggtcgccgccgccgccgccatcgcggaggagcgcgataaagggagccgagccggacgtgagggggaccccgcggagccgccgcgccagcgcagccccccagccgcatcggagtcgccagagtccgagccgccgccgccgccgccgccgcccccgccgccgccgcggctgcccaggggccggccagctccccagccctgcccgggggtcgcgccgccgccgcccccagcgtcgcccctagcctgcctgcccgccttaaatgtgacaccggcgtcgcggagcgcgacctgaagccgccgccggggaggggacgagcaccatgtcgaatctgagcaaaggcacgggcagccggaaggacaccaagatgcggatccgggcctttccgatgaccatggatgaaaaatatgtaaacagcatttgggaccttctgaaaaatgcaattcaagaaatccagcgtaagaataacagtggtcttagttttgaggagctctatagaaatgcatatacaatggttttgcataaacatggagaaaagctctacactggactaagagaagttgttaccgaacatctcataaataaggtgcgagaagatgtactaaattcattgaataacaactttcttcaaacgctaaatcaagcttggaatgatcatcaaacagctatggtgatgattagagacatactaatgtacatggaccgtgtgtatgtacaacaaaataatgtggagaacgtctacaatttgggattaattatttttcgagatcaagttgtacgttatgggtgtattagggatcatctacggcaaactctattggatatgattgcaagagagcggaaaggagaagtcgtagacagaggcgcaataagaaatgcttgccagatgttaatgattttaggtctcgaaggaagatcagtctatgaagaagattttgaggctccttttttggaaatgtctgcagaattttttcagatggaaagccagaaatttttagcagaaaatagtgcttcagtatatataaagaaagtagaagctagaattaatgaagaaatagaacgagtgatgcactgccttgacaaatcaacggaagaaccaattgtaaaggtggttgaaagggaactcatttccaagcacatgaagactatagtagaaatggagaattctgggctagtacatatgttgaaaaatggaaagacagaagaccttggttgcatgtacaagttatttagtcgtgtgccaaatggtttgaaaacaatgtgtgagtgtatgagttcctatttgagggagcaaggtaaagctcttgtttctgaagaaggagaaggaaagaatcctgttgactatatccagggcttattggatctgaagagtaggttcgatcgcttcctcctggaatcattcaacaatgaccgtctctttaaacaaactattgcgggtgactttgagtattttctcaacctcaactccaggtctcctgaatacctctcattatttattgatgataagctgaaaaagggagtcaaagggctaacagaacaagaagtagaaacaatattggataaagcaatggtcctttttaggtttatgcaagaaaaagatgtatttgaacgttattataaacaacacttggcaaggagacttctcacaaataaaagtgtttctgatgactctgaaaaaaacatgatatctaagttaaagactgaatgtggatgtcagttcacgtcaaaactggaaggaatgtttagggatatgagcatctcaaacacaacgatggatgaattcaggcaacatctacaggcaactggtgtatctttaggtggtgttgatcttacagtccgggtgctcacgacaggatattggcccactcagtcagccacaccaaagtgcaacatcccaccagcaccaagacatgcttttgagatattcagaaggttctacttagccaaacacagtggtcgacagctcacactccagcatcatatgggttctgcagatctcaatgccacattttatggaccagttaaaaaggaagatggatctgaagttggtgttggaggtgcacaagtaactggctctaatacacggaagcacatattgcaagtttccactttccagatgaccatattaatgctctttaataatagagaaaaatacacatttgaggaaattcagcaagagacagatatccctgaaagagagcttgttagagccctacagtccctcgcctgtggtaaaccaacacagcgggttcttacaaaagaacccaaatcaaaggaaatagaaaatggtcatatatttacagttaatgatcaattcacatccaaactacacagagtcaagattcaaacagttgctgccaaacaaggtgaatccgacccagagaggaaagaaacaaggcagaaagtagacgacgacagaaaacatgagatagaagctgctatagtgcggataatgaaatctagaaagaagatgcagcacaatgttctagtagcggaggtaactcagcagttgaaggcgcgattcttaccaagtccagttgttattaagaaacgtattgaaggacttattgagagagaatatttggcacgaacacctgaggatcgcaaagtatacacatatgtagcataaaatgcgttcagaaatttgatttattcttggactgtactcttcgcatggactgggaagttcttttaaatcattaaatattaagacgaccatctcttctattaaattacagtacatgttctagaccattgagatcaagcctttactccctttgagagtttccaacatcagttgattgagcttcaggctttacaacgtttatccctgtagagatcatctttacagttcctcgggaaaatgtgaatgtgctgcgttttgttttctttactgtatgaaaacaggaaaataaaagagaaatttagaaaatacagctcattacaataaaattgttggatttcatttccccaggtcttcagtgttgatgtaaatgtgttttgtagtgttgcttagcactttgcgcattgtgtaagttgggtaacaaaaatggcaaaagaaatgcagatttcccagttatcttgctctgaagacatttctttagctagtcttatttaattttaaaggtttgataaatatacaaagacccaagcatacaatttgagcatgctgtattctaccacttgcacttactcatcttctagccttatgaccaggaacctttgttttgggctcaagtacacatcctgatttggtttctccctgttgtaatttgagatttcccaaattaagtcttataatgattaggttttgttctgagttatttctagagaaagaaagtattttagtatgtgtaaattgtacaataatttttttgctgttgtactcactgctaatagtggattgtatagggtggtgtttttatttcatttattgtagacaaaaataatgaatttagtatacacatacccactaattcaagtatgtcagagcacaaagttggcagctggttatatttaattcagcccctctgaaaagcacatacagtctatactttgtttataaataccctaggtcctccctgcccctaaatatatattttggtgaagctgtggtgcactattaattttctgtttcaaaatgcaatctaaagatgcaataaatatgatgaccttgatagttttaatgaaatcttcaattcttgcagctgtgttttggaaagtgattaagcaatatttctcaaacctgatgattcttggatatttagctattgtcctccaaagagtcatcgtttcacgttttcaaacatgtgctttgtgctgaagattcttgtcagatatcctgtgcttccagagtatttttatcttcaattttatttaattttgtttcattttgttttcataagacaatgtttcagatatgtaatggggcaaaccactatagatttctgttggatagaaaaatgaaatgttactaataagtttaaattgacccttcgttgactatcagtactgttgatacatttattagaatgtatgtctcagaagatggtttctgtttaaatttatggtcaagttacaacaactgaattctaatatggattaaaaactccacataaatatttttccccatgcgtcttgggttataattttccttttagacttgcaaatatgcttttattgcaattttgtctccatctgtactgtagaattacaagccttgtgctctttatctctacattttccacttctacatgatgcaattaagatgccaatgaaaagtattgtgaacattattctcaggacacttttaccatacttgagtagtactaagtcaggtgtaacatggaaagctaagggtttcaccttctgattttgacataattggaaattttctataatggtaagatgtttataggaaagtaatggtagttcatgtttgagaattttttttattgctttcatttcccagttaaatgatatttaacacctgggaaaacaggacagctcagattgtcgagttagtaaacatgagcgatgtaaaaactttatttgaaatctcctaagtgagacattaaacattttagtgctagtttaagccattaaaagtaaagtttaagtttacgtcattgtctcaagtgtggctgtaaaaatcagatctagagtttagagacatacttgttaactttggagcacaggtttgatatttatgcttctaaatacattaaaacatttctgaattgcagttgaatggttggagattgctggcgatgtgatgctgcactgaaaaaactggtcacacaaaatgtttatatgtttgactgcataagtattattttaggtcataaaggttataacaaaatacatttaacattgctttctttttagcaagaggtcacagatgctattttttctcagtttttaatgctttaatttgaaagaaaaatgcatcctaaccattccatcctgttggtgcagagaaattttggtgatttattagaagacttttaaggagggtggatacatagtttttcaactgcaaaaatcatgtcatctcttcagtaactgttaaagtgtaattctctgccttcattatcaagtccaggacagtgtttattttgaatcgttaacattatttaaagactgaaaattcattgcaattagggaacgcacagcctcacaaaagtggttgtgattgcaaggattctttatgtcagtgaacttaaaaagggaatgggggaagagatgcatgcctttctaaaggtatgctagagtcacctgtgtagcattgtaattatgtactatcaaacccccaagatgctgatgataggccttctctgtaagaatccttctcatagtgaagcactgttgatgttttgttcaccggatatgttgggtagcagaaaaggcctagaaccagttttaagattatgcctacatctctagaagactagtacactggcatcatcttaggtttctaaatattatttaattccttaatttggaaagcagttttaatgtttacagtttaagatactcattttcagtaactagtgttaaagatttttatctttgcctgtctactgtaacttaagactttcatagaataattttttatagagtatatggtatattgtgtcaatcttggaaggaaagctgttgcatatcaattgtaggtcatgtattttactatatgttgcatagtattttgcattctgtaaatacgaatgttaaaacatttcaggtcagcaaaattagaagtcatttctagtcctcaaagcagaaataattagaaatgttaacatttaagtgcttatcatatgccagatactattctgaatattttatgtatattcattcatttagttgtcatattggctttatgtgacataactgtcattataccagtgttgtccaaggttgctagcaggaaatggcagagccaggagttggacctaggtttaatcctatccatattccatgttacaaattgacatgattttccatattaaaaaattttcatttattttgtacctcattcacatgaatagtaatgtgacaaactaaagttaatacatgaagcattgcaatatggaattttgcacatttttgttagctttacattatttgctgataccaacttttggtaggaaggaaaacagggaaggtgattgctgctattctggaatgtgtccattgaaaagaaaataggcgctttgtctcctacaatcttagagaaagttttacatacttaagtgggtaccacagataggcatgtaccttaaattcaaatctacagttttacaaaatgttttcctttgtgtgcctttcctatgtcaaattagccagaaggaagaagagacgttaagaatggcagataaatttaacaggtaatgatacagagattggccattacgctagctctcaggagaaaaacaactaggatgtcttgaaacccgtgcatttaattttagaaatggcaaatttgtaagcgtgtcatttaagtaatttgatgctcagttttagggtctaagttgacctcgagtgagccatgcaaaaatagctttaaaattatacatgagcagctcaaagtaaacgtgtattttttagtaacaatgaaattgtcaaatttcaagattttaataacaggacagttcaactaataaactttattgcatacaagatttattgcaatgtgggaaaattaaaattctcagtctcagaattctttctgcagttgtgattcttgaataaatgcctcagcacgatgtctggtatgtagtggatgtaggcactcagtaaatcttcagatgaatgtgctaaatgatcactcagtgtcttgaaagaaaatctttaaaagaattgaacttcacattaaaatttgtactgcactattggggctatgacagtataaggatatttttataagtagaagttatttgatacttgac

SEQ ID NO: 371893 - DNA, 3015 bp, Homo sapiens
aggagaaggaggaggaggaggacgacgttcggcctgcgcagtgagatgtttgtccggtcgccgccgccgccgccatcgcggaggagcgcgataaagggagccgagccggacgtgagggggaccccgcggagccgccgcgccagcgcagccccccagccgcatcggagtcgccagagtccgagccgccgccgccgccgccgccgcccccgccgccgccgcggctgcccaggggccggccagctccccagccctgcccgggggtcgcgccgccgccgcccccagcgtcgcccctagcctgcctgcccgccttaaatgtgacaccggcgtcgcggagcgcgacctgaagccgccgccggggaggggacgagcaccatgtcgaatctgagcaaaggcacgggcagccggaaggacaccaagatgcggatccgggcctttccgatgaccatggatgaaaaatatgtaaacagcatttgggaccttctgaaaaatgcaattcaagaaatccagcgtaagaataacagtggtcttagttttgaggagctctatagaaatgcatatacaatggttttgcataaacatggagaaaagctctacactggactaagagaagttgttaccgaacatctcataaataaggtgcgagaagatgtactaaattcattgaataacaactttcttcaaacgctaaatcaagcttggaatgatcatcaaacagctatggtgatgattagagacatactaatgtacatggaccgtgtgtatgtacaacaaaataatgtggagaacgtctacaatttgggattaattatttttcgagatcaagttgtacgttatgggtgtattagggatcatctacggcaaactctattggatatgattgcaagagagcggaaaggagaagtcgtagacagaggcgcaataagaaatgcttgccagatgttaatgattttaggtctcgaaggaagatcagtctatgaagaagattttgaggctccttttttggaaatgtctgcagaattttttcagatggaaagccagaaatttttagcagaaaatagtgcttcagtatatataaagaaagtagaagctagaattaatgaagaaatagaacgagtgatgcactgccttgacaaatcaacggaagaaccaattgtaaaggtggttgaaagggaactcatttccaagcacatgaagactatagtagaaatggagaattctgggctagtacatatgttgaaaaatggaaagacagaagaccttggttgcatgtacaagttatttagtcgtgtgccaaatggtttgaaaacaatgtgtgagtgtatgagttcctatttgagggagcaaggtaaagctcttgtttctgaagaaggagaaggaaagaatcctgttgactatatccagggcttattggatctgaagagtaggttcgatcgcttcctcctggaatcattcaacaatgaccgtctctttaaacaaactattgcgggtgactttgagtattttctcaacctcaactccaggtctcctgaatacctctcattatttattgatgataagctgaaaaagggagtcaaagggctaacagaacaagaagtagaaacaatattggataaagcaatggtcctttttaggtttatgcaagaaaaagatgtatttgaacgttattataaacaacacttggcaaggagacttctcacaaataaaagtgtttctgatgactctgaaaaaaacatgatatctaagttaaagactgaatgtggatgtcagttcacgtcaaaactggaaggaatgtttagggatatgagcatctcaaacacaacgatggatgaattcaggcaacatctacaggcaactggtgtatctttaggtggtgttgatcttacagtccgggtgctcacgacaggatattggcccactcagtcagccacaccaaagtgcaacatcccaccagcaccaagacatgcttttgagatattcagaaggttctacttagccaaacacagtggtcgacagctcacactccagcatcatatgggttctgcagatctcaatgccacattttatggaccagttaaaaaggaagatggatctgaagttggtgttggaggtgcacaagtaactggctctaatacacggaagcacatattgcaagtttccactttccagatgaccatattaatgctctttaataatagagaaaaatacacatttgaggaaattcagcaagagacagatatccctgaaagagagcttgttagagccctacagtccctcgcctgtggtaaaccaacacagcgggttcttacaaaagaacccaaatcaaaggaaatagaaaatggtcatatatttacagttaatgatcaattcacatccaaactacacagagtcaagattcaaacagttgctgccaaacaaggtgaatccgacccagagaggaaagaaacaaggcagaaagtagacgacgacagaaaacatgagatagaagctgctatagtgcggataatgaaatctagaaagaagatgcagcacaatgttctagtagcggaggtaactcagcagttgaaggcgcgattcttaccaagtccagttgttattaagaaacgtattgaaggacttattgagagagaatatttggcacgaacacctgaggatcgcaaagtatacacatatgtagcataaaatgcgttcagaaatttgatttattcttggactgtactcttcgcatggactgggaagttcttttaaatcattaaatattaagacgaccatctcttctattaaattacagtacatgttctagaccattgagatcaagcctttactccctttgagagtttccaacatcagttgattgagcttcaggctttacaacgtttatccctgtagagatcatctttacagttcctcgggaaaatgtgaatgtgctgcgttttgttttctttactgtatgaaaacaggaaaataaaagagaaatttagaaaatacagctcattacaataaaattgttggatttca

SEQ ID NO: 371894 - DNA, 2960 bp, Homo sapiens
aggagaaggaggaggaggaggacgacgttcggcctgcgcagtgagatgtttgtccggtcgccgccgccgccgccatcgcggaggagcgcgataaagggagccgagccggacgtgagggggaccccgcggagccgccgcgccagcgcagccccccagccgcatcggagtcgccagagtccgagccgccgccgccgccgccgccgcccccgccgccgccgcggctgcccaggggccggccagctccccagccctgcccgggggtcgcgccgccgccgcccccagcgtcgcccctagcctgcctgcccgccttaaatgtgacaccggcgtcgcggagcgcgacctgaagccgccgccggggaggggacgagcaccatgtcgaatctgagcaaaggcacgggcagccggaaggacaccaagatgcggatccgggcctttccgatgaccatggatgaaaaatatgtaaacagcatttgggaccttctgaaaaatgcaattcaagaaatccagcgtaagaataacagtggtcttagttttgaggagctctatagaaatgcatatacaatggttttgcataaacatggagaaaagctctacactggactaagagaagttgttaccgaacatctcataaataaggtgcgagaagatgtactaaattcattgaataacaactttcttcaaacgctaaatcaagcttggaatgatcatcaaacagctatggtgatgattagagacatactaatgtacatggaccgtgtgtatgtacaacaaaataatgtggagaacgtctacaatttgggattaattatttttcgagatcaagttgtacgttatgggtgtattagggatcatctacggcaaactctattggatatgattgcaagagagcggaaaggagaagtcgtagacagaggcgcaataagaaatgcttgccagatgttaatgattttaggtctcgaaggaagatcagtctatgaagaagattttgaggctccttttttggaaatgtctgcagaattttttcagtagaagctagaattaatgaagaaatagaacgagtgatgcactgccttgacaaatcaacggaagaaccaattgtaaaggtggttgaaagggaactcatttccaagcacatgaagactatagtagaaatggagaattctgggctagtacatatgttgaaaaatggaaagacagaagaccttggttgcatgtacaagttatttagtcgtgtgccaaatggtttgaaaacaatgtgtgagtgtatgagttcctatttgagggagcaaggtaaagctcttgtttctgaagaaggagaaggaaagaatcctgttgactatatccagggcttattggatctgaagagtaggttcgatcgcttcctcctggaatcattcaacaatgaccgtctctttaaacaaactattgcgggtgactttgagtattttctcaacctcaactccaggtctcctgaatacctctcattatttattgatgataagctgaaaaagggagtcaaagggctaacagaacaagaagtagaaacaatattggataaagcaatggtcctttttaggtttatgcaagaaaaagatgtatttgaacgttattataaacaacacttggcaaggagacttctcacaaataaaagtgtttctgatgactctgaaaaaaacatgatatctaagttaaagactgaatgtggatgtcagttcacgtcaaaactggaaggaatgtttagggatatgagcatctcaaacacaacgatggatgaattcaggcaacatctacaggcaactggtgtatctttaggtggtgttgatcttacagtccgggtgctcacgacaggatattggcccactcagtcagccacaccaaagtgcaacatcccaccagcaccaagacatgcttttgagatattcagaaggttctacttagccaaacacagtggtcgacagctcacactccagcatcatatgggttctgcagatctcaatgccacattttatggaccagttaaaaaggaagatggatctgaagttggtgttggaggtgcacaagtaactggctctaatacacggaagcacatattgcaagtttccactttccagatgaccatattaatgctctttaataatagagaaaaatacacatttgaggaaattcagcaagagacagatatccctgaaagagagcttgttagagccctacagtccctcgcctgtggtaaaccaacacagcgggttcttacaaaagaacccaaatcaaaggaaatagaaaatggtcatatatttacagttaatgatcaattcacatccaaactacacagagtcaagattcaaacagttgctgccaaacaaggtgaatccgacccagagaggaaagaaacaaggcagaaagtagacgacgacagaaaacatgagatagaagctgctatagtgcggataatgaaatctagaaagaagatgcagcacaatgttctagtagcggaggtaactcagcagttgaaggcgcgattcttaccaagtccagttgttattaagaaacgtattgaaggacttattgagagagaatatttggcacgaacacctgaggatcgcaaagtatacacatatgtagcataaaatgcgttcagaaatttgatttattcttggactgtactcttcgcatggactgggaagttcttttaaatcattaaatattaagacgaccatctcttctattaaattacagtacatgttctagaccattgagatcaagcctttactccctttgagagtttccaacatcagttgattgagcttcaggctttacaacgtttatccctgtagagatcatctttacagttcctcgggaaaatgtgaatgtgctgcgttttgttttctttactgtatgaaaacaggaaaataaaagagaaatttagaaaatacagctcattacaataaaattgttggatttca

SEQ ID NO: 371895 - DNA, 987 bp, Homo sapiens
gagtactggccatgctgatctcacgccacattttatgcaccagtgtaaaaggaagatggatctgaagttggtgttggaggtgcacaagtaactggctctaatacacggaagcacatattgcaagtttccactttccagatgaccatattaatgctctttaataatagagaaaaatacacatttgaggaaattcagcaagagacagatatccctgaaagagagcttgttagagccctacagtccctcgcctgtggtaaaccaacacagcgggttcttacaaaagaacccaaatcaaaggaaatagaaaatggtcatatatttacagttaatgatcaattcacatccaaactacacagagtcaagattcaaacagttgctgccaaacaaggtgaatccgacccagagaggaaagaaacaaggcagaaagtagacgacgacagaaaacatgagatagaagctgctatagtgcggataatgaaatctagaaagaagatgcagcacaatgttctagtagcggaggtaactcagcagttgaaggcgcgattcttaccaagtccagttgttattaagaaacgtattgaaggacttattgagagagaatatttggcacgaacacctgaggatcgcaaagtatacacatatgtagcataaaatgcgttcagaaatttgatttattcttggactgtactcttcgcatggactgggaagttcttttaaatcattaaatattaagacgaccatctcttctattaaattacagtacatgttctagaccattgagatcaagcctttactccctttgagagtttccaacatcagttgattgagcttcaggctttacaacgtttatccctgtagagatcatctttacagttcctcgggaaaatgtgaatgtgctgcgttttgttttctttactgtatgaaaacaggaaaataaaagagaaatttagaaaatacagctcattacaataaaattgttggatttca

SEQ ID NO: 371896 - DNA, 1010 bp, Homo sapiens
tgaaatccaacaattttattgtaatgagctgtattttctaaatttctcttttattttcctgttttcatacagtaaagaaaacaaaacgcagcacattcacattttcccaagtaactggctctaatacacggaagcacatattgcaagtttccactttccagatgaccatattaatgctctttaataatagagaaaaatacacatttgaggaaattcagcaagagacagatatccctgaaagagagcttgttagagccctacagtccctcgcctgtggtaaaccaacacagcgggttcttacaaaagaacccaaatcaaaggaaatagaaaatggtcatatatttacagttaatgatcaattcacatccaaactacacagagtcaagattcaaacagttgctgccaaacaaggtgaatccgacccagagaggaaagaaacaaggcagaaagtagacgacgacagaaaacatgagatagaagctgctatagtgcggataatgaaatctagaaagaagatgcagcacaatgttctagtagcggaggtaactcagcagttgaaggcgcgattcttaccaagtccagttgttattaagaaacgtattgaaggacttattgagagagaatatttggcacgaacacctgaggatcgcaaagtatacacatatgtagcataaaatgcgttcagaaatttgatttattcttggactgtactcttcgcatggactgggaagttcttttaaatcattaaatattaagacgaccatctcttctattaaattacagtacatgttctagaccattgagatcaagcctttactccctttgagagtttccaacatcagttgattgagcttcaggctttacaacgtttatccctgtagagatcatctttacagttcctcgggaaaatgtgaatgtgctgcgttttgttttctttactgtatgaaaacaggaaaataaaagagaaatttagaaaatacagctcattacaataaaattgttggatttca

SEQ ID NO: 371897 - DNA, 3188 bp, Homo sapiens
aggagaaggaggaggaggaggacgacgttcggcctgcgcagtgagatgtttgtccggtcgccgccgccgccgccatcgcggaggagcgcgataaagggagccgagccggacgtgagggggaccccgcggagccgccgcgccagcgcagccccccagccgcatcggagtcgccagagtccgagccgccgccgccgccgccgccgcccccgccgccgccgcggctgcccaggggccggccagctccccagccctgcccgggggtcgcgccgccgccgcccccagcgtcgcccctagcctgcctgcccgccttaaatgtgacaccggcgtcgcggagcgcgacctgaagccgccgccggggaggggacgagcaccatgtcgaatctgagcaaaggcacgggcagccggaaggacaccaagatgcggatccgggcctttccgatgaccatggatgaaaaatatgtaaacagcatttgggaccttctgaaaaatgcaattcaagaaatccagcgtaagaataacagtggtcttagttttgaggagctctatagaaatgcatatacaatggttttgcataaacatggagaaaagctctacactggactaagagaagttgttaccgaacatctcataaataaggtgcgagaagatgtactaaattcattgaataacaactttcttcaaacgctaaatcaagcttggaatgatcatcaaacagctatggtgatgattagagacatactaatgtacatggaccgtgtgtatgtacaacaaaataatgtggagaacgtctacaatttgggattaattatttttcgagatcaagttgtacgttatgggtgtattagggatcatctacggcaaactctattggatatgattgcaagagagcggaaaggagaagtcgtagacagaggcgcaataagaaatgcttgccagatgttaatgattttaggtctcgaaggaagatcagtctatgaagaagattttgaggctccttttttggaaatgtctgcagaattttttcagatggaaagccagaaatttttagcagaaaatagtgcttcagtatatataaagaaagtagaagctagaattaatgaagaaatagaacgagtgatgcactgccttgacaaatcaacggaagaaccaattgtaaaggtggttgaaagggaactcatttccaagcacatgaagactatagtagaaatggagaattctgggctagtacatatgttgaaaaatggaaagacagaagaccttggttgcatgtacaagttatttagtcgtgtgccaaatggtttgaaaacaatgtgtgagtgtatgagttcctatttgagggagcaaggtaaagctcttgtttctgaagaaggagaaggaaagaatcctgttgactatatccagggcttattggatctgaagagtaggttcgatcgcttcctcctggaatcattcaacaatgaccgtctctttaaacaaactattgcgggtgactttgagtattttctcaacctcaactccaggtctcctgaatacctctcattatttattgatgataagctgaaaaagggagtcaaagggctaacagaacaagaagtagaaacaatattggataaagcaatggtcctttttaggtttatgcaagaaaaagatgtatttgaacgttattataaacaacacttggcaaggagacttctcacaaataaaagtgtttctgatgactctgaaaaaaacatgatatctaagttaaagactgaatgtggatgtcagttcacgtcaaaactggaaggaatgtttagggatatgagcatctcaaacacaacgatggatgaattcaggcaacatctacaggcaactggtgtatctttaggtggtgttgatcttacagtccgggtgctcacgacaggatattggcccactcagtcagccacaccaaagtgcaacatcccaccagcaccaagacatgcttttgagatattcagaaggttctacttagccaaacacagtggtcgacagctcacactccagcatcatatgggttctgcagatctcaatgccacattttatggaccagttaaaaaggaagatggatctgaagttggtgttggaggtgcacaagtaactggctctaatacacggaagcacatattgcaagtttccactttccagatgaccatattaatgctctttaataatagagaaaaatacacatttgaggaaattcagcaagagacagatatccctgaaagagagcttgttagagccctacagtccctcgcctgtggtaaaccaacacagcgggttcttacaaaagaacccaaatcaaaggaaatagaaaatggtcatatatttacagttaatgatcaattcacatccaaactacacagagtcaagattcaaacagttgctgccaaacaaggtgaatccgacccagagaggaaagaaacaaggcagaaagtagacgacgacagaaaacatgagatagaagctgctatagtgcggataatgaaatctagaaagaagatgcagcacaatgttctagtagcggaggtaactcagcagttgaaggcgcgattcttaccaagtccagttgttattaagaaacgtattgaaggacttattgagagagaatatttggcacgaacacctgaggatcgcaaagtatacacatatgtagcataaaatgcgttcagaaatttgatttattcttggactgtactcttcgcatggactgggaagttcttttaaatcattaaatattaagacgaccatctcttctattaaattacagtacatgttctagaccattgagatcaagcctttactccctttgagagtttccaacatcagttgattgagcttcaggctttacaacgtttatccctgtagagatcatctttacagttcctcgggaaaatgtgaatgtgctgcgttttgttttctcaccatagagaaaagagcttgggacttgaccacagtctaaatggtacaactgccagatgtagtcttctggttgccagtcgaggacacttgactccttaattgcattgaattcatccactatgtagcattttcttttgaaaattctgatctaccaatagtgacaaacatttgtatttttcttgaatttaatggaagtccaaccatggtaagtcaacttcctgtggttaggtatgagttgtttcctgatg

SEQ ID NO: 371898 - DNA, 2919 bp, Homo sapiens
aggagaaggaggaggaggaggacgacgttcggcctgcgcagtgagatgtttgtccggtcgccgccgccgccgccatcgcggaggagcgcgataaagggagccgagccggacgtgagggggaccccgcggagccgccgcgccagcgcagccccccagccgcatcggagtcgccagagtccgagccgccgccgccgccgccgccgcccccgccgccgccgcggctgcccaggggccggccagctccccagccctgcccgggggtcgcgccgccgccgcccccagcgtcgcccctagcctgcctgcccgccttaaatgtgacaccggcgtcgcggagcgcgacctgaagccgccgccggggaggggacgagcaccatgtcgaatctgagcaaaggcacgggcagccggaaggacaccaagatgcggatccgggcctttccgatgaccatggatgaaaaatatgtaaacagcatttgggaccttctgaaaaatgcaattcaagaaatccagcgtaagaataacagtggtcttagttttgaggagctctatagaaatgcatatacaatggttttgcataaacatggagaaaagctctacactggactaagagaagttgttaccgaacatctcataaataaggtgcgagaagatgtactaaattcattgaataacaactttcttcaaacgctaaatcaagcttggaatgatcatcaaacagctatggtgatgattagagacatactaatgtacatggaccgtgtgtatgtacaacaaaataatgtggagaacgtctacaatttgggattaattatttttcgagatcaagttgtacgttatgggtgtattagggatcatctacggcaaactctattggatatgattgcaagagagcggaaaggagaagtcgtagacagaggcgcaataagaaatgcttgccagatgttaatgattttaggtctcgaaggaagatcagtctatgaagaagattttgaggctccttttttggaaatgtctgcagaattttttcagatggaaagccagaaatttttagcagaaaatagtgcttcagtatatataaagaaagtagaagctagaattaatgaagaaatagaacgagtgatgcactgccttgacaaatcaacggaagaaccaattgtaaaggtggttgaaagggaactcatttccaagcacatgaagactatagtagaaatggagaattctgggctagtacatatgttgaaaaatggaaagacagaagaccttggttgcatgtacaagttatttagtcgtgtgccaaatggtttgaaaacaatgtgtgagtgtatgagttcctatttgagggagcaaggtaaagctcttgtttctgaagaaggagaaggaaagaatcctgttgactatatccagggcttattggatctgaagagtaggttcgatcgcttcctcctggaatcattcaacaatgaccgtctctttaaacaaactattgcgggtgactttgagtattttctcaacctcaactccaggtctcctgaatacctctcattatttattgatgataagctgaaaaagggagtcaaagggctaacagaacaagaagtagaaacaatattggataaagcaatggtcctttttaggtttatgcaagaaaaagatgtatttgaacgttattataaacaacacttggcaaggagacttctcacaaataaaagtgtttctgatgactctgaaaaaaacatgatatctaagttaaagactgaatgtggatgtcagttcacgtcaaaactggaaggaatgtttagggatatgagcatctcaaacacaacgatggatgaattcaggcaacatctacaggcaactggtgtatctttaggtggtgttgatcttacagtccgggtgctcacgacaggatattggcccactcagtcagccacaccaaagtgcaacatcccaccagcaccaagacatgcttttgagatattcagaaggttctacttagccaaacacagtggtcgacagctcacactccagcatcatatgggttctgcagatctcaatgccacattttatggaccagttaaaaaggaagatggatctgaagttggtgttggaggtgcacaagtaactggctctaatacacggaagcacatattgcaagtttccactttccagatgaccatattaatgctctttaataatagagaaaaatacacatttgaggtatggattgtggttatatacattttaactgtgttgtttctaactctcacttgttacttgagtctttcttatttgaataacctttagagagtctctttgggtacttttagagaaaactgtataaaatggatcatggaactgtatgaacatcatacatgtattgagttatgtcttatttttaaattaactttatagaagtacttttatataaaacataccttatataagtagacaatttgatgagttttaaatgagtgcatctttgtaactaccatcacaagaatattgcccgaaaatacagagcattacctccaaaattgcgttgtaccccttgccagtctattccctcctaccacctccagccccaggcagccagtgacctgctttatatcactataaattagttttgtttttttttagactttcatgtaaatggaatcatacatgttgtctgtatgctttaatcctttgtcagttcacctgcatttgggttgataccggatttaggctaagtagagctatatgtttaacattttaagaaactgccgaactgtatcccaaagcaactataccattttccttatttgccagcagtgcaagacggtccagtcgctctacatcatctgcagtctttagattttgagccgctttagttggtgtgtaatagtgtctcattttggatttaattttcttttttttttttga

SEQ ID NO: 371899 - DNA, 642 bp, Homo sapiens
ggcagagaatattctatgactcagcccacagctgtgttgtacttggggatgacagaattctgcacagagtgacacatctttctgagaaattccttataatcctcttggctgttggggaagtggctgattcatcttaccagtctgggtttaactttcttttctttttcttctgcagtactctggtttccagcagtcggctgacaggtgttttctttgtggacatctgatcatggacatggtgagtaggtcagccaaagaagagaacagcatctcaggtggaggaggaggtgttcagagaaaaaagaaattaataattgaggacagtgtttcttatcttgatttgtggttacagctgggcgcagtggctcatgcctgtaatcccagcactttgggaggccgaggcgggcggatcacgaggtcaggagtttgagaccaaccagcctggccaatatggtgaaaccttgtctctactaaaaatacaaaaattttccgggcgtggtggtgcatgcctgtagtcccagctacttgagaggccaaggcaggagaattgtttgaaccctggaggcggagtttgcagtgagccaagatcacgccactgcactccagcctgggcaacagagtgagactccacctcaaaaaaaa

SEQ ID NO: 371900 - DNA, 452 bp, Homo sapiens
actctgtgtgtgactgctcatgtaatccttaggcctgatgtgttcctctccccttccaccatctcatccttccctataatccccactgagtcttggtctctgctccagatcctgcaagccctggggaagtcctaccaccccggctgtttccgctgtgtcatctgtaatgagtgtttggatggggtgcccttcaccgtggactcagagaacaagatctactgtgtccgagattaccacaagtaagaagggatgggagcagacaggacccattcgtgtaggccaagctgatctcagcagagtgagtggtggaaaccgacaaaactgtgtttgccagccgcccttagatcacagtccagcaaaggcttaatggttttgaggggtacagcagggaccttgggaggttggtcgatgccagtgttgacaggaatgggttaaagaatcatgtttagtga

SEQ ID NO: 371901 - DNA, 6006 bp, Homo sapiens
  misc_feature (715)..(715): n is a, c, g, or t
gcagagccggcgagcgagcagcagggactgcgcctggcgcactcacttccgcgtcccgccgccctccggcccgcgcgcgccgatccgccgccgccatcggacaatgggccgccagccccagctgccgtgaacttcctgccgctgctcggccgcccgtgcgtcccggacggcgttcctgccaggcgccggccgggatcgcagctccggggaagcagcggaggacccagcgcctggaacgtacctgcgcctcagccgccgcgcgtttgctccggcccgactcgcggcctcggcgccctcccggccgattcagcttcacccggcccagtcggctgctgccttgctgtgagtttccgtgtttggttgcctaaggaggatgtgattttacttttttgctgttttctttttccttttataatttgaagaggagaaaagaactccgctgagcaggcccgggacggcgaagtgccaccagctaccccaacaaggacgtctccaggggaaagggagttggaagcaaacttggtccagctggcgttgaggtctcaacttcggctggactcttaaatcctggggtcatgcccttcacgctaggcaggtggaagtctttagttgtactgggccggacttgagccccgacccttcgccagcatctccccgctgccctcaacacacaacacacacacacacacacacacacacacacacgcggcacctnctaggcccggacacctgtctgcagcatggataagtatgacgacctgggcctggaggccagtaaattcatcgaggacctgaacatgtatgaggcctctaaggatgggctcttccgagtggacaagggtgcaggcaacaaccccgagtttgaggaaactcgcagggtgttcgccaccaagatggccaaaatccacctccagcagcagcagcagcagctcctgcaggaggagactctgcccagggggagtagaggccctgtcaatggagggggccgcctgggcccacaggcccgttgggaagttgtgggcagcaagctgactgtggatggtgctgccaagcctcctcttgctgcctcgacaggggcacctggggcagtcaccaccctcgctgctgggcagcccccgtacccaccgcaggagcagagatccaggccatacctgcatggcacgaggcatggcagccaggactgtggttccagggagagcctggcgacttctgagatgtctgctttccaccagccaggcccctgtgaggatccttcctgcctcactcatggagactattatgacaacctctccttggcaagcccaaagtggggtgacaaaccaggagtgtcccccagcatcggcctgagtgtagggagtgggtggcctagctccccggggagtgacccaccactgcccaaaccctgcggggaccatcccctaaatcaccgacagctctccctgagctccagcaggtcttctgagggtagcctcggtggtcagaatagtggcattggtggccgcagcagcgagaagccaacaggcctttggtccactgcctcctcccagcgggtgagccctggcctgccttccccaaacttggagaacggagcaccagctgtggggcctgttcagcccaggactccttctgtgtcagcacccttggccctgagctgccccaggcaaggaggtcttccaagatcaaactcggggctggggggtgaggtttcaggtgtgatgtccaaacccaatgtggacccccaaccctggttccaggatgggcccaaatcttacctttccagttctgccccgtcatcctcgccagctggcctggacggttcacagcagggtgcggtccctgggctggggccgaagcctggctgcacagaccttggcactggtcccaagctcagccccaccagtcttgtccatccagtgatgtccaccctgcctgagttatcttgtaaagagggtcccctgggctggtcttctgatggtagcctgggatctgtgctcctggacagccccagctcccctagggtaaggctgccctgccagcccctcgtcccaggtcctgagctgagaccctctgctgctgagttgaaattagaagccctcacccaacgtctggagcgagagatggatgctcacccgaaggctgattactttggagcctgtgtgaaatgcagcaaaggggtgtttggggctggccaggcctgtcaggccatggggaacctctaccatgacacatgcttcacctgtgcagcttgcagccggaagctgagaggaaaagccttttattttgtcaacggcaaagtgttttgtgaagaagacttcctgtactctggtttccagcagtcggctgacaggtgttttctttgtggacatctgatcatggacatgatcctgcaagccctggggaagtcctaccaccccggctgtttccgctgtgtcatctgtaatgagtgtttggatggggtgcccttcaccgtggactcagagaacaagatctactgtgtccgagattaccacaaggtgctggcccccaagtgtgcagcctgtgggcttcccatccttccacctgagggctcagatgagaccatccgtgtcgtgtccatggacagagactaccacgtggagtgttaccactgcgaggactgtggtctggagctcaatgatgaagatggccaccgctgttatccgctggaggaccacctgttctgtcactcctgccacgtgaagaggctggagaagagaccctcatctacagcccttcaccagcaccacttctagccagagccacttgcagacatcacggcaggggatgaggagccggggttgctgctgctgcttccggtggcccctggggtggaagtggggtaggggaagaggaggggcaggagggagagttcctgtgagcatgtggggggtgcctttcctttaaccagggaggtgaacactacctgcctcctgcgtgtattttccaagtgcttttctctgttgccacattttcctcaggttactcaggaaaatgctccagcatgtgcgagcacatgacctgaggttgcatcatagcaccaaaggaatcctcctgtcccctctgggaacatttcatgcttcagagggagaggtttttattgagcttgtttcacaatatccccttgaagggacagctcagctgccaatacattcaaccctttctcttccttcaggaaaatacctatacccaaatgttccctcccccgacatatatcatggcatgacttaaggcttcttttcacctgagagcttcagttcttctgcagaatggctgcaaatttaattgcattaaggcaagaaggaagctctaatgtgtgctttgtatcctaagataaatttgcttagaaaaccagagtcaagatttgaaataggtgaggcagggtttcctccttagacactgacagcattctccgtaccccttcaaatccttactctcctaaaggcagctgagtccgcgacagaaatttgccctatgtgagtaaaacatactttgggagaagaacttggtgcaggcaccaggatttttttttttgcccacgtgtttgcgctgtttttctctggagttctcaagagttggtgacttggaaggccgcttctgcaaggcaagtctcaggaacccatgcaggtacatcgcttgcacctgtttttagcttatttaatgacgggcttttgggaagagctgcccgcatactgagagacagcttcttataaacaaggagagtttttgtgtgtgcgagatctctaagccagcgtgggagggagcgcctcaggataagttattatattcatttcgttggtttctctcctgcccaattcttggcacaggcattatgtttgaagaaaccaggataaggtacactgcttttgtctgtttaatttttttagttgtttcccttcactttcagtcttccacacacaaaaaatacctcacagagcttcaccaaatcacagattcaggaggaatttggctttcacactggactcagataccttcttcagtgtgttggaaatcactggcttcacacaggcccaactccagctggtcagggcagagtgatcgtaactaaaggtcagtggggaatagatccgattcagtgcttttgccttatgcatttcagcatcctggctccccagggtggcaggagctgagggagggccacacactggcaagatttcaagaccactctctgcactgaagaggtaaaatttgcactgcaagtcacatccctgaggccagaggtcagtaccctttggtatttcgattagaagaagctgcaaaagaaaggcagcccattttaccattgccagccaggccggggacacaggagccggtgtgtgcactctgcctcctcaccttgcacccagagcaagaggactgggtgctgggctgcagaggccggtcagtggagcccctagcacgtgtgaactcaggcttttcattgggcccggctccacttctaggccatgttttgactcatttggtaaccattgcctgtaagcagcacagaattggtgccatggattatcttttccatgttgatggaattcattctgttggaatcctttggccagatgtcacttcagccagggtgtgcatcatcattggttctttttcacaggctgagcctcctgaaaacccatgaacgctggggctggggaagtgaaccctgaggtggggaccctctcttcccatcaaatcatccagctcagtgtggggcgtggcaggggggtaaatgaagccagccaatgtgttaacctgtctctgtcaacctaagaatgttggccttactgacacacctttgctccatgttcaagaccagaagtagctgggatttgtttgcaaattgggtaattagtttaaaaatctgtgattacatttttaaatgaaattttcaaagtggcctagattgaggtgattcagataggtttgcgaatataccattttatattgttgagaaagaacaaaaagggaatttccagatgtcctagaaatcctagcaacagatttctctggttgtcagtttccctggagaaggcgccagataggaatctccaatcagttgtttttctcttcgcttcaggcccttacacaaaagccatgaagagatgttcacctacccggtattttaaatgttctgtaaattattagccaaatagaactgtaatggggttgtatttatgggcgcctagaaagaaaacacaaggacttggtaggccaggaagaaaagattttaaaatttagaatgaatagcccttctgggttttctttttgacaattcttggacttgaggtaaaacaaggaggattgtggccggatttcagatcccaaagccagcctccatcttaggcctttgcctcattgtgccttttaggttttcttacccaccgtctcctgttttgtcttttttttcttttctcctacccctatcttgggacattcagaaactgcctgggtggtttgagaagagacaacccagtttgatctgcaatacaaggatccattcgtaatctctctctcactgatgttattcccccatctgccgtcttggttcatctcaccacagaagggcatttagtcctacccagccatcggctgcgtatgacagcaggatggcacttcccatttctctgtggttagtgctcgagtgaaaacctctttcagctgagtcctctgaggttctgctgttgagtcctgggtggctgatggaatgattgaggaggtctggtcaccctcaagcgccgtcatcgccttgtttccatgggcttctgtcacacaaaatgaagaacagaaatgttaggacttaagagaatgtttggaattcacacctctttgcagtcctttcaaggctgctgctctgtgctgtgtcccatgcatgtgaaagtagagctgtgatggctgctgggatgcttgcaaagatcatgtgtgagaattgagcacaagaccacaaattattactgcttgatgcgcttgttaaaactctatctgcca

SEQ ID NO: 371902 - DNA, 3973 bp, Homo sapiens
tgtctacctgctccatttctcctcctcccagcagccctgcaaagtgcccgccaattttctctcctgttttgaagatgggaaaactaaagcagagagccacaaggtcactcacctggagcctgtgtgaaatgcagcaaaggggtgtttggggctggccaggcctgtcaggccatggggaacctctaccatgacacatgcttcacctgtgcagcttgcagccggaagctgagaggaaaagccttttattttgtcaacggcaaagtgttttgtgaagaagacttcctgtactctggtttccagcagtcggctgacaggtgttttctttgtggacatctgatcatggacatgatcctgcaagccctggggaagtcctaccaccccggctgtttccgctgtgtcatctgtaatgagtgtttggatggggtgcccttcaccgtggactcagagaacaagatctactgtgtccgagattaccacaaggtgctggcccccaagtgtgcagcctgtgggcttcccatccttccacctgagggctcagatgagaccatccgtgtcgtgtccatggacagagactaccacgtggagtgttaccactgcgaggactgtggtctggagctcaatgatgaagatggccaccgctgttatccgctggaggaccacctgttctgtcactcctgccacgtgaagaggctggagaagagaccctcatctacagcccttcaccagcaccacttctagccagagccacttgcagacatcacggcaggggatgaggagccggggttgctgctgctgcttccggtggcccctggggtggaagtggggtaggggaagaggaggggcaggagggagagttcctgtgagcatgtggggggtgcctttcctttaaccagggaggtgaacactacctgcctcctgcgtgtattttccaagtgcttttctctgttgccacattttcctcaggttactcaggaaaatgctccagcatgtgcgagcacatgacctgaggttgcatcatagcaccaaaggaatcctcctgtcccctctgggaacatttcatgcttcagagggagaggtttttattgagcttgtttcacaatatccccttgaagggacagctcagctgccaatacattcaaccctttctcttccttcaggaaaatacctatacccaaatgttccctcccccgacatatatcatggcatgacttaaggcttcttttcacctgagagcttcagttcttctgcagaatggctgcaaatttaattgcattaaggcaagaaggaagctctaatgtgtgctttgtatcctaagataaatttgcttagaaaaccagagtcaagatttgaaataggtgaggcagggtttcctccttagacactgacagcattctccgtaccccttcaaatccttactctcctaaaggcagctgagtccgcgacagaaatttgccctatgtgagtaaaacatactttgggagaagaacttggtgcaggcaccaggatttttttttttgcccacgtgtttgcgctgtttttctctggagttctcaagagttggtgacttggaaggccgcttctgcaaggcaagtctcaggaacccatgcaggtacatcgcttgcacctgtttttagcttatttaatgacgggcttttgggaagagctgcccgcatactgagagacagcttcttataaacaaggagagtttttgtgtgtgcgagatctctaagccagcgtgggagggagcgcctcaggataagttattatattcatttcgttggtttctctcctgcccaattcttggcacaggcattatgtttgaagaaaccaggataaggtacactgcttttgtctgtttaatttttttagttgtttcccttcactttcagtcttccacacacaaaaaatacctcacagagcttcaccaaatcacagattcaggaggaatttggctttcacactggactcagataccttcttcagtgtgttggaaatcactggcttcacacaggcccaactccagctggtcagggcagagtgatcgtaactaaaggtcagtggggaatagatccgattcagtgcttttgccttatgcatttcagcatcctggctccccagggtggcaggagctgagggagggccacacactggcaagatttcaagaccactctctgcactgaagaggtaaaatttgcactgcaagtcacatccctgaggccagaggtcagtaccctttggtatttcgattagaagaagctgcaaaagaaaggcagcccattttaccattgccagccaggccggggacacaggagccggtgtgtgcactctgcctcctcaccttgcacccagagcaagaggactgggtgctgggctgcagaggccggtcagtggagcccctagcacgtgtgaactcaggcttttcattgggcccggctccacttctaggccatgttttgactcatttggtaaccattgcctgtaagcagcacagaattggtgccatggattatcttttccatgttgatggaattcattctgttggaatcctttggccagatgtcacttcagccagggtgtgcatcatcattggttctttttcacaggctgagcctcctgaaaacccatgaacgctggggctggggaagtgaaccctgaggtggggaccctctcttcccatcaaatcatccagctcagtgtggggcgtggcaggggggtaaatgaagccagccaatgtgttaacctgtctctgtcaacctaagaatgttggccttactgacacacctttgctccatgttcaagaccagaagtagctgggatttgtttgcaaattgggtaattagtttaaaaatctgtgattacatttttaaatgaaattttcaaagtggcctagattgaggtgattcagataggtttgcgaatataccattttatattgttgagaaagaacaaaaagggaatttccagatgtcctagaaatcctagcaacagatttctctggttgtcagtttccctggagaaggcgccagataggaatctccaatcagttgtttttctcttcgcttcaggcccttacacaaaagccatgaagagatgttcacctacccggtattttaaatgttctgtaaattattagccaaatagaactgtaatggggttgtatttatgggcgcctagaaagaaaacacaaggacttggtaggccaggaagaaaagattttaaaatttagaatgaatagcccttctgggttttctttttgacaattcttggacttgaggtaaaacaaggaggattgtggccggatttcagatcccaaagccagcctccatcttaggcctttgcctcattgtgccttttaggttttcttacccaccgtctcctgttttgtcttttttttcttttctcctacccctatcttgggacattcagaaactgcctgggtggtttgagaagagacaacccagtttgatctgcaatacaaggatccattcgtaatctctctctcactgatgttattcccccatctgccgtcttggttcatctcaccacagaagggcatttagtcctacccagccatcggctgcgtatgacagcaggatggcacttcccatttctctgtggttagtgctcgagtgaaaacctctttcagctgagtcctctgaggttctgctgttgagtcctgggtggctgatggaatgattgaggaggtctggtcaccctcaagcgccgtcatcgccttgtttccatgggcttctgtcacacaaaatgaagaacagaaatgttaggacttaagagaatgtttggaattcacacctctttgcagtcctttcaaggctgctgctctgtgctgtgtcccatgcatgtgaaagtagagctgtgatggctgctgggatgcttgcaaagatcatgtgtgagaattgagcacaagaccacaaattattactgcttgatgcgcttgttaaaactctatctgcca

SEQ ID NO: 371903 - DNA, 2945 bp, Homo sapiens
  misc_feature (715)..(715): n is a, c, g, or t
gcagagccggcgagcgagcagcagggactgcgcctggcgcactcacttccgcgtcccgccgccctccggcccgcgcgcgccgatccgccgccgccatcggacaatgggccgccagccccagctgccgtgaacttcctgccgctgctcggccgcccgtgcgtcccggacggcgttcctgccaggcgccggccgggatcgcagctccggggaagcagcggaggacccagcgcctggaacgtacctgcgcctcagccgccgcgcgtttgctccggcccgactcgcggcctcggcgccctcccggccgattcagcttcacccggcccagtcggctgctgccttgctgtgagtttccgtgtttggttgcctaaggaggatgtgattttacttttttgctgttttctttttccttttataatttgaagaggagaaaagaactccgctgagcaggcccgggacggcgaagtgccaccagctaccccaacaaggacgtctccaggggaaagggagttggaagcaaacttggtccagctggcgttgaggtctcaacttcggctggactcttaaatcctggggtcatgcccttcacgctaggcaggtggaagtctttagttgtactgggccggacttgagccccgacccttcgccagcatctccccgctgccctcaacacacaacacacacacacacacacacacacacacacacgcggcacctnctaggcccggacacctgtctgcagcatggataagtatgacgacctgggcctggaggccagtaaattcatcgaggacctgaacatgtatgaggcctctaaggatgggctcttccgagtggacaagggtgcaggcaacaaccccgagtttgaggaaactcgcagggtgttcgccaccaagatggccaaaatccacctccagcagcagcagcagcagctcctgcaggaggagactctgcccagggggagtagaggccctgtcaatggagggggccgcctgggcccacaggcccgttgggaagttgtgggcagcaagctgactgtggatggtgctgccaagcctcctcttgctgcctcgacaggggcacctggggcagtcaccaccctcgctgctgggcagcccccgtacccaccgcaggagcagagatccaggccatacctgcatggcacgaggcatggcagccaggactgtggttccagggagagcctggcgacttctgagatgtctgctttccaccagccaggcccctgtgaggatccttcctgcctcactcatggagactattatgacaacctctccttggcaagcccaaagtggggtgacaaaccaggagtgtcccccagcatcggcctgagtgtagggagtgggtggcctagctccccggggagtgacccaccactgcccaaaccctgcggggaccatcccctaaatcaccgacagctctccctgagctccagcaggtcttctgagggtagcctcggtggtcagaatagtggcattggtggccgcagcagcgagaagccaacaggcctttggtccactgcctcctcccagcgggtgagccctggcctgccttccccaaacttggagaacggagcaccagctgtggggcctgttcagcccaggactccttctgtgtcagcacccttggccctgagctgccccaggcaaggaggtcttccaagatcaaactcggggctggggggtgaggtttcaggtgtgatgtccaaacccaatgtggacccccaaccctggttccaggatgggcccaaatcttacctttccagttctgccccgtcatcctcgccagctggcctggacggttcacagcagggtgcggtccctgggctggggccgaagcctggctgcacagaccttggcactggtcccaagctcagccccaccagtcttgtccatccagtgatgtccaccctgcctgagttatcttgtaaagagggtcccctgggctggtcttctgatggtagcctgggatctgtgctcctggacagccccagctcccctagggtaaggctgccctgccagcccctcgtcccaggtcctgagctgagaccctctgctgctgagttgaaattagaagccctcacccaacgtctggagcgagagatggatgctcacccgaaggctgattactttggagcctgtgtgaaatgcagcaaaggggtgtttggggctggccaggcctgtcaggccatggggaacctctaccatgacacatgcttcacctgtgcagcttgcagccggaagctgagaggaaaagccttttattttgtcaacggcaaagtgttttgtgaagaagacttcctgtactctggtttccagcagtcggctgacaggtgttttctttgtggacatctgatcatggacatgatcctgcaagccctggggaagtcctaccaccccggctgtttccgctgtgtcatctgtaatgagtgtttggatggggtgcccttcaccgtggactcagagaacaagatctactgtgtccgagattaccacaaggtgctggcccccaagtgtgcagcctgtgggcttcccatccttccacctgaggtaagatgcccttccagacatgctcccaggggcttctaagacatgaatatctccctgggctcatttacaagatccatgtcctgtccttacagcttttaaggtatccttttaaaaatctcaactctggcctggtgcagtggctcacgcctgtaatcccaccccttttaggaggcccaggcaggaaaattgcttgaggcctggagtttaagaacagcctgggcaacatagcaagacctcatctctacaaaaaattgttaaaaattggccaagtgtggtggcatgtgcctgtagtcctagctgcttgagcccaagagtttgaggctgcagcgagctatgatggtgctactgcattccagcaggtgacagcaagaccttgtctcc

SEQ ID NO: 371904 - DNA, 3690 bp, Homo sapiens
aaggtcgtcggcatctgtgttgtgcgtgtgtctcacgcagctgcgggctggccacctcgtcctggaagagctgctccagcttggcttctcctgctcgatgaagcgctccctgtgtcatctgtaatgagtgtttggatggggtgcccttcaccgtggactcagagaacaagatctactgtgtccgagattaccacaaggtgctggcccccaagtgtgcagcctgtgggcttcccatccttccacctgagggctcagatgagaccatccgtgtcgtgtccatggacagagactaccacgtggagtgttaccactgcgaggactgtggtctggagctcaatgatgaagatggccaccgctgttatccgctggaggaccacctgttctgtcactcctgccacgtgaagaggctggagaagagaccctcatctacagcccttcaccagcaccacttctagccagagccacttgcagacatcacggcaggggatgaggagccggggttgctgctgctgcttccggtggcccctggggtggaagtggggtaggggaagaggaggggcaggagggagagttcctgtgagcatgtggggggtgcctttcctttaaccagggaggtgaacactacctgcctcctgcgtgtattttccaagtgcttttctctgttgccacattttcctcaggttactcaggaaaatgctccagcatgtgcgagcacatgacctgaggttgcatcatagcaccaaaggaatcctcctgtcccctctgggaacatttcatgcttcagagggagaggtttttattgagcttgtttcacaatatccccttgaagggacagctcagctgccaatacattcaaccctttctcttccttcaggaaaatacctatacccaaatgttccctcccccgacatatatcatggcatgacttaaggcttcttttcacctgagagcttcagttcttctgcagaatggctgcaaatttaattgcattaaggcaagaaggaagctctaatgtgtgctttgtatcctaagataaatttgcttagaaaaccagagtcaagatttgaaataggtgaggcagggtttcctccttagacactgacagcattctccgtaccccttcaaatccttactctcctaaaggcagctgagtccgcgacagaaatttgccctatgtgagtaaaacatactttgggagaagaacttggtgcaggcaccaggatttttttttttgcccacgtgtttgcgctgtttttctctggagttctcaagagttggtgacttggaaggccgcttctgcaaggcaagtctcaggaacccatgcaggtacatcgcttgcacctgtttttagcttatttaatgacgggcttttgggaagagctgcccgcatactgagagacagcttcttataaacaaggagagtttttgtgtgtgcgagatctctaagccagcgtgggagggagcgcctcaggataagttattatattcatttcgttggtttctctcctgcccaattcttggcacaggcattatgtttgaagaaaccaggataaggtacactgcttttgtctgtttaatttttttagttgtttcccttcactttcagtcttccacacacaaaaaatacctcacagagcttcaccaaatcacagattcaggaggaatttggctttcacactggactcagataccttcttcagtgtgttggaaatcactggcttcacacaggcccaactccagctggtcagggcagagtgatcgtaactaaaggtcagtggggaatagatccgattcagtgcttttgccttatgcatttcagcatcctggctccccagggtggcaggagctgagggagggccacacactggcaagatttcaagaccactctctgcactgaagaggtaaaatttgcactgcaagtcacatccctgaggccagaggtcagtaccctttggtatttcgattagaagaagctgcaaaagaaaggcagcccattttaccattgccagccaggccggggacacaggagccggtgtgtgcactctgcctcctcaccttgcacccagagcaagaggactgggtgctgggctgcagaggccggtcagtggagcccctagcacgtgtgaactcaggcttttcattgggcccggctccacttctaggccatgttttgactcatttggtaaccattgcctgtaagcagcacagaattggtgccatggattatcttttccatgttgatggaattcattctgttggaatcctttggccagatgtcacttcagccagggtgtgcatcatcattggttctttttcacaggctgagcctcctgaaaacccatgaacgctggggctggggaagtgaaccctgaggtggggaccctctcttcccatcaaatcatccagctcagtgtggggcgtggcaggggggtaaatgaagccagccaatgtgttaacctgtctctgtcaacctaagaatgttggccttactgacacacctttgctccatgttcaagaccagaagtagctgggatttgtttgcaaattgggtaattagtttaaaaatctgtgattacatttttaaatgaaattttcaaagtggcctagattgaggtgattcagataggtttgcgaatataccattttatattgttgagaaagaacaaaaagggaatttccagatgtcctagaaatcctagcaacagatttctctggttgtcagtttccctggagaaggcgccagataggaatctccaatcagttgtttttctcttcgcttcaggcccttacacaaaagccatgaagagatgttcacctacccggtattttaaatgttctgtaaattattagccaaatagaactgtaatggggttgtatttatgggcgcctagaaagaaaacacaaggacttggtaggccaggaagaaaagattttaaaatttagaatgaatagcccttctgggttttctttttgacaattcttggacttgaggtaaaacaaggaggattgtggccggatttcagatcccaaagccagcctccatcttaggcctttgcctcattgtgccttttaggttttcttacccaccgtctcctgttttgtcttttttttcttttctcctacccctatcttgggacattcagaaactgcctgggtggtttgagaagagacaacccagtttgatctgcaatacaaggatccattcgtaatctctctctcactgatgttattcccccatctgccgtcttggttcatctcaccacagaagggcatttagtcctacccagccatcggctgcgtatgacagcaggatggcacttcccatttctctgtggttagtgctcgagtgaaaacctctttcagctgagtcctctgaggttctgctgttgagtcctgggtggctgatggaatgattgaggaggtctggtcaccctcaagcgccgtcatcgccttgtttccatgggcttctgtcacacaaaatgaagaacagaaatgttaggacttaagagaatgtttggaattcacacctctttgcagtcctttcaaggctgctgctctgtgctgtgtcccatgcatgtgaaagtagagctgtgatggctgctgggatgcttgcaaagatcatgtgtgagaattgagcacaagaccacaaattattactgcttgatgcgcttgttaaaactctatctgcca

SEQ ID NO: 371905 - DNA, 1147 bp, Homo sapiens
ctcccccgggacggggttaattgaaatgcggttccctttgagtcccccgcgttgtaaaaaaccccgtgttaggaccctcccgcgaaactccctcctggggattttttccacaaaccctctccgtgtccccccccggcgcgttttttatttggtgggagatccccccccccttgttccctgggcccccggttctccctcttgggaacccccgtttgggcccctttctcaccttccctctccggggcccccgcgcgcccccccgccgatgtggttttaggaaagtcttttcgcgaggggccgcgcgggcgcgcgccgcccaccgttttctttttttttttttttttttttttttttgtttttttcaggagcgaataccaacctttatttgcacttgggttccagttcaaagccaccttagacagtgtggcaaagtgggaaaaagcacagatcctgggaccaaggttcagattccatctcaagcgagcatatgaactgtgtgacaacaggcagacagtacctctgtgtctatgagaaagcggggagagcaacaccccagcttctagcagctctacagctgcctggacctgcaggccctcctaggcccacttcctccccagcacagtgtgtgttcccgggcgtgtgtggctctgggtccagctctgttcagggtgggactccaggtgaattactgaacctctgaggtgtacccccaaccccaaactttcaccaaaagcaataaagaggaactctagaactggagccaggactaagtgagaaaaactgcttataagtgcttaataaatactagttatttacaacttttgctcaagccgagggcagaggcctttgtacgcagctgccgaactctgactctagttctgcggaagaaaaggatgcggtatttgcttttgccatgatccctttccatttgattggcaggttaaataacatggtttttgaagtcacatacttaatattcttcctaaaaaccacccaaacactagatgtgtgtgtgcacacacacagaaaccacgaggtagtttaaatcaccattaaaaatcaacgctttctctgattctgtgtcacagagcgacgcgtgggcggaccgcgtgggtcgacggacgcgatgggtcgacccacgcgtccg

SEQ ID NO: 371906 - DNA, 1826 bp, Homo sapiens
  misc_feature (1410)..(1410): n is a, c, g, or t
ctttctaagttgcgggcgtcagcccggcgcctcgaacctgcagctcctccccgcgggctgcttctgagttcctgtggattccgccttcagggattgcgagcccggttggccctcgcgcgagtcacaacctctgaatcagcccctgaggattccccgagcgcgctgaacgcgcctggcacgggagctgcccctttttggcgttggccaaacccccgctgctccgtagccttgggaccctgggcgccgcgttgcccgtccggcgcgtaagcccgagcccctctcctgggcctcccgcgccctgccccctagcgcgccccccgaacgcctccgcctcccggggtccgctccccgccggggcctcgagaaggaaggtgtcacgttggtggcattcgagccagccggcaagacgaatgtccgggttgtcacttttgagaaatcccagccagccagagcaggtagccaagcagcccttcgatagctgttctgttagtgctgattcgactgttcttggagactcataaatccaatttggcagctgttaggtttgctgggattgacagtgacgcgtgtgaaggcattaaatgtgatgatgtatgtggcaacgctgtgtaaacagcagagctgtccacgattttgagggaattggcagtctgttttcagtggcggggaatgtgtcaacctcggtgcgtggcgttattaaaaactgtttccagcccctagcctttgataaaccaggtaagctggagtggcgagaacattaagtggaagtgtttagacaaacacagacgtttaggagaaataatattctaggttcatggacaatctggaaactaagttcgttttgaaatgaagctgagagcagagcgggtttctcggctttggtggatggcccttgggaaccagagcgggcataggaaggggttgccctgagtaccagtccccggccggtagctgcggggggtgtgcgggaggtgaagcctgctgagactgagaagccaagtcccgctaacgttgtgcccttcccaggagagggcctcgccgaggacggatggggctgggaacgggtgggcctatacatagtttctgcccgttattgtttatacctcttgaaaggatctgtgttgaatgggatttaattttaggacaagtaatgcatttacatggtacagaactccaattctaaaggtgcacaggagtacgtgcagaaaagttggtctcacagtctccaagtgtccttctctagaggcaactactcttcccagtttcttgtgaagccttctagaaataggctgtgcatgcatactatatatactatatattctctaccatacacgtgcgagtagcacacatgttgttttgcacatttttccgttttcatagtgtttcttattagaatgattgttctgagtnggtgcatataagactggcttacttgattttaattactgcttaggccaatgtacatacggttttatgaataaaaccattaacaagtacgtatggatttaaatgtttatgtagatttgaatgttttttaacctatttagacagtccctgttgatgaacatttgggttttcaatcagaaggtttgtgacagcaaagtcattggaataaatctttcttcttgatggagatgaaatatgtggctagtcttcgtgaggcagtcaccaattaatcaacttcagaaaaatagaaccaagcagaatactgaggaggggtgcgttacaggaaataaaaatgctatcagagggcaacccgctctggtccccttccacgctgcggaagctttgttcttttgctcttcacaataaatcttgctgctgct

SEQ ID NO: 371907 - DNA, 825 bp, Homo sapiens
atttgtctaattgtaaaaataccgaagtagtgattccaagttagaaagtagtgatccctaagaacagttggagaaacatatggtttgttctatagctgtaagcggtaattttgaagcaattttgaaagcattctttccctttaagaaaaaaatagtttcttactgaaatgactttttaggatgtcttgaaaaacgtagtgaaattcatctagaaacttacaaggttgatgctagccatcacatgcatgctgcaatttgctgaaatgtcttgatccaggggagctaaacttttacaaaaataggtttgtttagaagtcatatcactacatgaaaaatcaccacttttgaaacttacggttaaaggcagtttctcttttaaaaatgtgctcattgattattcccacccaaatagccagaatattttgtaattacccattaccactcctaccatctgaaacgtgcatgaaaaaaatgaaaaattgacttcatctgaaaagagttgtgtcatgatatatgaaacgttttttgtaacctccaggaaggaacattgcaatttttccatttcagatcgcctttgttttgccattctctacagcagaccaaagagtgcatcaaatgtacattatttcagcatagataatgaacttgaatatgagaagtaagtattgctctttaaaagattttaactttttgtttttgaagaatctaaaggtatggttataaatgggatggcctgggaaaattataaatctattgattgctaattacaggatgcttgtttttcacctgtagtaataaaataaacctttagagcaaaaaaaaaaa

SEQ ID NO: 371908 - DNA, 440 bp, Homo sapiens
aggtacatgtttcaggcagatttgaaatggatttcttcctcccacagtctaacaaaaacaagtagggaaacaaccaaagaataaggcaacttaaggaaaaacgcaggaagaccctgggaggcagggtcatgcaaaagctgccaatggtgtcctgatgggacgcagtcttcgtccatcaggtgtgcagtgcagctccgcggtgctgggaaacagggctctttcaagacagcgcagggaaatcttccgggtcatctgggttgggggcaacatcttgcatcaccacttctgctctgggtccatagttctctgccctcctgatccttccccggcctccccgggtgcctcctctggctccacgcccaggacgagggaggttaccaaaattaatctccagctgggatgtgatgtcattggcgggtttccggaaaacatgggaatcg

SEQ ID NO: 371909 - DNA, 5680 bp, Homo sapiens
cacggaacagccctcctggggtccccacgagccgcgtcctgctgtgccccggcgcctacgcagcagcggccgcggccgcggtgggcacgcacggttaccccgggcagctccggccgccagctgcagccccgtcgcctcggccgcgccagccggctgcgggcacctgggggcgggctgggggcgccggccgcggcaggaggcgctgtagcgagggctgcggcgccggtcctgcggcggccgcgggaggcagcggggcaggcgctgtgggccgggctcctcctccggctcctgcgcgaccgcctcccgccgggctctgccggcgcccgccgtccccgcagcgccgctctgcgcccgccgccccgagcgcccgcgcggggctggcgggagcctcggcgggcgcgcgggcgcgcggggccatggtcgtggccccctgacgggccgcggccgcctccatgaagcggaaaagcgagcggcggtcgagctgggccgccgcgcccccctgctcgcggcgctgctcgtcgacctcgccgggtgtgaagaagatccgcagctccacgcagcaagacccgcgccgccgggacccccaggacgacgtgtacctggacatcaccgatcgcctttgttttgccattctctacagcagaccaaagagtgcatcaaatgtacattatttcagcatagataatgaacttgaatatgagaacttctacgcagattttggaccactcaatctggcaatggtttacagatattgttgcaagatcaataagaaattaaagtccattacaatgttaaggaagaaaattgttcattttactggctctgatcagagaaaacaagcaaatgctgccttccttgttggatgctacatggttatatatttggggagaaccccagaagaagcatatagaatattaatctttggagagacatcctatattcctttcagagatgctgcctatggaagttgcaatttctacattacacttcttgactgttttcatgcagtaaagaaggcaatgcagtatggcttccttaatttcaactcatttaaccttgatgaatatgaacactatgaaaaagcagaaaatggagatttaaattggataataccagaccgatttattgccttctgtggacctcattcaagagccagacttgaaagtggttaccaccaacattctcctgagacttatattcaatattttaagaatcacaatgttactaccattattcgtctgaataaaaggatgtatgatgccaaacgctttacggatgctggcttcgatcaccatgatcttttctttgcggatggcagcacccctactgatgccattgtcaaagaattcctagatatctgtgaaaatgctgagggtgccattgcagtacattgcaaagctggccttggtcgcacgggcactctgatagcctgctacatcatgaagcattacaggatgacagcagccgagaccattgcgtgggtcaggatctgcagacctggctcggtgattgggcctcagcagcagtttttggtgatgaagcaaaccaacctctggctggaaggggactattttcgtcagaagttaaaggggcaggagaatggacaacacagagcagccttctccaaacttctctctggcgttgatgacatttccataaatggggtcgagaatcaagatcagcaagaacccgaaccgtacagtgatgatgacgaaatcaatggagtgacacaaggtgatagacttcgggccttgaaaagcagaagacaatccaaaacaaacgctattcctctcacagtaattcttcaatccagtgttcagagctgtaaaacatctgaacctaacatttctggcagtgcaggcattactaaaagaaccaccagatctgcttcaaggaaaagcagtgttaaaagtctctccatttcaaggactaaaacagtcttgcgttaagtaaaaacctgtgaccagagctgaaggaagactctaggactgaaaactgcaacagaaattagcacaatttgaaaacaaaacaaaattgcaaaagccttagttgctttttccacctaagaagttgatcaatggagaaaatgtccactggagtttgaataatgaactttgagtttgggtgcaagcaaatgactcagagaagggtccagctctcaagctgaatgacaaacatgctgttgtaaatttagtctcaggtgtaaatacccaagccctctggtacccagggagctggctggtctgtggtgcatgtgtgtccctgtgatggcaatcattgtagttgctggccttcagaagaattgaggatctgatggaggttttttatgtatttattttctgttcaccttgtgaccctgtgtcaaaatttataaagatacaaaaggcattactgaaatggtactttctgtaatttgatactatttggcttaatcatcttcacttgactatttgtaatactgttgtaatgttaactctgttaagtacccaagctgcttgtcttccaccaaagagtgctttattaacaagaatctgtgaaaatcacatttaaacactgttgcatgttgtaagaccaggtggtaccttagtaacctaaaacttgcaagagaatattaatggtagctttagaagactcaggaggagaaactgacttcagagttggaagatgttgcaagtcgttcctttttctgtccttcagggactgaagaactgggaggctgcccattgtttggttgccagtcatacaaattaaaatcatatttccttccatgaatggaagaaacacactattggtttttccccttggaaacagcaatcccaaataatgtcggcttacaaaaaaaaaaagttaccacttttttagagtccttccctgtaacattggattttttttttcccttatgagatccacctaaggccattgacgtggcctgcgatctcagtgacaatgatctgcttctggatctcactgttgcctttggttagggaacacaactagtaactctgcagagtgccttctcccgcagccctactggaacacagcagagtctgtgccatgaagcagttacagaaacagaattgatgtgctgctaaaaaaaaaaaaaaaatggggcccgaaataaaagaatatatagtactcacctcagttccttccataagaagtgggtggtttaatgattgttaagccatttttgcctgtgccgggagcatggagggctgagatgtcgacaggcagtgggaaacaaatgccctcctaagccacaaggcgtgcgccagattagtaggcaactccattttaagaagctgcctttttcacaaaactggaagaaataaaagcggttggaataaacaagttaaaagtctttaatgcaaaaagtaattgaaaggcagtgcctccattttggtgtactttcttggaagaaagtataaaattgaccggcatcatgagagacggaagatgccgtgttctcagccaaacaagcaactctttccccgccaggcactgtcgggtggggtcaggccagcttttaaacactggggactggatcacagaaaaacagtggttttctgtccctggaaatgaataggcacaaagacccacttggctgtgggcagactactcttcaataagatttgggtgggaggaggaacattccttttgctattttgagctgagacaatataaatattcaaactgtgccatgcataaagcattgaattctcagggcacctcttcttccccttaccccttttaaggccatcccctccattaataataatccaggtagttgtgaaaatcgtgcttctatctgatcccttcttagtttggcttttcatcccatcagaacaagtaaacgtaggcgccacagctcttgtgagtactgtctccctcacggtgaatgagcctcctggtgtttcgtccaagaaaagaaagggtgtcactggaaccacagccctttttcattttataaactgcctcttcatgttgcctgctcaagtttccacctagaattgctatcactgtggctctttctaaaaatctttctatttaactggttcactgaaattagtcatagaaaacttgtgatttggtgaagaggcattccttgtaataaccaaatgacttgggatggtgtgcatagcaagggcagtgttacacttatgaggactgtctctagcatccaggaagtctctgggtctgagggatggaaagttcttcctgctatgaatgagagtggactcttcccctcacccccaactgaaaccacaaacaaccagaatcttctggaattctgacttagagtcgttgttatagaagaccttgttgctatggaacatgaaactgtgtgtcagatggagagatccccttaacctaagagccttaaatagccctgaaagtacactgggacggtttgcgatggaattaaaattggaagtgaatatttttaggtgctcttgaagctttctggggactcaaaattatcaaaagtcagggacagtccggaggaagagcgtctgcaaaactgggttcctagaagtatagacggacttagctttttgtagaatttggtgaggagcagcgcctcgtgagagcagaatggcctggcgtggccagtgcttcccggcagcacgcagctctgcggcctccagaattcccctgttctgagcttgatgcccctagcctgtcccctacctacttcctcccctcctctctagccctctcacaggggtgattgctacctctctgttttcttgggcctaggcaagttttagaggagttcccaagcattgttatgaggccagtgtgctcgctgggctgggcgggatggcctgggcttgtgtgtggcctgagggctctcctggggccttctcttttcccagtcacctttggagccacagaagcagtgcactcattggatgtctgttcttaacacagcttctctttctacattaaaaaaaatcattattgcattttggaaagcagtgctcatcaaaagcaacttttaaaacctattttattgttcctttaaatgttctctcccgctgaaactgccctggagaggctatctgctgctcttccatttacccacatcaggttattctccatgtcactcagtggagatgactccagatgtgtttaaagactggacaattcacctatactgtgtaggaaattacctccttaattacctggtagaattgtcagcagacatgttcatccgatgatagtactgcagttttctattaataatttgcagacttttatctaacctgcactcatgtacagattattaaaagttttaaaatgtaactgatcagtattgatcaatcattgtcttgatttttttttacagcgtatatttctaatcatattttttaaagccaagagaactggttgaatgaatgtttattttcctgaaggtatttttaagataaagcttcctaatggcgtgtaaactttgcatatgtatgtagtttgatacatattgtcacatttgaaaatcttgtgggttgtaactggttttatacaaaatatcgaatagtggaaattgtataattacaatcatgtaattaaaagtattaacccaaaaaaaaaaagggggggcaaagaatccgagggccattaggaccagtttgtaaagggcccaagggggaaaaaaggggggcgggaaaggaggaac

SEQ ID NO: 371910 - DNA, 5382 bp, Homo sapiens
cacggaacagccctcctggggtccccacgagccgcgtcctgctgtgccccggcgcctacgcagcagcggccgcggccgcggtgggcacgcacggttaccccgggcagctccggccgccagctgcagccccgtcgcctcggccgcgccagccggctgcgggcacctgggggcgggctgggggcgccggccgcggcaggaggcgctgtagcgagggctgcggcgccggtcctgcggcggccgcgggaggcagcggggcaggcgctgtgggccgggctcctcctccggctcctgcgcgaccgcctcccgccgggctctgccggcgcccgccgtccccgcagcgccgctctgcgcccgccgccccgagcgcccgcgcggggctggcgggagcctcggcgggcgcgcgggcgcgcggggccatggtcgtggccccctgacgggccgcggccgcctccatgaagcggaaaagcgagcggcggtcgagctgggccgccgcgcccccctgctcgcggcgctgctcgtcgacctcgccgggtgtgaagaagatccgcagctccacgcagcaagacccgcgccgccgggacccccaggacgacgtgtacctggacatcaccgatcgcctttgttttgccattctctacagcagaccaaagagtgcatcaaatgtacattatttcagcatagataatgaacttgaatatgagaacttctacgcagattttggaccactcaatctggcaatggtttacagatattgttgcaagatcaataagaaattaaagtccattacaatgttaaggaagaaaattgttcattttactggctctgatcagagaaaacaagcaaatgctgccttccttgttggatgctacatggttatatatttggggagaaccccagaagaagcatatagaatattaatctttggagagacatcctatattcctttcagagatgctgcctatggaagttgcaatttctacattacacttcttgactgttttcatgcagtaaagaaggcaatgcagtatggcttccttaatttcaactcatttaaccttgatgaatatgaacactatgaaaaagcagaaaatggagatttaaattggataataccagaccgatttattgccttctgtggacctcattcaagagccagacttgaaagtggttaccaccaacattctcctgagacttatattcaatattttaagaatcacaatgttactaccattattcgtctgaataaaaggatgtatgatgccaaacgctttacggatgctggcttcgatcaccatgatcttttctttgcggatggcagcacccctactgatgccattgtcaaagaattcctagatatctgtgaaaatgctgagggtgccattgcagtacattgcaaagctggccttggtcgcacgggcactctgatagcctgctacatcatgaagcattacaggatgacagcagccgagaccattgcgtgggtcaggatctgcagacctggctcggtgattgggcctcagcagcagtttttggtgatgaagcaaaccaacctctggctggaaggggactattttcgtcagaagttaaaggggcaggagaatggacaacacagagcagccttctccaaacttctctctggcgttgatgacatttccataaatggggtcgagaatcaagatcagcaagaacccgaaccgtacagtgatgatgacgaaatcaatggagtgacacaaggtgatagacttcgggccttgaaaagcagaagacaatccaaaacaaacgctattcctctcaccgatggttggctgtcccaggctgtcacctttctagaccggcttctgatctggctcgggatccacaaggactagacctgcggggaaggtctctcctggacacgcccgttgcccactgcaagttctctccaggtgcaattgaagcctctcagcagcggaggccgccatgtggagagagcaggcaggcccactgctgctgagaacagggcaggcacgggcagctcctgttctgcctttcccagcttcggagacgcaggctcagctgctccgaagcacctgccagcaccgcacagtacagtttcagaggacagcagtctccttcccgtgaagctcccatgtgctggaatggcatggacttgctgatcaacagaaggaaatggtctgaagtctgaccagcacaaggaaggaggctggctggctcagaggggcccaccttgcgtggaatgaaaacgccaaaggctcatgagcaacattaggctagaggggtcttgttcaaagcatccaactctgacttcggaggcattcccagccggcagcagtgtgtccagcctgcctcttcccaggctggtctgacatgcagcttaggctttcatcccaagttaggtactgacccctccctcttgggcagcacctccctttttaaaaaaatttttttttcttccaaagacagagtcttgctcttgttgtccaggctggagtgcagtggcgcgatctaggctcactgcaacctccttctcccaggttcaagcgactctcctgcctcagcctcctgagtagctgggattataggcgtctgccaccacgcccggctaatttctgtatttttagtagagacagggtttcaccatgttggccaggctggtctcgaactcctgacctcaagtgatctgcctgccttggcctcccaaagtgctgggattacaggtgtcagccaccgcacccagccaagcacccctatctctagaggatctggccccccagcccagttactgcagggcagctttccccacctggtgacaggctgtgcgcagcagccccaggacctcaccctgagctgagtcttcaggagccgccctggtggcacaactcagacacccctgaggcctagcagtcaactcctgattcagacatgatccagtccagcctgggcttggctataaccagctcaaacttgcttgacctccacttttcaggagacttggggacgacagccctcatcggcgtctttcatggggttaatctgcttgagtctaagtcgccagccagaaacgtggtgcccagggtgccctgcctcaggacatgtccacacccacgtcacaagcacctgaggagtccggccggggcactgtggtccaaaaggtcctgccgcctccgcatctgactgtcccaacggcatgctggtgacacccccctgcccttcgcttctgtcctccctggcttctctggggcacttggggctatgtacaacctggcacgatccagaaagggtgcaaacaaaatgcctacatccaggcacacgaccaagtcagcgagagctagccctggtaagcaaacatagcccattacaggttcagaacgtgcaccgggttccccaaaactgtcttcaaccacatgactcaacagctctatgggataggaactgtcagtgtttttgcaactgcaacattaaaccaagtgctgtgggcttttcaagtattattcacaacactaaaggaaagtttcttcaaagggctctctggctaatcttcaaagccgcagttaggcaaaatgacagtgtgacagcttcaaagccactgactcatgacacagccctgatgttgtaccggctaggttcagatttcagaaatcagggcacttgcatccattgccttttccaggaaagggaagaaaacactcagttgataaaccttagtactcagataataaataagagaccaaaagtaggctatcacccaaagcaaacatccttaactgaccctaacgtgtatggattcaactttgattattcaacaaaatcatgaccgactgctgtggcctggagtaaccaaaggactgttttctctacacaaagtcaggagcgaataccaacctttatttgcacttgggttccagttcaaagccaccttagacagtgtggcaaagtgggaaaaagcacagatcctgggaccaaggttcagattccatctcaagcgagcatatgaactgtgtgacaacaggcagacagtacctctgtgtctatgagaaagcggggagagcaacaccccagcttctagcagctctacagctgcctggacctgcaggccctcctaggcccacttcctccccagcacagtgtgtgttcccgggcgtgtgtggctctgggtccagctctgttcagggtgggactccaggtgaattactgaacctctgaggtgtacccccaaccccaaactttcaccaaaagcaataaagaggaactctagaactggagccaggactaagtgagaaaaactgcttataagtgcttaataaatactagttatttacaacttttgctcaagccgagggcagaggcctttgtacgcagctgccgaactctgactctagttctgcggaagaaaaggatgcggtatttgcttttgccatgatccctttccatttgattggcaggttaaataacatggtttttgaagtcacatacttaatattcttcctaaaaaccacccaaacactagatgtgtgtgtgcacacacacagaaaccacgaggtagtttaaatcaccattaaaaatcaacgctttctctgattctgtgtcacagagtggtggccagtggctacacaatagcgatttttaaatgattggttaagtgaaaaccagaactcaaaatattccaggagagaagataacatttacaagtaaacagtaagtgcaattgtattttaatttcttggtctccgaaaactcagctgtgactgctttccattaacagttccagctctatgtgtttcctctaacgctaaaggcacagcccccgggaatctactgcttcctaagagtctccatggagtctattttacaacctcctttccctccatgcttccgcggaggagtctatactatctctatatacacattttaaacattattcttcatttgaaattccttcaataaaaacacagtcaccattcttcatcttcttgggaaatggcctgctctcgagcctctggagaagcccctctaacagctcagcccaaaaaagtgcaacaaatttacatgacacgggaaaagcaacatctattgttcttagagtctgactcccttggcccagctggaaaagtctccccacaggtgtgcagtgcagctccgcggtgctgggaaacagggctctttcaagacagcgcagggaaatcttccgggtcatctgggttgggggcaacatcttgcatcaccacttctgctctgggtccatagttctctgccctcctgatccttccccggcctccccgggtgcctcctctggctccacgcccaggacgagggaggttaccaaaattaatctccagctgggatgtgatgtcattggcgggtttccggaaaacatgggaatcg

SEQ ID NO: 371911 - DNA, 5732 bp, Homo sapiens
cacggaacagccctcctggggtccccacgagccgcgtcctgctgtgccccggcgcctacgcagcagcggccgcggccgcggtgggcacgcacggttaccccgggcagctccggccgccagctgcagccccgtcgcctcggccgcgccagccggctgcgggcacctgggggcgggctgggggcgccggccgcggcaggaggcgctgtagcgagggctgcggcgccggtcctgcggcggccgcgggaggcagcggggcaggcgctgtgggccgggctcctcctccggctcctgcgcgaccgcctcccgccgggctctgccggcgcccgccgtccccgcagcgccgctctgcgcccgccgccccgagcgcccgcgcggggctggcgggagcctcggcgggcgcgcgggcgcgcggggccatggtcgtggccccctgacgggccgcggccgcctccatgaagcggaaaagcgagcggcggtcgagctgggccgccgcgcccccctgctcgcggcgctgctcgtcgacctcgccgggtgtgaagaagatccgcagctccacgcagcaagacccgcgccgccgggacccccaggacgacgtgtacctggacatcaccgatcgcctttgttttgccattctctacagcagaccaaagagtgcatcaaatgtacattatttcagcatagataatgaacttgaatatgagaacttctacgcagattttggaccactcaatctggcaatggtttacagatattgttgcaagatcaataagaaattaaagtccattacaatgttaaggaagaaaattgttcattttactggctctgatcagagaaaacaagcaaatgctgccttccttgttggatgctacatggttatatatttggggagaaccccagaagaagcatatagaatattaatctttggagagacatcctatattcctttcagagatgctgcctatggaagttgcaatttctacattacacttcttgactgttttcatgcagtaaagaaggcaatgcagtatggcttccttaatttcaactcatttaaccttgatgaatatgaacactatgaaaaagcagaaaatggagatttaaattggataataccagaccgatttattgccttctgtggacctcattcaagagccagacttgaaagtggttaccaccaacattctcctgagacttatattcaatattttaagaatcacaatgttactaccattattcgtctgaataaaaggatgtatgatgccaaacgctttacggatgctggcttcgatcaccatgatcttttctttgcggatggcagcacccctactgatgccattgtcaaagaattcctagatatctgtgaaaatgctgagggtgccattgcagtacattgcaaagctggccttggtcgcacgggcactctgatagcctgctacatcatgaagcattacaggatgacagcagccgagaccattgcgtgggtcaggatctgcagacctggctcggtgattgggcctcagcagcagtttttggtgatgaagcaaaccaacctctggctggaaggggactattttcgtcagaagttaaaggggcaggagaatggacaacacagagcagccttctccaaacttctctctggcgttgatgacatttccataaatggggtcgagaatcaagatcagcaagaacccgaaccgtacagtgatgatgacgaaatcaatggagtgacacaaggtgatagacttcgggccttgaaaagcagaagacaatccaaaacaaacgctattcctctcacatgtcccctagctgtgctgacctctgcactgtgtagtgttgtcatctggtggattgtttgtgactacattcttcccatcctgctattctgtctcgatggtttcagaacacagtagccatcaggaccccctgacagatagctgctagtaattcttcaatccagtgttcagagctgtaaaacatctgaacctaacatttctggcagtgcaggcattactaaaagaaccaccagatctgcttcaaggaaaagcagtgttaaaagtctctccatttcaaggactaaaacagtcttgcgttaagtaaaaacctgtgaccagagctgaaggaagactctaggactgaaaactgcaacagaaattagcacaatttgaaaacaaaacaaaattgcaaaagccttagttgctttttccacctaagaagttgatcaatggagaaaatgtccactggagtttgaataatgaactttgagtttgggtgcaagcaaatgactcagagaagggtccagctctcaagctgaatgacaaacatgctgttgtaaatttagtctcaggtgtaaatacccaagccctctggtacccagggagctggctggtctgtggtgcatgtgtgtccctgtgatggcaatcattgtagttgctggccttcagaagaattgaggatctgatggaggttttttatgtatttattttctgttcaccttgtgaccctgtgtcaaaatttataaagatacaaaaggcattactgaaatggtactttctgtaatttgatactatttggcttaatcatcttcacttgactatttgtaatactgttgtaatgttaactctgttaagtacccaagctgcttgtcttccaccaaagagtgctttattaacaagaatctgtgaaaatcacatttaaacactgttgcatgttgtaagaccaggtggtaccttagtaacctaaaacttgcaagagaatattaatggtagctttagaagactcaggaggagaaactgacttcagagttggaagatgttgcaagtcgttcctttttctgtccttcagggactgaagaactgggaggctgcccattgtttggttgccagtcatacaaattaaaatcatatttccttccatgaatggaagaaacacactattggtttttccccttggaaacagcaatcccaaataatgtcggcttacaaaaaaaaaaagttaccacttttttagagtccttccctgtaacattggattttttttttcccttatgagatccacctaaggccattgacgtggcctgcgatctcagtgacaatgatctgcttctggatctcactgttgcctttggttagggaacacaactagtaactctgcagagtgccttctcccgcagccctactggaacacagcagagtctgtgccatgaagcagttacagaaacagaattgatgtgctgctaaaaaaaaaaaaaaaatggggcccgaaataaaagaatatatagtactcacctcagttccttccataagaagtgggtggtttaatgattgttaagccatttttgcctgtgccgggagcatggagggctgagatgtcgacaggcagtgggaaacaaatgccctcctaagccacaaggcgtgcgccagattagtaggcaactccattttaagaagctgcctttttcacaaaactggaagaaataaaagcggttggaataaacaagttaaaagtctttaatgcaaaaagtaattgaaaggcagtgcctccattttggtgtactttcttggaagaaagtataaaattgaccggcatcatgagagacggaagatgccgtgttctcagccaaacaagcaactctttccccgccaggcactgtcgggtggggtcaggccagcttttaaacactggggactggatcacagaaaaacagtggttttctgtccctggaaatgaataggcacaaagacccacttggctgtgggcagactactcttcaataagatttgggtgggaggaggaacattccttttgctattttgagctgagacaatataaatattcaaactgtgccatgcataaagcattgaattctcagggcacctcttcttccccttaccccttttaaggccatcccctccattaataataatccaggtagttgtgaaaatcgtgcttctatctgatcccttcttagtttggcttttcatcccatcagaacaagtaaacgtaggcgccacagctcttgtgagtactgtctccctcacggtgaatgagcctcctggtgtttcgtccaagaaaagaaagggtgtcactggaaccacagccctttttcattttataaactgcctcttcatgttgcctgctcaagtttccacctagaattgctatcactgtggctctttctaaaaatctttctatttaactggttcactgaaattagtcatagaaaacttgtgatttggtgaagaggcattccttgtaataaccaaatgacttgggatggtgtgcatagcaagggcagtgttacacttatgaggactgtctctagcatccaggaagtctctgggtctgagggatggaaagttcttcctgctatgaatgagagtggactcttcccctcacccccaactgaaaccacaaacaaccagaatcttctggaattctgacttagagtcgttgttatagaagaccttgttgctatggaacatgaaactgtgtgtcagatggagagatccccttaacctaagagccttaaatagccctgaaagtacactgggacggtttgcgatggaattaaaattggaagtgaatatttttaggtgctcttgaagctttctggggactcaaaattatcaaaagtcagggacagtccggaggaagagcgtctgcaaaactgggttcctagaagtatagacggacttagctttttgtagaatttggtgaggagcagcgcctcgtgagagcagaatggcctggcgtggccagtgcttcccggcagcacgcagctctgcggcctccagaattcccctgttctgagcttgatgcccctagcctgtcccctacctacttcctcccctcctctctagccctctcacaggggtgattgctacctctctgttttcttgggcctaggcaagttttagaggagttcccaagcattgttatgaggccagtgtgctcgctgggctgggcgggatggcctgggcttgtgtgtggcctgagggctctcctggggccttctcttttcccagtcacctttggagccacagaagcagtgcactcattggatgtctgttcttaacacagcttctctttctacattaaaaaaaatcattattgcattttggaaagcagtgctcatcaaaagcaacttttaaaacctattttattgttcctttaaatgttctctcccgctgaaactgccctggagaggctatctgctgctcttccatttacccacatcaggttattctccatgtcactcagtggagatgactccagatgtgtttaaagactggacaattcacctatactgtgtaggaaattacctccttaattacctggtagaattgtcagcagacatgttcatccgatgatagtactgcagttttctattaataatttgcagacttttatctaacctgcactcatgtacagattattaaaagttttaaaatgtaactgatcagtattgatcaatcattgtcttgatttttttttacagcgtatatttctaatcatattttttaaagccaagagaactggttgaatgaatgtttattttcctgaaggtatttttaagataaagcttcctaatggcgtgtaaactttgcatatgtatgtagtttgatacatattgtcacatttgaaaatcttgtgggttgtaactggttttatacaaaatatcgaatagtggaaattgtataattacaatcatgtaattaaaagtattaacccaa

SEQ ID NO: 371912 - DNA, 5552 bp, Homo sapiens
cacggaacagccctcctggggtccccacgagccgcgtcctgctgtgccccggcgcctacgcagcagcggccgcggccgcggtgggcacgcacggttaccccgggcagctccggccgccagctgcagccccgtcgcctcggccgcgccagccggctgcgggcacctgggggcgggctgggggcgccggccgcggcaggaggcgctgtagcgagggctgcggcgccggtcctgcggcggccgcgggaggcagcggggcaggcgctgtgggccgggctcctcctccggctcctgcgcgaccgcctcccgccgggctctgccggcgcccgccgtccccgcagcgccgctctgcgcccgccgccccgagcgcccgcgcggggctggcgggagcctcggcgggcgcgcgggcgcgcggggccatggtcgtggccccctgacgggccgcggccgcctccatgaagcggaaaagcgagcggcggtcgagctgggccgccgcgcccccctgctcgcggcgctgctcgtcgacctcgccgggtgtgaagaagatccgcagctccacgcagcaagacccgcgccgccgggacccccaggacgacgtgtacctggacatcaccgatcgcctttgttttgccattctctacagcagaccaaagagtgcatcaaatgtacattatttcagcatagataatgaacttgaatatgagaacttctacgcagattttggaccactcaatctggcaatggtttacagatattgttgcaagatcaataagaaattaaagtccattacaatgttaaggaagaaaattgttcattttactggctctgatcagagaaaacaagcaaatgctgccttccttgttggatgctacatggttatatatttggggagaaccccagaagaagcatatagaatattaatctttggagagacatcctatattcctttcagagatgctgcctatggaagttgcaatttctacattacacttcttgactgttttcatgcagtaaagaaggcaatgcagtatggcttccttaatttcaactcatttaaccttgatgaatatgaacactatgaaaaagcagaaaatggagatttaaattggataataccagaccgatttattgccttctgtggacctcattcaagagccagacttgaaagtggttaccaccaacattctcctgagacttatattcaatattttaagaatcacaatgttactaccattattcgtctgaataaaaggatgtatgatgccaaacgctttacggatgctggcttcgatcaccatgatcttttctttgcggatggcagcacccctactgatgccattgtcaaagaattcctagatatctgtgaaaatgctgagggtgccattgcagtacattgcaaagctggccttggtcgcacgggcactctgatagcctgctacatcatgaagcattacaggatgacagcagccgagaccattgcgtgggtcaggatctgcagacctggctcggtgattgggcctcagcagcagtttttggtgatgaagcaaaccaacctctggctggaaggggactattttcgtcagaagttaaaggggcaggagaatggacaacacagagcagccttctccaaacttctctctggcgttgatgacatttccataaatggggtcgagaatcaagatcagcaagaacccgaaccgtacagtgatgatgacgaaatcaatggagtgacacaaggtgatagacttcgggccttgaaaagcagaagacaatccaaaacaaacgctattcctctcacatgtcccctagctgtgctgacctctgcactgtgtagtgttgtcatctggtggattgtttgtgactacattcttcccatcctgctattctgtctcgatggtttcagaacacagtagccatcaggaccccctgacagatagctgctagtaattcttcaatccagtgttcagagctgtaaaacatctgaacctaacatttctggcagtgcaggcattactaaaagaaccaccagatctgcttcaaggaaaagcagtgttaaaagtctctccatttcaaggactaaaacagtcttgcgttaagtaaaaacctgtgaccagagctgaaggaagactctaggactgaaaactgcaacagaaattagcacaatttgaaaacaaaacaaaattgcaaaagccttagttgctttttccacctaagaagttgatcaatggagaaaatgtccactggagtttgaataatgaactttgagtttgggtgcaagcaaatgactcagagaagggtccagctctcaagctgaatgacaaacatgctgttgtaaatttagtctcaggtgtaaatacccaagccctctggtacccagggagctggctggtctgtggtgcatgtgtgtccctgtgatggcaatcattgtagttgctggccttcagaagaattgaggatctgatggaggttttttatgtatttattttctgttcaccttgtgaccctgtgtcaaaatttataaagatacaaaaggcattactgaaatggtacttagtaacctaaaacttgcaagagaatattaatggtagctttagaagactcaggaggagaaactgacttcagagttggaagatgttgcaagtcgttcctttttctgtccttcagggactgaagaactgggaggctgcccattgtttggttgccagtcatacaaattaaaatcatatttccttccatgaatggaagaaacacactattggtttttccccttggaaacagcaatcccaaataatgtcggcttacaaaaaaaaaaagttaccacttttttagagtccttccctgtaacattggattttttttttcccttatgagatccacctaaggccattgacgtggcctgcgatctcagtgacaatgatctgcttctggatctcactgttgcctttggttagggaacacaactagtaactctgcagagtgccttctcccgcagccctactggaacacagcagagtctgtgccatgaagcagttacagaaacagaattgatgtgctgctaaaaaaaaaaaaaaaatggggcccgaaataaaagaatatatagtactcacctcagttccttccataagaagtgggtggtttaatgattgttaagccatttttgcctgtgccgggagcatggagggctgagatgtcgacaggcagtgggaaacaaatgccctcctaagccacaaggcgtgcgccagattagtaggcaactccattttaagaagctgcctttttcacaaaactggaagaaataaaagcggttggaataaacaagttaaaagtctttaatgcaaaaagtaattgaaaggcagtgcctccattttggtgtactttcttggaagaaagtataaaattgaccggcatcatgagagacggaagatgccgtgttctcagccaaacaagcaactctttccccgccaggcactgtcgggtggggtcaggccagcttttaaacactggggactggatcacagaaaaacagtggttttctgtccctggaaatgaataggcacaaagacccacttggctgtgggcagactactcttcaataagatttgggtgggaggaggaacattccttttgctattttgagctgagacaatataaatattcaaactgtgccatgcataaagcattgaattctcagggcacctcttcttccccttaccccttttaaggccatcccctccattaataataatccaggtagttgtgaaaatcgtgcttctatctgatcccttcttagtttggcttttcatcccatcagaacaagtaaacgtaggcgccacagctcttgtgagtactgtctccctcacggtgaatgagcctcctggtgtttcgtccaagaaaagaaagggtgtcactggaaccacagccctttttcattttataaactgcctcttcatgttgcctgctcaagtttccacctagaattgctatcactgtggctctttctaaaaatctttctatttaactggttcactgaaattagtcatagaaaacttgtgatttggtgaagaggcattccttgtaataaccaaatgacttgggatggtgtgcatagcaagggcagtgttacacttatgaggactgtctctagcatccaggaagtctctgggtctgagggatggaaagttcttcctgctatgaatgagagtggactcttcccctcacccccaactgaaaccacaaacaaccagaatcttctggaattctgacttagagtcgttgttatagaagaccttgttgctatggaacatgaaactgtgtgtcagatggagagatccccttaacctaagagccttaaatagccctgaaagtacactgggacggtttgcgatggaattaaaattggaagtgaatatttttaggtgctcttgaagctttctggggactcaaaattatcaaaagtcagggacagtccggaggaagagcgtctgcaaaactgggttcctagaagtatagacggacttagctttttgtagaatttggtgaggagcagcgcctcgtgagagcagaatggcctggcgtggccagtgcttcccggcagcacgcagctctgcggcctccagaattcccctgttctgagcttgatgcccctagcctgtcccctacctacttcctcccctcctctctagccctctcacaggggtgattgctacctctctgttttcttgggcctaggcaagttttagaggagttcccaagcattgttatgaggccagtgtgctcgctgggctgggcgggatggcctgggcttgtgtgtggcctgagggctctcctggggccttctcttttcccagtcacctttggagccacagaagcagtgcactcattggatgtctgttcttaacacagcttctctttctacattaaaaaaaatcattattgcattttggaaagcagtgctcatcaaaagcaacttttaaaacctattttattgttcctttaaatgttctctcccgctgaaactgccctggagaggctatctgctgctcttccatttacccacatcaggttattctccatgtcactcagtggagatgactccagatgtgtttaaagactggacaattcacctatactgtgtaggaaattacctccttaattacctggtagaattgtcagcagacatgttcatccgatgatagtactgcagttttctattaataatttgcagacttttatctaacctgcactcatgtacagattattaaaagttttaaaatgtaactgatcagtattgatcaatcattgtcttgatttttttttacagcgtatatttctaatcatattttttaaagccaagagaactggttgaatgaatgtttattttcctgaaggtatttttaagataaagcttcctaatggcgtgtaaactttgcatatgtatgtagtttgatacatattgtcacatttgaaaatcttgtgggttgtaactggttttatacaaaatatcgaatagtggaaattgtataattacaatcatgtaattaaaagtattaacccaa

SEQ ID NO: 371913 - DNA, 5687 bp, Homo sapiens
atttgtctaattgtaaaaataccgaagtagtgattccaagttagaaagtagtgatccctaagaacagttggagaaacatatggtttgttctatagctgtaagcggtaattttgaagcaattttgaaagcattctttccctttaagaaaaaaatagtttcttactgaaatgactttttaggatgtcttgaaaaacgtagtgaaattcatctagaaacttacaaggttgatgctagccatcacatgcatgctgcaatttgctgaaatgtcttgatccaggggagctaaacttttacaaaaataggtttgtttagaagtcatatcactacatgaaaaatcaccacttttgaaacttacggttaaaggcagtttctcttttaaaaatgtgctcattgattattcccacccaaatagccagaatattttgtaattacccattaccactcctaccatctgaaacgtgcatgaaaaaaatgaaaaattgacttcatctgaaaagagttgtgtcatgatatatgaaacgttttttgtaacctccaggaaggaacattgcaatttttccatttcagatcgcctttgttttgccattctctacagcagaccaaagagtgcatcaaatgtacattatttcagcatagataatgaacttgaatatgagaacttctacgcagattttggaccactcaatctggcaatggtttacagatattgttgcaagatcaataagaaattaaagtccattacaatgttaaggaagaaaattgttcattttactggctctgatcagagaaaacaagcaaatgctgccttccttgttggatgctacatggttatatatttggggagaaccccagaagaagcatatagaatattaatctttggagagacatcctatattcctttcagagatgctgcctatggaagttgcaatttctacattacacttcttgactgttttcatgcagtaaagaaggcaatgcagtatggcttccttaatttcaactcatttaaccttgatgaatatgaacactatgaaaaagcagaaaatggagatttaaattggataataccagaccgatttattgccttctgtggacctcattcaagagccagacttgaaagtggttaccaccaacattctcctgagacttatattcaatattttaagaatcacaatgttactaccattattcgtctgaataaaaggatgtatgatgccaaacgctttacggatgctggcttcgatcaccatgatcttttctttgcggatggcagcacccctactgatgccattgtcaaagaattcctagatatctgtgaaaatgctgagggtgccattgcagtacattgcaaagctggccttggtcgcacgggcactctgatagcctgctacatcatgaagcattacaggatgacagcagccgagaccattgcgtgggtcaggatctgcagacctggctcggtgattgggcctcagcagcagtttttggtgatgaagcaaaccaacctctggctggaaggggactattttcgtcagaagttaaaggggcaggagaatggacaacacagagcagccttctccaaacttctctctggcgttgatgacatttccataaatggggtcgagaatcaagatcagcaagaacccgaaccgtacagtgatgatgacgaaatcaatggagtgacacaaggtgatagacttcgggccttgaaaagcagaagacaatccaaaacaaacgctattcctctcacatgtcccctagctgtgctgacctctgcactgtgtagtgttgtcatctggtggattgtttgtgactacattcttcccatcctgctattctgtctcgatggtttcagaacacagtagccatcaggaccccctgacagatagctgctagtaattcttcaatccagtgttcagagctgtaaaacatctgaacctaacatttctggcagtgcaggcattactaaaagaaccaccagatctgcttcaaggaaaagcagtgttaaaagtctctccatttcaaggactaaaacagtcttgcgttaagtaaaaacctgtgaccagagctgaaggaagactctaggactgaaaactgcaacagaaattagcacaatttgaaaacaaaacaaaattgcaaaagccttagttgctttttccacctaagaagttgatcaatggagaaaatgtccactggagtttgaataatgaactttgagtttgggtgcaagcaaatgactcagagaagggtccagctctcaagctgaatgacaaacatgctgttgtaaatttagtctcaggtgtaaatacccaagccctctggtacccagggagctggctggtctgtggtgcatgtgtgtccctgtgatggcaatcattgtagttgctggccttcagaagaattgaggatctgatggaggttttttatgtatttattttctgttcaccttgtgaccctgtgtcaaaatttataaagatacaaaaggcattactgaaatggtactttctgtaatttgatactatttggcttaatcatcttcacttgactatttgtaatactgttgtaatgttaactctgttaagtacccaagctgcttgtcttccaccaaagagtgctttattaacaagaatctgtgaaaatcacatttaaacactgttgcatgttgtaagaccaggtggtaccttagtaacctaaaacttgcaagagaatattaatggtagctttagaagactcaggaggagaaactgacttcagagttggaagatgttgcaagtcgttcctttttctgtccttcagggactgaagaactgggaggctgcccattgtttggttgccagtcatacaaattaaaatcatatttccttccatgaatggaagaaacacactattggtttttccccttggaaacagcaatcccaaataatgtcggcttacaaaaaaaaaaagttaccacttttttagagtccttccctgtaacattggattttttttttcccttatgagatccacctaaggccattgacgtggcctgcgatctcagtgacaatgatctgcttctggatctcactgttgcctttggttagggaacacaactagtaactctgcagagtgccttctcccgcagccctactggaacacagcagagtctgtgccatgaagcagttacagaaacagaattgatgtgctgctaaaaaaaaaaaaaaaatggggcccgaaataaaagaatatatagtactcacctcagttccttccataagaagtgggtggtttaatgattgttaagccatttttgcctgtgccgggagcatggagggctgagatgtcgacaggcagtgggaaacaaatgccctcctaagccacaaggcgtgcgccagattagtaggcaactccattttaagaagctgcctttttcacaaaactggaagaaataaaagcggttggaataaacaagttaaaagtctttaatgcaaaaagtaattgaaaggcagtgcctccattttggtgtactttcttggaagaaagtataaaattgaccggcatcatgagagacggaagatgccgtgttctcagccaaacaagcaactctttccccgccaggcactgtcgggtggggtcaggccagcttttaaacactggggactggatcacagaaaaacagtggttttctgtccctggaaatgaataggcacaaagacccacttggctgtgggcagactactcttcaataagatttgggtgggaggaggaacattccttttgctattttgagctgagacaatataaatattcaaactgtgccatgcataaagcattgaattctcagggcacctcttcttccccttaccccttttaaggccatcccctccattaataataatccaggtagttgtgaaaatcgtgcttctatctgatcccttcttagtttggcttttcatcccatcagaacaagtaaacgtaggcgccacagctcttgtgagtactgtctccctcacggtgaatgagcctcctggtgtttcgtccaagaaaagaaagggtgtcactggaaccacagccctttttcattttataaactgcctcttcatgttgcctgctcaagtttccacctagaattgctatcactgtggctctttctaaaaatctttctatttaactggttcactgaaattagtcatagaaaacttgtgatttggtgaagaggcattccttgtaataaccaaatgacttgggatggtgtgcatagcaagggcagtgttacacttatgaggactgtctctagcatccaggaagtctctgggtctgagggatggaaagttcttcctgctatgaatgagagtggactcttcccctcacccccaactgaaaccacaaacaaccagaatcttctggaattctgacttagagtcgttgttatagaagaccttgttgctatggaacatgaaactgtgtgtcagatggagagatccccttaacctaagagccttaaatagccctgaaagtacactgggacggtttgcgatggaattaaaattggaagtgaatatttttaggtgctcttgaagctttctggggactcaaaattatcaaaagtcagggacagtccggaggaagagcgtctgcaaaactgggttcctagaagtatagacggacttagctttttgtagaatttggtgaggagcagcgcctcgtgagagcagaatggcctggcgtggccagtgcttcccggcagcacgcagctctgcggcctccagaattcccctgttctgagcttgatgcccctagcctgtcccctacctacttcctcccctcctctctagccctctcacaggggtgattgctacctctctgttttcttgggcctaggcaagttttagaggagttcccaagcattgttatgaggccagtgtgctcgctgggctgggcgggatggcctgggcttgtgtgtggcctgagggctctcctggggccttctcttttcccagtcacctttggagccacagaagcagtgcactcattggatgtctgttcttaacacagcttctctttctacattaaaaaaaatcattattgcattttggaaagcagtgctcatcaaaagcaacttttaaaacctattttattgttcctttaaatgttctctcccgctgaaactgccctggagaggctatctgctgctcttccatttacccacatcaggttattctccatgtcactcagtggagatgactccagatgtgtttaaagactggacaattcacctatactgtgtaggaaattacctccttaattacctggtagaattgtcagcagacatgttcatccgatgatagtactgcagttttctattaataatttgcagacttttatctaacctgcactcatgtacagattattaaaagttttaaaatgtaactgatcagtattgatcaatcattgtcttgatttttttttacagcgtatatttctaatcatattttttaaagccaagagaactggttgaatgaatgtttattttcctgaaggtatttttaagataaagcttcctaatggcgtgtaaactttgcatatgtatgtagtttgatacatattgtcacatttgaaaatcttgtgggttgtaactggttttatacaaaatatcgaatagtggaaattgtataattacaatcatgtaattaaaagtattaacccaa

SEQ ID NO: 371914 - DNA, 4686 bp, Homo sapiens
cgccttccagatgctttggagtcatgagccgggagggcgcgggggcagctttggtagccgaggtgatcaaagatcgcctttgttttgccattctctacagcagaccaaagagtgcatcaaatgtacattatttcagcatagataatgaacttgaatatgagaacttctacgcagattttggaccactcaatctggcaatggtttacagatattgttgcaagatcaataagaaattaaagtccattacaatgttaaggaagaaaattgttcattttactggctctgatcagagaaaacaagcaaatgctgccttccttgttggatgctacatggttatatatttggggagaaccccagaagaagcatatagaatattaatctttggagagacatcctatattcctttcagagatgctgcctatggaagttgcaatttctacattacacttcttgactgttttcatgcagtaaagaaggcaatgcagtatggcttccttaatttcaactcatttaaccttgatgaatatgaacactatgaaaaagcagaaaatggagatttaaattggataataccagaccgatttattgccttctgtggacctcattcaagagccagacttgaaagtggttaccaccaacattctcctgagacttatattcaatattttaagaatcacaatgttactaccattattcgtctgaataaaaggatgtatgatgcccaaacttctctctggcgttgatgacatttccataaatggggtcgagaatcaagatcagcaagaacccgaaccgtacagtgatgatgacgaaatcaatggagtgacacaaggtgatagacttcgggccttgaaaagcagaagacaatccaaaacaaacgctattcctctcacagtaattcttcaatccagtgttcagagctgtaaaacatctgaacctaacatttctggcagtgcaggcattactaaaagaaccaccagatctgcttcaaggaaaagcagtgttaaaagtctctccatttcaaggactaaaacagtcttgcgttaagtaaaaacctgtgaccagagctgaaggaagactctaggactgaaaactgcaacagaaattagcacaatttgaaaacaaaacaaaattgcaaaagccttagttgctttttccacctaagaagttgatcaatggagaaaatgtccactggagtttgaataatgaactttgagtttgggtgcaagcaaatgactcagagaagggtccagctctcaagctgaatgacaaacatgctgttgtaaatttagtctcaggtgtaaatacccaagccctctggtacccagggagctggctggtctgtggtgcatgtgtgtccctgtgatggcaatcattgtagttgctggccttcagaagaattgaggatctgatggaggttttttatgtatttattttctgttcaccttgtgaccctgtgtcaaaatttataaagatacaaaaggcattactgaaatggtactttctgtaatttgatactatttggcttaatcatcttcacttgactatttgtaatactgttgtaatgttaactctgttaagtacccaagctgcttgtcttccaccaaagagtgctttattaacaagaatctgtgaaaatcacatttaaacactgttgcatgttgtaagaccaggtggtaccttagtaacctaaaacttgcaagagaatattaatggtagctttagaagactcaggaggagaaactgacttcagagttggaagatgttgcaagtcgttcctttttctgtccttcagggactgaagaactgggaggctgcccattgtttggttgccagtcatacaaattaaaatcatatttccttccatgaatggaagaaacacactattggtttttccccttggaaacagcaatcccaaataatgtcggcttacaaaaaaaaaaagttaccacttttttagagtccttccctgtaacattggattttttttttcccttatgagatccacctaaggccattgacgtggcctgcgatctcagtgacaatgatctgcttctggatctcactgttgcctttggttagggaacacaactagtaactctgcagagtgccttctcccgcagccctactggaacacagcagagtctgtgccatgaagcagttacagaaacagaattgatgtgctgctaaaaaaaaaaaaaaaatggggcccgaaataaaagaatatatagtactcacctcagttccttccataagaagtgggtggtttaatgattgttaagccatttttgcctgtgccgggagcatggagggctgagatgtcgacaggcagtgggaaacaaatgccctcctaagccacaaggcgtgcgccagattagtaggcaactccattttaagaagctgcctttttcacaaaactggaagaaataaaagcggttggaataaacaagttaaaagtctttaatgcaaaaagtaattgaaaggcagtgcctccattttggtgtactttcttggaagaaagtataaaattgaccggcatcatgagagacggaagatgccgtgttctcagccaaacaagcaactctttccccgccaggcactgtcgggtggggtcaggccagcttttaaacactggggactggatcacagaaaaacagtggttttctgtccctggaaatgaataggcacaaagacccacttggctgtgggcagactactcttcaataagatttgggtgggaggaggaacattccttttgctattttgagctgagacaatataaatattcaaactgtgccatgcataaagcattgaattctcagggcacctcttcttccccttaccccttttaaggccatcccctccattaataataatccaggtagttgtgaaaatcgtgcttctatctgatcccttcttagtttggcttttcatcccatcagaacaagtaaacgtaggcgccacagctcttgtgagtactgtctccctcacggtgaatgagcctcctggtgtttcgtccaagaaaagaaagggtgtcactggaaccacagccctttttcattttataaactgcctcttcatgttgcctgctcaagtttccacctagaattgctatcactgtggctctttctaaaaatctttctatttaactggttcactgaaattagtcatagaaaacttgtgatttggtgaagaggcattccttgtaataaccaaatgacttgggatggtgtgcatagcaagggcagtgttacacttatgaggactgtctctagcatccaggaagtctctgggtctgagggatggaaagttcttcctgctatgaatgagagtggactcttcccctcacccccaactgaaaccacaaacaaccagaatcttctggaattctgacttagagtcgttgttatagaagaccttgttgctatggaacatgaaactgtgtgtcagatggagagatccccttaacctaagagccttaaatagccctgaaagtacactgggacggtttgcgatggaattaaaattggaagtgaatatttttaggtgctcttgaagctttctggggactcaaaattatcaaaagtcagggacagtccggaggaagagcgtctgcaaaactgggttcctagaagtatagacggacttagctttttgtagaatttggtgaggagcagcgcctcgtgagagcagaatggcctggcgtggccagtgcttcccggcagcacgcagctctgcggcctccagaattcccctgttctgagcttgatgcccctagcctgtcccctacctacttcctcccctcctctctagccctctcacaggggtgattgctacctctctgttttcttgggcctaggcaagttttagaggagttcccaagcattgttatgaggccagtgtgctcgctgggctgggcgggatggcctgggcttgtgtgtggcctgagggctctcctggggccttctcttttcccagtcacctttggagccacagaagcagtgcactcattggatgtctgttcttaacacagcttctctttctacattaaaaaaaatcattattgcattttggaaagcagtgctcatcaaaagcaacttttaaaacctattttattgttcctttaaatgttctctcccgctgaaactgccctggagaggctatctgctgctcttccatttacccacatcaggttattctccatgtcactcagtggagatgactccagatgtgtttaaagactggacaattcacctatactgtgtaggaaattacctccttaattacctggtagaattgtcagcagacatgttcatccgatgatagtactgcagttttctattaataatttgcagacttttatctaacctgcactcatgtacagattattaaaagttttaaaatgtaactgatcagtattgatcaatcattgtcttgatttttttttacagcgtatatttctaatcatattttttaaagccaagagaactggttgaatgaatgtttattttcctgaaggtatttttaagataaagcttcctaatggcgtgtaaactttgcatatgtatgtagtttgatacatattgtcacatttgaaaatcttgtgggttgtaactggttttatacaaaatatcgaatagtggaaattgtataattacaatcatgtaattaaaagtattaacccaa

SEQ ID NO: 371915 - DNA, 1879 bp, Homo sapiens
ctcccccgggacggggttaattgaaatgcggttccctttgagtcccccgcgttgtaaaaaaccccgtgttaggaccctcccgcgaaactccctcctggggattttttccacaaaccctctccgtgtccccccccggcgcgttttttatttggtgggagatccccccccccttgttccctgggcccccggttctccctcttgggaacccccgtttgggcccctttctcaccttccctctccggggcccccgcgcgcccccccgccgatgtggttttaggaaagtcttttcgcgaggggccgcgcgggcgcgcgccgcccaccgttttctttttttttttttttttttttttttttgtttttttcaggagcgaataccaacctttatttgcacttgggttccagttcaaagccaccttagacagtgtggcaaagtgggaaaaagcacagatcctgggaccaaggttcagattccatctcaagcgagcatatgaactgtgtgacaacaggcagacagtacctctgtgtctatgagaaagcggggagagcaacaccccagcttctagcagctctacagctgcctggacctgcaggccctcctaggcccacttcctccccagcacagtgtgtgttcccgggcgtgtgtggctctgggtccagctctgttcagggtgggactccaggtgaattactgaacctctgaggtgtacccccaaccccaaactttcaccaaaagcaataaagaggaactctagaactggagccaggactaagtgagaaaaactgcttataagtgcttaataaatactagttatttacaacttttgctcaagccgagggcagaggcctttgtacgcagctgccgaactctgactctagttctgcggaagaaaaggatgcggtatttgcttttgccatgatccctttccatttgattggcaggttaaataacatggtttttgaagtcacatacttaatattcttcctaaaaaccacccaaacactagatgtgtgtgtgcacacacacagaaaccacgaggtagtttaaatcaccattaaaaatcaacgctttctctgattctgtgtcacagagtggtggccagtggctacacaatagcgatttttaaatgattggttaagtgaaaaccagaactcaaaatattccaggagagaagataacatttacaagtaaacagtaagtgcaattgtattttaatttcttggtctccgaaaactcagctgtgactgctttccattaacagttccagctctatgtgtttcctctaacgctaaaggcacagcccccgggaatctactgcttcctaagagtctccatggagtctattttacaacctcctttccctccatgcttccgcggaggagtctatactatctctatatacacattttaaacattattcttcatttgaaattccttcaataaaaacacagtcaccattcttcatcttcttgggaaatggcctgctctcgagcctctggagaagcccctctaacagctcagcccaaaaaagtgcaacaaatttacatgacacgggaaaagcaacatctattgttcttagagtctgactcccttggcccagctggaaaagtctccccacaggtgtgcagtgcagctccgcggtgctgggaaacagggctctttcaagacagcgcagggaaatcttccgggtcatctgggttgggggcaacatcttgcatcaccacttctgctctgggtccatagttctctgccctcctgatccttccccggcctccccgggtgcctcctctggctccacgcccaggacgagggaggttaccaaaattaatctccagctgggatgtgatgtcattggcgggtttccggaaaacatgggaatcg

SEQ ID NO: 371916 - DNA, 817 bp, Homo sapiens
  misc_feature (103)..(103): n is a, c, g, or t
  misc_feature (106)..(106): n is a, c, g, or t
gggaccccagatggggaagggggggggggggccccccgacacgaaaaaaagagggagagagaggttaggggaggggaaaagagagaatgtggtaaagggaagnaanactaaagaatttaatattttttttgtaagtgcaattgtattttaatttcttggtctccgaaaactcagctgtgactgctttccattaacagttccagctctatgtgtttcctctaacgctaaaggcacagcccccgggaatctactgcttcctaagagtctccatggagtctattttacaacctcctttccctccatgcttccgcggaggagtctatactatctctatatacacattttaaacattattcttcatttgaaattccttcaataaaaacacagtcaccattcttcatcttcttgggaaatggcctgctctcgagcctctggagaagcccctctaacagctcagcccaaaaaagtgcaacaaatttacatgacacgggaaaagcaacatctattgttcttagagtctgactcccttggcccagctggaaaagtctccccacaggtgtgcagtgcagctccgcggtgctgggaaacagggctctttcaagacagcgcagggaaatcttccgggtcatctgggttgggggcaacatcttgcatcaccacttctgctctgggtccatagttctctgccctcctgatccttccccggcctccccgggtgcctcctctggctccacgcccaggacgagggaggttaccaaaattaatctccagctgggatgtgatgtcattggcgggtttccggaaaacatgggaatcg

SEQ ID NO: 371917 - DNA, 1634 bp, Homo sapiens
cacggaacagccctcctggggtccccacgagccgcgtcctgctgtgccccggcgcctacgcagcagcggccgcggccgcggtgggcacgcacggttaccccgggcagctccggccgccagctgcagccccgtcgcctcggccgcgccagccggctgcgggcacctgggggcgggctgggggcgccggccgcggcaggaggcgctgtagcgagggctgcggcgccggtcctgcggcggccgcgggaggcagcggggcaggcgctgtgggccgggctcctcctccggctcctgcgcgaccgcctcccgccgggctctgccggcgcccgccgtccccgcagcgccgctctgcgcccgccgccccgagcgcccgcgcggggctggcgggagcctcggcgggcgcgcgggcgcgcggggccatggtcgtggccccctgacgggccgcggccgcctccatgaagcggaaaagcgagcggcggtcgagctgggccgccgcgcccccctgctcgcggcgctgctcgtcgacctcgccgggtgtgaagaagatccgcagctccacgcagcaagacccgcgccgccgggacccccaggacgacgtgtacctggacatcaccgatcgcctttgttttgccattctctacagcagaccaaagagtgcatcaaatgtacattatttcagcatagataatgaacttgaatatgagaacttctacgcagattttggaccactcaatctggcaatggtttacagatattgttgcaagatcaataagaaattaaagtccattacaatgttaaggaagaaaattgttcattttactggctctgatcagagaaaacaagcaaatgctgccttccttgttggatgctacatggtaagtatttgttttcctaatgtattcataaaaatgcacacaacagtggttctttacatttgcagttggaattttgaaatcaagataatgtcttgatttctcttcagaaagaacgtgttttgcttttaaaaaattgaccaattcaaggaagctgtgcttatgtggaagtagcaggtagatgagagatctcctgtaccttccacttaattttgctgtgaacctaaaactgctcgggaaaaaagcctatatttttttaaaaagtgcccaactactttggcaaaggtttatgttttatggcactaaaggttggaaaatagtgctccaaagctatttctattcactcgtgatccatttagtgagttgtaaaatcatcttactggggtcaggaccccactattaattttctaaaaatttttttaaaaagtgctttctaaaatttgaatctaggcatttttcccctaattaaggtcatctcctttctcatcaaaacatctagcaggaggccacgggatgtcagtgttgtcagaagatgggttacataccacacggattacatacatatgccatcaagtgctccatttggatcattggaaatgtgctttggaatagcagtatttacataagagttgtgaatttcatttatttgtaaatatgatggaaaagatttattttttgaagagtcacattttgtttggcacccagtggatttgtctgcaggggccctgaaagctgcaatttttccagagccagcttagagctcct

SEQ ID NO: 371918 - DNA, 685 bp, Homo sapiens
cagaagcagcccatgctttaagcatgtgtccattcatgtcccctcccctcttctctaattgtatgttcattctcatcccagaatgtgcctttttatgggaagatatatggtatttgtgggtatcaatgttaatcttttcaaaggtcttgctaataatatgaatggttatgggatttggaattgatcttcatcacaaaatgaaattgtggaagacttgaaattaaaaagaaaatgctaacagttatttatttttatgcagtccattacaatgttaaggaagaaaattgttcattttactggctctgatcagagaaaacaagcaaatgctgccttccttgttggatgctacatggtaagtatttgttttcctaatgtattcataaaaatgcacacaacagtggttctttacatttgcagttggaattttgaaatcaagataatgtcttgatttctcttcagaaagaacgtgttttgcttttaaaaaattgaccaattcaaggaagctgtgcttatgtggaagtagcaggtagatgagagatctcctgtaccttccacttaattttgctgtgaacctaaaactgctcgggaaaaaagcctatatttttttaaaaagtgcccaactactttggcaaaggtttatgttttatggcactaaaggttggaaaatagtgctccaaagctattt

SEQ ID NO: 371919 - DNA, 634 bp, Homo sapiens
aaacacagcatttttttattcaacataaaatggcaaaactccatccttgttgaccacccctttgtatccctgttgctgttggctgggcttttagggtgtctaaaattcacatatggcttgattgattgatgattgcgtaatttattttggcttcccaatttgaacatctgttctttccccttcacccctttccagatgtcccctagctgtgctgacctctgcactgtgtagtgttgtcatctggtggattgtttgtgactacattcttcccatcctgctattctgtctcgatggtttcagaacacagtagccatcaggaccccctgacagatagctgctgtaagtgtcccgttctgtttctctgccgttgcttacttctggtgcctagtgtggttcccacaatgcatgtttttctccttgtcagctcctagctttgttggtttgcctattttcaaaggttctttttctgaatcttttcaattaatgggatggtggtggggagggaaggtgggcttcactgttcctctcatagaaaggatattgaaagtaacatacgttgttttaaagttatgcttatccttaacatatttcaaaatagcagttgataaagacactgaaacagtttttcttcact

SEQ ID NO: 371920 - DNA, 941 bp, Homo sapiens
cacggaacagccctcctggggtccccacgagccgcgtcctgctgtgccccggcgcctacgcagcagcggccgcggccgcggtgggcacgcacggttaccccgggcagctccggccgccagctgcagccccgtcgcctcggccgcgccagccggctgcgggcacctgggggcgggctgggggcgccggccgcggcaggaggcgctgtagcgagggctgcggcgccggtcctgcggcggccgcgggaggcagcggggcaggcgctgtgggccgggctcctcctccggctcctgcgcgaccgcctcccgccgggctctgccggcgcccgccgtccccgcagcgccgctctgcgcccgccgccccgagcgcccgcgcggggctggcgggagcctcggcgggcgcgcgggcgcgcggggccatggtcgtggccccctgacgggccgcggccgcctccatgaagcggaaaagcgagcggcggtcgagctgggccgccgcgcccccctgctcgcggcgctgctcgtcgacctcgccgggtgtgaagaagatccgcagctccacgcagcaagacccgcgccgccgggacccccaggacgacgtgtacctggacatcaccgcgatggttggctgtcccaggctgtcacctttctagaccggcttctgatctggctcgggatccacaaggactagacctgcggggaaggtctctcctggacacgcccgttgcccactgcaagttctctccaggtgcaattgaagcctctcagcaggtgcgtctgcctcattcttccactgggtattgagccatcagcccagggccttcctttaggtgggcctcggcctgactgggttgggaatggccgggctgacacccaccctgggatggtaggaggcccattccaggcgcagcagggcagtgctgctgacactttcttaggctaggagc

SEQ ID NO: 371921 - DNA, 5588 bp, Homo sapiens
cacggaacagccctcctggggtccccacgagccgcgtcctgctgtgccccggcgcctacgcagcagcggccgcggccgcggtgggcacgcacggttaccccgggcagctccggccgccagctgcagccccgtcgcctcggccgcgccagccggctgcgggcacctgggggcgggctgggggcgccggccgcggcaggaggcgctgtagcgagggctgcggcgccggtcctgcggcggccgcgggaggcagcggggcaggcgctgtgggccgggctcctcctccggctcctgcgcgaccgcctcccgccgggctctgccggcgcccgccgtccccgcagcgccgctctgcgcccgccgccccgagcgcccgcgcggggctggcgggagcctcggcgggcgcgcgggcgcgcggggccatggtcgtggccccctgacgggccgcggccgcctccatgaagcggaaaagcgagcggcggtcgagctgggccgccgcgcccccctgctcgcggcgctgctcgtcgacctcgccgggtgtgaagaagatccgcagctccacgcagcaagacccgcgccgccgggacccccaggacgacgtgtacctggacatcaccgatcgcctttgttttgccattctctacagcagaccaaagagtgcatcaaatgtacattatttcagcatagataatgaacttgaatatgagaacttctacgcagattttggaccactcaatctggcaatggtttacagatattgttgcaagatcaataagaaattaaagtccattacaatgttaaggaagaaaattgttcattttactggctctgatcagagaaaacaagcaaatgctgccttccttgttggatgctacatggttatatatttggggagaaccccagaagaagcatatagaatattaatctttggagagacatcctatattcctttcagagatgctgcctatggaagttgcaatttctacattacacttcttgactgttttcatgcagtaaagaaggcaatgcagtatggcttccttaatttcaactcatttaaccttgatgaatatgaacactatgaaaaagcagaaaatggagatttaaattggataataccagaccgatttattgccttctgtggacctcattcaagagccagacttgaaagtggttaccaccaacattctcctgagacttatattcaatattttaagaatcacaatgttactaccattattcgtctgaataaaaggatgtatgatgccaaacgctttacggatgctggcttcgatcaccatgatcttttctttgcggatggcagcacccctactgatgccattgtcaaagaattcctagatatctgtgaaaatgctgagggtgccattgcagtacattgcaaagctggccttggtcgcacgggcactctgatagcctgctacatcatgaagcattacaggatgacagcagccgagaccattgcgtgggtcaggatctgcagacctggctcggtgattgggcctcagcagcagtttttggtgatgaagcaaaccaacctctggctggaaggggactattttcgtcagaagttaaaggggcaggagaatggacaacacagagcagccttctccaaacttctctctggcgttgatgacatttccataaatggggtcgagaatcaagatcagcaagaacccgaaccgtacagtgatgatgacgaaatcaatggagtgacacaaggtgatagacttcgggccttgaaaagcagaagacaatccaaaacaaacgctattcctctcacagtaattcttcaatccagtgttcagagctgtaaaacatctgaacctaacatttctggcagtgcaggcattactaaaagaaccaccagatctgcttcaaggaaaagcagtgttaaaagtctctccatttcaaggactaaaacagtcttgcgttaagtaaaaacctgtgaccagagctgaaggaagactctaggactgaaaactgcaacagaaattagcacaatttgaaaacaaaacaaaattgcaaaagccttagttgctttttccacctaagaagttgatcaatggagaaaatgtccactggagtttgaataatgaactttgagtttgggtgcaagcaaatgactcagagaagggtccagctctcaagctgaatgacaaacatgctgttgtaaatttagtctcaggtgtaaatacccaagccctctggtacccagggagctggctggtctgtggtgcatgtgtgtccctgtgatggcaatcattgtagttgctggccttcagaagaattgaggatctgatggaggttttttatgtatttattttctgttcaccttgtgaccctgtgtcaaaatttataaagatacaaaaggcattactgaaatggtactttctgtaatttgatactatttggcttaatcatcttcacttgactatttgtaatactgttgtaatgttaactctgttaagtacccaagctgcttgtcttccaccaaagagtgctttattaacaagaatctgtgaaaatcacatttaaacactgttgcatgttgtaagaccaggtggtaccttagtaacctaaaacttgcaagagaatattaatggtagctttagaagactcaggaggagaaactgacttcagagttggaagatgttgcaagtcgttcctttttctgtccttcagggactgaagaactgggaggctgcccattgtttggttgccagtcatacaaattaaaatcatatttccttccatgaatggaagaaacacactattggtttttccccttggaaacagcaatcccaaataatgtcggcttacaaaaaaaaaaagttaccacttttttagagtccttccctgtaacattggattttttttttcccttatgagatccacctaaggccattgacgtggcctgcgatctcagtgacaatgatctgcttctggatctcactgttgcctttggttagggaacacaactagtaactctgcagagtgccttctcccgcagccctactggaacacagcagagtctgtgccatgaagcagttacagaaacagaattgatgtgctgctaaaaaaaaaaaaaaaatggggcccgaaataaaagaatatatagtactcacctcagttccttccataagaagtgggtggtttaatgattgttaagccatttttgcctgtgccgggagcatggagggctgagatgtcgacaggcagtgggaaacaaatgccctcctaagccacaaggcgtgcgccagattagtaggcaactccattttaagaagctgcctttttcacaaaactggaagaaataaaagcggttggaataaacaagttaaaagtctttaatgcaaaaagtaattgaaaggcagtgcctccattttggtgtactttcttggaagaaagtataaaattgaccggcatcatgagagacggaagatgccgtgttctcagccaaacaagcaactctttccccgccaggcactgtcgggtggggtcaggccagcttttaaacactggggactggatcacagaaaaacagtggttttctgtccctggaaatgaataggcacaaagacccacttggctgtgggcagactactcttcaataagatttgggtgggaggaggaacattccttttgctattttgagctgagacaatataaatattcaaactgtgccatgcataaagcattgaattctcagggcacctcttcttccccttaccccttttaaggccatcccctccattaataataatccaggtagttgtgaaaatcgtgcttctatctgatcccttcttagtttggcttttcatcccatcagaacaagtaaacgtaggcgccacagctcttgtgagtactgtctccctcacggtgaatgagcctcctggtgtttcgtccaagaaaagaaagggtgtcactggaaccacagccctttttcattttataaactgcctcttcatgttgcctgctcaagtttccacctagaattgctatcactgtggctctttctaaaaatctttctatttaactggttcactgaaattagtcatagaaaacttgtgatttggtgaagaggcattccttgtaataaccaaatgacttgggatggtgtgcatagcaagggcagtgttacacttatgaggactgtctctagcatccaggaagtctctgggtctgagggatggaaagttcttcctgctatgaatgagagtggactcttcccctcacccccaactgaaaccacaaacaaccagaatcttctggaattctgacttagagtcgttgttatagaagaccttgttgctatggaacatgaaactgtgtgtcagatggagagatccccttaacctaagagccttaaatagccctgaaagtacactgggacggtttgcgatggaattaaaattggaagtgaatatttttaggtgctcttgaagctttctggggactcaaaattatcaaaagtcagggacagtccggaggaagagcgtctgcaaaactgggttcctagaagtatagacggacttagctttttgtagaatttggtgaggagcagcgcctcgtgagagcagaatggcctggcgtggccagtgcttcccggcagcacgcagctctgcggcctccagaattcccctgttctgagcttgatgcccctagcctgtcccctacctacttcctcccctcctctctagccctctcacaggggtgattgctacctctctgttttcttgggcctaggcaagttttagaggagttcccaagcattgttatgaggccagtgtgctcgctgggctgggcgggatggcctgggcttgtgtgtggcctgagggctctcctggggccttctcttttcccagtcacctttggagccacagaagcagtgcactcattggatgtctgttcttaacacagcttctctttctacattaaaaaaaatcattattgcattttggaaagcagtgctcatcaaaagcaacttttaaaacctattttattgttcctttaaatgttctctcccgctgaaactgccctggagaggctatctgctgctcttccatttacccacatcaggttattctccatgtcactcagtggagatgactccagatgtgtttaaagactggacaattcacctatactgtgtaggaaattacctccttaattacctggtagaattgtcagcagacatgttcatccgatgatagtactgcagttttctattaataatttgcagacttttatctaacctgcactcatgtacagattattaaaagttttaaaatgtaactgatcagtattgatcaatcattgtcttgatttttttttacagcgtatatttctaatcatattttttaaagccaagagaactggttgaatgaatgtttattttcctgaaggtatttttaagataaagcttcctaatggcgtgtaaactttgcatatgtatgtagtttgatacatattgtcacatttgaaaatcttgtgggttgtaactggttttatacaaaatatcgaatagtggaaattgtataattacaatcatgtaattaaaagtattaacccaa

SEQ ID NO: 371922 - DNA, 5552 bp, Homo sapiens
cacggaacagccctcctggggtccccacgagccgcgtcctgctgtgccccggcgcctacgcagcagcggccgcggccgcggtgggcacgcacggttaccccgggcagctccggccgccagctgcagccccgtcgcctcggccgcgccagccggctgcgggcacctgggggcgggctgggggcgccggccgcggcaggaggcgctgtagcgagggctgcggcgccggtcctgcggcggccgcgggaggcagcggggcaggcgctgtgggccgggctcctcctccggctcctgcgcgaccgcctcccgccgggctctgccggcgcccgccgtccccgcagcgccgctctgcgcccgccgccccgagcgcccgcgcggggctggcgggagcctcggcgggcgcgcgggcgcgcggggccatggtcgtggccccctgacgggccgcggccgcctccatgaagcggaaaagcgagcggcggtcgagctgggccgccgcgcccccctgctcgcggcgctgctcgtcgacctcgccgggtgtgaagaagatccgcagctccacgcagcaagacccgcgccgccgggacccccaggacgacgtgtacctggacatcaccgatcgcctttgttttgccattctctacagcagaccaaagagtgcatcaaatgtacattatttcagcatagataatgaacttgaatatgagaacttctacgcagattttggaccactcaatctggcaatggtttacagatattgttgcaagatcaataagaaattaaagtccattacaatgttaaggaagaaaattgttcattttactggctctgatcagagaaaacaagcaaatgctgccttccttgttggatgctacatggttatatatttggggagaaccccagaagaagcatatagaatattaatctttggagagacatcctatattcctttcagagatgctgcctatggaagttgcaatttctacattacacttcttgactgttttcatgcagtaaagaaggcaatgcagtatggcttccttaatttcaactcatttaaccttgatgaatatgaacactatgaaaaagcagaaaatggagatttaaattggataataccagaccgatttattgccttctgtggacctcattcaagagccagacttgaaagtggttaccaccaacattctcctgagacttatattcaatattttaagaatcacaatgttactaccattattcgtctgaataaaaggatgtatgatgccaaacgctttacggatgctggcttcgatcaccatgatcttttctttgcggatggcagcacccctactgatgccattgtcaaagaattcctagatatctgtgaaaatgctgagggtgccattgcagtacattgcaaagctggccttggtcgcacgggcactctgatagcctgctacatcatgaagcattacaggatgacagcagccgagaccattgcgtgggtcaggatctgcagacctggctcggtgattgggcctcagcagcagtttttggtgatgaagcaaaccaacctctggctggaaggggactattttcgtcagaagttaaaggggcaggagaatggacaacacagagcagccttctccaaacttctctctggcgttgatgacatttccataaatggggtcgagaatcaagatcagcaagaacccgaaccgtacagtgatgatgacgaaatcaatggagtgacacaaggtgatagacttcgggccttgaaaagcagaagacaatccaaaacaaacgctattcctctcacagtaattcttcaatccagtgttcagagctgtaaaacatctgaacctaacatttctggcagtgcaggcattactaaaagaaccaccagatctgcttcaaggaaaagcagtgttaaaagtctctccatttcaaggactaaaacagtcttgcgttaagtaaaaacctgtgaccagagctgaaggaagactctaggactgaaaactgcaacagaaattagcacaatttgaaaacaaaacaaaattgcaaaagccttagttgctttttccacctaagaagttgatcaatggagaaaatgtccactggagtttgaataatgaactttgagtttgggtgcaagcaaatgactcagagaagggtccagctctcaagctgaatgacaaacatgctgttgtaaatttagtctcaggtgtaaatacccaagccctctggtacccagggagctggctggtctgtggtgcatgtgtgtccctgtgatggcaatcattgtagttgctggccttcagaagaattgaggatctgatggaggttttttatgtatttattttctgttcaccttgtgaccctgtgtcaaaatttataaagatacaaaaggcattactgaaatggtactttctgtaatttgatactatttggcttaatcatcttcacttgactatttgtaatactgttgtaatgttaactctgttaagtacccaagctgcttgtcttccaccaaagagtgctttattaacaagaatctgtgaaaatcacatttaaacactgttgcatgttgtaagaccaggtggtaccttagtaacctaaaacttgcaagagaatattaatggtagctttagaagactcaggaggagaaactgacttcagagttggaagatgttgcaagtcgttcctttttctgtccttcagggactgaagaactgggaggctgcccattgtttggttgccagtcatacaaattaaaatcatatttccttccatgaatggaagaaacacactattggtttttccccttggaaacagcaatcccaaataatgtcggcttacaaaaaaaaaaagttaccacttttttagagtccttccctgtaacattggattttttttttcccttatgagatccacctaaggccattgacgtggcctgcgatctcagtgacaatgatctgcttctggatctcactgttgcctttggttagggaacacaactagtaactctgcagagtgccttctcccgcagccctactggaacacagcagagtctgtgccatgaagcagttacagaaacagaattgatgtgctgctaaaaaaaaaaaaaaaatggggcccgaaataaaagaatatatagtactcacctcagttccttccataagaagtgggtggtttaatgattgttaagccatttttgcctgtgccgggagcatggagggctgagatgtcgacaggcagtgggaaacaaatgccctcctaagccacaaggcgtgcgccagattagtaggcaactccattttaagaagctgcctttttcacaaaactggaagaaataaaagcggttggaataaacaagttaaaagtctttaatgcaaaaagtaattgaaaggcagtgcctccattttggtgtactttcttggaagaaagtataaaattgaccggcatcatgagagacggaagatgccgtgttctcagccaaacaagcaactctttccccgccaggcactgtcgggtggggtcaggccagcttttaaacactggggactggatcacagaaaaacagtggttttctgtccctggaaatgaataggcacaaagacccacttggctgtgggcagactactcttcaataagatttgggtgggaggaggaacattccttttgctattttgagctgagacaatataaatattcaaactgtgccatgcataaagcattgaattctcagggcacctcttcttccccttaccccttttaaggccatcccctccattaataataatccaggtagttgtgaaaatcgtgcttctatctgatcccttcttagtttggcttttcatcccatcagaacaagtaaacgtaggcgccacagctcttgtgagtactgtctccctcacggtgaatgagcctcctggtgtttcgtccaagaaaagaaagggtgtcactggaaccacagccctttttcattttataaactgcctcttcatgttgcctgctcaagtttccacctagaattgctatcactgtggctctttctaaaaatctttctatttaactggttcactgaaattagtcatagaaaacttgtgatttggtgaagaggcattccttgtaataaccaaatgacttgggatggtgtgcatagcaagggcagtgttacacttatgaggactgtctctagcatccaggaagtctctgggtctgagggatggaaagttcttcctgctatgaatgagagtggactcttcccctcacccccaactgaaaccacaaacaaccagaatcttctggaattctgacttagagtcgttgttatagaagaccttgttgctatggaacatgaaactgtgtgtcagatggagagatccccttaacctaagagccttaaatagccctgaaagtacactgggacggtttgcgatggaattaaaattggaagtgaatatttttaggtgctcttgaagctttctggggactcaaaattatcaaaagtcagggacagtccggaggaagagcgtctgcaaaactgggttcctagaagtatagacggacttagctttttgtagaatttggtgaggagcagcgcctcgtgagagcagaatggcctggcgtggccagtgcttcccggcagcacgcagctctgcggcctccagaattcccctgttctgagcttgatgcccctagcctgtcccctacctacttcctcccctcctctctagccctctcacaggggtgattgctacctctctgttttcttgggcctaggcaagttttagaggagttcccaagcattgttatgaggccagtgtgctcgctgggctgggcgggatggcctgggcttgtgtgtggcctgagggctctcctggggccttctcttttcccagtcacctttggagccacagaagcagtgcactcattggatgtctgttcttaacacagcttctctttctacattaaaaaaaatcattattgcattttggaaagcagtgctcatcaaaagcaacttttaaaacctattttattgttcctttaaatgttctctcccgctgaaactgccctggagaggctatctgctgctcttccatttacccacatcaggttattctccatgtcactcagtggagatgactccagatgtgtttaaagactggacaattcacctatactgtgtaggaaattacctccttaattacctggtagaattgtcagcagacatgttcatccgatgatagtactgcagttttctattaataatttgcagacttttatctaacctgcatgatcagtattgatcaatcattgtcttgatttttttttacagcgtatatttctaatcatattttttaaagccaagagaactggttgaatgaatgtttattttcctgaaggtatttttaagataaagcttcctaatggcgtgtaaactttgcatatgtatgtagtttgatacatattgtcacatttgaaaatcttgtgggttgtaactggttttatacaaaatatcgaatagtggaaattgtataattacaatcatgtaattaaaagtattaacccaa

SEQ ID NO: 371923 - DNA, 5615 bp, Homo sapiens
cacggaacagccctcctggggtccccacgagccgcgtcctgctgtgccccggcgcctacgcagcagcggccgcggccgcggtgggcacgcacggttaccccgggcagctccggccgccagctgcagccccgtcgcctcggccgcgccagccggctgcgggcacctgggggcgggctgggggcgccggccgcggcaggaggcgctgtagcgagggctgcggcgccggtcctgcggcggccgcgggaggcagcggggcaggcgctgtgggccgggctcctcctccggctcctgcgcgaccgcctcccgccgggctctgccggcgcccgccgtccccgcagcgccgctctgcgcccgccgccccgagcgcccgcgcggggctggcgggagcctcggcgggcgcgcgggcgcgcggggccatggtcgtggccccctgacgggccgcggccgcctccatgaagcggaaaagcgagcggcggtcgagctgggccgccgcgcccccctgctcgcggcgctgctcgtcgacctcgccgggtgtgaagaagatccgcagctccacgcagcaagacccgcgccgccgggacccccaggacgacgtgtacctggacatcaccgatcgcctttgttttgccattctctacagcagaccaaagagtgcatcaaatgtacattatttcagcatagataatgaacttgaatatgagaacttctacgcagattttggaccactcaatctggcaatggtttacagatattgttgcaagatcaataagaaattaaagtccattacaatgttaaggaagaaaattgttcattttactggctctgatcagagaaaacaagcaaatgctgccttccttgttggatgctacatggttatatatttggggagaaccccagaagaagcatatagaatattaatctttggagagacatcctatattcctttcagagatgctgcctatggaagttgcaatttctacattacacttcttgactgttttcatgcagtaaagaaggcaatgcagtatggcttccttaatttcaactcatttaaccttgatgaatatgaacactatgaaaaagcagaaaatggagatttaaattggataataccagaccgatttattgccttctgtggacctcattcaagagccagacttgaaagtggttaccaccaacattctcctgagacttatattcaatattttaagaatcacaatgttactaccattattcgtctgaataaaaggatgtatgatgccaaacgctttacggatgctggcttcgatcaccatgatcttttctttgcggatggcagcacccctactgatgccattgtcaaagaattcctagatatctgtgaaaatgctgagggtgccattgcagtacattgcaaagctggccttggtcgcacgggcactctgatagcctgctacatcatgaagcattacaggatgacagcagccgagaccattgcgtgggtcaggatctgcagacctggctcggtgattgggcctcagcagcagtttttggtgatgaagcaaaccaacctctggctggaaggggactattttcgtcagaagttaaaggggcaggagaatggacaacacagagcagccttctccaaacttctctctggcgttgatgacatttccataaatggggtcgagaatcaagatcagcaagaacccgaaccgtacagtgatgatgacgaaatcaatggagtgacacaaggtgatagacttcgggccttgaaaagcagaagacaatccaaaacaaacgctattcctctcacatgtcccctagctgtgctgacctctgcactgtgtagtgttgtcatctggtggattgtttgtgactacattcttcccatcctgctattctgtctcgatggtttcagaacacagtagccatcaggaccccctgacagatagctgcttctctccatttcaaggactaaaacagtcttgcgttaagtaaaaacctgtgaccagagctgaaggaagactctaggactgaaaactgcaacagaaattagcacaatttgaaaacaaaacaaaattgcaaaagccttagttgctttttccacctaagaagttgatcaatggagaaaatgtccactggagtttgaataatgaactttgagtttgggtgcaagcaaatgactcagagaagggtccagctctcaagctgaatgacaaacatgctgttgtaaatttagtctcaggtgtaaatacccaagccctctggtacccagggagctggctggtctgtggtgcatgtgtgtccctgtgatggcaatcattgtagttgctggccttcagaagaattgaggatctgatggaggttttttatgtatttattttctgttcaccttgtgaccctgtgtcaaaatttataaagatacaaaaggcattactgaaatggtactttctgtaatttgatactatttggcttaatcatcttcacttgactatttgtaatactgttgtaatgttaactctgttaagtacccaagctgcttgtcttccaccaaagagtgctttattaacaagaatctgtgaaaatcacatttaaacactgttgcatgttgtaagaccaggtggtaccttagtaacctaaaacttgcaagagaatattaatggtagctttagaagactcaggaggagaaactgacttcagagttggaagatgttgcaagtcgttcctttttctgtccttcagggactgaagaactgggaggctgcccattgtttggttgccagtcatacaaattaaaatcatatttccttccatgaatggaagaaacacactattggtttttccccttggaaacagcaatcccaaataatgtcggcttacaaaaaaaaaaagttaccacttttttagagtccttccctgtaacattggattttttttttcccttatgagatccacctaaggccattgacgtggcctgcgatctcagtgacaatgatctgcttctggatctcactgttgcctttggttagggaacacaactagtaactctgcagagtgccttctcccgcagccctactggaacacagcagagtctgtgccatgaagcagttacagaaacagaattgatgtgctgctaaaaaaaaaaaaaaaatggggcccgaaataaaagaatatatagtactcacctcagttccttccataagaagtgggtggtttaatgattgttaagccatttttgcctgtgccgggagcatggagggctgagatgtcgacaggcagtgggaaacaaatgccctcctaagccacaaggcgtgcgccagattagtaggcaactccattttaagaagctgcctttttcacaaaactggaagaaataaaagcggttggaataaacaagttaaaagtctttaatgcaaaaagtaattgaaaggcagtgcctccattttggtgtactttcttggaagaaagtataaaattgaccggcatcatgagagacggaagatgccgtgttctcagccaaacaagcaactctttccccgccaggcactgtcgggtggggtcaggccagcttttaaacactggggactggatcacagaaaaacagtggttttctgtccctggaaatgaataggcacaaagacccacttggctgtgggcagactactcttcaataagatttgggtgggaggaggaacattccttttgctattttgagctgagacaatataaatattcaaactgtgccatgcataaagcattgaattctcagggcacctcttcttccccttaccccttttaaggccatcccctccattaataataatccaggtagttgtgaaaatcgtgcttctatctgatcccttcttagtttggcttttcatcccatcagaacaagtaaacgtaggcgccacagctcttgtgagtactgtctccctcacggtgaatgagcctcctggtgtttcgtccaagaaaagaaagggtgtcactggaaccacagccctttttcattttataaactgcctcttcatgttgcctgctcaagtttccacctagaattgctatcactgtggctctttctaaaaatctttctatttaactggttcactgaaattagtcatagaaaacttgtgatttggtgaagaggcattccttgtaataaccaaatgacttgggatggtgtgcatagcaagggcagtgttacacttatgaggactgtctctagcatccaggaagtctctgggtctgagggatggaaagttcttcctgctatgaatgagagtggactcttcccctcacccccaactgaaaccacaaacaaccagaatcttctggaattctgacttagagtcgttgttatagaagaccttgttgctatggaacatgaaactgtgtgtcagatggagagatccccttaacctaagagccttaaatagccctgaaagtacactgggacggtttgcgatggaattaaaattggaagtgaatatttttaggtgctcttgaagctttctggggactcaaaattatcaaaagtcagggacagtccggaggaagagcgtctgcaaaactgggttcctagaagtatagacggacttagctttttgtagaatttggtgaggagcagcgcctcgtgagagcagaatggcctggcgtggccagtgcttcccggcagcacgcagctctgcggcctccagaattcccctgttctgagcttgatgcccctagcctgtcccctacctacttcctcccctcctctctagccctctcacaggggtgattgctacctctctgttttcttgggcctaggcaagttttagaggagttcccaagcattgttatgaggccagtgtgctcgctgggctgggcgggatggcctgggcttgtgtgtggcctgagggctctcctggggccttctcttttcccagtcacctttggagccacagaagcagtgcactcattggatgtctgttcttaacacagcttctctttctacattaaaaaaaatcattattgcattttggaaagcagtgctcatcaaaagcaacttttaaaacctattttattgttcctttaaatgttctctcccgctgaaactgccctggagaggctatctgctgctcttccatttacccacatcaggttattctccatgtcactcagtggagatgactccagatgtgtttaaagactggacaattcacctatactgtgtaggaaattacctccttaattacctggtagaattgtcagcagacatgttcatccgatgatagtactgcagttttctattaataatttgcagacttttatctaacctgcactcatgtacagattattaaaagttttaaaatgtaactgatcagtattgatcaatcattgtcttgatttttttttacagcgtatatttctaatcatattttttaaagccaagagaactggttgaatgaatgtttattttcctgaaggtatttttaagataaagcttcctaatggcgtgtaaactttgcatatgtatgtagtttgatacatattgtcacatttgaaaatcttgtgggttgtaactggttttatacaaaatatcgaatagtggaaattgtataattacaatcatgtaattaaaagtattaacccaa

SEQ ID NO: 371924 - DNA, 5221 bp, Homo sapiens
cgccttccagatgctttggagtcatgagccgggagggcgcgggggcagctttggtagccgaggtgatcaaaggaaggaacattgcaatttttccatttcagatcgcctttgttttgccattctctacagcagaccaaagagtgcatcaaatgtacattatttcagcatagataatgaacttgaatatgagaacttctacgcagattttggaccactcaatctggcaatggtttacagatattgttgcaagatcaataagaaattaaagtccattacaatgttaaggaagaaaattgttcattttactggctctgatcagagaaaacaagcaaatgctgccttccttgttggatgctacatggttatatatttggggagaaccccagaagaagcatatagaatattaatctttggagagacatcctatattcctttcagagatgctgcctatggaagttgcaatttctacattacacttcttgactgttttcatgcagtaaagaaggcaatgcagtatggcttccttaatttcaactcatttaaccttgatgaatatgaacactatgaaaaagcagaaaatggagatttaaattggataataccagaccgatttattgccttctgtggacctcattcaagagccagacttgaaagtggttaccaccaacattctcctgagacttatattcaatattttaagaatcacaatgttactaccattattcgtctgaataaaaggatgtatgatgccaaacgctttacggatgctggcttcgatcaccatgatcttttctttgcggatggcagcacccctactgatgccattgtcaaagaattcctagatatctgtgaaaatgctgagggtgccattgcagtacattgcaaagctggccttggtcgcacgggcactctgatagcctgctacatcatgaagcattacaggatgacagcagccgagaccattgcgtgggtcaggatctgcagacctggctcggtgattgggcctcagcagcagtttttggtgatgaagcaaaccaacctctggctggaaggggactattttcgtcagaagttaaaggggcaggagaatggacaacacagagcagccttctccaaacttctctctggcgttgatgacatttccataaatggggtcgagaatcaagatcagcaagaacccgaaccgtacagtgatgatgacgaaatcaatggagtgacacaaggtgatagacttcgggccttgaaaagcagaagacaatccaaaacaaacgctattcctctcacatgtcccctagctgtgctgacctctgcactgtgtagtgttgtcatctggtggattgtttgtgactacattcttcccatcctgctattctgtctcgatggtttcagaacacagtagccatcaggaccccctgacagatagctgctagtaattcttcaatccagtgttcagagctgtaaaacatctgaacctaacatttctggcagtgcaggcattactaaaagaaccaccagatctgcttcaaggaaaagcagtgttaaaagtctctccatttcaaggactaaaacagtcttgcgttaagtaaaaacctgtgaccagagctgaaggaagactctaggactgaaaactgcaacagaaattagcacaatttgaaaacaaaacaaaattgcaaaagccttagttgctttttccacctaagaagttgatcaatggagaaaatgtccactggagtttgaataatgaactttgagtttgggtgcaagcaaatgactcagagaagggtccagctctcaagctgaatgacaaacatgctgttgtaaatttagtctcaggtgtaaatacccaagccctctggtacccagggagctggctggtctgtggtgcatgtgtgtccctgtgatggcaatcattgtagttgctggccttcagaagaattgaggatctgatggaggttttttatgtatttattttctgttcaccttgtgaccctgtgtcaaaatttataaagatacaaaaggcattactgaaatggtactttctgtaatttgatactatttggcttaatcatcttcacttgactatttgtaatactgttgtaatgttaactctgttaagtacccaagctgcttgtcttccaccaaagagtgctttattaacaagaatctgtgaaaatcacatttaaacactgttgcatgttgtaagaccaggtggtaccttagtaacctaaaacttgcaagagaatattaatggtagctttagaagactcaggaggagaaactgacttcagagttggaagatgttgcaagtcgttcctttttctgtccttcagggactgaagaactgggaggctgcccattgtttggttgccagtcatacaaattaaaatcatatttccttccatgaatggaagaaacacactattggtttttccccttggaaacagcaatcccaaataatgtcggcttacaaaaaaaaaaagttaccacttttttagagtccttccctgtaacattggattttttttttcccttatgagatccacctaaggccattgacgtggcctgcgatctcagtgacaatgatctgcttctggatctcactgttgcctttggttagggaacacaactagtaactctgcagagtgccttctcccgcagccctactggaacacagcagagtctgtgccatgaagcagttacagaaacagaattgatgtgctgctaaaaaaaaaaaaaaaatggggcccgaaataaaagaatatatagtactcacctcagttccttccataagaagtgggtggtttaatgattgttaagccatttttgcctgtgccgggagcatggagggctgagatgtcgacaggcagtgggaaacaaatgccctcctaagccacaaggcgtgcgccagattagtaggcaactccattttaagaagctgcctttttcacaaaactggaagaaataaaagcggttggaataaacaagttaaaagtctttaatgcaaaaagtaattgaaaggcagtgcctccattttggtgtactttcttggaagaaagtataaaattgaccggcatcatgagagacggaagatgccgtgttctcagccaaacaagcaactctttccccgccaggcactgtcgggtggggtcaggccagcttttaaacactggggactggatcacagaaaaacagtggttttctgtccctggaaatgaataggcacaaagacccacttggctgtgggcagactactcttcaataagatttgggtgggaggaggaacattccttttgctattttgagctgagacaatataaatattcaaactgtgccatgcataaagcattgaattctcagggcacctcttcttccccttaccccttttaaggccatcccctccattaataataatccaggtagttgtgaaaatcgtgcttctatctgatcccttcttagtttggcttttcatcccatcagaacaagtaaacgtaggcgccacagctcttgtgagtactgtctccctcacggtgaatgagcctcctggtgtttcgtccaagaaaagaaagggtgtcactggaaccacagccctttttcattttataaactgcctcttcatgttgcctgctcaagtttccacctagaattgctatcactgtggctctttctaaaaatctttctatttaactggttcactgaaattagtcatagaaaacttgtgatttggtgaagaggcattccttgtaataaccaaatgacttgggatggtgtgcatagcaagggcagtgttacacttatgaggactgtctctagcatccaggaagtctctgggtctgagggatggaaagttcttcctgctatgaatgagagtggactcttcccctcacccccaactgaaaccacaaacaaccagaatcttctggaattctgacttagagtcgttgttatagaagaccttgttgctatggaacatgaaactgtgtgtcagatggagagatccccttaacctaagagccttaaatagccctgaaagtacactgggacggtttgcgatggaattaaaattggaagtgaatatttttaggtgctcttgaagctttctggggactcaaaattatcaaaagtcagggacagtccggaggaagagcgtctgcaaaactgggttcctagaagtatagacggacttagctttttgtagaatttggtgaggagcagcgcctcgtgagagcagaatggcctggcgtggccagtgcttcccggcagcacgcagctctgcggcctccagaattcccctgttctgagcttgatgcccctagcctgtcccctacctacttcctcccctcctctctagccctctcacaggggtgattgctacctctctgttttcttgggcctaggcaagttttagaggagttcccaagcattgttatgaggccagtgtgctcgctgggctgggcgggatggcctgggcttgtgtgtggcctgagggctctcctggggccttctcttttcccagtcacctttggagccacagaagcagtgcactcattggatgtctgttcttaacacagcttctctttctacattaaaaaaaatcattattgcattttggaaagcagtgctcatcaaaagcaacttttaaaacctattttattgttcctttaaatgttctctcccgctgaaactgccctggagaggctatctgctgctcttccatttacccacatcaggttattctccatgtcactcagtggagatgactccagatgtgtttaaagactggacaattcacctatactgtgtaggaaattacctccttaattacctggtagaattgtcagcagacatgttcatccgatgatagtactgcagttttctattaataatttgcagacttttatctaacctgcactcatgtacagattattaaaagttttaaaatgtaactgatcagtattgatcaatcattgtcttgatttttttttacagcgtatatttctaatcatattttttaaagccaagagaactggttgaatgaatgtttattttcctgaaggtatttttaagataaagcttcctaatggcgtgtaaactttgcatatgtatgtagtttgatacatattgtcacatttgaaaatcttgtgggttgtaactggttttatacaaaatatcgaatagtggaaattgtataattacaatcatgtaattaaaagtattaacccaa

SEQ ID NO: 371925 - DNA, 5575 bp, Homo sapiens
ctttctaagttgcgggcgtcagcccggcgcctcgaacctgcagctcctccccgcgggctgcttctgagttcctgtggattccgccttcagggattgcgagcccggttggccctcgcgcgagtcacaacctctgaatcagcccctgaggattccccgagcgcgctgaacgcgcctggcacgggagctgcccctttttggcgttggccaaacccccgctgctccgtagccttgggaccctgggcgccgcgttgcccgtccggcgcgtaagcccgagcccctctcctgggcctcccgcgccctgccccctagcgcgccccccgaacgcctccgcctcccggggtccgctccccgccggggcctcgagaaggaaggtgtcacgttggtggcattcgagccagccggcaagacgaatgtccgggttgtcacttttgagaaatcccagccagccagagcagatcgcctttgttttgccattctctacagcagaccaaagagtgcatcaaatgtacattatttcagcatagataatgaacttgaatatgagaacttctacgcagattttggaccactcaatctggcaatggtttacagatattgttgcaagatcaataagaaattaaagtccattacaatgttaaggaagaaaattgttcattttactggctctgatcagagaaaacaagcaaatgctgccttccttgttggatgctacatggttatatatttggggagaaccccagaagaagcatatagaatattaatctttggagagacatcctatattcctttcagagatgctgcctatggaagttgcaatttctacattacacttcttgactgttttcatgcagtaaagaaggcaatgcagtatggcttccttaatttcaactcatttaaccttgatgaatatgaacactatgaaaaagcagaaaatggagatttaaattggataataccagaccgatttattgccttctgtggacctcattcaagagccagacttgaaagtggttaccaccaacattctcctgagacttatattcaatattttaagaatcacaatgttactaccattattcgtctgaataaaaggatgtatgatgccaaacgctttacggatgctggcttcgatcaccatgatcttttctttgcggatggcagcacccctactgatgccattgtcaaagaattcctagatatctgtgaaaatgctgagggtgccattgcagtacattgcaaagctggccttggtcgcacgggcactctgatagcctgctacatcatgaagcattacaggatgacagcagccgagaccattgcgtgggtcaggatctgcagacctggctcggtgattgggcctcagcagcagtttttggtgatgaagcaaaccaacctctggctggaaggggactattttcgtcagaagttaaaggggcaggagaatggacaacacagagcagccttctccaaacttctctctggcgttgatgacatttccataaatggggtcgagaatcaagatcagcaagaacccgaaccgtacagtgatgatgacgaaatcaatggagtgacacaaggtgatagacttcgggccttgaaaagcagaagacaatccaaaacaaacgctattcctctcacatgtcccctagctgtgctgacctctgcactgtgtagtgttgtcatctggtggattgtttgtgactacattcttcccatcctgctattctgtctcgatggtttcagaacacagtagccatcaggaccccctgacagatagctgctagtaattcttcaatccagtgttcagagctgtaaaacatctgaacctaacatttctggcagtgcaggcattactaaaagaaccaccagatctgcttcaaggaaaagcagtgttaaaagtctctccatttcaaggactaaaacagtcttgcgttaagtaaaaacctgtgaccagagctgaaggaagactctaggactgaaaactgcaacagaaattagcacaatttgaaaacaaaacaaaattgcaaaagccttagttgctttttccacctaagaagttgatcaatggagaaaatgtccactggagtttgaataatgaactttgagtttgggtgcaagcaaatgactcagagaagggtccagctctcaagctgaatgacaaacatgctgttgtaaatttagtctcaggtgtaaatacccaagccctctggtacccagggagctggctggtctgtggtgcatgtgtgtccctgtgatggcaatcattgtagttgctggccttcagaagaattgaggatctgatggaggttttttatgtatttattttctgttcaccttgtgaccctgtgtcaaaatttataaagatacaaaaggcattactgaaatggtactttctgtaatttgatactatttggcttaatcatcttcacttgactatttgtaatactgttgtaatgttaactctgttaagtacccaagctgcttgtcttccaccaaagagtgctttattaacaagaatctgtgaaaatcacatttaaacactgttgcatgttgtaagaccaggtggtaccttagtaacctaaaacttgcaagagaatattaatggtagctttagaagactcaggaggagaaactgacttcagagttggaagatgttgcaagtcgttcctttttctgtccttcagggactgaagaactgggaggctgcccattgtttggttgccagtcatacaaattaaaatcatatttccttccatgaatggaagaaacacactattggtttttccccttggaaacagcaatcccaaataatgtcggcttacaaaaaaaaaaagttaccacttttttagagtccttccctgtaacattggattttttttttcccttatgagatccacctaaggccattgacgtggcctgcgatctcagtgacaatgatctgcttctggatctcactgttgcctttggttagggaacacaactagtaactctgcagagtgccttctcccgcagccctactggaacacagcagagtctgtgccatgaagcagttacagaaacagaattgatgtgctgctaaaaaaaaaaaaaaaatggggcccgaaataaaagaatatatagtactcacctcagttccttccataagaagtgggtggtttaatgattgttaagccatttttgcctgtgccgggagcatggagggctgagatgtcgacaggcagtgggaaacaaatgccctcctaagccacaaggcgtgcgccagattagtaggcaactccattttaagaagctgcctttttcacaaaactggaagaaataaaagcggttggaataaacaagttaaaagtctttaatgcaaaaagtaattgaaaggcagtgcctccattttggtgtactttcttggaagaaagtataaaattgaccggcatcatgagagacggaagatgccgtgttctcagccaaacaagcaactctttccccgccaggcactgtcgggtggggtcaggccagcttttaaacactggggactggatcacagaaaaacagtggttttctgtccctggaaatgaataggcacaaagacccacttggctgtgggcagactactcttcaataagatttgggtgggaggaggaacattccttttgctattttgagctgagacaatataaatattcaaactgtgccatgcataaagcattgaattctcagggcacctcttcttccccttaccccttttaaggccatcccctccattaataataatccaggtagttgtgaaaatcgtgcttctatctgatcccttcttagtttggcttttcatcccatcagaacaagtaaacgtaggcgccacagctcttgtgagtactgtctccctcacggtgaatgagcctcctggtgtttcgtccaagaaaagaaagggtgtcactggaaccacagccctttttcattttataaactgcctcttcatgttgcctgctcaagtttccacctagaattgctatcactgtggctctttctaaaaatctttctatttaactggttcactgaaattagtcatagaaaacttgtgatttggtgaagaggcattccttgtaataaccaaatgacttgggatggtgtgcatagcaagggcagtgttacacttatgaggactgtctctagcatccaggaagtctctgggtctgagggatggaaagttcttcctgctatgaatgagagtggactcttcccctcacccccaactgaaaccacaaacaaccagaatcttctggaattctgacttagagtcgttgttatagaagaccttgttgctatggaacatgaaactgtgtgtcagatggagagatccccttaacctaagagccttaaatagccctgaaagtacactgggacggtttgcgatggaattaaaattggaagtgaatatttttaggtgctcttgaagctttctggggactcaaaattatcaaaagtcagggacagtccggaggaagagcgtctgcaaaactgggttcctagaagtatagacggacttagctttttgtagaatttggtgaggagcagcgcctcgtgagagcagaatggcctggcgtggccagtgcttcccggcagcacgcagctctgcggcctccagaattcccctgttctgagcttgatgcccctagcctgtcccctacctacttcctcccctcctctctagccctctcacaggggtgattgctacctctctgttttcttgggcctaggcaagttttagaggagttcccaagcattgttatgaggccagtgtgctcgctgggctgggcgggatggcctgggcttgtgtgtggcctgagggctctcctggggccttctcttttcccagtcacctttggagccacagaagcagtgcactcattggatgtctgttcttaacacagcttctctttctacattaaaaaaaatcattattgcattttggaaagcagtgctcatcaaaagcaacttttaaaacctattttattgttcctttaaatgttctctcccgctgaaactgccctggagaggctatctgctgctcttccatttacccacatcaggttattctccatgtcactcagtggagatgactccagatgtgtttaaagactggacaattcacctatactgtgtaggaaattacctccttaattacctggtagaattgtcagcagacatgttcatccgatgatagtactgcagttttctattaataatttgcagacttttatctaacctgcactcatgtacagattattaaaagttttaaaatgtaactgatcagtattgatcaatcattgtcttgatttttttttacagcgtatatttctaatcatattttttaaagccaagagaactggttgaatgaatgtttattttcctgaaggtatttttaagataaagcttcctaatggcgtgtaaactttgcatatgtatgtagtttgatacatattgtcacatttgaaaatcttgtgggttgtaactggttttatacaaaatatcgaatagtggaaattgtataattacaatcatgtaattaaaagtattaacccaa

SEQ ID NO: 371926 - DNA, 5677 bp, Homo sapiens
cacggaacagccctcctggggtccccacgagccgcgtcctgctgtgccccggcgcctacgcagcagcggccgcggccgcggtgggcacgcacggttaccccgggcagctccggccgccagctgcagccccgtcgcctcggccgcgccagccggctgcgggcacctgggggcgggctgggggcgccggccgcggcaggaggcgctgtagcgagggctgcggcgccggtcctgcggcggccgcgggaggcagcggggcaggcgctgtgggccgggctcctcctccggctcctgcgcgaccgcctcccgccgggctctgccggcgcccgccgtccccgcagcgccgctctgcgcccgccgccccgagcgcccgcgcggggctggcgggagcctcggcgggcgcgcgggcgcgcggggccatggtcgtggccccctgacgggccgcggccgcctccatgaagcggaaaagcgagcggcggtcgagctgggccgccgcgcccccctgctcgcggcgctgctcgtcgacctcgccgggtgtgaagaagatccgcagctccacgcagcaagacccgcgccgccgggacccccaggacgacgtgtacctggacatcaccgatcgcctttgttttgccattctctacagcagaccaaagagtgcatcaaatgtacattatttcagcatagataatgaacttgaatatgagaacttctacgcagattttggaccactcaatctggcaatggtttacagatattgttgcaagatcaataagaaattaaagtccattacaatgttaaggaagaaaattgttcattttactggctctgatcagagaaaacaagcaaatgctgccttccttgttggatgctacatggttatatatttggggagaaccccagaagaagcatatagaatattaatctttggagagacatcctatattcctttcagagatgctgcctatggaagttgcaatttctacattacacttcttgactgttttcatgcagtaaagaaggcaatgcagtatggcttccttaatttcaactcatttaaccttgatgaatatgaacactatgaaaaagcagaaaatggagatttaaattggataataccagaccgatttattgccttctgtggacctcattcaagagccagacttgaaagtggttaccaccaacattctcctgagacttatattcaatattttaagaatcacaatgttactaccattattcgtctgaataaaaggatgtatgatgccaaacgctttacggatgctggcttcgatcaccatgatcttttctttgcggatggcagcacccctactgatgccattgtcaaagaattcctagatatctgtgaaaatgctgagggtgccattgcagtacattgcaaagctggccttggtcgcacgggcactctgatagcctgctacatcatgaagcattacaggatgacagcagccgagaccattgcgtgggtcaggatctgcagacctggctcggtgattgggcctcagcagcagtttttggtgatgaagcaaaccaacctctggctggaaggggactattttcgtcagaagttaaaggggcaggagaatggacaacacagagcagccttctccaaacttctctctggcgttgatgacatttccataaatggggtcgagaatcaagatcagcaagaacccgaaccgtacagtgatgatgacgaaatcaatggagtgacacaaggtgatagacttcgggccttgaaaagcagaagacaatccaaaacaaacgctattcctctcacatgtcccctagctgtgctgacctctgcactgtgtagtgttgtcatctggtggattgtttgtgactacattcttcccatcctgctattctgtctcgatggtttcagaacacagtagccatcaggaccccctgacagatagctgctagtaattcttcaatccagtgttcagagctgtaaaacatctgaacctaacatttctggcagtgcaggcattactaaaagaaccaccagatctgcttcaaggaaaagcagtgttaaaagtctctccatttcaaggactaaaacagtcttgcgttaagtaaaaacctgtgaccagagctgaaggaagactctaggactgaaaactgcaacagaaattagcacaatttgaaaacaaaacaaaattgcaaaagccttagttgctttttccacctaagaagttgatcaatggagaaaatgtccactggagtttgaataatgaactttgagtttgggtgcaagcaaatgactcagagaagggtccagctctcaagctgaatgacaaacatgctgttgtaaatttagtctcaggtgtaaatacccaagccctctggtacccagggagctggctggtctgtggtgcatgtgtgtccctgtgatggcaatcattgtagttgctggccttcagaagaattgaggatctgatggaggttttttatgtatttattttctgttcaccttgtgaccctgtgtcaaaatttataaagatacaaaaggcattactgaaatggtactttctgtaatttgatactatttggcttaatcatcttcacttgactatttgtaatactgttgtaatgttaactctgttaagtacccaagctgcttgtcttccaccaaagagtgctttattaacaagaatctgtgaaaatcacatttaaacactgttgcatgttgtaagaccaggtggtaccttagtaacctaaaacttgcaagagaatattaatggtagctttagaagactcaggaggagaaactgacttcagagttggaagatgttgcaagtcgttcctttttctgtccttcagggactgaagaactgggaggctgcccattgtttggttgccagtcatacaaattaaaatcatatttccttccatgaatggaagaaacacactattggtttttccccttggaaacagcaatcccaaataatgtcggcttacaaaaaaaaaaagttaccacttttttagagtccttccctgtaacattggattttttttttcccttatgagatccacctaaggccattgacgtggcctgcgatctcagtgacaatgatctgcttctggatctcactgttgcctttggttagggaacacaactagtaactctgcagagtgccttctcccgcagccctactggaacacagcagagtctgtgccatgaagcagttacagaaacagaattgatgtgctgctaaaaaaaaaaaaaaaatggggcccgaaataaaagaatatatagtactcacctcagttccttccataagaagtgggtggtttaatgattgttaagccatttttgcctgtgccgggagcatggagggctgagatgtcgacaggcagtgggaaacaaatgccctcctaagccacaaggcgtgcgccagattagtaggcaactccattttaagaagctgcctttttcacaaaactggaagaaataaaagcggttggaataaacaagttaaaagtctttaatgcaaaaagtaattgaaaggcagtgcctccattttggtgtactttcttggaagaaagtataaaattgaccggcatcatgagagacggaagatgccgtgttctcagccaaacaagcaactctttccccgccaggcactgtcgggtggggtcaggccagcttttaaacactggggactggatcacagaaaaacagtggttttctgtccctggaaatgaataggcacaaagacccacttggctgtgggcagactactcttcaataagatttgggtgggaggaggaacattccttttgctattttgagctgagacaatataaatattcaaactgtgccatgcataaagcattgaattctcagggcacctcttcttccccttaccccttttaaggccatcccctccattaataataatccaggtagttgtgaaaatcgtgcttctatctgatcccttcttagtttggcttttcatcccatcagaacaagtaaacgtaggcgccacagctcttgtgagtactgtctccctcacggtgaatgagcctcctggtgtttcgtccaagaaaagaaagggtgtcactggaaccacagccctttttcattttataaactgcctcttcatgttgcctgctcaagtttccacctagaattgctatcactgtggctctttctaaaaatctttctatttaactggttcactgaaattagtcatagaaaacttgtgatttggtgaagaggcattccttgtaataaccaaatgacttgggatggtgtgcatagcaagggcagtgttacacttatgaggactgtctctagcatccaggaagtctctgggtctgagggatggaaagttcttcctgctatgaatgagagtggactcttcccctcacccccaactgaaaccacaaacaaccagaatcttctggaattctgacttagagtcgttgttatagaagaccttgttgctatggaacatgaaactgtgtgtcagatggagagatccccttaacctaagagccttaaatagccctgaaagtacactgggacggtttgcgatggaattaaaattggaagtgaatatttttaggtgctcttgaagctttctggggactcaaaattatcaaaagtcagggacagtccggaggaagagcgtctgcgagcagcgcctcgtgagagcagaatggcctggcgtggccagtgcttcccggcagcacgcagctctgcggcctccagaattcccctgttctgagcttgatgcccctagcctgtcccctacctacttcctcccctcctctctagccctctcacaggggtgattgctacctctctgttttcttgggcctaggcaagttttagaggagttcccaagcattgttatgaggccagtgtgctcgctgggctgggcgggatggcctgggcttgtgtgtggcctgagggctctcctggggccttctcttttcccagtcacctttggagccacagaagcagtgcactcattggatgtctgttcttaacacagcttctctttctacattaaaaaaaatcattattgcattttggaaagcagtgctcatcaaaagcaacttttaaaacctattttattgttcctttaaatgttctctcccgctgaaactgccctggagaggctatctgctgctcttccatttacccacatcaggttattctccatgtcactcagtggagatgactccagatgtgtttaaagactggacaattcacctatactgtgtaggaaattacctccttaattacctggtagaattgtcagcagacatgttcatccgatgatagtactgcagttttctattaataatttgcagacttttatctaacctgcactcatgtacagattattaaaagttttaaaatgtaactgatcagtattgatcaatcattgtcttgatttttttttacagcgtatatttctaatcatattttttaaagccaagagaactggttgaatgaatgtttattttcctgaaggtatttttaagataaagcttcctaatggcgtgtaaactttgcatatgtatgtagtttgatacatattgtcacatttgaaaatcttgtgggttgtaactggttttatacaaaatatcgaatagtggaaattgtataattacaatcatgtaattaaaagtattaacccaa

SEQ ID NO: 371927 - DNA, 5471 bp, Homo sapiens
cacggaacagccctcctggggtccccacgagccgcgtcctgctgtgccccggcgcctacgcagcagcggccgcggccgcggtgggcacgcacggttaccccgggcagctccggccgccagctgcagccccgtcgcctcggccgcgccagccggctgcgggcacctgggggcgggctgggggcgccggccgcggcaggaggcgctgtagcgagggctgcggcgccggtcctgcggcggccgcgggaggcagcggggcaggcgctgtgggccgggctcctcctccggctcctgcgcgaccgcctcccgccgggctctgccggcgcccgccgtccccgcagcgccgctctgcgcccgccgccccgagcgcccgcgcggggctggcgggagcctcggcgggcgcgcgggcgcgcggggccatggtcgtggccccctgacgggccgcggccgcctccatgaagcggaaaagcgagcggcggtcgagctgggccgccgcgcccccctgctcgcggcgctgctcgtcgacctcgccgggtgtgaagaagatccgcagctccacgcagcaagacccgcgccgccgggacccccaggacgacgtgtacctggacatcaccgatcgcctttgttttgccattctctacagcagaccaaagagtgcatcaaatgtacattatttcagcatagataatgaacttgaatatgagaacttctacgcagattttggaccactcaatctggcaatggtttacagatattgttgcaagatcaataagaaattaaagtccattacaatgttaaggaagaaaattgttcattttactggctctgatcagagaaaacaagcaaatgctgccttccttgttggatgctacatggttatatatttggggagaaccccagaagaagcatatagaatattaatctttggagagacatcctatattcctttcagagatgctgcctatggaagttgcaatttctacattacacttcttgactgttttcatgcagtaaagaaggcaatgcagtatggcttccttaatttcaactcatttaaccttgatgaatatgaacactatgaaaaagcagaaaatggagatttaaattggataataccagaccgatttattgccttctgtggacctcattcaagagccagacttgaaagtggttaccaccaacattctcctgagacttatattcaatattttaagaatcacaatgttactaccattattcgtctgaataaaaggatgtatgatgccaaacgctttacggatgctggcttcgatcaccatgatcttttctttgcggatggcagcacccctactgatgccattgtcaaagaattcctagatatctgtgaaaatgctgagggtgccattgcagtacattgcaaagctggccttggtcgcacgggcactctgatagcctgctacatcatgaagcattacaggatgacagcagccgagaccattgcgtgggtcaggatctgcagacctggctcggtgattgggcctcagcagcagtttttggtgatgaagcaaaccaacctctggctggaaggggactattttcgtcagaagttaaaggggcaggagaatggacaacacagagcagccttctccaaacttctctctggcgttgatgacatttccataaatggggtcgagaatcaagatcagcaagaacccgaaccgtacagtgatgatgacgaaatcaatggagtgacacaaggtgatagacttcgggccttgaaaagcagaagacaatccaaaacaaacgctattcctctcaccgatggttggctgtcccaggctgtcacctttctagaccggcttctgatctggctcgggatccacaaggactagacctgcggggaaggtctctcctggacacgcccgttgcccactgcaagttctctccaggtgcaattgaagcctctcagcagcggaggccgccatgtggagagagcaggcaggcccactgctgctgagaacagggcaggcacgggcagctcctgttctgcctttcccagcttcggagacgcaggctcagctgctccgaagcacctgccagcaccgcacagtacagtttcagaggacagcagtctccttcccgtgaagctcccatgtgctggaatggcatggacttgctgatcaacagaaggaaatggtctgaagtctgaccagcacaaggaaggaggctggctggctcagaggggcccaccttgcgtggaatgaaaacgccaaaggctcatgagcaacattaggctagaggggtcttgttcaaagcatccaactctgacttcggaggcattcccagccggcagcagtgtgtccagcctgcctcttcccaggctggtctgacatgcagcttaggctttcatcccaagttaggtactgacccctccctcttgggcagcacctccctttttaaaaaaatttttttttcttccaaagacagagtcttgctcttgttgtccaggctggagtgcagtggcgcgatctaggctcactgcaacctccttctcccaggttcaagcgactctcctgcctcagcctcctgagtagctgggattataggcgtctgccaccacgcccggctaatttctgtatttttagtagagacagggtttcaccatgttggccaggctggtctcgaactcctgacctcaagtgatctgcctgccttggcctcccaaagtgctgggattacaggtgtcagccaccgcacccagccaagcacccctatctctagaggatctggccccccagcccagttactgcagggcagctttccccacctggtgacaggctgtgcgcagcagccccaggacctcaccctgagctgagtcttcaggagccgccctggtggcacaactcagacacccctgaggcctagcagtcaactcctgattcagacatgatccagtccagcctgggcttggctataaccagctcaaacttgcttgacctccacttttcaggagacttggggacgacagccctcatcggcgtctttcatggggttaatctgcttgagtctaagtcgccagccagaaacgtggtgcccagggtgccctgcctcaggacatgtccacacccacgtcacaagcacctgaggagtccggccggggcactgtggtccaaaaggtcctgccgcctccgcatctgactgtcccaacggcatgctggtgacacccccctgcccttcgcttctgtcctccctggcttctctggggcacttggggctatgtacaacctggcacgatccagaaagggtgcaaacaaaatgcctacatccaggcacacgaccaagtcagcgagagctagccctggtaagcaaacatagcccattacaggttcagaacgtgcaccgggttccccaaaactgtcttcaaccacatgactcaacagctctatgggataggaactgtcagtgtttttgcaactgcaacattaaaccaagtgctgtgggcttttcaagtattattcacaacactaaaggaaagtttcttcaaagggctctctggctaatcttcaaagccgcagttaggcaaaatgacagtgtgacagcttcaaagccactgactcatgacacagccctgatgttgtaccggctaggttcagatttcagaaatcagggcacttgcatccattgccttttccaggaaagggaagaaaacactcagttgataaaccttagtactcagataataaataagagaccaaaagtaggctatcacccaaagcaaacatccttaactgaccctaacgtgtatggattcaactttgattattcaacaaaatcatgaccgactgctgtggcctggagtaaccaaaggactgttttctctacacaaagtcaggagcgaataccaacctttatttgcacttgggttccagttcaaagccaccttagacagtgtggcaaagtgggaaaaagcacagatcctgggaccaaggttcagattccatctcaagcgagcatatgaactgtgtgacaacaggcagacagtacctctgtgtctatgagaaagcggggagagcaacaccccagcttctagcagctctacagctgcctggacctgcaggccctcctaggcccacttcctccccagcacagtgtgtgttcccgggcgtgtgtggctctgggtccagctctgttcagggtgggactccaggtgaattactgaacctctgaggtgtacccccaaccccaaactttcaccaaaagcaataaagaggaactctagaactggagccaggactaagtgagaaaaactgcttataagtgcttaataaatactagttatttacaacttttgctcaagccgagggcagaggcctttgtacgcagctgccgaactctgactctagttctgcggaagaaaaggatgcggtatttgcttttgccatgatccctttccatttgattggcaggttaaataacatggtttttgaagtcacatacttaatattcttcctctcggccttctctttcttggctcgctcacggtcgtggctcttcttgggtgaagatgaggagtgtctgtgcctctccttctctttcagcttctcagggaggcaggcgctctccctcggcttgtcgtctccaggtggctccgtgaaagagacctccaggaaggcagtcagccccggctcctgccctcggtccgtgaagctgtcagaggagacctcgctgattttatcgttggagtcttctctgtactcatggagagcctcttcttccaacttttcaagcaggcttttttccgcgtcggcacttctcgaggacttcctctccttggaatgttctttgtccgacttctctttgtgtttgcttttagccttgtcttcggcagcgtgcttcttttcagccttctcggggagcttctgtttatttttcttatcttgcgtggagtccactgaggctctgtccttcctgtccttgtacttttctgtggactctttatccttcttctccttgtgcttttcaaagactttctcctttttgtctctccccgcgtcggcagcccctcggtcctttctcctgtctctgggctccttgtccttctgcctctcagggtgctgcttgtcagaagacttcctgtgtctgtcggaggcataggcctcccgtccttcctccttctcctggaggccgtccgtcctcggcaagtcgctggcctctcccatcttgaacccgctccccatgcagctgtctctgtcgtcctcactctcatctgtgaagatgtctgcgatgtaccagcttttctctttgcctttcttgtcatcttttttttcagagaagtcttctgagatgatcccagggaaagccttctccttcttctctttcccttggtcgagagacgctttcctttctttgtctttgccatgtgtgtctttatgtttttccttggtatcttttttctctttaaaacatttatcaaattctttgtccttctgacattt

SEQ ID NO: 371928 - DNA, 2460 bp, Homo sapiens
cacggaacagccctcctggggtccccacgagccgcgtcctgctgtgccccggcgcctacgcagcagcggccgcggccgcggtgggcacgcacggttaccccgggcagctccggccgccagctgcagccccgtcgcctcggccgcgccagccggctgcgggcacctgggggcgggctgggggcgccggccgcggcaggaggcgctgtagcgagggctgcggcgccggtcctgcggcggccgcgggaggcagcggggcaggcgctgtgggccgggctcctcctccggctcctgcgcgaccgcctcccgccgggctctgccggcgcccgccgtccccgcagcgccgctctgcgcccgccgccccgagcgcccgcgcggggctggcgggagcctcggcgggcgcgcgggcgcgcggggccatggtcgtggccccctgacgggccgcggccgcctccatgaagcggaaaagcgagcggcggtcgagctgggccgccgcgcccccctgctcgcggcgctgctcgtcgacctcgccgggtgtgaagaagatccgcagctccacgcagcaagacccgcgccgccgggacccccaggacgacgtgtacctggacatcaccgatcgcctttgttttgccattctctacagcagaccaaagagtgcatcaaatgtacattatttcagcatagataatgaacttgaatatgagaacttctacgcagattttggaccactcaatctggcaatggtttacagatattgttgcaagatcaataagaaattaaagtccattacaatgttaaggaagaaaattgttcattttactggctctgatcagagaaaacaagcaaatgctgccttccttgttggatgctacatggttatatatttggggagaaccccagaagaagcatatagaatattaatctttggagagacatcctatattcctttcagagatgctgcctatggaagttgcaatttctacattacacttcttgactgttttcatgcagtaaagaaggcaatgcagtatggcttccttaatttcaactcatttaaccttgatgaatatgaacactatgaaaaagcagaaaatggagatttaaattggataataccagaccgatttattgccttctgtggacctcattcaagagccagacttgaaagtggttaccaccaacattctcctgagacttatattcaatattttaagaatcacaatgttactaccattattcgtctgaataaaaggatgtatgatgccaaacgctttacggatgctggcttcgatcaccatgatcttttctttgcggatggcagcacccctactgatgccattgtcaaagaattcctagatatctgtgaaaatgctgagggtgccattgcagtacattgcaaagctggccttggtcgcacgggcactctgatagcctgctacatcatgaagcattacaggatgacagcagccgagaccattgcgtgggtcaggatctgcagacctggctcggtgattgggcctcagcagcagtttttggtgatgaagcaaaccaacctctggctggaaggggactattttcgtcagaagttaaaggggcaggagaatggacaacacagagcagccttctccaaacttctctctggcgttgatgacatttccataaatggggtcgagaatcaagatcagcaagaacccgaaccgtacagtgatgatgacgaaatcaatggagtgacacaaggtgatagacttcgggccttgaaaagcagaagacaatccaaaacaaacgctattcctctcacatgtcccctagctgtgctgacctctgcactgtgtagtgttgtcatctggtggattgtttgtgactacattcttcccatcctgctattctgtctcgatggtttcagaacacagtagccatcaggaccccctgacagatagctgctacatagccagaatgcctttaataggctaatagcagcaaatctgtattctcttgagatctttcatctttgaaatgaagaccttaacagcgaagaggctttatttctgcagaagaatgtacaagaggcccacttgtggaacagcatgttgaagacccccagaaggcgggtgtgtccgtgtcacggggtccaccgccacccttctgtgtctgagctgcgttcttccttctctgaagctttttccttaactcatattttaagaatttcttctcttgtctcctcttggacttggaagttatgaaagaatgcaaaagttccttgcaagatctcttccaaagaaaaattccattgcaaccaactctggtactttgtggtttcactgagtattttcacatagctgagaaagatttaaaaatcaagctgatttcactcttcagaattaggcaaaacctgcttaacttgctcctatttatggcattttcttgaatatcttacaaataaaagcttattgtcgcgcattcaga

SEQ ID NO: 371929 - DNA, 1667 bp, Homo sapiens
gccggcgggccttgtggtctcatcgcgcgcaggatccgggccgggcgggggcgggggcggggcgcgtccgcggaggggggcggttggcggctcccgagcccagcgccgcgctcagtccggaccccgtgaccggcggccgaggccccgcctccgtcagtctgtccttcgggtcctcagcacagccgtgccggtgaggcgggcggcgggggaacgcggctgtcccgggtcaggggtcttgcggcggcagggcggggggccgaggggcggggcctgggaggaaggcgtggcctttggggactggggctcggactgggggcggagccggggctggttggggaccggccgggttccgctcctgctggagcccggtgcgtggaattccacgcgagtgccggggagttcctggggagccgggcttctcttttggcccccagcgtgttgaccgagcccgcttcgcacagcccttcctagggtgtggagagcgggccccgccctgaaggggcaccgtgggctggggggcctgttttggagcaggcaccggtggccgagctccgtgaccatgaaggtcaaggtcatccccgtgctcgaggacaactacatgtacctggtcatcgaggagctcacgcgcgaggcggtggccgtggacgtggctgtgcccaagaggctgctggagatcgtgggccgggagggggtgtctctgaccgctgtgctgaccacccaccatcactgggaccacgcgcggggaaacccggagctggcgcggcttcgtcccgggctggcggtgctgggcgcggacgagcgcatcttctcgctgacgcgcaggctggcgcacggcgaggagctgcggttcggggccatccacgtgcgttgcctcctgacgcccggccacaccgccggccacatgagctacttcctgtgggaggacgattgcccggacccacccgccctgttctcgggcgacgcgctgtcggtggccggctgcggctcgtgcctggagggcagcgcccagcagatgtaccagagcctggccgagctgggtaccctgccccccgagacgaaggtgttctgcggccacgagcacacgcttagcaacctggagtttgcccagaaagtggagccctgcaacgaccacgtgagagccaagctgtcctgggctaagaagagggatgaggatgacgtgcccactgtgccgtcgactctgggcgaggagcgcctctacaaccccttcctgcgggtggcagaggagccggtgcgcaagttcacgggcaaggcggtccccgccgacgtcctggaggcgctatgcaaggagcgggcgcgcttcgaacaggcgggcgagccgcggcagccacaggcgcgggccctccttgcgctgcagtgggggctcctgagtgcagccccacacgactgagccacccagaccctcacagggctggggcctgcgtccctcctcgtgacctcggccagctggacccacatgagggccacctctggaaccttcttcgaggccctggccagccatctgcccagcctcggagggtgggcaacctggtgcttcccgggtggacacacaggaccactcagtggggcctgtgtgggcgccgagacctgggtgtctgggaagtggggcacacggggcctccgaactatgaataaagctttgaaaggcc

SEQ ID NO: 371930 - DNA, 1326 bp, Homo sapiens
gccggcgggccttgtggtctcatcgcgcgcaggatccgggccgggcgggggcgggggcggggcgcgtccgcggaggggggcggttggcggctcccgagcccagcgccgcgctcagtccggaccccgtgaccggcggccgaggccccgcctccgtcagtctgtccttcgggtcctcagcacagccgtgccgcaggcaccggtggccgagctccgtgaccatgaaggtcaaggtcatccccgtgctcgaggacaactacatgtacctggtcatcgaggagctcacgcgcgaggcggtggccgtggacgtggctgtgcccaagaggctgctggagatcgtgggccgggagggggtgtctctgaccgctgtgctgaccacccaccatcactgggaccacgcgcggggaaacccggagctggcgcggcttcgtcccgggctggcggtgctgggcgcggacgagcgcatcttctcgctgacgcgcaggctggcgcacggcgaggagctgcggttcggggccatccacgtgcgttgcctcctgacgcccggccacaccgccggccacatgagctacttcctgtgggaggacgattgcccggacccacccgccctgttctcgggcgacgcgctgtcggtggccggctgcggctcgtgcctggagggcagcgcccagcagatgtaccagagcctggccgagctgggtaccctgccccccgagacgaaggtgttctgcggccacgagcacacgcttagcaacctggagtttgcccagaaagtggagccctgcaacgaccacgtgagagccaagctgtcctgggctaagaagagggatgaggatgacgtgcccactgtgccgtcgactctgggcgaggagcgcctctacaaccccttcctgcgggtggcagaggagccggtgcgcaagttcacgggcaaggcggtccccgccgacgtcctggaggcgctatgcaaggagcgggcgcgcttcgaacaggcgggcgagccgcggcagccacaggcgcgggccctccttgcgctgcagtgggggctcctgagtgcagccccacacgactgagccacccagaccctcacagggctggggcctgcgtccctcctcgtgacctcggccagctggacccacatgagggccacctctggaaccttcttcgaggccctggccagccatctgcccagcctcggagggtgggcaacctggtgcttcccgggtggacacacaggaccactcagtggggcctgtgtgggcgccgagacctgggtgtctgggaagtggggcacacggggcctccgaactatgaataaagctttgaaaggcc

SEQ ID NO: 371931 - DNA, 1786 bp, Homo sapiens
gccggcgggccttgtggtctcatcgcgcgcaggatccgggccgggcgggggcgggggcggggcgcgtccgcggaggggggcggttggcggctcccgagcccagcgccgcgctcagtccggaccccgtgaccggcggccgaggccccgcctccgtcagtctgtccttcgggtcctcagcacagccgtgccgcccttcctagggtgtggagagcgggccccgccctgaaggggcaccgtgggctggggggcctgttttggagcaggcaccggtggccgagctccgtgaccatgaaggtcaaggtcatccccgtgctcgaggacaactacatgtacctggtcatcgaggagctcacgcgcgaggcggtggccgtggacgtggctgtgcccaagaggctgctggagatcgtgggccgggagggggtgtctctgaccgctgtgctgaccacccaccatcactgggaccacgcgcggggaaacccggagctggcgcggcttcgtcccgggctggcggtgctgggcgcggacgagcgcatcttctcgctgacgcgcaggctggcgcacggcgaggagctgcggttcggggccatccacgtgcgttgcctcctgacgcccggccacaccgccggccacatgagctacttcctgtgggaggacgattgcccggacccacccgccctgttctcgggtacccgcagcgcggagcgcgcccaccccgcctcccgccggccccgccccatctgctctgacccgccctcccccgccaggcgacgcgctgtcggtggccggctgcggctcgtgcctggagggcagcgcccagcagatgtaccagagcctggccgagctgggtaccctgccccccgagacgaaggtgttctgcggccacgagcacacgcttagcaacctggagtttgcccagaaagtggagccctgcaacgaccacgtgagagccaagctgtcctgggctaaggcacggccctttcccgccgcggcaagagggtggggggggagggaacaggcttcggggtggggggggctctcagacaaggcctaatggtgaccggggcctgtggtcactccagaagagggatgaggatgacgtgcccactgtgccgtcgactctgggcgaggagcgcctctacaaccccttcctgcgggtggcgtgagtatggctgttgtcccggggcctccaccgttacgtggacccttaggaaggcatctggggactgcgtgttgggctgagtgagcatctctggcttgggggaggctgctcattaagtgcctgcctgcccgcccacccctcggcgccatgctcccgcgtgggcagcgggccctgcgcctcactgcacccctccctgcagagaggagccggtgcgcaagttcacgggcaaggcggtccccgccgacgtcctggaggcgctatgcaaggagcgggcgcgcttcgaacaggcgggcgagccgcggcagccacaggcgcgggccctccttgcgctgcagtgggggctcctgagtgcagccccacacgactgagccacccagaccctcacagggctggggcctgcgtccctcctcgtgacctcggccagctggacccacatgagggccacctctggaaccttcttcgaggccctggccagccatctgcccagcctcggagggtgggcaacctggtgcttcccgggtggacacacaggaccactcagtggggcctgtgtgggcgccgagacctgggtgtctgggaagtggggcacacggggcctccgaactatgaataaagctttgaaaggcc

SEQ ID NO: 371932 - DNA, 1559 bp, Homo sapiens
gccggcgggccttgtggtctcatcgcgcgcaggatccgggccgggcgggggcgggggcggggcgcgtccgcggaggggggcggttggcggctcccgagcccagcgccgcgctcagtccggaccccgtgaccggcggccgaggccccgcctccgtcagtctgtccttcgggtcctcagcacagccgtgccggtgaggcgggcggcgggggaacgcggctgtcccgggtcaggggtcttgcggcggcagggcggggggccgaggggcggggcctgggaggaaggcgtggcctttggggactggggctcggactgggggcggagccggggctggttggggaccggccgggttccgctcctgctggagcccggtgcgtggaattccacgcgagtgccggggagttcctggggagccgggcttctcttttggcccccagcgtgttgaccgagcccgcttcgcacagcccttcctagggtgtggagagcgggccccgccctgaaggggcaccgtgggctggggggcctgttttggagcaggcaccggtggccgagctccgtgaccatgaaggtcaaggtcatccccgtgctcgaggacaactacatgtacctggtcatcgaggagctcacgcgcgaggcggtggccgtggacgtggctgtgcccaagaggctgctggagatcgtgggccgggagggggtgtctctgaccgctgtgctgaccacccaccatcactgggaccacgcgcggggaaacccggagctggcgcggcttcgtcccgggctggcggtgctgggcgcggacgagcgcatcttctcgctgacgcgcaggctggcgcacggcgaggagctgcggttcggggccatccacgtgcgttgcctcctgacgcccggccacaccgccggccacatgagctacttcctgtgggaggacgattgcccggacccacccgccctgttctcgggcgacgcgctgtcggtggccggctgcggctcgtgcctggagggcagcgcccagcagatgtaccagagcctggccgagctgggtaccctgccccccgagacgaaggtgttctgcggccacgagcacacgcttagcaacctggagtttgcccagaaagtggagccctgcaacgaccacgtgagagccaagctgtcctgggctaagaagagggatgaggatgacgtgcccactgtgccgtcgactctgggcgaggagcgcctctacaaccccttcctgcgggtggcagaggagccggtgcgcaagttcacgggcaaggcggtccccgccgacgtcctggaggcgctatgcaaggagcgggcgcgcttcgaacaggcgggcgagccgcggcagccacaggcgcgggccctccttgcgctgcagtgggggctcctgagtgcagccccacacgactgagccacccagaccctcggagggtgggcaacctggtgcttcccgggtggacacacaggaccactcagtggggcctgtgtgggcgccgagacctgggtgtctgggaagtggggcacacggggcctccgaactatgaataaagctttgaaaggcc

SEQ ID NO: 371933 - DNA, 818 bp, Homo sapiens
ttccgctcctgctggagcccggtgcgtggaattccacgcgagtgccggggagttcctggggagccgggcttctcttttggcccccagcgtgttgaccgagcccgcttcgcacagcccttcctagggtgtggagagcgggccccgccctgaaggggcaccgtgggctggggggcctgttttggagcaggcaccggtggccgagctccgtgaccatgaaggtcaaggtcatccccgtgctcgaggacaactacatgtacctggtcatcgaggagctcacgcgcgaggcggtggccgtggacgtggctgtgcccaagagggtgagggcaggccgcgggccgcagggacccggccgtgtcccccgagagcctccccgacccccctggtaggagcgagcccccacgtgctctgctctccggaagtcattggcggctggggttccttgtttatcttggggctccctgaagttacggcacctctggcctccgccctttcgctgctgcctggcggtccctgcacgcgctgggcgcagtcaccgcccgctgggtccccgctccccggcgctccccggggctctggccggcctggggcagtgagcgcggcggatcccgatatggagggagtgggccaccgggaccgtctgtgttaccgtcactcccgtccctttcagctgctggagatcgtgggccgggagggggtgtctctgaccgctgtgctgaccacccaccatcactggtgagcgccggcggggcgcggggaggcacgaggacgccgccttgtcccaacccgacctaacccggcccccgcccgcccgcccgcag

SEQ ID NO: 371934 - DNA, 816 bp, Homo sapiens
gtgagcgggcctgggccctcccctcttctcccgtgggcacagcccccacgctccgcaccctcactgtgctaggggtgcagagtgaatgcccacctgagggcagaccgggcaggggaggccaggcccccggcgcaagcactttccccgcttcctggccgcgtgcgcgctcaccgagcgctcttcctccagaaggtgttctgcggccacgagcacacgcttagcaacctggagtttgcccagaaagtggagccctgcaacgaccacgtgagagccaagctgtcctgggctaaggcacggccctttcccgccgcggcaagagggtggggggggagggaacaggcttcggggtggggggggctctcagacaaggcctaatggtgaccggggcctgtggtcactccagaagagggatgaggatgacgtgcccactgtgccgtcgactctgggcgaggagcgcctctacaaccccttcctgcgggtggcgtgagtatggctgttgtcccggggcctccaccgttacgtggacccttaggaaggcatctggggactgcgtgttgggctgagtgagcatctctggcttgggggaggctgctcattaagtgcctgcctgcccgcccacccctcggcgccatgctcccgcgtgggcagcgggccctgcgcctcactgcacccctccctgcagagaggagccggtgcgcaagttcacgggcaaggcggtccccgccgacgtcctggaggcgctatgcaaggagcgggcgcgcttcgaacaggcgggcgagccgcggcagccacaggcgcgggccctccttgcgctgc

SEQ ID NO: 371935 - DNA, 1749 bp, Homo sapiens
gccggcgggccttgtggtctcatcgcgcgcaggatccgggccgggcgggggcgggggcggggcgcgtccgcggaggggggcggttggcggctcccgagcccagcgccgcgctcagtccggaccccgtgaccggcggccgaggccccgcctccgtcagtctgtccttcgggtcctcagcacagccgtgccggtgaggcgggcggcgggggaacgcggctgtcccgggtcaggggtcttgcggcggcagggcggggggccgaggggcggggcctgggaggaaggcgtggcctttggggactggggctcggactgggggcggagccggggctggttggggaccggccgggttccgctcctgctggagcccggtgcgtggaattccacgcgagtgccggggagttcctggggagccgggcttctcttttggcccccagcgtgttgaccgagcccgcttcgcacagcccttcctagggtgtggagagcgggccccgccctgaaggggcaccgtgggctggggggcctgttttggagcaggcaccggtggccgagctccgtgaccatgaaggtcaaggtcatccccgtgctcgaggacaactacatgtacctggtcatcgaggagctcacgcgcgaggcggtggccgtggacgtggctgtgcccaagaggctgctggagatcgtgggccgggagggggtgtctctgaccgctgtgctgaccacccaccatcactgggaccacgcgcggggaaacccggagctggcgcggcttcgtcccgggctggcggtgctgggcgcggacgagcgcatcttctcgctgacgcgcaggctggcgcacggcgaggagctgcgggtgagcgcgcgctcccgggaggggcggggagggcgccccgggtccacccgccctcacaggtccgcctgctcctccgccgcagttcggggccatccacgtgcgttgcctcctgacgcccggccacaccgccggccacatgagctacttcctgtgggaggacgattgcccggacccacccgccctgttctcgggcgacgcgctgtcggtggccggctgcggctcgtgcctggagggcagcgcccagcagatgtaccagagcctggccgagctgggtaccctgccccccgagacgaaggtgttctgcggccacgagcacacgcttagcaacctggagtttgcccagaaagtggagccctgcaacgaccacgtgagagccaagctgtcctgggctaagaagagggatgaggatgacgtgcccactgtgccgtcgactctgggcgaggagcgcctctacaaccccttcctgcgggtggcagaggagccggtgcgcaagttcacgggcaaggcggtccccgccgacgtcctggaggcgctatgcaaggagcgggcgcgcttcgaacaggcgggcgagccgcggcagccacaggcgcgggccctccttgcgctgcagtgggggctcctgagtgcagccccacacgactgagccacccagaccctcacagggctggggcctgcgtccctcctcgtgacctcggccagctggacccacatgagggccacctctggaaccttcttcgaggccctggccagccatctgcccagcctcggagggtgggcaacctggtgcttcccgggtggacacacaggaccactcagtggggcctgtgtgggcgccgagacctgggtgtctgggaagtggggcacacggggcctccgaactatgaataaagctttgaaaggcc

SEQ ID NO: 371936 - DNA, 1396 bp, Homo sapiens
gccggcgggccttgtggtctcatcgcgcgcaggatccgggccgggcgggggcgggggcggggcgcgtccgcggaggggggcggttggcggctcccgagcccagcgccgcgctcagtccggaccccgtgaccggcggccgaggccccgcctccgtcagtctgtccttcgggtcctcagcacagccgtgccgcccttcctagggtgtggagagcgggccccgccctgaaggggcaccgtgggctggggggcctgttttggagcaggcaccggtggccgagctccgtgaccatgaaggtcaaggtcatccccgtgctcgaggacaactacatgtacctggtcatcgaggagctcacgcgcgaggcggtggccgtggacgtggctgtgcccaagaggctgctggagatcgtgggccgggagggggtgtctctgaccgctgtgctgaccacccaccatcactgggaccacgcgcggggaaacccggagctggcgcggcttcgtcccgggctggcggtgctgggcgcggacgagcgcatcttctcgctgacgcgcaggctggcgcacggcgaggagctgcggttcggggccatccacgtgcgttgcctcctgacgcccggccacaccgccggccacatgagctacttcctgtgggaggacgattgcccggacccacccgccctgttctcgggcgacgcgctgtcggtggccggctgcggctcgtgcctggagggcagcgcccagcagatgtaccagagcctggccgagctgggtaccctgccccccgagacgaaggtgttctgcggccacgagcacacgcttagcaacctggagtttgcccagaaagtggagccctgcaacgaccacgtgagagccaagctgtcctgggctaagaagagggatgaggatgacgtgcccactgtgccgtcgactctgggcgaggagcgcctctacaaccccttcctgcgggtggcagaggagccggtgcgcaagttcacgggcaaggcggtccccgccgacgtcctggaggcgctatgcaaggagcgggcgcgcttcgaacaggcgggcgagccgcggcagccacaggcgcgggccctccttgcgctgcagtgggggctcctgagtgcagccccacacgactgagccacccagaccctcacagggctggggcctgcgtccctcctcgtgacctcggccagctggacccacatgagggccacctctggaaccttcttcgaggccctggccagccatctgcccagcctcggagggtgggcaacctggtgcttcccgggtggacacacaggaccactcagtggggcctgtgtgggcgccgagacctgggtgtctgggaagtggggcacacggggcctccgaactatgaataaagctttgaaaggcc

SEQ ID NO: 371937 - DNA, 1866 bp, Homo sapiens
gccggcgggccttgtggtctcatcgcgcgcaggatccgggccgggcgggggcgggggcggggcgcgtccgcggaggggggcggttggcggctcccgagcccagcgccgcgctcagtccggaccccgtgaccggcggccgaggccccgcctccgtcagtctgtccttcgggtcctcagcacagccgtgccggtgaggcgggcggcgggggaacgcggctgtcccgggtcaggggtcttgcggcggcagggcggggggccgaggggcggggcctgggaggaaggcgtggcctttggggactggggctcggactgggggcggagccggggctggttggggaccggccgggttccgctcctgctggagcccggtgcgtggaattccacgcgagtgccggggagttcctggggagccgggcttctcttttggcccccagcgtgttgaccgagcccgcttcgcacagcccttcctagggtgtggagagcgggccccgccctgaaggggcaccgtgggctggggggcctgttttggagcaggcaccggtggccgagctccgtgaccatgaaggtcaaggtcatccccgtgctcgaggacaactacatgtacctggtcatcgaggagctcacgcgcgaggcggtggccgtggacgtggctgtgcccaagaggctgctggagatcgtgggccgggagggggtgtctctgaccgctgtgctgaccacccaccatcactgggaccacgcgcggggaaacccggagctggcgcggcttcgtcccgggctggcggtgctgggcgcggacgagcgcatcttctcgctgacgcgcaggctggcgcacggcgaggagctgcggttcggggccatccacgtgcgttgcctcctgacgcccggccacaccgccggccacatgagctacttcctgtgggaggacgattgcccggacccacccgccctgttctcgggcgacgcgctgtcggtggccggctgcggctcgtgcctggagggcagcgcccagcagatgtaccagagcctggccgagctgggtaccctgccccccgagacgaaggtgttctgcggccacgagcacacgcttagcaacctggagtttgcccagaaagtggagccctgcaacgaccacgtgagagccaagctgtcctgggctaagaagagggatgaggatgacgtgcccactgtgccgtcgactctgggcgaggagcgcctctacaaccccttcctgcgggtggcgtgagtatggctgttgtcccggggcctccaccgttacgtggacccttaggaaggcatctggggactgcgtgttgggctgagtgagcatctctggcttgggggaggctgctcattaagtgcctgcctgcccgcccacccctcggcgccatgctcccgcgtgggcagcgggccctgcgcctcactgcacccctccctgcagagaggagccggtgcgcaagttcacgggcaaggcggtccccgccgacgtcctggaggcgctatgcaaggagcgggcgcgcttcgaacaggcgggcgagccgcggcagccacaggcgcgggccctccttgcgctgcagtgggggctcctgagtgcagccccacacgactgagccacccagaccctcacagggctggggcctgcgtccctcctcgtgacctcggccagctggacccacatgagggccacctctggaaccttcttcgaggccctggccagccatctgcccagcctcggagggtgggcaacctggtgcttcccgggtggacacacaggaccactcagtggggcctgtgtgggcgccgagacctgggtgtctgggaagtggggcacacggggcctccgaactatgaataaagctttgaaaggcc

SEQ ID NO: 371938 - DNA, 1978 bp, Homo sapiens
gccggcgggccttgtggtctcatcgcgcgcaggatccgggccgggcgggggcgggggcggggcgcgtccgcggaggggggcggttggcggctcccgagcccagcgccgcgctcagtccggaccccgtgaccggcggccgaggccccgcctccgtcagtctgtccttcgggtcctcagcacagccgtgccggtgaggcgggcggcgggggaacgcggctgtcccgggtcaggggtcttgcggcggcagggcggggggccgaggggcggggcctgggaggaaggcgtggcctttggggactggggctcggactgggggcggagccggggctggttggggaccggccgggttccgctcctgctggagcccggtgcgtggaattccacgcgagtgccggggagttcctggggagccgggcttctcttttggcccccagcgtgttgaccgagcccgcttcgcacagcccttcctagggtgtggagagcgggccccgccctgaaggggcaccgtgggctggggggcctgttttggagcaggcaccggtggccgagctccgtgaccatgaaggtcaaggtcatccccgtgctcgaggacaactacatgtacctggtcatcgaggagctcacgcgcgaggcggtggccgtggacgtggctgtgcccaagaggctgctggagatcgtgggccgggagggggtgtctctgaccgctgtgctgaccacccaccatcactgggaccacgcgcggggaaacccggagctggcgcggcttcgtcccgggctggcggtgctgggcgcggacgagcgcatcttctcgctgacgcgcaggctggcgcacggcgaggagctgcggttcggggccatccacgtgcgttgcctcctgacgcccggccacaccgccggccacatgagctacttcctgtgggaggacgattgcccggacccacccgccctgttctcgggcgacgcgctgtcggtggccggctgcggctcgtgcctggagggcagcgcccagcagatgtaccagagcctggccgagctgggtaccctgccccccgagacgaaggtgttctgcggccacgagcacacgcttagcaacctggagtttgcccagaaagtggagccctgcaacgaccacgtgagagccaagctgtcctgggctaaggcacggccctttcccgccgcggcaagagggtggggggggagggaacaggcttcggggtggggggggctctcagacaaggcctaatggtgaccggggcctgtggtcactccagaagagggatgaggatgacgtgcccactgtgccgtcgactctgggcgaggagcgcctctacaaccccttcctgcgggtggcgtgagtatggctgttgtcccggggcctccaccgttacgtggacccttaggaaggcatctggggactgcgtgttgggctgagtgagcatctctggcttgggggaggctgctcattaagtgcctgcctgcccgcccacccctcggcgccatgctcccgcgtgggcagcgggccctgcgcctcactgcacccctccctgcagagaggagccggtgcgcaagttcacgggcaaggcggtccccgccgacgtcctggaggcgctatgcaaggagcgggcgcgcttcgaacaggcgggcgagccgcggcagccacaggcgcgggccctccttgcgctgcagtgggggctcctgagtgcagccccacacgactgagccacccagaccctcacagggctggggcctgcgtccctcctcgtgacctcggccagctggacccacatgagggccacctctggaaccttcttcgaggccctggccagccatctgcccagcctcggagggtgggcaacctggtgcttcccgggtggacacacaggaccactcagtggggcctgtgtgggcgccgagacctgggtgtctgggaagtggggcacacggggcctccgaactatgaataaagctttgaaaggcc

SEQ ID NO: 371939 - DNA, 1841 bp, Homo sapiens
gccggcgggccttgtggtctcatcgcgcgcaggatccgggccgggcgggggcgggggcggggcgcgtccgcggaggggggcggttggcggctcccgagcccagcgccgcgctcagtccggaccccgtgaccggcggccgaggccccgcctccgtcagtctgtccttcgggtcctcagcacagccgtgccggtgaggcgggcggcgggggaacgcggctgtcccgggtcaggggtcttgcggcggcagggcggggggccgaggggcggggcctgggaggaaggcgtggcctttggggactggggctcggactgggggcggagccggggctggttggggaccggccgggttccgctcctgctggagcccggtgcgtggaattccacgcgagtgccggggagttcctggggagccgggcttctcttttggcccccagcgtgttgaccgagcccgcttcgcacagcccttcctagggtgtggagagcgggccccgccctgaaggggcaccgtgggctggggggcctgttttggagcaggcaccggtggccgagctccgtgaccatgaaggtcaaggtcatccccgtgctcgaggacaactacatgtacctggtcatcgaggagctcacgcgcgaggcggtggccgtggacgtggctgtgcccaagaggctgctggagatcgtgggccgggagggggtgtctctgaccgctgtgctgaccacccaccatcactgggaccacgcgcggggaaacccggagctggcgcggcttcgtcccgggctggcggtgctgggcgcggacgagcgcatcttctcgctgacgcgcaggctggcgcacggcgaggagctgcggttcggggccatccacgtgcgttgcctcctgacgcccggccacaccgccggccacatgagctacttcctgtgggaggacgattgcccggacccacccgccctgttctcgggcgacgcgctgtcggtggccggctgcggctcgtgcctggagggcagcgcccagcagatgtaccagagcctggccgagctgggtaccctgccccccgagacgaaggtgttctgcggccacgagcacacgcttagcaacctggagtttgcccagaaagtggagccctgcaacgaccacgtgagagccaagctgtcctgggctaagaagagggatgaggatgacgtgcccactgtgccgtcgactctgggcgaggagcgcctctacaaccccttcctgcgggtggcagaggagccggtgcgcaagttcacgggcaaggcggtccccgccgacgtcctggaggcgctatgcaaggagcgggcgcgcttcgaacaggcgggcgagccgcggcagccacaggcgcgggccctccttgcgctgcagtgggggctcctgagtgcagccccacacgactgagccacccagaccctcacagggctggggcctgcgtccctcctcgtgacctcggccagctggacccacatgagggccacctctggaaccttcttcgaggccctggccagccatctgcccagcctcggagggtgggcaacctggtgcttcccgggtggacacacaggaccactcagtggggcctgtgtgggcgccgagacctgggtgtctgggaagtggggcacacggggcctccgaactatgaataaagctttgaaaggccaaaacaccttcacaaaaacccccagggcccatatcgccggggcgcgggaacaagcggctactgaacgggccaggtgccatacgcggcttccggacccacgacttgtgaccaagggtcacctctcgggtcacaaaggaggcgaatactccgacaccagttactgctaaaactccg

SEQ ID NO: 371940 - DNA, 2900 bp, Homo sapiens
tgattctgaggcattgccgtcgcgcggtgcatagctaaagacgtcgcgcttgcgcaggcgctcggcgcagaggcctgcgggaagccaagatggcgcataggggttctccaggctgcagttggcgccttatcagtatctaagcggagtgttttggaaggagttaaggggctgtggcaaacgccctctccgccgtcatggcccggcatcggaatgttcgaggctataactacgatgaagattttgaagatgatgatctctacggccagtctgtagaggatgattattgtatttcgccgtcaacagctgctcagtttatttattcacggcgtgacaaaccttccgttgagcctgtggaagaatatgattatgaagatctgaaagaatcttccaattctgtttcaaaccatcagctcagtggatttgatcaagctcgtctttattcatgccttgatcacatgagagaggtacttggagatgctgtgccagatgaaatattaattgaagcagttctgaagaacaagtttgatgtgcagaaggctttgtcaggggttctggaacaagatagagtgcagagtttgaaggacaagaatgaggcaacagtatctacaggaaagatagcaaaaggaaaaccagtagattcccagacatcgcgaagtgaatctgaaattgtgccaaaagttgctaaaatgactgtatctggaaagaagcaaactatgggatttgaagtgcctggagtatcttctgaagaaaatggtcatagtttccacacacctcaaaaaggaccgcccattgaagatgccattgcttcttccgatgttcttgagactgcttctaaatctgctaatccaccccacacgattcaagcatcagaagagcagagttcaaccccagcaccggtgaaaaagtctggcaagctgaggcagcaaatagatgtgaaggcggaactggagaagcggcaaggagggaagcagctactcaacttagtggtcattggtcatgttgatgctgggaaaagtactctgatgggccatatgctttatcttctgggtaatataaacaaaagaactatgcataagtatgaacaggagtctaaaaaggctggcaaagcttcgtttgcatatgcatgggtcttggatgaaactggcgaagaaagggaaaggggagtaaccatggatgttggtatgacaaagtttgaaaccacaaccaaagttattacattaatggatgctccaggccataaggacttcattccaaatatgattacaggagcagcccaggcggatgtagctgttttagttgtagatgccagcaggggagagtttgaagctggatttgagactggaggacaaacacgagagcatggactcttggtccgttctctgggagtgacgcagcttgcagttgcagttaataaaatggatcaggttaattggcaacaagaaaggtttcaagagattactggaaaacttgggcactttcttaagcaagcaggttttaaggagagtgatgtaggttttattcctacaagtggtctcagtggtgaaaatctaatcacaagatctcagtcaagtgaactcacaaaatggtataaaggactatgtttattagaacaaattgattcctttaagcctccccagcgatctattgacaaaccttttagattatgtgtgtccgatgttttcaaagatcaaggatctggattttgcataactggtaaaatagaagctggttatatccaaactggtgaccgactactggcaatgcctcctaatgaaacttgtaccgtgaaaggaatcactctgcatgatgaacctgtcgactgggcggcagcaggcgatcatgttagtcttactttggttgggatggatatcatcaaaatcaatgttggctgcatattttgtggccccaaagtacccattaaagcttgcactcgtttcagagcccgaatcctcatctttaatattgaaattcctatcactaaaggatttcctgtgctgttacactaccaaactgtcagtgaacccgccgttattaaacgattgattagtgtcttaaacaaaagcacgggtgaagtcacaaagaaaaagcctaagtttttgactaaaggccagaatgcattggtagagctacagacacaaagaccaatagctcttgagctatataaagactttaaagagctggggaggttcatgctacgttacggtggttctacaatagctgctggtgttgtcactgagataaaagaatgatgggtcagaatttctaccacgtttctggatacagtgaaatagctaacctctgtttcaagaatgcagttattaagtcaaaggaacaatgtgcaattgatatgtttttagatgagagagaaaaattaaagctaaaattagctgcaaagaagtattaataatcacctctgcaaaaattctaagttgccaactggcaaagaaagtctaatgttaaaaacaactttgcctttgaaacgttaataaatggatttactttgctaagatttatggcaagtgtcaaaaatagtatctgaagatactgaatcatcatgaaatgaactctacttctggccaaagcacaatgtatttgcagttttctcttttgattcaattatactgcacatgttttaaggaaaagtaacttaattgggtttttcaggcagttgatatttgacctaagcttttttttttttttttttccagttaatgctaagaaaagatttggggaaggttataataaaagtattttgtggtgaccataagaatgtccctccccaaacaagtaaacttgtgaaagtttaatttggaattagtggaagctgttcctttgaaagccaagatattatttaagttgtaaagccagctaataaaatgccttagtttgagcataataca

SEQ ID NO: 371941 - DNA, 2353 bp, Homo sapiens
ccaaaccttttcactcattctccacacacttgtctaagcactactggacatctctcctgggagagtgttcttttaggggtaccattctcatggaatgtggtgtgattggtccccccggaatgcaacttctgcatgtgtgtgtctcatagacacttcagatttaccaagcctaaaatggatcttgtccttagtttcatatctcacagttaatgcatcatcatctcacattttcccctttctgtcattagtcttcactttccttaccactccaaacttgttattccttattcccgaattcttgagtttattccctttctgtagtaagtttgtgcatttgtatcagcctctactctaagacagaaataccatcaccttacttctccggtcacaatatttactggcttcctattacttaactgcaggatgaaatttaaaccctaagcgtgatttatgagacccctttattatttctcccttgcctatctctgttgcctcctgtcttaccttttcttcattattctatatggtcccctccccatggcccccacaagtgacacatgactcttagcccatcccacatttggttatgcctttgcccacacagtttcctggggcagcagtgtcttcctttttctccctactcatgcatacaagctacctaataaacacttattccttcttcagagtgccagatgtctattctcaccatcatggattctttggtgcacctttgtgtttctattgtatattttacatattatttgtctcaggacaatgtaattgtttccatctttctcttcactagtataatatctttatgggcagggacttacatttttatttttttttatccccagagtttagtataatatctggtactacgtatttattatttctcaataaatatttgagaaaggaatgaacctttctttggtaatatgagtatttttatttgcaaaaaaaaaaagtaaagtgtggtatgccatatttagtagagatgttaattctgaaatgattattatttaatgtccattgaactactagttttatatgactacttgagaactaagtatagttaacggtattaatcatcagataacattgctgtatgaaccataagattttggtatgttttgcagatcaaggatctggattttgcataactggtaaaatagaagctggttatatccaaactggtgaccgactactggcaatgcctcctaatgaaacttgtaccgtgaaaggaatcactctgcatgatgaacctgtcgactgggcggcagcaggcgatcatgttagtcttactttggttgggatggatatcatcaaaatcaatgttggctgcatattttgtggccccaaagtacccattaaagcttgcactcgtttcagagcccgaatcctcatctttaatattgaaattcctatcactaaaggatttcctgtgctgttacactaccaaactgtcagtgaacccgccgttattaaacgattgattagtgtcttaaacaaaagcacgggtgaagtcacaaagaaaaagcctaagtttttgactaaaggccagaatgcattggtagagctacagacacaaagaccaatagctcttgagctatataaagactttaaagagctggggaggttcatgctacgttacggtggttctacaatagctgctggtgttgtcactgagataaaagaatgatgggtcagaatttctaccacgtttctggatacagtgaaatagctaacctctgtttcaagaatgcagttattaagtcaaaggaacaatgtgcaattgatatgtttttagatgagagagaaaaattaaagctaaaattagctgcaaagaagtattaataatcacctctgcaaaaattctaagttgccaactggcaaagaaagtctaatgttaaaaacaactttgcctttgaaacgttaataaatggatttactttgctaagatttatggcaagtgtcaaaaatagtatctgaagatactgaatcatcatgaaatgaactctacttctggccaaagcacaatgtatttgcagttttctcttttgattcaattatactgcacatgttttaaggaaaagtaacttaattgggtttttcaggcagttgatatttgacctaagcttttttttttttttttttccagttaatgctaagaaaagatttggggaaggttataataaaagtattttgtggtgaccataagaatgtccctccccaaacaagtaaacttgtgaaagtttaatttggaattagtggaagctgttcctttgaaagccaagatattatttaagttgtaaagccagctaataaaatgccttagtttgagcataataca

SEQ ID NO: 371942 - DNA, 800 bp, Homo sapiens
tgattctgaggcattgccgtcgcgcggtgcatagctaaagacgtcgcgcttgcgcaggcgctcggcgcagaggcctgcgggaagccaagatggcgcataggggttctccaggctgcagttggcgccttatcagtatctaagcggagtgttttggaaggagttaaggggctgtggcaaacgccctctccgccgtcatggcccggcatcggaatgttcgaggctataactacgatgaagattttgaagatgatgatctctacggccagtctgtagaggatgattattgtatttcgccgtcaacagctgctcagtttatttattcacggcgtgacaaaccttccgttgagcctgtggaagaatatgattatgaagatctgaaagaatcttccaattctgtttcaaaccatcagctcagtggatttgatcaagctcgtctttattcatgccttgatcacatgagagaggtacttggagatgctgtgccagatgaaatattaattgaagcagttctgaagaacaagtttgatgtgcagaaggctttgtcaggggttctggaacaagatagagtgcagagtttgaaggacaagaatgaggcaacagtatctacaggaaagatagcaaaaggagtcttattttcttcttctgaagtttcagctgataatgttcaaagttcttatcctcagtcagcaaatcatttggattatagtagcaaaccctttgattttgctagctcagtaggaaaatacggattatctcataattcttcagttccaactcactgtttactccatagaaaaaaa

SEQ ID NO: 371943 - DNA, 875 bp, Homo sapiens
tgattctgaggcattgccgtcgcgcggtgcatagctaaagacgtcgcgcttgcgcaggcgctcggcgcagaggcctgcgggaagccaagatggcgcataggggttctccaggctgcagttggcgccttatcagtatctaagcggagtgttttggaaggagttaaggggctgtggcaaacgccctctccgccgtcatggcccggcatcggaatgttcgaggctataactacgatgaagattttgaagatgatgatctctacggccagtctgtagaggatgattattgtatttcgccgtcaacagctgctcagtttatttattcacggcgtgacaaaccttccgttgagcctgtggaagaatatgattatgaagatctgaaagaatcttccaattctgtttcaaaccatcagctcagtggatttgatcaagctcgtctttattcatgccttgatcacatgagagaggtacttggagatgctgtgccagatgaaatattaattgaagcagttctgaagaacaagtttgatgtgcagaaggctttgtcaggggttctggaacaagatagagtgcagagtttgaaggacaagaatgaggcaacagtatctacaggaaagatagcaaaaggtcacctggcggtagacccattcataagaggaaaagacagaattcacattgggatccagtttctttaatatctcatgcacttaaacagaaatttgcatttcaagaagatgattcttttgagaaagagaatagatcttgggaatcttccccattttctagtccagaaacttcaaggtttggacatcacatttcacagtcagaaggacagcgaactaaagaagaaatggtcaacacaaaagctgttgaccaag

SEQ ID NO: 371944 - DNA, 756 bp, Homo sapiens
catggcaagcactgtgtctgatcctatttaattttcatcacaacgctataaaagcctacttattttacacttgaggaaactgaggtacagacagaagagaaagagttgagattcaatcccaggttctttccctactactacttgtaataataaaaatgacaacaacatttgttctaaatgacgaattctcttacttaatctttagaacaacactaagatgttgttaccctccatctttacagaggaaaaagctgacaggttatgcactgaactaaagttgatgcagtaattggtggggtagaaatttgaaatgcctctcatgacttttttcctcttagtgagttaagtaaccacctgattagagtggtgggacttagaggaagcaactggagatcctgaaagactccaagcagtagcactgaattgaagataattaagtataagtgccaaaagaaaaggccagagatactgtggtagcagatttttagtgttataattttttgttttaggtgctgttacactaccaaactgtcagtgaacccgccgttattaaacgattgattagtgtcttaaacaaaagcacgggtgaagtcacaaagaaaaagcctaagtgagtgttttaatacagaaatgataaacaagcaatttaagccaattttttaaagattaactcatttgtgtagtatttctctttgtggtaagtgaaacccatttttacttgttccagaaattattttttcaagggctagattaaaa

SEQ ID NO: 371945 - DNA, 6418 bp, Homo sapiens
tgattctgaggcattgccgtcgcgcggtgcatagctaaagacgtcgcgcttgcgcaggcgctcggcgcagaggcctgcgggaagccaagatggcgcataggggttctccaggctgcagttggcgccttatcagtatctaagcggagtgttttggaaggagttaaggggctgtggcaaacgccctctccgccgtcatggcccggcatcggaatgttcgaggctataactacgatgaagattttgaagatgatgatctctacggccagtctgtagaggatgattattgtatttcgccgtcaacagctgctcagtttatttattcacggcgtgacaaaccttccgttgagcctgtggaagaatatgattatgaagatctgaaagaatcttccaattctgtttcaaaccatcagctcagtggatttgatcaagctcgtctttattcatgccttgatcacatgagagaggtacttggagatgctgtgccagatgaaatattaattgaagcagttctgaagaacaagtttgatgtgcagaaggctttgtcaggggttctggaacaagatagagtgcagagtttgaaggacaagaatgaggcaacagtatctacaggaaagatagcaaaaggaaaaccagtagattcccagacatcgcgaagtgaatctgaaattgtgccaaaagttgctaaaatgactgtatctggaaagaagcaaactatgggatttgaagtgcctggagtatcttctgaagaaaatggtcatagtttccacacacctcaaaaaggaccgcccattgaagatgccattgcttcttccgatgttcttgagactgcttctaaatctgctaatccaccccacacgattcaagcatcagaagagcagagttcaaccccagcaccggtgaaaaagtctggcaagctgaggcagcaaatagatgtgaaggcggaactggagaagcggcaaggagggaagcagctactcaacttagtggtcattggtcatgttgatgctgggaaaagtactctgatgggccatatgctttatcttctgggtaatataaacaaaagaactatgcataagtatgaacaggagtctaaaaaggctggcaaagcttcgtttgcatatgcatgggtcttggatgaaactggcgaagaaagggaaaggggagtaaccatggatgttggtatgacaaagtttgaaaccacaaccaaagttattacattaatggatgctccaggccataaggacttcattccaaatatgattacaggagcagcccaggcggatgtagctgttttagttgtagatgccagcaggggagagtttgaagctggatttgagactggaggacaaacacgagagcatggactcttggtccgttctctgggagtgacgcagcttgcagttgcagttaataaaatggatcaggttaattggcaacaagaaaggtttcaagagattactggaaaacttgggcactttcttaagcaagcaggttttaaggagagtgatgtaggttttattcctacaagtggtctcagtggtgaaaatctaatcacaagatctcagtcaagtgaactcacaaaatggtataaaggactatgtttattagaacaaattgattcctttaagcctccccagcgatctattgacaaaccttttagattatgtgtgtccgatgttttcaaagatcaaggatctggattttgcataactggtaaaatagaagctggttatatccaaactggtgaccgactactggcaatgcctcctaatgaaacttgtaccgtgaaaggaatcactctgcatgatgaacctgtcgactgggcggcagcaggcgatcatgttagtcttactttggttgggatggatatcatcaaaatcaatgttggctgcatattttgtggccccaaagtacccattaaagcttgcactcgtttcagagcccgaatcctcatctttaatattgaaattcctatcactaaaggatttcctgtgctgttacactaccaaactgtcagtgaacccgccgttattaaacgattgattagtgtcttaaacaaaagcacgggtgaagtcacaaagaaaaagcctaagtttttgactaaaggccagaatgcattggtagagctacagacacaaagaccaatagctcttgagctatataaagactttaaagagctggggaggttcatgctacgttacggtggttctacaatagctgctggtgttgtcactgagataaaagaatgatgggtcagaatttctaccacgtttctggatacagtgaaatagctaacctctgtttcaagaatgcagttattaagtcaaaggaacaatgtgcaattgatatgtttttagatgagagagaaaaattaaagctaaaattagctgcaaagaagtattaataatcacctctgcaaaaattctaagttgccaactggcaaagaaagtctaatgttaaaaacaactttgcctttgaaacgttaataaatggatttactttgctaagatttatggcaagtgtcaaaaatagtatctgaagatactgaatcatcatgaaatgaactctacttctggccaaagcacaatgtatttgcagttttctcttttgattcaattatactgcacatgttttaaggaaaagtaacttaattgggtttttcaggcagttgatatttgacctaagcttttttttttttttttttccagttaatgctaagaaaagatttggggaaggttataataaaagtattttgtggtgaccataagaatgtccctccccaaacaagtaaacttgtgaaagtttaatttggaattagtggaagctgttcctttgaaagccaagatattatttaagttgtaaagccagctaataaaatgccttagtttgagcataatacaaactgtgttttgttctttagacatttatgagattctctgccactaacagtaaatatgatttaggggttttgtgggatctttttcacctaagagtttcctagctctgtcacatgaattcttttttatcctaatggcagatccaatttcatctcattcatttttttaaccataacttgcttttcccattctcacttttagaattatacctatgatggccctttctttatcttgcttaccttatagattataagtcccctgtgagtaagtaagagtcatgtttttctttaaagtttcaacaacaaaccccaaggtttatttatttaacaacaggtattcgttgaggtgccttctgggtgcaaggagctttagagtagattttgacctcagctgaacctggaactctgatctgatagactgtttatgataagcttttttttttattagcagcgtgatttgtatatcgatggcttaacatatacaacagcatttcttctccctgcaccttttcgtgaacctgacattttgaacataagcaataacatctgtatggtaaagtaggcagattatacatgtgttgcttagtgaatgattaccaagtgaacacacttggtatattgctttaccaaaatacatgtgtagttgtcacttcagattcactgagttaagaaagttttatttaaatattaatattaatcaagaatttaacagatatatgtgacagaaatctaacttcaagtgactgaagcagaaagaaaaatttttgaatgacataactgagaaaattagaggtagctctagctttgattccatttagatcgagcagctcacacaatgttagcaaggactcatctccactctgccttccctggtgctggttttgctctcaaactctatatagaactctcggccgggcgcggtggctcacacctgtaatcaaaacactttgggaggctgagtcgggaggatagcgtgagcccaggagtttgagaccagctaaggcaatatagtgagaccatgtctctacagaaaaaatttaaaaacagatcagctgggtgtggtgccacatgcctgtagtcccagcttctcaggaggctggggtgggaagatcacttgagcccaggaggtcgaggctgcagtgagccatgatcacatcactgcagtccagcctgggtgacagagcaagacctgtcaccctgccacccataaaaaacctcttctgtaatgccaggttcttgacaagatgtgataattccacacttacatcctcagatctcccatccagggcaaggacagactaaaagagcatatcttctccagaagtcctagaaacatctcatcattgactatgattgaattttatttattaatacttccctaggatatcctgtgtttgagtgtgaagttaatatcacacaaagcatgtagctaacagttgtgtgagggttggaaattcagggtgctgttaggaaggggaaatggattggggtttaaggtagggggagtaaaaacaagaaaccatccactctgtatattatataagactgtgatcgaattaagaattttagtttacagtttagcataaacaaatagtagtagaaatgaatgcatttattcattccttccttctccaatagtgtttaagtacaatctttttatttgcattttattgatgattgattgtggttgaaaggagtggtgatattatttcgaggatccactgtgtaagaagactgttggcagtggaaggctcgagttgattaagtgacaaagaggtaaagcagacatgcccaagcttggttatgctctgatttcctaccctgttactttcatccataatttatagtacatccattttgtgtcattttgcttcaggtatttcttgtcctgactgtcttcttttttatgattttactgtttcttcacactaatggctttgtcctctgactttgactctttgtgagattcttctgagcagttaacctctaggataatgtggcttgaacacattacagaactatgttttgacttgttagtattattcacacattcatgacaattgagcctctctactgtgagaaatgttttagaggccagtttctaggcatagctgtttttctcccatgagtatgcaaatcaatagttttaaccattgttaaaatgcaatcatagtgacttcagaaaatttggaaaatacagaaaatatagggaagaataaaattaacccacagttctgtcacctaaaggtaactgctgccaatgttttcatgtatttcttttctgtctctccaatgcatttttttacatagttgtgagcgttagccaagttattttcatgttgttatgtaatcaatatttttcaatagaagtattagaggttttttttattgatataaaaataacaattacagatcctgatatatagaagttattcaaaattatacagttttcaaaaaatcaagacaagtaggcccaatacaaactactgaatcatcttctaatttccctctaaaatatttatagaaatatgtaagtagaaaaacattcatcctttcctcgtctaattatgatcctgccatattccaggcacaagagaaagctctggggcttgagtcttaatagggctgatagtccaaccaggggacagggtatcataaagagataattcaaaactttaagattggagggtaggtgatggtagaaaattctgcggcaaacatttgttgatgctcatcatttgttgatgtcatcaaagatcaccagggcataattataatcaaaattagttttattgatgcttgctgcagcaagagagactgcacaccactggggtctatgggtgcttctcagtgggaaggtgtaaggaggggcttgctaagaatttgagcacatgtagctaattttaaggagggctcaagtgagcaagggtttcttctggattgagtgctgtcagaaagtggattgagtgctgtcagaaagtgggagtgattttgcaactgggtatcttaatttttatgttgtgggtgggaggaaaggaaagaagcaacagtcacccatgttagccacaagaagaggttggctgtttatggtttgcacagtgactttgtttttatctgtgctcaggcatgattacagtatctcattttatccggattacagtgacctcatctgatgttagagatttgagaattgttaaatgttcagcaggagaacgccaccgcctagtgtgaatgctaggtcagaagctgctttttcacactgaaaccatttaagtatgtacaaataagttaatagtgtaaatgtaggtgtaaaatacaatgcaaaacaaaataatgaagtaagtgaattaaattattgcaccaaatatggggatatgaaatagggaaagaaaagcattaagttacttatagtccataaagggactacattattttgttactctgataatcccataaaacaaagttttaagaatgtttacagtaaccatgaatggaattagtgaaactattcatatcaatgca

SEQ ID NO: 371946 - DNA, 6233 bp, Homo sapiens
ttagtcactgttattcaggagacattttattatagtgatttttaaattaacgaaatcgttccttggataagggaagataggtatattgtagataaaaatacgatcattagagataatttttgccaaagagaagggagagttgaatattctagtacagctgtaaattttaaaatcagttttgaagattaaaagttctttcattgcaccatttagtatagcttttgaccattgtcgtcttttctagctcgtctttattcatgccttgatcacatgagagaggtacttggagatgctgtgccagatgaaatattaattgaagcagttctgaagaacaagtttgatgtgcagaaggctttgtcaggggttctggaacaagatagagtgcagagtttgaaggacaagaatgaggcaacagtatctacaggaaagatagcaaaaggaaaaccagtagattcccagacatcgcgaagtgaatctgaaattgtgccaaaagttgctaaaatgactgtatctggaaagaagcaaactatgggatttgaagtgcctggagtatcttctgaagaaaatggtcatagtttccacacacctcaaaaaggaccgcccattgaagatgccattgcttcttccgatgttcttgagactgcttctaaatctgctaatccaccccacacgattcaagcatcagaagagcagagttcaaccccagcaccggtgaaaaagtctggcaagctgaggcagcaaatagatgtgaaggcggaactggagaagcggcaaggagggaagcagctactcaacttagtggtcattggtcatgttgatgctgggaaaagtactctgatgggccatatgctttatcttctgggtaatataaacaaaagaactatgcataagtatgaacaggagtctaaaaaggctggcaaagcttcgtttgcatatgcatgggtcttggatgaaactggcgaagaaagggaaaggggagtaaccatggatgttggtatgacaaagtttgaaaccacaaccaaagttattacattaatggatgctccaggccataaggacttcattccaaatatgattacaggagcagcccaggcggatgtagctgttttagttgtagatgccagcaggggagagtttgaagctggatttgagactggaggacaaacacgagagcatggactcttggtccgttctctgggagtgacgcagcttgcagttgcagttaataaaatggatcaggttaattggcaacaagaaaggtttcaagagattactggaaaacttgggcactttcttaagcaagcaggttttaaggagagtgatgtaggttttattcctacaagtggtctcagtggtgaaaatctaatcacaagatctcagtcaagtgaactcacaaaatggtataaaggactatgtttattagaacaaattgattcctttaagcctccccagcgatctattgacaaaccttttagattatgtgtgtccgatgttttcaaagatcaaggatctggattttgcataactggtaaaatagaagctggttatatccaaactggtgaccgactactggcaatgcctcctaatgaaacttgtaccgtgaaaggaatcactctgcatgatgaacctgtcgactgggcggcagcaggcgatcatgttagtcttactttggttgggatggatatcatcaaaatcaatgttggctgcatattttgtggccccaaagtacccattaaagcttgcactcgtttcagagcccgaatcctcatctttaatattgaaattcctatcactaaaggatttcctgtgctgttacactaccaaactgtcagtgaacccgccgttattaaacgattgattagtgtcttaaacaaaagcacgggtgaagtcacaaagaaaaagcctaagtttttgactaaaggccagaatgcattggtagagctacagacacaaagaccaatagctcttgagctatataaagactttaaagagctggggaggttcatgctacgttacggtggttctacaatagctgctggtgttgtcactgagataaaagaatgatgggtcagaatttctaccacgtttctggatacagtgaaatagctaacctctgtttcaagaatgcagttattaagtcaaaggaacaatgtgcaattgatatgtttttagatgagagagaaaaattaaagctaaaattagctgcaaagaagtattaataatcacctctgcaaaaattctaagttgccaactggcaaagaaagtctaatgttaaaaacaactttgcctttgaaacgttaataaatggatttactttgctaagatttatggcaagtgtcaaaaatagtatctgaagatactgaatcatcatgaaatgaactctacttctggccaaagcacaatgtatttgcagttttctcttttgattcaattatactgcacatgttttaaggaaaagtaacttaattgggtttttcaggcagttgatatttgacctaagcttttttttttttttttttccagttaatgctaagaaaagatttggggaaggttataataaaagtattttgtggtgaccataagaatgtccctccccaaacaagtaaacttgtgaaagtttaatttggaattagtggaagctgttcctttgaaagccaagatattatttaagttgtaaagccagctaataaaatgccttagtttgagcataatacaaactgtgttttgttctttagacatttatgagattctctgccactaacagtaaatatgatttaggggttttgtgggatctttttcacctaagagtttcctagctctgtcacatgaattcttttttatcctaatggcagatccaatttcatctcattcatttttttaaccataacttgcttttcccattctcacttttagaattatacctatgatggccctttctttatcttgcttaccttatagattataagtcccctgtgagtaagtaagagtcatgtttttctttaaagtttcaacaacaaaccccaaggtttatttatttaacaacaggtattcgttgaggtgccttctgggtgcaaggagctttagagtagattttgacctcagctgaacctggaactctgatctgatagactgtttatgataagcttttttttttattagcagcgtgatttgtatatcgatggcttaacatatacaacagcatttcttctccctgcaccttttcgtgaacctgacattttgaacataagcaataacatctgtatggtaaagtaggcagattatacatgtgttgcttagtgaatgattaccaagtgaacacacttggtatattgctttaccaaaatacatgtgtagttgtcacttcagattcactgagttaagaaagttttatttaaatattaatattaatcaagaatttaacagatatatgtgacagaaatctaacttcaagtgactgaagcagaaagaaaaatttttgaatgacataactgagaaaattagaggtagctctagctttgattccatttagatcgagcagctcacacaatgttagcaaggactcatctccactctgccttccctggtgctggttttgctctcaaactctatatagaactctcggccgggcgcggtggctcacacctgtaatcaaaacactttgggaggctgagtcgggaggatagcgtgagcccaggagtttgagaccagctaaggcaatatagtgagaccatgtctctacagaaaaaatttaaaaacagatcagctgggtgtggtgccacatgcctgtagtcccagcttctcaggaggctggggtgggaagatcacttgagcccaggaggtcgaggctgcagtgagccatgatcacatcactgcagtccagcctgggtgacagagcaagacctgtcaccctgccacccataaaaaacctcttctgtaatgccaggttcttgacaagatgtgataattccacacttacatcctcagatctcccatccagggcaaggacagactaaaagagcatatcttctccagaagtcctagaaacatctcatcattgactatgattgaattttatttattaatacttccctaggatatcctgtgtttgagtgtgaagttaatatcacacaaagcatgtagctaacagttgtgtgagggttggaaattcagggtgctgttaggaaggggaaatggattggggtttaaggtagggggagtaaaaacaagaaaccatccactctgtatattatataagactgtgatcgaattaagaattttagtttacagtttagcataaacaaatagtagtagaaatgaatgcatttattcattccttccttctccaatagtgtttaagtacaatctttttatttgcattttattgatgattgattgtggttgaaaggagtggtgatattatttcgaggatccactgtgtaagaagactgttggcagtggaaggctcgagttgattaagtgacaaagaggtaaagcagacatgcccaagcttggttatgctctgatttcctaccctgttactttcatccataatttatagtacatccattttgtgtcattttgcttcaggtatttcttgtcctgactgtcttcttttttatgattttactgtttcttcacactaatggctttgtcctctgactttgactctttgtgagattcttctgagcagttaacctctaggataatgtggcttgaacacattacagaactatgttttgacttgttagtattattcacacattcatgacaattgagcctctctactgtgagaaatgttttagaggccagtttctaggcatagctgtttttctcccatgagtatgcaaatcaatagttttaaccattgttaaaatgcaatcatagtgacttcagaaaatttggaaaatacagaaaatatagggaagaataaaattaacccacagttctgtcacctaaaggtaactgctgccaatgttttcatgtatttcttttctgtctctccaatgcatttttttacatagttgtgagcgttagccaagttattttcatgttgttatgtaatcaatatttttcaatagaagtattagaggttttttttattgatataaaaataacaattacagatcctgatatatagaagttattcaaaattatacagttttcaaaaaatcaagacaagtaggcccaatacaaactactgaatcatcttctaatttccctctaaaatatttatagaaatatgtaagtagaaaaacattcatcctttcctcgtctaattatgatcctgccatattccaggcacaagagaaagctctggggcttgagtcttaatagggctgatagtccaaccaggggacagggtatcataaagagataattcaaaactttaagattggagggtaggtgatggtagaaaattctgcggcaaacatttgttgatgctcatcatttgttgatgtcatcaaagatcaccagggcataattataatcaaaattagttttattgatgcttgctgcagcaagagagactgcacaccactggggtctatgggtgcttctcagtgggaaggtgtaaggaggggcttgctaagaatttgagcacatgtagctaattttaaggagggctcaagtgagcaagggtttcttctggattgagtgctgtcagaaagtggattgagtgctgtcagaaagtgggagtgattttgcaactgggtatcttaatttttatgttgtgggtgggaggaaaggaaagaagcaacagtcacccatgttagccacaagaagaggttggctgtttatggtttgcacagtgactttgtttttatctgtgctcaggcatgattacagtatctcattttatccggattacagtgacctcatctgatgttagagatttgagaattgttaaatgttcagcaggagaacgccaccgcctagtgtgaatgctaggtcagaagctgctttttcacactgaaaccatttaagtatgtacaaataagttaatagtgtaaatgtaggtgtaaaatacaatgcaaaacaaaataatgaagtaagtgaattaaattattgcaccaaatatggggatatgaaatagggaaagaaaagcattaagttacttatagtccataaagggactacattattttgttactctgataatcccataaaacaaagttttaagaatgtttacagtaaccatgaatggaattagtgaaactattcatatcaatgca

SEQ ID NO: 371947 - DNA, 1470 bp, Homo sapiens
aagcagtggtatcaacgcagagtggccattacgtccggggggcactttcttaagcaagcaggttttaaggagagtgatgtaggttttattcctacaagtggtctcagtggtgaaaatctaatcacaagatctcagtcaagtgaactcacaaaatggtataaaggactatgtttattagaacaaattgattcctttaagcctccccagcgatctattgacaaaccttttagattatgtgtgtccgatgttttcaaagatcaaggatctggattttgcataactggtaaaatagaagctggttatatccaaactggtgaccgactactggcaatgcctcctaatgaaacttgtaccgtgaaaggaatcactctgcatgatgaacctgtcgactgggcggcagcaggcgatcatgttagtcttactttggttgggatggatatcatcaaaatcaatgttggctgcatattttgtggccccaaagtacccattaaagcttgcactcgtttcagagcccgaatcctcatctttaatattgaaattcctatcactaaaggatttcctgtgctgttacactaccaaactgtcagtgaacccgccgttattaaacgattgattagtgtcttaaacaaaagcacgggtgaagtcacaaagaaaaagcctaagtttttgactaaaggccagaatgcattggtagagctacagacacaaagaccaatagctcttgagctatataaagactttaaagagctggggaggttcatgctacgttacggtggttctacaatagctgctggtgttgtcactgagataaaagaatgatgggtcagaatttctaccacgtttctggatacagtgaaatagctaacctctgtttcaagaatgcagttattaagtcaaaggaacaatgtgcaattgatatgtttttagatgagagagaaaaattaaagctaaaattagctgcaaagaagtattaataatcacctctgcaaaaattctaagttgccaactggcaaagaaagtctaatgttaaaaacaactttgcctttgaaacgttaataaatggatttactttgctaagatttatggcaagtgtcaaaaatagtatctgaagatactgaatcatcatgaaatgaactctacttctggccaaagcacaatgtatttgcagttttctcttttgattcaattatactgcacatgttttaaggaaaagtaacttaattgggtttttcaggcagttgatatttgacctaagcttttttttttttttttttccagttaatgctaagaaaagatttggggaaggttataataaaagtattttgtggtgaccataagaatgtccctccccaaacaagtaaacttgtgaaagtttaatttggaattagtggaagctgttcctttgaaagccaagatattatttaagttgtaaagccagctaataaaatgccttagtttgagcataataca

SEQ ID NO: 371948 - DNA, 2508 bp, Homo sapiens
tgattctgaggcattgccgtcgcgcggtgcatagctaaagacgtcgcgcttgcgcaggcgctcggcgcagaggcctgcgggaagccaagatggcgcataggggttctccaggctgcagttggcgccttatcagtatctaagcggagtgttttggaaggagttaaggggctgtggcaaacgccctctccgccgtcatggcccggcatcggaatgttcgaggctataactacgatgaagattttgaagatgatgatctctacggccagtctgtagaggatgattattgtatttcgccgtcaacagctgctcagtttatttattcacggcgtgacaaaccttccgttgagcctgtggaagaatatgattatgaagatctgaaagaatcttccaattctgtttcaaaccatcagctcagtggatttgatcaagctcgtctttattcatgccttgatcacatgagagaggtacttggagatgctgtgccagatgaaatattaattgaagcagttctgaagaacaagtttgatgtgcagaaggctttgtcaggggttctggaacaagatagagtgcagagtttgaaggacaagaatgaggcaacagtatctacaggaaagatagcaaaaggaaaaccagtagattcccagacatcgcgaagtgaatctgaaattgtgccaaaagttgctaaaatgactgtatctggaaagaagcaaactatgggatttgaagtgcctggagtatcttctgaagaaaatggtcatagtttccacacacctcaaaaaggaccgcccattgaagatgccattgcttcttccgatgttcttgagactgcttctaaatctgctaatccaccccacacgattcaagcatcagaagagcagagttcaaccccagcaccggtgaaaaagtctggcaagctgaggcagcaaatagatgtgaaggcggaactggagaagcggcaaggagggaagcagctactcaacttagtggtcattggtcatgttgatgctgggaaaagtactctgatgggccatatgctttatcttctgggtaatataaacaaaagaactatgcataagtatgaacaggagtctaaaaaggctggcaaagcttcgtttgcatatgcatgggtcttggatgaaactggcgaagaaagggaaaggggagtaaccatggatgttggtatgacaaagtttgaaaccacaaccaaagttattacattaatggatgctccaggccataaggacttcattccaaatatgattacaggagcagcccaggcggatgtagctgttttagttgtagatgccagcaggggagagtttgaagctggatttgagactggaggacaaacacgagagcatggactcttggtccgttctctgggagtgacgcagcttgcagttgcagttaataaaatggatcaggttaattggcaacaagaaaggtttcaagagattactggaaaacttgggcactttcttaagcaagcaggttttaaggagagtgatgtaggttttattcctacaagtggtctcagtggtgaaaatctaatcacaagatctcagtcaagtgaactcacaaaatggtataaaggactatgtttattagaacaaattgattcctttaagcctccccagcgatctattgacaaaccttttagattatgtgtgtccgatgttttcaaagatcaaggatctggattttgcataactggtaaaatagaagctggttatatccaaactggtgaccgactactggcaatgcctcctaatgaaacttgtaccgtgaaaggaatcactctgcatgatgaacctgtcgactgggcggcagcaggcgatcatgttagtcttactttggttgggatggatatcatcaaaatcaatgttggctgcatattttgtggccccaaagtacccattaaagcttgcactcgtttcagagcccgaatcctcatctttaatattgaaattcctatcactaaaggatttcctgtgctgttacactaccaaactgtcagtgaacccgccgttattaaacgattgattagtgtcttaaacaaaagcacgggtgaagtcacaaagaaaaagcctaagtttttgactaaaggccagaatgcattggtagagctacagacacaaagaccaatagctcttgagctatataaagactttaaagagctggggaggttcatgctacgttacggtggttctacaatagctgctggtgttgtcactgagataaaagaatgatgggtcagaatttctaccacgtttctggatacagtgaaatagctaacctctgtttcaagaatgcagttattaagtcaaaggaacaatgtgcaattgatatgtttttagatgagagagaaaaattaaagctaaaattagctgcaaagaagtattaataatcacctctgcaaaaattctaagttgccaactggcaaagaaagtctaatgttaaaaacaactttgcctttgaaacgttaataaatggatttactttgctaag

SEQ ID NO: 371949 - DNA, 1418 bp, Homo sapiens
catggcaagcactgtgtctgatcctatttaattttcatcacaacgctataaaagcctacttattttacacttgaggaaactgaggtacagacagaagagaaagagttgagattcaatcccaggttctttccctactactacttgtaataataaaaatgacaacaacatttgttctaaatgacgaattctcttacttaatctttagaacaacactaagatgttgttaccctccatctttacagaggaaaaagctgacaggttatgcactgaactaaagttgatgcagtaattggtggggtagaaatttgaaatgcctctcatgacttttttcctcttagtgagttaagtaaccacctgattagagtggtgggacttagaggaagcaactggagatcctgaaagactccaagcagtagcactgaattgaagataattaagtataagtgccaaaagaaaaggccagagatactgtggtagcagatttttagtgttataattttttgttttaggtgctgttacactaccaaactgtcagtgaacccgccgttattaaacgattgattagtgtcttaaacaaaagcacgggtgaagtcacaaagaaaaagcctaagtttttgactaaaggccagaatgcattggtagagctacagacacaaagaccaatagctcttgagctatataaagactttaaagagctggggaggttcatgctacgttacggtggttctacaatagctgctggtgttgtcactgagataaaagaatgatgggtcagaatttctaccacgtttctggatacagtgaaatagctaacctctgtttcaagaatgcagttattaagtcaaaggaacaatgtgcaattgatatgtttttagatgagagagaaaaattaaagctaaaattagctgcaaagaagtattaataatcacctctgcaaaaattctaagttgccaactggcaaagaaagtctaatgttaaaaacaactttgcctttgaaacgttaataaatggatttactttgctaagatttatggcaagtgtcaaaaatagtatctgaagatactgaatcatcatgaaatgaactctacttctggccaaagcacaatgtatttgcagttttctcttttgattcaattatactgcacatgttttaaggaaaagtaacttaattgggtttttcaggcagttgatatttgacctaagcttttttttttttttttttccagttaatgctaagaaaagatttggggaaggttataataaaagtattttgtggtgaccataagaatgtccctccccaaacaagtaaacttgtgaaagtttaatttggaattagtggaagctgttcctttgaaagccaagatattatttaagttgtaaagccagctaataaaatgccttagtttgagcataataca

SEQ ID NO: 371950 - DNA, 2391 bp, Homo sapiens
tgattctgaggcattgccgtcgcgcggtgcatagctaaagacgtcgcgcttgcgcaggcgctcggcgcagaggcctgcgggaagccaagatggcgcataggggttctccaggctgcagttggcgccttatcagtatctaagcggagtgttttggaaggagttaaggggctgtggcaaacgccctctccgccgtcatggcccggcatcggaatgttcgaggctataactacgatgaagattttgaagatgatgatctctacggccagtctgtagaggatgattattgtatttcgccgtcaacagctgctcagtttatttattcacggcgtgacaaaccttccgttgagcctgtggaagaatatgattatgaagatctgaaagaatcttccaattctgtttcaaaccatcagctcagtggatttgatcaagctcgtctttattcatgccttgatcacatgagagaggtacttggagatgctgtgccagatgaaatattaattgaagcagttctgaagaacaagtttgatgtgcagaaggctttgtcaggggttctggaacaagatagagtgcagagtttgaaggacaagaatgaggcaacagtatctacaggaaagatagcaaaaggaaaaccagtagattcccagacatcgcgaagtgaatctgaaattgtgccaaaagttgctaaaatgactgtatctggaaagaagcaaactatgggatttgaagtgcctggagtatcttctgaagaaaatggtcatagtttccacacacctcaaaaaggaccgcccattgaagatgccattgcttcttccgatgttcttgagactgcttctaaatctgctaatccaccccacacgattcaagcatcagaagagcagagttcaaccccagcaccggtgaaaaagtctggcaagctgaggcagcaaatagatgtgaaggcggaactggagaagcggcaaggagggaagcagctactcaacttagtggtcattggtcatgttgatgctgggaaaagtactctgatgggccatatgctttatcttctgggtaatataaacaaaagaactatgcataagtatgaacaggagtctaaaaaggctggcaaagcttcgtttgcatatgcatgggtcttggatgaaactggcgaagaaagggaaaggggagtaaccatggatgttggtatgacaaagtttgaaaccacaaccaaagttattacattaatggatgctccaggccataaggacttcattccaaatatgattacaggagcagcccaggcggatgtagctgttttagttgtagatgccagcaggggagagtttgaagctggatttgagactggaggacaaacacgagagcatggactcttggtccgttctctgggagtgacgcagcttgcagttgcagttaataaaatggatcaggttaattggcaacaagaaaggtttcaagagattactggaaaacttgggcactttcttaagcaagcaggttttaaggagagtgatgtaggttttattcctacaagtggtctcagtggtgaaaatctaatcacaagatctcagtcaagtgaactcacaaaatggtataaaggactatgtttattagaacaaattgattcctttaagcctccccagcgatctattgacaaaccttttagattatgtgtgtccgatgttttcaaagatcaaggatctggattttgcataactggtaaaatagaagctggttatatccaaactggtgaccgactactggcaatgcctcctaatgaaacttgtaccgtgaaaggaatcactctgcatgatgaacctgtcgactgggcggcagcaggcgatcatgttagtcttactttggttgggatggatatcatcaaaatcaatgttggctgcatattttgtggccccaaagtacccattaaagcttgcactcgtttcagagcccgaatcctcatctttaatattgaaattcctatcactaaaggatttcctgtgctgttacactaccaaactgtcagtgaacccgccgttattaaacgattgattagtgtcttaaacaaaagcacgggtgaagtcacaaagaaaaagcctaagtttttgactaaaggccagaatgcattggtagagctacagacacaaagaccaatagctcttgagctatataaagactttaaagagctggggaggttcatgctacgttacggtggttctacaatagctgctggtgttgtcactgagataaaagaatgatgggtcagaatttctaccacgtttctggatacagtgaaatagctaacctctgtttcaagaatgcagttattaagtcaaaggaacaatgtgcaattgatatgtttttagatgagagagaaaaattaaagctaaaattagctgc

SEQ ID NO: 371951 - DNA, 6353 bp, Homo sapiens
cggccggcactcacgggcgagtgtcttcccaacgtagcctaagctaagtatcgagctgcccttatcagtatctaagcggagtgttttggaaggagttaaggggctgtggcaaacgccctctccgccgtcatggcccggcatcggaatgttcgaggctataactacgatgaagattttgaagatgatgatctctacggccagtctgtagaggatgattattgtatttcgccgtcaacagctgctcagtttatttattcacggcgtgacaaaccttccgttgagcctgtggaagaatatgattatgaagatctgaaagaatcttccaattctgtttcaaaccatcagctcagtggatttgatcaagctcgtctttattcatgccttgatcacatgagagaggtacttggagatgctgtgccagatgaaatattaattgaagcagttctgaagaacaagtttgatgtgcagaaggctttgtcaggggttctggaacaagatagagtgcagagtttgaaggacaagaatgaggcaacagtatctacaggaaagatagcaaaaggaaaaccagtagattcccagacatcgcgaagtgaatctgaaattgtgccaaaagttgctaaaatgactgtatctggaaagaagcaaactatgggatttgaagtgcctggagtatcttctgaagaaaatggtcatagtttccacacacctcaaaaaggaccgcccattgaagatgccattgcttcttccgatgttcttgagactgcttctaaatctgctaatccaccccacacgattcaagcatcagaagagcagagttcaaccccagcaccggtgaaaaagtctggcaagctgaggcagcaaatagatgtgaaggcggaactggagaagcggcaaggagggaagcagctactcaacttagtggtcattggtcatgttgatgctgggaaaagtactctgatgggccatatgctttatcttctgggtaatataaacaaaagaactatgcataagtatgaacaggagtctaaaaaggctggcaaagcttcgtttgcatatgcatgggtcttggatgaaactggcgaagaaagggaaaggggagtaaccatggatgttggtatgacaaagtttgaaaccacaaccaaagttattacattaatggatgctccaggccataaggacttcattccaaatatgattacaggagcagcccaggcggatgtagctgttttagttgtagatgccagcaggggagagtttgaagctggatttgagactggaggacaaacacgagagcatggactcttggtccgttctctgggagtgacgcagcttgcagttgcagttaataaaatggatcaggttaattggcaacaagaaaggtttcaagagattactggaaaacttgggcactttcttaagcaagcaggttttaaggagagtgatgtaggttttattcctacaagtggtctcagtggtgaaaatctaatcacaagatctcagtcaagtgaactcacaaaatggtataaaggactatgtttattagaacaaattgattcctttaagcctccccagcgatctattgacaaaccttttagattatgtgtgtccgatgttttcaaagatcaaggatctggattttgcataactggtaaaatagaagctggttatatccaaactggtgaccgactactggcaatgcctcctaatgaaacttgtaccgtgaaaggaatcactctgcatgatgaacctgtcgactgggcggcagcaggcgatcatgttagtcttactttggttgggatggatatcatcaaaatcaatgttggctgcatattttgtggccccaaagtacccattaaagcttgcactcgtttcagagcccgaatcctcatctttaatattgaaattcctatcactaaaggatttcctgtgctgttacactaccaaactgtcagtgaacccgccgttattaaacgattgattagtgtcttaaacaaaagcacgggtgaagtcacaaagaaaaagcctaagtttttgactaaaggccagaatgcattggtagagctacagacacaaagaccaatagctcttgagctatataaagactttaaagagctggggaggttcatgctacgttacggtggttctacaatagctgctggtgttgtcactgagataaaagaatgatgggtcagaatttctaccacgtttctggatacagtgaaatagctaacctctgtttcaagaatgcagttattaagtcaaaggaacaatgtgcaattgatatgtttttagatgagagagaaaaattaaagctaaaattagctgcaaagaagtattaataatcacctctgcaaaaattctaagttgccaactggcaaagaaagtctaatgttaaaaacaactttgcctttgaaacgttaataaatggatttactttgctaagatttatggcaagtgtcaaaaatagtatctgaagatactgaatcatcatgaaatgaactctacttctggccaaagcacaatgtatttgcagttttctcttttgattcaattatactgcacatgttttaaggaaaagtaacttaattgggtttttcaggcagttgatatttgacctaagcttttttttttttttttttccagttaatgctaagaaaagatttggggaaggttataataaaagtattttgtggtgaccataagaatgtccctccccaaacaagtaaacttgtgaaagtttaatttggaattagtggaagctgttcctttgaaagccaagatattatttaagttgtaaagccagctaataaaatgccttagtttgagcataatacaaactgtgttttgttctttagacatttatgagattctctgccactaacagtaaatatgatttaggggttttgtgggatctttttcacctaagagtttcctagctctgtcacatgaattcttttttatcctaatggcagatccaatttcatctcattcatttttttaaccataacttgcttttcccattctcacttttagaattatacctatgatggccctttctttatcttgcttaccttatagattataagtcccctgtgagtaagtaagagtcatgtttttctttaaagtttcaacaacaaaccccaaggtttatttatttaacaacaggtattcgttgaggtgccttctgggtgcaaggagctttagagtagattttgacctcagctgaacctggaactctgatctgatagactgtttatgataagcttttttttttattagcagcgtgatttgtatatcgatggcttaacatatacaacagcatttcttctccctgcaccttttcgtgaacctgacattttgaacataagcaataacatctgtatggtaaagtaggcagattatacatgtgttgcttagtgaatgattaccaagtgaacacacttggtatattgctttaccaaaatacatgtgtagttgtcacttcagattcactgagttaagaaagttttatttaaatattaatattaatcaagaatttaacagatatatgtgacagaaatctaacttcaagtgactgaagcagaaagaaaaatttttgaatgacataactgagaaaattagaggtagctctagctttgattccatttagatcgagcagctcacacaatgttagcaaggactcatctccactctgccttccctggtgctggttttgctctcaaactctatatagaactctcggccgggcgcggtggctcacacctgtaatcaaaacactttgggaggctgagtcgggaggatagcgtgagcccaggagtttgagaccagctaaggcaatatagtgagaccatgtctctacagaaaaaatttaaaaacagatcagctgggtgtggtgccacatgcctgtagtcccagcttctcaggaggctggggtgggaagatcacttgagcccaggaggtcgaggctgcagtgagccatgatcacatcactgcagtccagcctgggtgacagagcaagacctgtcaccctgccacccataaaaaacctcttctgtaatgccaggttcttgacaagatgtgataattccacacttacatcctcagatctcccatccagggcaaggacagactaaaagagcatatcttctccagaagtcctagaaacatctcatcattgactatgattgaattttatttattaatacttccctaggatatcctgtgtttgagtgtgaagttaatatcacacaaagcatgtagctaacagttgtgtgagggttggaaattcagggtgctgttaggaaggggaaatggattggggtttaaggtagggggagtaaaaacaagaaaccatccactctgtatattatataagactgtgatcgaattaagaattttagtttacagtttagcataaacaaatagtagtagaaatgaatgcatttattcattccttccttctccaatagtgtttaagtacaatctttttatttgcattttattgatgattgattgtggttgaaaggagtggtgatattatttcgaggatccactgtgtaagaagactgttggcagtggaaggctcgagttgattaagtgacaaagaggtaaagcagacatgcccaagcttggttatgctctgatttcctaccctgttactttcatccataatttatagtacatccattttgtgtcattttgcttcaggtatttcttgtcctgactgtcttcttttttatgattttactgtttcttcacactaatggctttgtcctctgactttgactctttgtgagattcttctgagcagttaacctctaggataatgtggcttgaacacattacagaactatgttttgacttgttagtattattcacacattcatgacaattgagcctctctactgtgagaaatgttttagaggccagtttctaggcatagctgtttttctcccatgagtatgcaaatcaatagttttaaccattgttaaaatgcaatcatagtgacttcagaaaatttggaaaatacagaaaatatagggaagaataaaattaacccacagttctgtcacctaaaggtaactgctgccaatgttttcatgtatttcttttctgtctctccaatgcatttttttacatagttgtgagcgttagccaagttattttcatgttgttatgtaatcaatatttttcaatagaagtattagaggttttttttattgatataaaaataacaattacagatcctgatatatagaagttattcaaaattatacagttttcaaaaaatcaagacaagtaggcccaatacaaactactgaatcatcttctaatttccctctaaaatatttatagaaatatgtaagtagaaaaacattcatcctttcctcgtctaattatgatcctgccatattccaggcacaagagaaagctctggggcttgagtcttaatagggctgatagtccaaccaggggacagggtatcataaagagataattcaaaactttaagattggagggtaggtgatggtagaaaattctgcggcaaacatttgttgatgctcatcatttgttgatgtcatcaaagatcaccagggcataattataatcaaaattagttttattgatgcttgctgcagcaagagagactgcacaccactggggtctatgggtgcttctcagtgggaaggtgtaaggaggggcttgctaagaatttgagcacatgtagctaattttaaggagggctcaagtgagcaagggtttcttctggattgagtgctgtcagaaagtggattgagtgctgtcagaaagtgggagtgattttgcaactgggtatcttaatttttatgttgtgggtgggaggaaaggaaagaagcaacagtcacccatgttagccacaagaagaggttggctgtttatggtttgcacagtgactttgtttttatctgtgctcaggcatgattacagtatctcattttatccggattacagtgacctcatctgatgttagagatttgagaattgttaaatgttcagcaggagaacgccaccgcctagtgtgaatgctaggtcagaagctgctttttcacactgaaaccatttaagtatgtacaaataagttaatagtgtaaatgtaggtgtaaaatacaatgcaaaacaaaataatgaagtaagtgaattaaattattgcaccaaatatggggatatgaaatagggaaagaaaagcattaagttacttatagtccataaagggactacattattttgttactctgataatcccataaaacaaagttttaagaatgtttacagtaaccatgaatggaattagtgaaactattcatatcaatgca

SEQ ID NO: 371952 - DNA, 5856 bp, Homo sapiens
ttgacgtgtggaaagaaaaatcacaaactgggagacagtatttgtagcattggtagcaaaaggaaaaccagtagattcccagacatcgcgaagtgaatctgaaattgtgccaaaagttgctaaaatgactgtatctggaaagaagcaaactatgggatttgaagtgcctggagtatcttctgaagaaaatggtcatagtttccacacacctcaaaaaggaccgcccattgaagatgccattgcttcttccgatgttcttgagactgcttctaaatctgctaatccaccccacacgattcaagcatcagaagagcagagttcaaccccagcaccggtgaaaaagtctggcaagctgaggcagcaaatagatgtgaaggcggaactggagaagcggcaaggagggaagcagctactcaacttagtggtcattggtcatgttgatgctgggaaaagtactctgatgggccatatgctttatcttctgggtaatataaacaaaagaactatgcataagtatgaacaggagtctaaaaaggctggcaaagcttcgtttgcatatgcatgggtcttggatgaaactggcgaagaaagggaaaggggagtaaccatggatgttggtatgacaaagtttgaaaccacaaccaaagttattacattaatggatgctccaggccataaggacttcattccaaatatgattacaggagcagcccaggcggatgtagctgttttagttgtagatgccagcaggggagagtttgaagctggatttgagactggaggacaaacacgagagcatggactcttggtccgttctctgggagtgacgcagcttgcagttgcagttaataaaatggatcaggttaattggcaacaagaaaggtttcaagagattactggaaaacttgggcactttcttaagcaagcaggttttaaggagagtgatgtaggttttattcctacaagtggtctcagtggtgaaaatctaatcacaagatctcagtcaagtgaactcacaaaatggtataaaggactatgtttattagaacaaattgattcctttaagcctccccagcgatctattgacaaaccttttagattatgtgtgtccgatgttttcaaagatcaaggatctggattttgcataactggtaaaatagaagctggttatatccaaactggtgaccgactactggcaatgcctcctaatgaaacttgtaccgtgaaaggaatcactctgcatgatgaacctgtcgactgggcggcagcaggcgatcatgttagtcttactttggttgggatggatatcatcaaaatcaatgttggctgcatattttgtggccccaaagtacccattaaagcttgcactcgtttcagagcccgaatcctcatctttaatattgaaattcctatcactaaaggatttcctgtgctgttacactaccaaactgtcagtgaacccgccgttattaaacgattgattagtgtcttaaacaaaagcacgggtgaagtcacaaagaaaaagcctaagtttttgactaaaggccagaatgcattggtagagctacagacacaaagaccaatagctcttgagctatataaagactttaaagagctggggaggttcatgctacgttacggtggttctacaatagctgctggtgttgtcactgagataaaagaatgatgggtcagaatttctaccacgtttctggatacagtgaaatagctaacctctgtttcaagaatgcagttattaagtcaaaggaacaatgtgcaattgatatgtttttagatgagagagaaaaattaaagctaaaattagctgcaaagaagtattaataatcacctctgcaaaaattctaagttgccaactggcaaagaaagtctaatgttaaaaacaactttgcctttgaaacgttaataaatggatttactttgctaagatttatggcaagtgtcaaaaatagtatctgaagatactgaatcatcatgaaatgaactctacttctggccaaagcacaatgtatttgcagttttctcttttgattcaattatactgcacatgttttaaggaaaagtaacttaattgggtttttcaggcagttgatatttgacctaagcttttttttttttttttttccagttaatgctaagaaaagatttggggaaggttataataaaagtattttgtggtgaccataagaatgtccctccccaaacaagtaaacttgtgaaagtttaatttggaattagtggaagctgttcctttgaaagccaagatattatttaagttgtaaagccagctaataaaatgccttagtttgagcataatacaaactgtgttttgttctttagacatttatgagattctctgccactaacagtaaatatgatttaggggttttgtgggatctttttcacctaagagtttcctagctctgtcacatgaattcttttttatcctaatggcagatccaatttcatctcattcatttttttaaccataacttgcttttcccattctcacttttagaattatacctatgatggccctttctttatcttgcttaccttatagattataagtcccctgtgagtaagtaagagtcatgtttttctttaaagtttcaacaacaaaccccaaggtttatttatttaacaacaggtattcgttgaggtgccttctgggtgcaaggagctttagagtagattttgacctcagctgaacctggaactctgatctgatagactgtttatgataagcttttttttttattagcagcgtgatttgtatatcgatggcttaacatatacaacagcatttcttctccctgcaccttttcgtgaacctgacattttgaacataagcaataacatctgtatggtaaagtaggcagattatacatgtgttgcttagtgaatgattaccaagtgaacacacttggtatattgctttaccaaaatacatgtgtagttgtcacttcagattcactgagttaagaaagttttatttaaatattaatattaatcaagaatttaacagatatatgtgacagaaatctaacttcaagtgactgaagcagaaagaaaaatttttgaatgacataactgagaaaattagaggtagctctagctttgattccatttagatcgagcagctcacacaatgttagcaaggactcatctccactctgccttccctggtgctggttttgctctcaaactctatatagaactctcggccgggcgcggtggctcacacctgtaatcaaaacactttgggaggctgagtcgggaggatagcgtgagcccaggagtttgagaccagctaaggcaatatagtgagaccatgtctctacagaaaaaatttaaaaacagatcagctgggtgtggtgccacatgcctgtagtcccagcttctcaggaggctggggtgggaagatcacttgagcccaggaggtcgaggctgcagtgagccatgatcacatcactgcagtccagcctgggtgacagagcaagacctgtcaccctgccacccataaaaaacctcttctgtaatgccaggttcttgacaagatgtgataattccacacttacatcctcagatctcccatccagggcaaggacagactaaaagagcatatcttctccagaagtcctagaaacatctcatcattgactatgattgaattttatttattaatacttccctaggatatcctgtgtttgagtgtgaagttaatatcacacaaagcatgtagctaacagttgtgtgagggttggaaattcagggtgctgttaggaaggggaaatggattggggtttaaggtagggggagtaaaaacaagaaaccatccactctgtatattatataagactgtgatcgaattaagaattttagtttacagtttagcataaacaaatagtagtagaaatgaatgcatttattcattccttccttctccaatagtgtttaagtacaatctttttatttgcattttattgatgattgattgtggttgaaaggagtggtgatattatttcgaggatccactgtgtaagaagactgttggcagtggaaggctcgagttgattaagtgacaaagaggtaaagcagacatgcccaagcttggttatgctctgatttcctaccctgttactttcatccataatttatagtacatccattttgtgtcattttgcttcaggtatttcttgtcctgactgtcttcttttttatgattttactgtttcttcacactaatggctttgtcctctgactttgactctttgtgagattcttctgagcagttaacctctaggataatgtggcttgaacacattacagaactatgttttgacttgttagtattattcacacattcatgacaattgagcctctctactgtgagaaatgttttagaggccagtttctaggcatagctgtttttctcccatgagtatgcaaatcaatagttttaaccattgttaaaatgcaatcatagtgacttcagaaaatttggaaaatacagaaaatatagggaagaataaaattaacccacagttctgtcacctaaaggtaactgctgccaatgttttcatgtatttcttttctgtctctccaatgcatttttttacatagttgtgagcgttagccaagttattttcatgttgttatgtaatcaatatttttcaatagaagtattagaggttttttttattgatataaaaataacaattacagatcctgatatatagaagttattcaaaattatacagttttcaaaaaatcaagacaagtaggcccaatacaaactactgaatcatcttctaatttccctctaaaatatttatagaaatatgtaagtagaaaaacattcatcctttcctcgtctaattatgatcctgccatattccaggcacaagagaaagctctggggcttgagtcttaatagggctgatagtccaaccaggggacagggtatcataaagagataattcaaaactttaagattggagggtaggtgatggtagaaaattctgcggcaaacatttgttgatgctcatcatttgttgatgtcatcaaagatcaccagggcataattataatcaaaattagttttattgatgcttgctgcagcaagagagactgcacaccactggggtctatgggtgcttctcagtgggaaggtgtaaggaggggcttgctaagaatttgagcacatgtagctaattttaaggagggctcaagtgagcaagggtttcttctggattgagtgctgtcagaaagtggattgagtgctgtcagaaagtgggagtgattttgcaactgggtatcttaatttttatgttgtgggtgggaggaaaggaaagaagcaacagtcacccatgttagccacaagaagaggttggctgtttatggtttgcacagtgactttgtttttatctgtgctcaggcatgattacagtatctcattttatccggattacagtgacctcatctgatgttagagatttgagaattgttaaatgttcagcaggagaacgccaccgcctagtgtgaatgctaggtcagaagctgctttttcacactgaaaccatttaagtatgtacaaataagttaatagtgtaaatgtaggtgtaaaatacaatgcaaaacaaaataatgaagtaagtgaattaaattattgcaccaaatatggggatatgaaatagggaaagaaaagcattaagttacttatagtccataaagggactacattattttgttactctgataatcccataaaacaaagttttaagaatgtttacagtaaccatgaatggaattagtgaaactattcatatcaatgca

SEQ ID NO: 371953 - DNA, 723 bp, Homo sapiens
tgattctgaggcattgccgtcgcgcggtgcatagctaaagacgtcgcgcttgcgcaggcgctcggcgcagaggcctgcgggaagccaagatggcgcataggggttctccaggctgcagttggcgccttatcagtatctaagcggagtgttttggaaggagttaaggggctgtggcaaacgccctctccgccgtcatggcccggcatcggaatgttcgaggctataactacgatgaagattttgaagatgatgatctctacggccagtctgtagaggatgattattgtatttcgccgtcaacagctgctcagtttatttattcacggcgtgacaaaccttccgttgagcctgtggaagaatatgattatgaagatctgaaagaatcttccaattctgtttcaaaccatcagctcagtggatttgatcaagctcgtctttattcatgccttgatcacatgagagaggtacttggagatgctgtgccagatgaaatattaattgaagcagttctgaagaacaagtttgatgtgcagaaggctttgtcaggggttctggaacaagatagagtgcagagtttgaaggacaagaatgaggcaacagtatctacaggaaagatagcaaaaggcccttgctgctagaccttcagcttttgcctcaacactgtgtcttcgttacccactgaaaagctgcaagcgacgcacccttgacctctataagactttt

SEQ ID NO: 371954 - DNA, 841 bp, Homo sapiens
attcaagctaggtagtcagtatctcagccaggctgtctcctggctccctgaacattatggtgctgaccacaaactttcctgtccacttatacaaacttctagtgagtgtgtgtgattactagcttcatgaatacctgacccctccactctgaaggaggaacaggcctgtctggatcacttctctgtccctaactgagcccatctcatttagggaaactacagagcactgttgctttttttttttagatggagtctcgttctgtcgtccaggctggagtgcggtggcgtgatctcagctcactccagcctccacttcccaggttcaagtgattctcctgcctcagccccccaagtaactgggattacaggcatgcaccaccatgcctggctaattttttgtatttttagtagagacggggctttgccatgttggccaggctggtctcgaactcctgaccttgagtaatccacccgcctcggcctcccaaagtgctgggattacaggtgtgagccactgagcccggccacagtgcagtatttctaaccagtgatcagggtaaagaggatgcgtgtccaccatcccagccctgatcagcctgtctgtgcatcccccatcccagccagggcttggagcagccttgctcaccactgtgtcccctgcattgtaacacatccaggcacaagaatagccgcccagtgactgccaagtgagtgaaccagcctgcttggagcctgcctctttcccaaactgctcattatcctgttaccccacccagcccacgtgtccaaatacactccagatgcaaaataaaaagctctacgacaatggctctgaatgttc

SEQ ID NO: 371955 - DNA, 541 bp, Homo sapiens
attcaagctaggtagtcagtatctcagccaggctgtctcctggctccctgaacattatggtgctgaccacaaactttcctgtccacttatacaaacttctagtgagtgtgtgtgattactagcttcatgaatacctgacccctccactctgaaggaggaacaggcctgtctggatcacttctctgtccctaactgagcccatctcatttagggaaactacagagcactgttgctttttttttttagatggagtctcgttctgtcgtccaggctggagtgcggtggcgtgatctcagctcactccagcctccacttcccagccagggcttggagcagccttgctcaccactgtgtcccctgcattgtaacacatccaggcacaagaatagccgcccagtgactgccaagtgagtgaaccagcctgcttggagcctgcctctttcccaaactgctcattatcctgttaccccacccagcccacgtgtccaaatacactccagatgcaaaataaaaagctctacgacaatggctctgaatgttc

SEQ ID NO: 371956 - DNA, 2532 bp, Homo sapiens
ggaggtgcactttacttcctgactcctttcctttttccagtggttatcgcggcgcccaccggcctctgatctctgagtcttctccaacccacagacgttttttgttgctctggttccaggaccttctccacaactaggccattttccctgccaggtgtcctttttgacctcttgacctctgactcaaaggtcagctcaaaggttccgaactcgggcctgggatgtgagggggtactgaacctaagttctccgaatctttagccctgggtccctaagtcgcatccttaaggcacctcactctagatctgagccttcatatcccaaactcactcatgagtttccacatccagccccaaagaatgagttaactcctactaactctccacctaagactcccgaggtaacccaaccggtaccacagatccggttccggatttaaggaccccaccctgttaaccgtcaggtgccttatgacttgagtcagcctcgcaattcctgctcccgtggtttcaaatattagccctggtcctttcacacccactgctcagtccccagattctggaactcagctcttaaacctttaaaatctccatccctgagaccgttctccgttggaggatccttccctccccgctttctgaacctctcaacacctcctgtagaccccaaaatgacttctccatgctctcctcccctaaaaccaccaatttctcctccaaaaacccctgtaccccaagccagcagcattccatctcctcctctacccccaagtcccctggacttttcagctttaccatcccctccctggagtcagcagacccctgttcccccaccgctcccactgcctcctccacccgctgccacagggcctgctccccctcatgtcttcggcctggagaagagccagctcctgaaggaggcctttgataaggccggcccggtccccaagggcagagaagatgtgaagaggcttctgaaactacacaaggaccggttccgaggtgacctgcggtggatcctcttctgtgcagacctgccgtccctcatccaagaaggccctcaatgcgggctggtggccttgtggatggcaggtactctcctgtcgccccccagtggcgtccccctggagagactcatacgggtggccacggaaagaggctacacggcccagggagagatgttctcagtggccgatatgggcaggctggcccaggaggtgctgggctgccaggccaagctgctctctggtggcctgggcggtcccaacagagacctcgtcctgcagcacctggtcactggacatcccctgctcatccccaccagctacgacgaggacttcaaccatgagccgtgtcagaggaagggccacaaggcacactgggcggtgagtgcaggggtcctgctgggtgttcgggctgtgcccagtctcggctacactgaggaccctgagctgccgggcctgttccacccagtgctgggcacgccctgccaaccaccatccctgccagaggagggctccccgggagctgtctacctgctgtccaagcagggcaagagttggcactatcagctgtgggactacgaccaggtccgggagagcaacctgcagctgacggacttctcgccctcacgggccactgacggccgggtgtacgtggtgcccgtgggtggggtacgggctggcctctgtggccaggccctgctcctcacaccacaggactgcagccattagctgcggctgcggtctcaggctgcagcctagctcgttttaaagcccatctgggagcagttacctgtgccagcccctctacctgtgttagcagatctggcaaccctgtaaggggggtgctagatggacccgatttgacagatggcaagactgaggcctggagaagtggaatcactggcctgaggtcacatgactagcacatggcaagatggagtctcgttctgtcgtccaggctggagtgcggtggcgtgatctcagctcactccagcctccacttcccaggttcaagtgattctcctgcctcagccccccaagtaactgggattacaggcatgcaccaccatgcctggctaattttttgtatttttagtagagacggggctttgccatgttggccaggctggtctcgaactcctgaccttgagtaatccacccgcctcggcctcccaaagtgctgggattacaggtgtgagccactgagcccggccacagtgcagtatttctaaccagtgatcagggtaaagaggatgcgtgtccaccatcccagccctgatcagcctgtctgtgcatcccccatcccagccagggcttggagcagccttgctcaccactgtgtcccctgcattgtaacacatccaggcacaagaatagccgcccagtgactgccaagtgagtgaaccagcctgcttggagcctgcctctttcccaaactgctcattatcctgttaccccacccagcccacgtgtccaaatacactccagatgcaaaataaaaagctctacgacaatggctctgaatgttc

SEQ ID NO: 371957 - DNA, 2402 bp, Homo sapiens
ggaggtgcactttacttcctgactcctttcctttttccagtggttatcgcggcgcccaccggcctctgatctctgagtcttctccaacccacagacgttttttgttgctctggttccaggaccttctccacaactaggccattttccctgccaggtgtcctttttgacctcttgacctctgactcaaaggtcagctcaaaggttccgaactcgggcctgggatgtgagggggtactgaacctaagttctccgaatctttagccctgggtccctaagtcgcatccttaaggcacctcactctagatctgagccttcatatcccaaactcactcatgagtttccacatccagccccaaagaatgagttaactcctactaactctccacctaagactcccgaggtaacccaaccggtaccacagatccggttccggatttaaggaccccaccctgttaaccgtcaggtgccttatgacttgagtcagcctcgcaattcctgctcccgtggtttcaaatattagccctggtcctttcacacccactgctcagtccccagattctggaactcagctcttaaacctttaaaatctccatccctgagaccgttctccgttggaggatccttccctccccgctttctgaacctctcaacacctcctgtagaccccaaaatgacttctccatgctctcctcccctaaaaccaccaatttctcctccaaaaacccctgtaccccaagccagcagcattccatctcctcctctacccccaagtcccctggacttttcagctttaccatcccctccctggagtcagcagacccctgttcccccaccgctcccactgcctcctccacccgctgccacagggcctgctccccctcatgtcttcggcctggagaagagccagctcctgaaggaggcctttgataaggccggcccggtccccaagggcagagaagatgtgaagaggcttctgaaactacacaaggaccggttccgaggtgacctgcggtggatcctcttctgtgcagacctgccgtccctcatccaagaaggccctcaatgcgggctggtggccttgtggatggcaggtactctcctgtcgccccccagtggcgtccccctggagagactcatacgggtggccacggaaagaggctacacggcccagggagagatgttctcagcaccagctacgacgaggacttcaaccatgagccgtgtcagaggaagggccacaaggcacactgggcggtgagtgcaggggtcctgctgggtgttcgggctgtgcccagtctcggctacactgaggaccctgagctgccgggcctgttccacccagtgctgggcacgccctgccaaccaccatccctgccagaggagggctccccgggagctgtctacctgctgtccaagcagggcaagagttggcactatcagctgtgggactacgaccaggtccgggagagcaacctgcagctgacggacttctcgccctcacgggccactgacggccgggtgtacgtggtgcccgtgggtggggtacgggctggcctctgtggccaggccctgctcctcacaccacaggactgcagccattagctgcggctgcggtctcaggctgcagcctagctcgttttaaagcccatctgggagcagttacctgtgccagcccctctacctgtgttagcagatctggcaaccctgtaaggggggtgctagatggacccgatttgacagatggcaagactgaggcctggagaagtggaatcactggcctgaggtcacatgactagcacatggcaagatggagtctcgttctgtcgtccaggctggagtgcggtggcgtgatctcagctcactccagcctccacttcccaggttcaagtgattctcctgcctcagccccccaagtaactgggattacaggcatgcaccaccatgcctggctaattttttgtatttttagtagagacggggctttgccatgttggccaggctggtctcgaactcctgaccttgagtaatccacccgcctcggcctcccaaagtgctgggattacaggtgtgagccactgagcccggccacagtgcagtatttctaaccagtgatcagggtaaagaggatgcgtgtccaccatcccagccctgatcagcctgtctgtgcatcccccatcccagccagggcttggagcagccttgctcaccactgtgtcccctgcattgtaacacatccaggcacaagaatagccgcccagtgactgccaagtgagtgaaccagcctgcttggagcctgcctctttcccaaactgctcattatcctgttaccccacccagcccacgtgtccaaatacactccagatgcaaaataaaaagctctacgacaatggctctgaatgttc

SEQ ID NO: 371958 - DNA, 1855 bp, Homo sapiens
ggaggtgcactttacttcctgactcctttcctttttccagtggttatcgcggcgcccaccggcctctgatctctgagtcttctccaacccacagacgttttttgttgctctggttccaggaccttctccacaactaggccattttccctgccaggtgtcctttttgacctcttgacctctgactcaaagggcctgctccccctcatgtcttcggcctggagaagagccagctcctgaaggaggcctttgataaggccggcccggtccccaagggcagagaagatgtgaagaggcttctgaaactacacaaggaccggttccgaggtgacctgcggtggatcctcttctgtgcagacctgccgtccctcatccaagaaggccctcaatgcgggctggtggccttgtggatggcaggtactctcctgtcgccccccagtggcgtccccctggagagactcatacgggtggccacggaaagaggctacacggcccagggagagatgttctcagtggccgatatgggcaggctggcccaggaggtgctgggctgccaggccaagctgctctctggtggcctgggcggtcccaacagagacctcgtcctgcagcacctggtcactggacatcccctgctcatccccaccagctacgacgaggacttcaaccatgagccgtgtcagaggaagggccacaaggcacactgggcggtgagtgcaggggtcctgctgggtgttcgggctgtgcccagtctcggctacactgaggaccctgagctgccgggcctgttccacccagtgctgggcacgccctgccaaccaccatccctgccagaggagggctccccgggagctgtctacctgctgtccaagcagggcaagagttggcactatcagctgtgggactacgaccaggtccgggagagcaacctgcagctgacggacttctcgccctcacgggccactgacggccgggtgtacgtggtgcccgtgggtggggtacgggctggcctctgtggccaggccctgctcctcacaccacaggactgcagccattagctgcggctgcggtctcaggctgcagcctagctcgttttaaagcccatctgggagcagttacctgtgccagcccctctacctgtgttagcagatctggcaaccctgtaaggggggtgctagatggacccgatttgacagatggcaagactgaggcctggagaagtggaatcactggcctgaggtcacatgactagcacatggcaagatggagtctcgttctgtcgtccaggctggagtgcggtggcgtgatctcagctcactccagcctccacttcccaggttcaagtgattctcctgcctcagccccccaagtaactgggattacaggcatgcaccaccatgcctggctaattttttgtatttttagtagagacggggctttgccatgttggccaggctggtctcgaactcctgaccttgagtaatccacccgcctcggcctcccaaagtgctgggattacaggtgtgagccactgagcccggccacagtgcagtatttctaaccagtgatcagggtaaagaggatgcgtgtccaccatcccagccctgatcagcctgtctgtgcatcccccatcccagccagggcttggagcagccttgctcaccactgtgtcccctgcattgtaacacatccaggcacaagaatagccgcccagtgactgccaagtgagtgaaccagcctgcttggagcctgcctctttcccaaactgctcattatcctgttaccccacccagcccacgtgtccaaatacactccagatgcaaaataaaaagctctacgacaatggctctgaatgttc

SEQ ID NO: 371959 - DNA, 1306 bp, Homo sapiens
ggaggtgcactttacttcctgactcctttcctttttccagtggttatcgcggcgcccaccggcctctgatctctgagtcttctccaacccacagacgttttttgttgctctggttccaggaccttctccacaactaggccattttccctgccaggtgtcctttttgacctcttgacctctgactcaaaggtcagctcaaaggttccgaactcgggcctgggatgtgagggggtactgaacctaagttctccgaatctttagccctgggtccctaagtcgcatccttaaggcacctcactctagatctgagccttcatatcccaaactcactcatgagtttccacatccagccccaaagaatgagttaactcctactaactctccacctaagactcccgaggtaacccaaccggtaccacagatccggttccggatttaaggaccccaccctgttaaccgtcaggtgccttatgacttgagtcagcctcgcaattcctgctcccgtggtttcaaatattagccctggtcctttcacacccactgctcagtccccagattctggaactcagctcttaaacctttaaaatctccatccctgagaccgttctccgttggaggatccttccctccccgctttctgaacctctcaacacctcctgtagaccccaaaatgacttctccatgctctcctcccctaaaaccaccaatttctcctccaaaaacccctgtaccccaagccagcagcattccatctcctcctctacccccaagtcccctggacttttcagctttaccatcccctccctggagtcagcagacccctgttcccccaccgctcccactgcctcctccacccgctgccacagggcctgctccccctcatgtcttcggcctggagaagagccagctcctgaaggaggcctttgataaggccggcccggtccccaagggcagagaagatgtgaagaggcttctgaaactacacaaggaccggttccgaggtgacctgcggtggatcctcttctgtgcagacctgccgtccctcatccaagaaggccctcagtatgtgccctgatgcgggaaccccagcccatctgctgcctttactctgcccttgctgggcttcttaaggactgatctggagaagaggagtggattgtccctgctgggaggaggagggaaggaaagggggaactttccactcaggcttctgagtgcctgcatagtaaacatagttgggacatgcgaaggaatgaacgaatgagcctggtccatctctctaactccaccttggttcctcctccca

SEQ ID NO: 371960 - DNA, 2159 bp, Homo sapiens
ggaggtgcactttacttcctgactcctttcctttttccagtggttatcgcggcgcccaccggcctctgatctctgagtcttctccaacccacagacgttttttgttgctctggttccaggaccttctccacaactaggccattttccctgccaggtgtcctttttgacctcttgacctctgactcaaaggtcagctcaaaggttccgaactcgggcctgggatgtgagggggtactgaacctaagttctccgaatctttagccctgggtccctaagtcgcatccttaaggcacctcactctagatctgagccttcatatcccaaactcactcatgagtttccacatccagccccaaagaatgagttaactcctactaactctccacctaagactcccgaggtaacccaaccggtaccacagatccggttccggatttaaggaccccaccctgttaaccgtcaggtgccttatgacttgagtcagcctcgcaattcctgctcccgtggtttcaaatattagccctggtcctttcacacccactgctcagtccccagattctggaactcagctcttaaacctttaaaatctccatccctgagaccgttctccgttggaggatccttccctccccgctttctgaacctctcaacacctcctgtagaccccaaaatgacttctccatgctctcctcccctaaaaccaccaatttctcctccaaaaacccctgtaccccaagccagcagcattccatctcctcctctacccccaagtcccctggacttttcagctttaccatcccctccctggagtcagcagacccctgttcccccaccgctcccactgcctcctccacccgctgccacagggcctgctccccctcatgtcttcggcctggagaagagccagctcctgaaggaggcctttgataaggccggcccggtccccaagggcagagaagatgtgaagaggcttctgaaactacacaaggaccggttccgaggtgacctgcggtggatcctcttctgtgcagacctgccgtccctcatccaagaaggccctcaatgcgggctggtggccttgtggatggcaggtactctcctgtcgccccccagtggcgtccccctggagagactcatacgggtggccacggaaagaggctacacggcccagggagagatgttctcagcaccagctacgacgaggacttcaaccatgagccgtgtcagaggaagggccacaaggcacactgggcggtgagtgcaggggtcctgctgggtgttcgggctgtgcccagtctcggctacactgaggaccctgagctgccgggcctgttccacccagtgctgggcacgccctgccaaccaccatccctgccagaggagggctccccgggagctgtctacctgctgtccaagcagggcaagagttggcactatcagctgtgggactacgaccaggtccgggagagcaacctgcagctgacggacttctcgccctcacgggccactgacggccgggtgtacgtggtgcccgtgggtggggtacgggctggcctctgtggccaggccctgctcctcacaccacaggactgcagccattagctgcggctgcggtctcaggctgcagcctagctcggtaaccatttgaagtgtgcctacacttctcccactgtgtgatggcgacaagattgaagctaggtctcaggggtctccagtcctccttcatcagggccaccccctgcagtattgagcaccagctggtccctctagggagagattgacaacagcccggaccctgcggcctgcctattccatctgaatgtcgcatcgtctgtttctcactaggggccgcctctgtcatctcactagacatttgaggaacctcctgcctgggccctctgcttctcacaggacagggacactgaactgcgtcagcctcagctcacccctccttagcccaaggtcttcctcatgcttgccacctactagtcatactggccttttagatccctgaagtgttgttcaaatccccggatcattgagtcccacccccagccctctgctgcggatcactccttaacttttccattggggctcaggtatcactacctcagggaagagtcctgcagccccagtcaagacacccctcccccacctca

SEQ ID NO: 371961 - DNA, 1428 bp, Homo sapiens
ggaggtgcactttacttcctgactcctttcctttttccagtggttatcgcggcgcccaccggcctctgatctctgagtcttctccaacccacagacgttttttgttgctctggttccaggaccttctccacaactaggccattttccctgccaggtgtcctttttgacctcttgacctctgactcaaaggtcagctcaaaggttccgaactcgggcctgggatgtgagggggtactgaacctaagttctccgaatctttagccctgggtccctaagtcgcatccttaaggcacctcactctagatctgagccttcatatcccaaactcactcatgagtttccacatccagccccaaagaatgagttaactcctactaactctccacctaagactcccgaggtaacccaaccggtaccacagatccggttccggatttaaggaccccaccctgttaaccgtcaggtgccttatgacttgagtcagcctcgcaattcctgctcccgtggtttcaaatattagccctggtcctttcacacccactgctcagtccccagattctggaactcagctcttaaacctttaaaatctccatccctgagaccgttctccgttggaggatccttccctccccgctttctgaacctctcaacacctcctgtagaccccaaaatgacttctccatgctctcctcccctaaaaccaccaatttctcctccaaaaacccctgtaccccaagccagcagcattccatctcctcctctacccccaagtcccctggacttttcagctttaccatcccctccctggagtcagcagacccctgttcccccaccgctcccactgcctcctccacccgctgccacagggcctgctccccctcatgtcttcggcctggagaagagccagctcctgaaggaggcctttgataaggccggcccggtccccaagggcagagaagatgtgaagaggcttctgaaactacacaaggaccggttccgaggtgacctgcggtggatcctcttctgtgcagacctgccgtccctcatccaagaaggccctcaatgcgggctggtggccttgtggatggcaggtactctcctgtcgccccccagtggcgtccccctggagagactcatacgggtggccacggaaagaggctacacggcccagggagagatgttctcagcaccagctacgacgaggacttcaaccatgagccgtgtcagaggaagggccacaaggcacactgggcggtgagtgcaggcacaagaatagccgcccagtgactgccaagtgagtgaaccagcctgcttggagcctgcctctttcccaaactgctcattatcctgttaccccacccagcccacgtgtccaaatacactccagatgcaaaataaaaagctctacgacaatggctctgaatgttc

SEQ ID NO: 371962 - DNA, 267 bp, Homo sapiens
ggctgccctctttgctgttcctaaacaagccccttcccaccccagccttcattgctcttcttcttcctgagtcccaattcctgagtgagccagctggcttttccctcactttctttgagaacttgctcaagcaccttgtcagtgaggaatcctgtgcccttcctttgtaagtcagtttcccaactgtcctaatatctttatcattctctatttttcaccatagaatgtatctaacatgacgaactatgtatttactcaatacttgtt

SEQ ID NO: 371963 - DNA, 1276 bp, Homo sapiens
tttgtactacaatacaaaaaaaataagtgaatcatttatttcagagaatagccatttgcaaacgttcactgtaaaaatctagaggatagaaaacctaaaaagttttgtttaggtttgtcaatttaagtgggagggatatatttctaaagaatatgtcctaaagctgtgccaagtatgtgcaagtccaagtatggcaagagatgaccctggactctgtggtggttgcagacaaataatacataactttcaaaaccagccccatagtgagtcagagtagtgggcatttgtacagaggaggaagctgacattgtcttttaatccaaacagcaatcctgggtggctctggtggaatgaggtatttaatcacctcaccggtgatccttgttgggtctttcttgttgagtaaatacttggcagccttagtcattagcttgaaaggcagagggaaaagtaaaccttcatgagtgagtacccagctgaggtgtttgtttaggctaatcccaaatgccctttagggcctaactcagtgctgcccctcccctacttcactgtgaagctgcagctgtggagccaacattttatcttatttattctctatgtgcaggttcccaaacataattattggatgaatgaatgaacaagaagatgactatggaggatacttgggatctggctagcaacaagtatatttcccattgttagaggtagttgggtcagaaattagatcagtgcttctcagcatttctctgttcaatgcatactttttggtggcacccataaagaaatcaaaaggggaatatccctttttagcaagaagtatttagaaaatctaaaagaactcttcctcctattcattgggtcacttttcagccctgcatcactgtttacagaaaagtgttaacatcttggactcgtgaagcaatgttttcacacattctagaagaagcttgctggaagggttctgtggaggtctcccacctgtggaagaaggtgatagaaaaattagcctgataatggaactgtcaacccaggtttcccttcagactgagagaattactcagctgaaagaagttttggaggaaaaggaaaggaagattcagcagctggaagctgagcggagtccccatcctccccaagaggtcaaggaccctccaggatgtttaccagaagccccagttttctctactcatgacatcccacctgtggtctctgatgagaatttgtagattcccaataagaaaacaataaaagtttattaagtgtcatccaggtaaaa

SEQ ID NO: 371964 - DNA, 398 bp, Homo sapiens
taatcacaatcataccattatgtcaaaatccctcaaacaacccaaacattttcatagtcactaagaagcttgctggaagggttctgtggaggtctcccacctgtggaagaaggtgatagaaaaattagcctgataatggaactgtcaacccaggtttcccttcagactgagagaattactcagctgaaagaagttttggaggaaaaggaaaggaagattcagcagctggaagctgagcggagtccccatcctccccaagaggtcaaggaccctccaggatgtttaccagaagccccagttttctctactcatgacatcccacctgtggtctctgatgagaatttgtagattcccaataagaaaacaataaaagtttattaagtgtcatccaggtaaaa

SEQ ID NO: 371965 - DNA, 993 bp, Homo sapiens
tttgtactacaatacaaaaaaaataagtgaatcatttatttcagagaatagccatttgcaaacgttcactgtaaaaatctagaggatagaaaacctaaaaagttttgtttaggtttgtcaatttaagtgggagggatatatttctaaagaatatgtcctaaagctgtgccaagtatgtgcaagtccaagtatggcaagagatgaccctggactctgtggtggttgcagacaaataatacataactttcaaaaccagccccatagtgagtcagagtagtgggcatttgtacagaggaggaagctgacattgtcttttaatccaaacagcaatcctgggtggctctggtggaatgaggtatttaatcacctcaccggtgatccttgttgggtctttcttgttgagtaaatacttggcagccttagtcattagcttgaaaggcagagggaaaagtaaaccttcatgagtgagtacccagctgaggtgtttgtttaggctaatcccaaatgccctttagggcctaactcagtgctgcccctcccctacttcactgtgaagctgcagctgtggagccaacattttatcttatttattctctatgtgcaggttcccaaacataattattggatgaatgaatgaacaagaagatgactatggaggatacttgggatctggctagcaacaagtatatttcccattgttagaggtagttgggtcagaaattagatcagtgcttctcagcatttctctgttcaatgcatactttttggtggcacccataaagaaatcaaaaggggaatatccctttttagcaagaagtatttagaaaatctaaaagaactcttcctcctattcattgggtcacttttcagccctgcatcactgtttacagaaaagtgttaacatcttggactcgtgaagcaatgttttcacacattctaggtatgttgacctaatatgaaaccactccttcttgctctgattagcaacaagtg

SEQ ID NO: 371966 - DNA, 274 bp, Homo sapiens
tgggacgcaagcgtgtgccaccatgcccggctaatttgttggtgttgttgttgttgttttttgcttgtttgtttgtttgtttttttgtaggaatgaggttttgccatgttgccccaggagttcgagaccagcctgagcaacatggggagtcccagtctctacaaaaaaataaaaaaattagcagagcgtgacagtgtgtgcttgttatcccagctactgaggagcctgatgtaggacgattgcctgaatctgggagggcaaggctgcagagagc

SEQ ID NO: 371967 - DNA, 421 bp, Homo sapiens
gtcattgtggccagggtgaactgctcattgcagtgatgcgaaaaggtgaggtcacaggacacaaacccatatctgagacctggatgcctccctccacgcactcacccactggctgtcctgagcatcaccctgcacctgttgtcccagcaacaagggaaaaataaggtctattgctcaggctggagtgaagtggtgcaattgtggctcactgcagccttgaatacctcagctcaaacgatcctcccacctcagcctcctgagtagctgggaccacagcatagtggtcaagtccattgtcagcttctgacactgcctcttacaaggaggtgactttggaaatgtcattcagccttcctgtgcccgaaatcacctcacctgtcaaatgggaacaataaagcacttcaaagaattgttgtaaaag

SEQ ID NO: 371968 - DNA, 310 bp, Homo sapiens
gtcattgtggccagggtgaactgctcattgcagtgatgcgaaaaggtgaggtcacaggacacaaacccatatctgagacctggatgcctccctccacgcactcacccactggctgtcctgagcatcaccctgcacctgttgtcccagcaacaagggaaaaataagcatagtggtcaagtccattgtcagcttctgacactgcctcttacaaggaggtgactttggaaatgtcattcagccttcctgtgcccgaaatcacctcacctgtcaaatgggaacaataaagcacttcaaagaattgttgtaaaag

SEQ ID NO: 371969 - DNA, 296 bp, Homo sapiens
tgcaccaccatgtccagctaattttttatttttattttttgtagaggtggggtctcaccatgttatccagactggattttgtctttttaatttcaaatttcaatcgttcattgctggcatataagaaaacaattgactcttgtgtattaatcctgcatcttgtgctcactttggaaacagatttactaaaattggaatgatacagagaagattagcatagcctctgtgcaaggatagagttgtgaagcattctttatgtgtcttcagcttgggcaagagtgacaccctatctctga

SEQ ID NO: 371970 - DNA, 416 bp, Homo sapiens
actgtctgctccaacccctaccccaacaccacactcagatttttccaagtgatgtcacacagatgcctcaaattcgatgagtccagaacaggaccctctatgcccctcaccttctccccacgagccctccatctcaacaaagaccaccaccatccaaccactctgcggctcaggcctctgaatccacttggactcccctctcagccctgtcccgtctgtaggcaaacccatatcccacccctccttgtcctccaggttccacctcccagccccgaaagtaatcactgtcccttaaggattccccctgctcaaggattcctctggcagtccactaccctgacagcaaacacagaggtttgttgtttttttttaaattttagtaacatatacacaacataaaatttgtccaaactatt

SEQ ID NO: 371971 - DNA, 277 bp, Homo sapiens
ataatgcccaaaataacagctgttgttagaattggtgtatttttgtcttttgtaaataagtagtatttctccagtctttaaccagtacagtcatacattgcttaatgatagggatacattctgagaaatgggttcattaggtgatttcattgttgtgcaaacatcatagagtgtagttagaagcctaaatggtataggctttacaaatctatacagcatgttactatactgtaggcaactgtaacacaatggtaagtatctaaacatgtctaaacat

SEQ ID NO: 371972 - DNA, 544 bp, Homo sapiens
ctcagtgagcactactcacagatccacacctgaccctgttgggtcgagtcaggctgggttttggtctgcactgtagcacctgtgttctttcagttcacatcatgaatgtgacttcccagataccatctcaggcttaacctagcacatcctatttcttttcttctatgatatccaaattggactgacctcacttcaaatatcttgtcccattttgtcgtcctatcttacctcggggaaattggggactgatggccagaccaattctgttgaaattcttgcatagagcaaacctgtgctcatttttaagtggcatgggagaggcccccagccatagtaaagcctagtctgtgtcttcacagttttgatagaatgtgcttgtgtgtatagatgtatgatacagatttatttatgttgctatcgccatatattgaaggccaacataactggtggacagggtgggtgacagaaaatgaaagcctttttggtgattgttaaagcaagatgtgtataaagaaataaatagttgttctttcactgctttgtt

SEQ ID NO: 371973 - DNA, 2634 bp, Homo sapiens
aaggaggcggcctccgggaaaagcgaccgcaggactcctgagagcagcctccatgaggccctggaccagtgcatgaccgccctggacctcttcctcaccaaccagttctcagaagcactcagctacctcaagcccagaaccaaggaaagcatgtaccactcactgacatatgccaccatcctggagatgcaggccatgatgacctttgaccctcaggacatcctgcttgccggcaacatgatgaaggaggcacagatgctgtgtcagaggcaccggaggaagtcttctgtaacagattccttcagcagcctggtgaaccgccccacgctgggccaattcactgaagaggaaatccacgctgaggtctgctatgcagagtgcctgctgcagcgagcagccctgaccttcctgcaggacgagaacatggtgagcttcatcaaaggcggcatcaaagttcgaaacagctaccagacctacaaggagctggacagccttgttcagtcctcacaatactgcaagggtgagaaccacccgcactttgaaggaggagtgaagcttggtgtaggggccttcaacctgacactgtccatgcttcctactaggatcctgaggctgttggagtttgtggggttttcaggaaacaaggactatgggctgctgcagctggaggagggagcgtcagggcacagcttccgctctgtgctctgtgtcatgctcctgctgtgctaccacaccttcctcaccttcgtgctcggtactgggaacgtcaacatcgaggaggccgagaagctcttgaagccctacctgaaccggtaccctaagggtgccatcttcctgttctttgcagggaggattgaagtcattaaaggcaacattgatgcagccatccggcgtttcgaggagtgctgtgaggcccagcagcactggaagcagttccaccacatgtgctactgggagctgatgtggtgcttcacctacaagggccagtggaagatgtcctacttctacgccgacctgctcagcaaggagaactgctggtccaaggccacctacatttacatgaaggccgcctacctcagcatgtttgggaaggaggaccacaagccgttcggggacgacgaagtggaattatttcgagctgtgccaggcctgaagctcaagattgctgggaaatctctacccacagagaagtttgccatccggaagtcccggcgctacttctcctccaaccctatctcgctgccagtgcctgctctggaaatgatgtacatctggaacggctacgccgtgattgggaagcagccgaaactcacggatgggatacttgagattatcactaaggctgaagagatgctggagaaaggcccagagaacgagtactcagtggatgacgagtgcttggtgaaattgttgaaaggcctgtgtctgaaatacctgggccgtgtccaggaggccgaggagaattttaggagcatctctgccaatgaaaagaagattaaatatgaccactacttgatcccaaacgccctgctggagctggccctgctgcttatggagcaagacagaaacgaagaggccatcaaacttttggaatctgccaagcaaaactacaagaattactccatggagtcaaggacacactttcgaatccaggcagccacactccaagccaagtcttccctagagaacagcagcagatccatggtctcatcagtgtccttgtagctttgtgcagcagttccgggctggaagacagagacagctggacagagctcctgaaaacatttcaaaataccccctccccctgccctgccctgcctttggggtccaccggcactccagttggatggcacaacatagtgtatccgtgcagaagccgagctggcattttcaccagtgtagccaagggcctttgccaagggcagagcaggtggagccctctgcctgccctatcacacatacgggtacttgcttttcactgtgatgtttaagagaatgtatgaacagtttacattttccttagaaatacattgatgggatcacagttggctttaaaaaccaacaacaatcaaccacctgtaagtctttgtcttcacctattatcatctggaggtaaatctctttatatgatgatgccaaagggcaaattgcttttcaaattcagcaagttctcagcttgtgtgacggaaggtccttcagaggacctgaggaatgcctgggagaggctaagcctcaggcttcaatgcttctggggttgggcatgaggatgtacacagacacccactaccttactactcacacttcatttcactccttttgtaaatttccaatttaaaaatcaagcacgtctttttagtgagataaaatctgagctcttctgtagaaaaatcaatctctaccagtagaaaatgccagggcttgatggaagagctgtgtagccctttctatgccaaagccaggaaatttggggggcaggaggaggttctcagaatccagtctgtatctttgctgtatgccaaactgaaaccactgggaataatttatgaaacataaaaatcttctgtacttcactccaaggtacatttgcttactgacagcatttttgttaaaactgttattcttgaaaattgtgta

SEQ ID NO: 371974 - DNA, 1872 bp, Homo sapiens
acagcgcccggctcggggttgcggcggcagcacctgggccgcgattggcgtccggctggggcagcgccgcccgcgcccctcggcgatgacctcggctggcggcgccccaggagccctgcccgcggggactcctgagagcagcctccatgaggccctggaccagtgcatgaccgccctggacctcttcctcaccaaccagttctcagaagcactcagctacctcaagcccagaaccaaggaaagcatgtaccactcactgacatatgccaccatcctggagatgcaggccatgatgacctttgaccctcaggacatcctgcttgccggcaacatgatgaaggaggcacagatgctgtgtcagaggcaccggaggaagtcttctgtaacagattccttcagcagcctggtgaaccgccccacgctgggccaattcactgaagaggaaatccacgctgaggtctgctatgcagagtgcctgctgcagcgagcagccctgaccttcctgcagggttcctcacacggaggggcagtcaggcccagagccttgcatgatccctctcacgcctgcagctgcccacctgggccaggccgtcagcatcttttcctcctgcgacgagaacatggtgagcttcatcaaaggcggcatcaaagttcgaaacagctaccagacctacaaggagctggacagccttgttcagtcctcacaatactgcaagggtgagaaccacccgcactttgaaggaggagtgaagcttggtgtaggggccttcaacctgacactgtccatgcttcctactaggatcctgaggctgttggagtttgtggggttttcaggaaacaaggactatgggctgctgcagctggaggagggagcgtcagggcacagcttccgctctgtgctctgtgtcatgctcctgctgtgctaccacaccttcctcaccttcgtgctcggtactgggaacgtcaacatcgaggaggccgagaagctcttgaagccctacctgaaccggtaccctaagggtgccatcttcctgttctttgcagggaggattgaagtcattaaaggcaacattgatgcagccatccggcgtttcgaggagtgctgtgaggcccagcagcactggaagcagttccaccacatgtgctactgggagctgatgtggtgcttcacctacaagggccagtggaagatgtcctacttctacgccgacctgctcagcaaggagaactgctggtccaaggccacctacatttacatgaaggccgcctacctcagcatgtttgggaaggaggaccacaagccgttcggggacgacgaagtggaattatttcggtgggtcccacatcgtgctcccactgtgtaggccactcccaccgtgtaggccgctatggacagaccagccaggccaccctgagctgtgggcactggggagggaggagtagggtggctccctgcccccacccgcggactgccccccctgcgtgtcctcccctcccatcaccaccccatgctgctgctgctggtggttggagccctttgactttcttcagaggctttctttcacagaaatggttttgctaatatcgtcttcctccgagtctctttcatgtggacagtaggacagatgtggctccaaggtccagggagggaaggtctttcactctgctgagttaacctgagacactcagagaagcacagtagagagctgacagtcggaatcgaacaaacaagagtaaacccagcctctgcttgttcttagctgtgtcaccttggacaacttcagcatctgtaaaatgggaacaacaacctccacctcgcagcactgttttgcaaatcaactagataataaatgttaagagcctggcgcatag

SEQ ID NO: 371975 - DNA, 7134 bp, Homo sapiens
  misc_feature (2079)..(2079): n is a, c, g, or t
  misc_feature (2811)..(2811): n is a, c, g, or t
  misc_feature (3418)..(3418): n is a, c, g, or t
  misc_feature (3443)..(3443): n is a, c, g, or t
  misc_feature (3464)..(3464): n is a, c, g, or t
  misc_feature (3476)..(3476): n is a, c, g, or t
  misc_feature (3539)..(3539): n is a, c, g, or t
  misc_feature (4002)..(4002): n is a, c, g, or t
  misc_feature (5128)..(5128): n is a, c, g, or t
ccccagtctgggggaggttaccgcagacagcctcatcccagttaagcagaagaggtgccggggctgccgagggaaggactgtgcctgtctgcactgactgtccatccggcctggatctttctctccaggactcctgagagcagcctccatgaggccctggaccagtgcatgaccgccctggacctcttcctcaccaaccagttctcagaagcactcagctacctcaagcccagaaccaaggaaagcatgtaccactcactgacatatgccaccatcctggagatgcaggccatgatgacctttgaccctcaggacatcctgcttgccggcaacatgatgaaggaggcacagatgctgtgtcagaggcaccggaggaagtcttctgtaacagattccttcagcagcctggtgaaccgccccacgctgggccaattcactgaagaggaaatccacgctgaggtctgctatgcagagtgcctgctgcagcgagcagccctgaccttcctgcaggacgagaacatggtgagcttcatcaaaggcggcatcaaagttcgaaacagctaccagacctacaaggagctggacagccttgttcagtcctcacaatactgcaagggtgagaaccacccgcactttgaaggaggagtgaagcttggtgtaggggccttcaacctgacactgtccatgcttcctactaggatcctgaggctgttggagtttgtggggttttcaggaaacaaggactatgggctgctgcagctggaggagggagcgtcagggcacagcttccgctctgtgctctgtgtcatgctcctgctgtgctaccacaccttcctcaccttcgtgctcggtactgggaacgtcaacatcgaggaggccgagaagctcttgaagccctacctgaaccggtaccctaagggtgccatcttcctgttctttgcagggaggattgaagtcattaaaggcaacattgatgcagtgagtgatgggggtccgggccggggctggggatccctcggggtctcccagaccagcaggaagtcaggcacatgtgacatactcagggacaggatagactgggggcggggggggggccaagagagaaccaaccagagagcaggggcaggagaggcccttctggcagagcagcctgggaagacaagggaggaggaggcatttgtggtgcctgggattttgactgggagatataggactgcagcattgcagtggagggaggtggagggaggtgcttgagggaggcagaggttaggaaagcccatctgtttagggcatgacgattaggctggagtctggtacctcccctccattatagctctctcctgctctttcattttgttactaaaaaccagagtcctaggcgggggctgtatttgagcccaacgtcatgtaagacttaggaggtaaaaccaggactggaggccagatctcctggctcctggggccccacctgagcctagcacagggctggaccactatgccctggaggagtcccggtctgctgtggtgttgggaggttcggaggatgcagaggggttggggctgggtgggcacccgtcaggctgaccagaaggtgcctgcaggccatccggcgtttcgaggagtgctgtgaggcccagcagcactggaagcagttccaccacatgtgctactgggagctgatgtggtgcttcacctacaagggccagtggaagatgtcctacttctacgccgacctgctcagcaaggagaactgctggtccaaggtgggctgatgccacgtgttaggggcattgggtgaccagggctgactgtgtgcctccagaccacgggccaaatccctaactgaacacagatgtctcagctggaatctaaacataaccttaaattctaataggactcaggcttggaaggaactaaagaccacaagagaaacttctgaaccacaatgtgtcacaaagagatttctagtcacaaaggacagaaacatggctccctctgtccagtagaactgtttctgtggtagaaatgttctacttatgcactgcccaaatatggtagtcaccagccacatgtgcacantgagcacatgaaatgtgcctagtgcaactgggaaactgattgttttcagttttatttaattttaattaactaaatgttaaatttaaatagccatgtagggcttgtggccactatattggactatgcaggtccaaaacacaaaaggctcatataactgaacattcttggcacatccgacttcaggtagggctggatccaggaattcaaatgatgtcgtctggcttggtctttccatttgtggctgtgctctctcctatgacatctttgtttctgctgcatctttgcaggaaggttctctccatgtgacaggcaaggtggccacgggctgcttctactcatatcctccccttggtttcaaccagagtcccacagtttgagcctcactggtctgacttgtcacctgccaatgcctggaacagaggggtgggaagattcctcatgggctgagagtaggagaggggtggttccacagaagaaaatgatgcacccagaaatagtggagggattaacaagatgccatacaggcaaaacaaagccaaacagatgcccgcctaccaaagatgaaatttatcatggtaagtattgaaataagtgttagcttgtaccatcatagtaatgatagtgcagaaattggaaccaagagtcttacaaccacctagctcagcaaacgtctaatctgttatttgtaaatacacaggacatgtgtcttcatggcttcatcccctgcccatngcagacattgctaatcaatcctctgccatgagcctagctgtgaccttagataccttccctgcaaagctccaggcagccgttagaactgacccacattggcacctgttaggagacctgtcatctgcatctggtccctccccctcctctgcatggaggtctcttccgtagccctgcctggggaccaagctgaaggggaattctctgggtctggggcaggtggggctggggaagggagcaggcttctactgagctctcaacatgtctggcacctgtcatgtcctccacaccacacccagtgaggagaagttattatctccattgggcacatgagggccactgatgctaagcgaggactgtgactttcccacccacatggctgttggtgacagacaccggatttgaggacagtcctgtgtgactcagaggcctctgcttctctcttgctcctagagtcctcctgaggagtcggggcttgccctgagcccaccctgctgttgaaggtgcttcctcaggcccagctcccatggcccccacaccccctcctcatcacctcctactcccaaaaaggacaaagcctcagggaaccttttttctttttttagagacngggtcttgctatgttggtcaggctngtcttgaactcctgggcccangcaatcttcccncctctgcctcctaaagtgctgggattctgggccttagggaacctttttgaactgaaagtgacnctcgaagccttcctgtagagtgaggtgggtggctggggctaaccatatggggaaggagagacctggtgggggcacacagctgctatatagaggaacagaaggtgggccaggcctcccagctgtcaggaaatctggctcagtccccagaccgctgtgtggctttggggtggccagtccctctctctctgcaacactctcctcatgaggacttctgtgaaaaatgggggttgtaaccctctgagttctggggccccacccatttctaatctccagaacttggccaccacagactccaccaacttctagtcctggggcctgggcctctggccattgccataggcaccacctgctctgtgcaggcagcgcccccctctgccaggatcctccgaggtcagctgctgggtctgacccgcagaccctggctgagcgacggatgaacggagtatgcagacacaggcttgcntgtcagcagatgggggacccctgccagagtcagcagcggcccccataagcctgccacgcttgcatttatttagtacagatgtaatgacaaaggcctaaagcaaactccatttgtgggtaattaacattgtcgcccccccagaaagagcagtcctccgcatgatgattaaaggccaggttccgaggcctaagtaaaccaacttatctagatcaattcccttacttcttgttatctactctgagagaattcagctgccttcagccaaatcctttcccgaagcttttgcaaaacctccgagccttccaaggtttgcttctttctgtaatttttctcaccaccctgacctatctcctgcagtcagccctgtggaggcctttgtgtttcccccagtgctggcagcctagaggctgagatggccagaaacaaggtggtgacagtggcgtgctcagggcttgggaaacccaaggagctaaaggcatgcccaggcaaccaaagaggacaggaaggcttctgaggagagacctctgaggtgggtcttggagaggaaggacttagggaggcagagtggaggaagtgagaggacaccccaagccaagagggcggcaggaccaaaggctcagaagccagggcgctgcagaggggctgtgtgccacagggtgaagagtttgtgtggcagaagggcagggggcttgcatcaggggtgacagctgctcttttgtcccagcatagcccctgtacatccctggagagctggggcgtccacaactctaagtcacagcccccatcctaaccctggtggtgcagtgagggtgagctgtctgtgggcaggagggaagactcttggagatgagcctggtgaagggataatggcatcccgggccgaggagcagcacaggcagaggcctggggagagtttaaggagtgtaggggaggaaatggcagaagatgagccagaaaaagaaaggttagggcaggtcctggaggacatgagtggctgtttgggctttatccagcagtgggggagccttggcaggcttgtggcttagataggtgctttagaaagcccaccagcagttgctgggccaccccgctggctgggtcctgttctaaggcaggaaatacaagnatgagcaggaaaagaccccctcaaggctcacgtcctagtggggagacaagaaacacagatgggcaatataacacgatgtctggttccagtaagtgcagtgaagaacaagcgaggctggatgcagggagtgatgggaggggctttgtaaggggaggtcgggggaagcctgtctcagaggacaccagaatggagcgcaggagcagcacgtggcagtcacatggcaggccgttagggcagagggagctgggcagggcacagcagggcaggagtgtgtttgatgtgtcctgggaaccgccctgaggccgtcgtgtggctggagtgctgcaggtgtcaaggaaattgtaggagatgtctcctgagtgtgatggaatataaccagatttccagaaggaactgacatgatctgacttaaaaaggccacctacatttacatgaaggccgcctacctcagcatgtttgggaaggaggaccacaagccgttcggggacgacgaagtggaattatttcgagctgtgccaggcctgaagctcaagattgctgggaaatctctacccacagagaagtttgccatccggaagtcccggcgctacttctcctccaaccctatctcgctgccagtgcctgctctggaaatgatgtacatctggaacggctacgccgtgattgggaagcagccgaaactcacggatgggatacttgagattatcactaaggctgaagagatgctggagaaaggcccagagaacgagtactcagtggatgacgagtgcttggtgaaattgttgaaaggcctgtgtctgaaatacctgggccgtgtccaggaggccgaggagaattttaggagcatctctgccaatgaaaagaagattaaatatgaccactacttgatcccaaacgccctgctggagctggccctgctgcttatggagcaagacagaaacgaagaggccatcaaacttttggaatctgccaagcaaaactacaagaattactccatggagtcaaggacacactttcgaatccaggcagccacactccaagccaagtcttccctagagaacagcagcagatccatggtctcatcagtgtccttgtagctttgtgcagcagttccgggctggaagacagagacagctggacagagctcctgaaaacatttcaaaataccccctccccctgccctgccctgcctttggggtccaccggcactccagttggatggcacaacatagtgtatccgtgcagaagccgagctggcattttcaccagtgtagccaagggcctttgccaagggcagagcaggtggagccctctgcctgccctatcacacatacgggtacttgcttttcactgtgatgtttaagagaatgtatgaacagtttacattttccttagaaatacattgatgggatcacagttggctttaaaaaccaacaacaatcaaccacctgtaagtctttgtcttcacctattatcatctggaggtaaatctctttatatgatgatgccaaagggcaaattgcttttcaaattcagcaagttctcagcttgtgtgacggaaggtccttcagaggacctgaggaatgcctgggagaggctaagcctcaggcttcaatgcttctggggttgggcatgaggatgtacacagacacccactaccttactactcacacttcatttcactccttttgtaaatttccaatttaaaaatcaagcacgtctttttagtgagataaaatctgagctcttctgtagaaaaatcaatctctaccagtagaaaatgccagggcttgatggaagagctgtgtagccctttctatgccaaagccaggaaatttggggggcaggaggaggttctcagaatccagtctgtatctttgctgtatgccaaactgaaaccactgggaataatttatgaaacataaaaatcttctgtacttcactccaaggtacatttgcttactgacagcatttttgttaaaactgttattcttgaaaattgtgta

SEQ ID NO: 371976 - DNA, 7253 bp, Homo sapiens
  misc_feature (2198)..(2198): n is a, c, g, or t
  misc_feature (2930)..(2930): n is a, c, g, or t
  misc_feature (3537)..(3537): n is a, c, g, or t
  misc_feature (3562)..(3562): n is a, c, g, or t
  misc_feature (3583)..(3583): n is a, c, g, or t
  misc_feature (3595)..(3595): n is a, c, g, or t
  misc_feature (3658)..(3658): n is a, c, g, or t
  misc_feature (4121)..(4121): n is a, c, g, or t
  misc_feature (5247)..(5247): n is a, c, g, or t
aggcctgggggagggaggaggccttggagaaggaggagggaaaaaggggctgtgggatttagtggctgggctgcaccccctgggggggcagcagagcccaatgggccagaagggccacaaagactccctttacccttgtggagggactcctgagagcagcctccatgaggccctggaccagtgcatgaccgccctggacctcttcctcaccaaccagttctcagaagcactcagctacctcaagcccagaaccaaggaaagcatgtaccactcactgacatatgccaccatcctggagatgcaggccatgatgacctttgaccctcaggacatcctgcttgccggcaacatgatgaaggaggcacagatgctgtgtcagaggcaccggaggaagtcttctgtaacagattccttcagcagcctggtgaaccgccccacgctgggccaattcactgaagaggaaatccacgctgaggtctgctatgcagagtgcctgctgcagcgagcagccctgaccttcctgcagggttcctcacacggaggggcagtcaggcccagagccttgcatgatccctctcacgcctgcagctgcccacctgggccaggccgtcagcatcttttcctcctgcgacgagaacatggtgagcttcatcaaaggcggcatcaaagttcgaaacagctaccagacctacaaggagctggacagccttgttcagtcctcacaatactgcaagggtgagaaccacccgcactttgaaggaggagtgaagcttggtgtaggggccttcaacctgacactgtccatgcttcctactaggatcctgaggctgttggagtttgtggggttttcaggaaacaaggactatgggctgctgcagctggaggagggagcgtcagggcacagcttccgctctgtgctctgtgtcatgctcctgctgtgctaccacaccttcctcaccttcgtgctcggtactgggaacgtcaacatcgaggaggccgagaagctcttgaagccctacctgaaccggtaccctaagggtgccatcttcctgttctttgcagggaggattgaagtcattaaaggcaacattgatgcagtgagtgatgggggtccgggccggggctggggatccctcggggtctcccagaccagcaggaagtcaggcacatgtgacatactcagggacaggatagactgggggcggggggggggccaagagagaaccaaccagagagcaggggcaggagaggcccttctggcagagcagcctgggaagacaagggaggaggaggcatttgtggtgcctgggattttgactgggagatataggactgcagcattgcagtggagggaggtggagggaggtgcttgagggaggcagaggttaggaaagcccatctgtttagggcatgacgattaggctggagtctggtacctcccctccattatagctctctcctgctctttcattttgttactaaaaaccagagtcctaggcgggggctgtatttgagcccaacgtcatgtaagacttaggaggtaaaaccaggactggaggccagatctcctggctcctggggccccacctgagcctagcacagggctggaccactatgccctggaggagtcccggtctgctgtggtgttgggaggttcggaggatgcagaggggttggggctgggtgggcacccgtcaggctgaccagaaggtgcctgcaggccatccggcgtttcgaggagtgctgtgaggcccagcagcactggaagcagttccaccacatgtgctactgggagctgatgtggtgcttcacctacaagggccagtggaagatgtcctacttctacgccgacctgctcagcaaggagaactgctggtccaaggtgggctgatgccacgtgttaggggcattgggtgaccagggctgactgtgtgcctccagaccacgggccaaatccctaactgaacacagatgtctcagctggaatctaaacataaccttaaattctaataggactcaggcttggaaggaactaaagaccacaagagaaacttctgaaccacaatgtgtcacaaagagatttctagtcacaaaggacagaaacatggctccctctgtccagtagaactgtttctgtggtagaaatgttctacttatgcactgcccaaatatggtagtcaccagccacatgtgcacantgagcacatgaaatgtgcctagtgcaactgggaaactgattgttttcagttttatttaattttaattaactaaatgttaaatttaaatagccatgtagggcttgtggccactatattggactatgcaggtccaaaacacaaaaggctcatataactgaacattcttggcacatccgacttcaggtagggctggatccaggaattcaaatgatgtcgtctggcttggtctttccatttgtggctgtgctctctcctatgacatctttgtttctgctgcatctttgcaggaaggttctctccatgtgacaggcaaggtggccacgggctgcttctactcatatcctccccttggtttcaaccagagtcccacagtttgagcctcactggtctgacttgtcacctgccaatgcctggaacagaggggtgggaagattcctcatgggctgagagtaggagaggggtggttccacagaagaaaatgatgcacccagaaatagtggagggattaacaagatgccatacaggcaaaacaaagccaaacagatgcccgcctaccaaagatgaaatttatcatggtaagtattgaaataagtgttagcttgtaccatcatagtaatgatagtgcagaaattggaaccaagagtcttacaaccacctagctcagcaaacgtctaatctgttatttgtaaatacacaggacatgtgtcttcatggcttcatcccctgcccatngcagacattgctaatcaatcctctgccatgagcctagctgtgaccttagataccttccctgcaaagctccaggcagccgttagaactgacccacattggcacctgttaggagacctgtcatctgcatctggtccctccccctcctctgcatggaggtctcttccgtagccctgcctggggaccaagctgaaggggaattctctgggtctggggcaggtggggctggggaagggagcaggcttctactgagctctcaacatgtctggcacctgtcatgtcctccacaccacacccagtgaggagaagttattatctccattgggcacatgagggccactgatgctaagcgaggactgtgactttcccacccacatggctgttggtgacagacaccggatttgaggacagtcctgtgtgactcagaggcctctgcttctctcttgctcctagagtcctcctgaggagtcggggcttgccctgagcccaccctgctgttgaaggtgcttcctcaggcccagctcccatggcccccacaccccctcctcatcacctcctactcccaaaaaggacaaagcctcagggaaccttttttctttttttagagacngggtcttgctatgttggtcaggctngtcttgaactcctgggcccangcaatcttcccncctctgcctcctaaagtgctgggattctgggccttagggaacctttttgaactgaaagtgacnctcgaagccttcctgtagagtgaggtgggtggctggggctaaccatatggggaaggagagacctggtgggggcacacagctgctatatagaggaacagaaggtgggccaggcctcccagctgtcaggaaatctggctcagtccccagaccgctgtgtggctttggggtggccagtccctctctctctgcaacactctcctcatgaggacttctgtgaaaaatgggggttgtaaccctctgagttctggggccccacccatttctaatctccagaacttggccaccacagactccaccaacttctagtcctggggcctgggcctctggccattgccataggcaccacctgctctgtgcaggcagcgcccccctctgccaggatcctccgaggtcagctgctgggtctgacccgcagaccctggctgagcgacggatgaacggagtatgcagacacaggcttgcntgtcagcagatgggggacccctgccagagtcagcagcggcccccataagcctgccacgcttgcatttatttagtacagatgtaatgacaaaggcctaaagcaaactccatttgtgggtaattaacattgtcgcccccccagaaagagcagtcctccgcatgatgattaaaggccaggttccgaggcctaagtaaaccaacttatctagatcaattcccttacttcttgttatctactctgagagaattcagctgccttcagccaaatcctttcccgaagcttttgcaaaacctccgagccttccaaggtttgcttctttctgtaatttttctcaccaccctgacctatctcctgcagtcagccctgtggaggcctttgtgtttcccccagtgctggcagcctagaggctgagatggccagaaacaaggtggtgacagtggcgtgctcagggcttgggaaacccaaggagctaaaggcatgcccaggcaaccaaagaggacaggaaggcttctgaggagagacctctgaggtgggtcttggagaggaaggacttagggaggcagagtggaggaagtgagaggacaccccaagccaagagggcggcaggaccaaaggctcagaagccagggcgctgcagaggggctgtgtgccacagggtgaagagtttgtgtggcagaagggcagggggcttgcatcaggggtgacagctgctcttttgtcccagcatagcccctgtacatccctggagagctggggcgtccacaactctaagtcacagcccccatcctaaccctggtggtgcagtgagggtgagctgtctgtgggcaggagggaagactcttggagatgagcctggtgaagggataatggcatcccgggccgaggagcagcacaggcagaggcctggggagagtttaaggagtgtaggggaggaaatggcagaagatgagccagaaaaagaaaggttagggcaggtcctggaggacatgagtggctgtttgggctttatccagcagtgggggagccttggcaggcttgtggcttagataggtgctttagaaagcccaccagcagttgctgggccaccccgctggctgggtcctgttctaaggcaggaaatacaagnatgagcaggaaaagaccccctcaaggctcacgtcctagtggggagacaagaaacacagatgggcaatataacacgatgtctggttccagtaagtgcagtgaagaacaagcgaggctggatgcagggagtgatgggaggggctttgtaaggggaggtcgggggaagcctgtctcagaggacaccagaatggagcgcaggagcagcacgtggcagtcacatggcaggccgttagggcagagggagctgggcagggcacagcagggcaggagtgtgtttgatgtgtcctgggaaccgccctgaggccgtcgtgtggctggagtgctgcaggtgtcaaggaaattgtaggagatgtctcctgagtgtgatggaatataaccagatttccagaaggaactgacatgatctgacttaaaaaggccacctacatttacatgaaggccgcctacctcagcatgtttgggaaggaggaccacaagccgttcggggacgacgaagtggaattatttcgagctgtgccaggcctgaagctcaagattgctgggaaatctctacccacagagaagtttgccatccggaagtcccggcgctacttctcctccaaccctatctcgctgccagtgcctgctctggaaatgatgtacatctggaacggctacgccgtgattgggaagcagccgaaactcacggatgggatacttgagattatcactaaggctgaagagatgctggagaaaggcccagagaacgagtactcagtggatgacgagtgcttggtgaaattgttgaaaggcctgtgtctgaaatacctgggccgtgtccaggaggccgaggagaattttaggagcatctctgccaatgaaaagaagattaaatatgaccactacttgatcccaaacgccctgctggagctggccctgctgcttatggagcaagacagaaacgaagaggccatcaaacttttggaatctgccaagcaaaactacaagaattactccatggagtcaaggacacactttcgaatccaggcagccacactccaagccaagtcttccctagagaacagcagcagatccatggtctcatcagtgtccttgtagctttgtgcagcagttccgggctggaagacagagacagctggacagagctcctgaaaacatttcaaaataccccctccccctgccctgccctgcctttggggtccaccggcactccagttggatggcacaacatagtgtatccgtgcagaagccgagctggcattttcaccagtgtagccaagggcctttgccaagggcagagcaggtggagccctctgcctgccctatcacacatacgggtacttgcttttcactgtgatgtttaagagaatgtatgaacagtttacattttccttagaaatacattgatgggatcacagttggctttaaaaaccaacaacaatcaaccacctgtaagtctttgtcttcacctattatcatctggaggtaaatctctttatatgatgatgccaaagggcaaattgcttttcaaattcagcaagttctcagcttgtgtgacggaaggtccttcagaggacctgaggaatgcctgggagaggctaagcctcaggcttcaatgcttctggggttgggcatgaggatgtacacagacacccactaccttactactcacacttcatttcactccttttgtaaatttccaatttaaaaatcaagcacgtctttttagtgagataaaatctgagctcttctgtagaaaaatcaatctctaccagtagaaaatgccagggcttgatggaagagctgtgtagccctttctatgccaaagccaggaaatttggggggcaggaggaggttctcagaatccagtctgtatctttgctgtatgccaaactgaaaccactgggaataatttatgaaacataaaaatcttctgtacttcactccaaggtacatttgcttactgacagcatttttgttaaaactgttattcttgaaaattgtgta

SEQ ID NO: 371977 - DNA, 7273 bp, Homo sapiens
  misc_feature (2218)..(2218): n is a, c, g, or t
  misc_feature (2950)..(2950): n is a, c, g, or t
  misc_feature (3557)..(3557): n is a, c, g, or t
  misc_feature (3582)..(3582): n is a, c, g, or t
  misc_feature (3603)..(3603): n is a, c, g, or t
  misc_feature (3615)..(3615): n is a, c, g, or t
  misc_feature (3678)..(3678): n is a, c, g, or t
  misc_feature (4141)..(4141): n is a, c, g, or t
  misc_feature (5267)..(5267): n is a, c, g, or t
caactttctcacggagctgtagtcacagacacgttcagagcagccttccccacctgcctcgtggcgttcactcctgtggggtgggccctgttactctcatccccattacagatgaggaaactgagacacagcacttaagtgacttgtcatcggtcacccaggaggactcctgagagcagcctccatgaggccctggaccagtgcatgaccgccctggacctcttcctcaccaaccagttctcagaagcactcagctacctcaagcccagaaccaaggaaagcatgtaccactcactgacatatgccaccatcctggagatgcaggccatgatgacctttgaccctcaggacatcctgcttgccggcaacatgatgaaggaggcacagatgctgtgtcagaggcaccggaggaagtcttctgtaacagattccttcagcagcctggtgaaccgccccacgctgggccaattcactgaagaggaaatccacgctgaggtctgctatgcagagtgcctgctgcagcgagcagccctgaccttcctgcagggttcctcacacggaggggcagtcaggcccagagccttgcatgatccctctcacgcctgcagctgcccacctgggccaggccgtcagcatcttttcctcctgcgacgagaacatggtgagcttcatcaaaggcggcatcaaagttcgaaacagctaccagacctacaaggagctggacagccttgttcagtcctcacaatactgcaagggtgagaaccacccgcactttgaaggaggagtgaagcttggtgtaggggccttcaacctgacactgtccatgcttcctactaggatcctgaggctgttggagtttgtggggttttcaggaaacaaggactatgggctgctgcagctggaggagggagcgtcagggcacagcttccgctctgtgctctgtgtcatgctcctgctgtgctaccacaccttcctcaccttcgtgctcggtactgggaacgtcaacatcgaggaggccgagaagctcttgaagccctacctgaaccggtaccctaagggtgccatcttcctgttctttgcagggaggattgaagtcattaaaggcaacattgatgcagtgagtgatgggggtccgggccggggctggggatccctcggggtctcccagaccagcaggaagtcaggcacatgtgacatactcagggacaggatagactgggggcggggggggggccaagagagaaccaaccagagagcaggggcaggagaggcccttctggcagagcagcctgggaagacaagggaggaggaggcatttgtggtgcctgggattttgactgggagatataggactgcagcattgcagtggagggaggtggagggaggtgcttgagggaggcagaggttaggaaagcccatctgtttagggcatgacgattaggctggagtctggtacctcccctccattatagctctctcctgctctttcattttgttactaaaaaccagagtcctaggcgggggctgtatttgagcccaacgtcatgtaagacttaggaggtaaaaccaggactggaggccagatctcctggctcctggggccccacctgagcctagcacagggctggaccactatgccctggaggagtcccggtctgctgtggtgttgggaggttcggaggatgcagaggggttggggctgggtgggcacccgtcaggctgaccagaaggtgcctgcaggccatccggcgtttcgaggagtgctgtgaggcccagcagcactggaagcagttccaccacatgtgctactgggagctgatgtggtgcttcacctacaagggccagtggaagatgtcctacttctacgccgacctgctcagcaaggagaactgctggtccaaggtgggctgatgccacgtgttaggggcattgggtgaccagggctgactgtgtgcctccagaccacgggccaaatccctaactgaacacagatgtctcagctggaatctaaacataaccttaaattctaataggactcaggcttggaaggaactaaagaccacaagagaaacttctgaaccacaatgtgtcacaaagagatttctagtcacaaaggacagaaacatggctccctctgtccagtagaactgtttctgtggtagaaatgttctacttatgcactgcccaaatatggtagtcaccagccacatgtgcacantgagcacatgaaatgtgcctagtgcaactgggaaactgattgttttcagttttatttaattttaattaactaaatgttaaatttaaatagccatgtagggcttgtggccactatattggactatgcaggtccaaaacacaaaaggctcatataactgaacattcttggcacatccgacttcaggtagggctggatccaggaattcaaatgatgtcgtctggcttggtctttccatttgtggctgtgctctctcctatgacatctttgtttctgctgcatctttgcaggaaggttctctccatgtgacaggcaaggtggccacgggctgcttctactcatatcctccccttggtttcaaccagagtcccacagtttgagcctcactggtctgacttgtcacctgccaatgcctggaacagaggggtgggaagattcctcatgggctgagagtaggagaggggtggttccacagaagaaaatgatgcacccagaaatagtggagggattaacaagatgccatacaggcaaaacaaagccaaacagatgcccgcctaccaaagatgaaatttatcatggtaagtattgaaataagtgttagcttgtaccatcatagtaatgatagtgcagaaattggaaccaagagtcttacaaccacctagctcagcaaacgtctaatctgttatttgtaaatacacaggacatgtgtcttcatggcttcatcccctgcccatngcagacattgctaatcaatcctctgccatgagcctagctgtgaccttagataccttccctgcaaagctccaggcagccgttagaactgacccacattggcacctgttaggagacctgtcatctgcatctggtccctccccctcctctgcatggaggtctcttccgtagccctgcctggggaccaagctgaaggggaattctctgggtctggggcaggtggggctggggaagggagcaggcttctactgagctctcaacatgtctggcacctgtcatgtcctccacaccacacccagtgaggagaagttattatctccattgggcacatgagggccactgatgctaagcgaggactgtgactttcccacccacatggctgttggtgacagacaccggatttgaggacagtcctgtgtgactcagaggcctctgcttctctcttgctcctagagtcctcctgaggagtcggggcttgccctgagcccaccctgctgttgaaggtgcttcctcaggcccagctcccatggcccccacaccccctcctcatcacctcctactcccaaaaaggacaaagcctcagggaaccttttttctttttttagagacngggtcttgctatgttggtcaggctngtcttgaactcctgggcccangcaatcttcccncctctgcctcctaaagtgctgggattctgggccttagggaacctttttgaactgaaagtgacnctcgaagccttcctgtagagtgaggtgggtggctggggctaaccatatggggaaggagagacctggtgggggcacacagctgctatatagaggaacagaaggtgggccaggcctcccagctgtcaggaaatctggctcagtccccagaccgctgtgtggctttggggtggccagtccctctctctctgcaacactctcctcatgaggacttctgtgaaaaatgggggttgtaaccctctgagttctggggccccacccatttctaatctccagaacttggccaccacagactccaccaacttctagtcctggggcctgggcctctggccattgccataggcaccacctgctctgtgcaggcagcgcccccctctgccaggatcctccgaggtcagctgctgggtctgacccgcagaccctggctgagcgacggatgaacggagtatgcagacacaggcttgcntgtcagcagatgggggacccctgccagagtcagcagcggcccccataagcctgccacgcttgcatttatttagtacagatgtaatgacaaaggcctaaagcaaactccatttgtgggtaattaacattgtcgcccccccagaaagagcagtcctccgcatgatgattaaaggccaggttccgaggcctaagtaaaccaacttatctagatcaattcccttacttcttgttatctactctgagagaattcagctgccttcagccaaatcctttcccgaagcttttgcaaaacctccgagccttccaaggtttgcttctttctgtaatttttctcaccaccctgacctatctcctgcagtcagccctgtggaggcctttgtgtttcccccagtgctggcagcctagaggctgagatggccagaaacaaggtggtgacagtggcgtgctcagggcttgggaaacccaaggagctaaaggcatgcccaggcaaccaaagaggacaggaaggcttctgaggagagacctctgaggtgggtcttggagaggaaggacttagggaggcagagtggaggaagtgagaggacaccccaagccaagagggcggcaggaccaaaggctcagaagccagggcgctgcagaggggctgtgtgccacagggtgaagagtttgtgtggcagaagggcagggggcttgcatcaggggtgacagctgctcttttgtcccagcatagcccctgtacatccctggagagctggggcgtccacaactctaagtcacagcccccatcctaaccctggtggtgcagtgagggtgagctgtctgtgggcaggagggaagactcttggagatgagcctggtgaagggataatggcatcccgggccgaggagcagcacaggcagaggcctggggagagtttaaggagtgtaggggaggaaatggcagaagatgagccagaaaaagaaaggttagggcaggtcctggaggacatgagtggctgtttgggctttatccagcagtgggggagccttggcaggcttgtggcttagataggtgctttagaaagcccaccagcagttgctgggccaccccgctggctgggtcctgttctaaggcaggaaatacaagnatgagcaggaaaagaccccctcaaggctcacgtcctagtggggagacaagaaacacagatgggcaatataacacgatgtctggttccagtaagtgcagtgaagaacaagcgaggctggatgcagggagtgatgggaggggctttgtaaggggaggtcgggggaagcctgtctcagaggacaccagaatggagcgcaggagcagcacgtggcagtcacatggcaggccgttagggcagagggagctgggcagggcacagcagggcaggagtgtgtttgatgtgtcctgggaaccgccctgaggccgtcgtgtggctggagtgctgcaggtgtcaaggaaattgtaggagatgtctcctgagtgtgatggaatataaccagatttccagaaggaactgacatgatctgacttaaaaaggccacctacatttacatgaaggccgcctacctcagcatgtttgggaaggaggaccacaagccgttcggggacgacgaagtggaattatttcgagctgtgccaggcctgaagctcaagattgctgggaaatctctacccacagagaagtttgccatccggaagtcccggcgctacttctcctccaaccctatctcgctgccagtgcctgctctggaaatgatgtacatctggaacggctacgccgtgattgggaagcagccgaaactcacggatgggatacttgagattatcactaaggctgaagagatgctggagaaaggcccagagaacgagtactcagtggatgacgagtgcttggtgaaattgttgaaaggcctgtgtctgaaatacctgggccgtgtccaggaggccgaggagaattttaggagcatctctgccaatgaaaagaagattaaatatgaccactacttgatcccaaacgccctgctggagctggccctgctgcttatggagcaagacagaaacgaagaggccatcaaacttttggaatctgccaagcaaaactacaagaattactccatggagtcaaggacacactttcgaatccaggcagccacactccaagccaagtcttccctagagaacagcagcagatccatggtctcatcagtgtccttgtagctttgtgcagcagttccgggctggaagacagagacagctggacagagctcctgaaaacatttcaaaataccccctccccctgccctgccctgcctttggggtccaccggcactccagttggatggcacaacatagtgtatccgtgcagaagccgagctggcattttcaccagtgtagccaagggcctttgccaagggcagagcaggtggagccctctgcctgccctatcacacatacgggtacttgcttttcactgtgatgtttaagagaatgtatgaacagtttacattttccttagaaatacattgatgggatcacagttggctttaaaaaccaacaacaatcaaccacctgtaagtctttgtcttcacctattatcatctggaggtaaatctctttatatgatgatgccaaagggcaaattgcttttcaaattcagcaagttctcagcttgtgtgacggaaggtccttcagaggacctgaggaatgcctgggagaggctaagcctcaggcttcaatgcttctggggttgggcatgaggatgtacacagacacccactaccttactactcacacttcatttcactccttttgtaaatttccaatttaaaaatcaagcacgtctttttagtgagataaaatctgagctcttctgtagaaaaatcaatctctaccagtagaaaatgccagggcttgatggaagagctgtgtagccctttctatgccaaagccaggaaatttggggggcaggaggaggttctcagaatccagtctgtatctttgctgtatgccaaactgaaaccactgggaataatttatgaaacataaaaatcttctgtacttcactccaaggtacatttgcttactgacagcatttttgttaaaactgttattcttgaaaattgtgta

SEQ ID NO: 371978 - DNA, 3304 bp, Homo sapiens
aggcctgggggagggaggaggccttggagaaggaggagggaaaaaggggctgtgggatttagtggctgggctgcaccccctgggggggcagcagagcccaatgggccagaagggccacaaagactccctttacccttgtggagggactcctgagagcagcctccatgaggccctggaccagtgcatgaccgccctggacctcttcctcaccaaccagttctcagaagcactcagctacctcaagcccagaaccaaggaaagcatgtaccactcactgacatatgccaccatcctggagatgcaggccatgatgacctttgaccctcaggacatcctgcttgccggcaacatgatgaaggaggcacagatgctgtgtcagaggcaccggaggaagtcttctgtaacagattccttcagcagcctggtgaaccgccccacgctgggccaattcactgaagaggaaatccacgctgaggtctgctatgcagagtgcctgctgcagcgagcagccctgaccttcctgcaggacgagaacatggtgagcttcatcaaaggcggcatcaaagttcgaaacagctaccagacctacaaggagctggacagccttgttcagtcctcacaatactgcaagggtgagaaccacccgcactttgaaggaggagtgaagcttggtgtaggggccttcaacctgacactgtccatgcttcctactaggatcctgaggctgttggagtttgtggggttttcaggaaacaaggactatgggctgctgcagctggaggagggagcgtcagggcacagcttccgctctgtgctctgtgtcatgctcctgctgtgctaccacaccttcctcaccttcgtgctcggtactgggaacgtcaacatcgaggaggccgagaagctcttgaagccctacctgaaccggtaccctaagggtgccatcttcctgttctttgcagggaggattgaagtcattaaaggcaacattgatgcagccatccggcgtttcgaggagtgctgtgaggcccagcagcactggaagcagttccaccacatgtgctactgggagctgatgtggtgcttcacctacaagggccagtggaagatgtcctacttctacgccgacctgctcagcaaggagaactgctggtccaaggccacctacatttacatgaaggccgcctacctcagcatgtttgggaaggaggaccacaagccgttcggggacgacgaagtggaattatttcgagctgtgccaggcctgaagctcaagattgctgggaaatctctacccacagagaagtttgccatccggaagtcccggcgctacttctcctccaaccctatctcgctgccagtgcctgctctggaaatgatgtacatctggaacggctacgccgtgattgggaagcagccgaaactcacggatgggatacttgagattatcactaaggctgaagagatgctggagaaaggcccagagaacgagtactcagtggatgacgagtgcttggtgaaattgttgaaaggcctgtgtctgaaatacctgggccgtgtccaggaggccgaggagaattttaggagcatctctgccaatgaaaagaagattaaatatgaccactacttgatcccaaacgccctgctggagctggccctgctgcttatggagcaagacagaaacgaagaggccatcaaacttttggaatctgccaagtaaggcttgggtaacctcagtctgtcctttgctccctctgaactcagctcaggagctggctggggacagagttgcccagagagcagtgagtggagttgctagcaaggccagtctggcagtctagagggtggacctgtgtccctcggaatccagctctcgcctgtcataggaagacttctttcttaatgtataaatgcgcagttagactcccagaggcaggaagtaagttcccaaggtcacatcagaagccaactgcatggctgtgtgaggacccatgcctcctgccttccagggtaggggtctattccctaaaaccaccccttcaagcttaggaacccaggaggaccaggagtggttccagtggccatgataccagggatgaggggccacaaacccttctggttaactctcccattgggtagggctcaactctctctggacacattaatttctctacaatccttccttggctcgcggggctcatacagctcaaacaggaggaaaagcatctctgggagcaggcagcctcatgtgtctgattcgctgctcaattccaggcaaaactacaagaattactccatggagtcaaggacacactttcgaatccaggcagccacactccaagccaagtcttccctagagaacagcagcagatccatggtctcatcagtgtccttgtagctttgtgcagcagttccgggctggaagacagagacagctggacagagctcctgaaaacatttcaaaataccccctccccctgccctgccctgcctttggggtccaccggcactccagttggatggcacaacatagtgtatccgtgcagaagccgagctggcattttcaccagtgtagccaagggcctttgccaagggcagagcaggtggagccctctgcctgccctatcacacatacgggtacttgcttttcactgtgatgtttaagagaatgtatgaacagtttacattttccttagaaatacattgatgggatcacagttggctttaaaaaccaacaacaatcaaccacctgtaagtctttgtcttcacctattatcatctggaggtaaatctctttatatgatgatgccaaagggcaaattgcttttcaaattcagcaagttctcagcttgtgtgacggaaggtccttcagaggacctgaggaatgcctgggagaggctaagcctcaggcttcaatgcttctggggttgggcatgaggatgtacacagacacccactaccttactactcacacttcatttcactccttttgtaaatttccaatttaaaaatcaagcacgtctttttagtgagataaaatctgagctcttctgtagaaaaatcaatctctaccagtagaaaatgccagggcttgatggaagagctgtgtagccctttctatgccaaagccaggaaatttggggggcaggaggaggttctcagaatccagtctgtatctttgctgtatgccaaactgaaaccactgggaataatttatgaaacataaaaatcttctgtacttcactccaaggtacatttgcttactgacagcatttttgttaaaactgttattcttgaaaattgtgta

SEQ ID NO: 371979 - DNA, 1310 bp, Homo sapiens
agaaatgaacaagtctgtctttttccctcacatccctattttcagagaacgagtactcagtggatgacgagtgcttggtgaaattgttgaaaggcctgtgtctgaaatacctgggccgtgtccaggaggccgaggagaattttaggagcatctctgccaatgaaaagaagattaaatatgaccactacttgatcccaaacgccctgctggagctggccctgctgcttatggagcaagacagaaacgaagaggccatcaaacttttggaatctgccaagcaaaactacaagaattactccatggagtcaaggacacactttcgaatccaggcagccacactccaagccaagtcttccctagagaacagcagcagatccatggtctcatcagtgtccttgtagctttgtgcagcagttccgggctggaagacagagacagctggacagagctcctgaaaacatttcaaaataccccctccccctgccctgccctgcctttggggtccaccggcactccagttggatggcacaacatagtgtatccgtgcagaagccgagctggcattttcaccagtgtagccaagggcctttgccaagggcagagcaggtggagccctctgcctgccctatcacacatacgggtacttgcttttcactgtgatgtttaagagaatgtatgaacagtttacattttccttagaaatacattgatgggatcacagttggctttaaaaaccaacaacaatcaaccacctgtaagtctttgtcttcacctattatcatctggaggtaaatctctttatatgatgatgccaaagggcaaattgcttttcaaattcagcaagttctcagcttgtgtgacggaaggtccttcagaggacctgaggaatgcctgggagaggctaagcctcaggcttcaatgcttctggggttgggcatgaggatgtacacagacacccactaccttactactcacacttcatttcactccttttgtaaatttccaatttaaaaatcaagcacgtctttttagtgagataaaatctgagctcttctgtagaaaaatcaatctctaccagtagaaaatgccagggcttgatggaagagctgtgtagccctttctatgccaaagccaggaaatttggggggcaggaggaggttctcagaatccagtctgtatctttgctgtatgccaaactgaaaccactgggaataatttatgaaacataaaaatcttctgtacttcactccaaggtacatttgcttactgacagcatttttgttaaaactgttattcttgaaaattgtgta

SEQ ID NO: 371980 - DNA, 2066 bp, Homo sapiens
aggcctgggggagggaggaggccttggagaaggaggagggaaaaaggggctgtgggatttagtggctgggctgcaccccctgggggggcagcagagcccaatgggccagaagggccacaaagactccctttacccttgtggagggactcctgagagcagcctccatgaggccctggaccagtgcatgaccgccctggacctcttcctcaccaaccagttctcagaagcactcagctacctcaagcccagaaccaaggaaagcatgtaccactcactgacatatgccaccatcctggagatgcaggccatgatgacctttgaccctcaggacatcctgcttgccggcaacatgatgaaggaggcacagatgctgtgtcagaggcaccggaggaagtcttctgtaacagattccttcagcagcctggtgaaccgccccacgctgggccaattcactgaagaggaaatccacgctgaggtctgctatgcagagtgcctgctgcagcgagcagccctgaccttcctgcaggacgagaacatggtgagcttcatcaaaggcggcatcaaagttcgaaacagctaccagacctacaaggagctggacagccttgttcagtcctcacaatactgcaagggtgagaaccacccgcactttgaaggaggagtgaagcttggtgtaggggccttcaacctgacactgtccatgcttcctactaggatcctgaggctgttggagtttgtggggttttcaggaaacaaggactatgggctgctgcagctggaggagggagcgtcagggcacagcttccgctctgtgctctgtgtcatgctcctgctgtgctaccacaccttcctcaccttcgtgctcggtactgggaacgtcaacatcgaggaggccgagaagctcttgaagccctacctgaaccggtaccctaagggtgccatcttcctgttctttgcagggaggattgaagtcattaaaggcaacattgatgcagccatccggcgtttcgaggagtgctgtgaggcccagcagcactggaagcagttccaccacatgtgctactgggagctgatgtggtgcttcacctacaagggccagtggaagatgtcctacttctacgccgacctgctcagcaaggagaactgctggtccaaggccacctacatttacatgaaggccgcctacctcagcatgtttgggaaggaggaccacaagccgttcggggacgacgaagtggaattatttcgagctgtgccaggcctgaagctcaagattgctgggaaatctctacccacagagaagtttgccatccggaagtcccggcgctacttctcctccaaccctatctcgctgccagtgcctgctctggaaatgatgtacatctggaacggctacgccgtgattgggaagcagccgaaactcacggatgggatacttgagattatcactaaggctgaagagatgctggagaaaggcccagagaacgagtactcagtggatgacgagtgcttggtgaaattgttgaaaggcctgtgtctgaaatacctgggccgtgtccaggaggccgaggagaattttaggagcatctctgccaatgaaaagaagattaaatatgaccactacttgatcccaaacgccctgctggagctggccctgctgcttatggagcaagacagaaacgaagaggccatcaaacttttggaatctgccaagcaaaactacaagaattactccatggagtcaaggacacactttcgaatccaggcagccacactccaagccaagtcttccctagagaacagcagcagatccatggtctcatcagtgtccttgtagctttgtgcagcagttccgggctggaagacagagacagctggacagagctcctgaaaacatttcaaaataccccctccccctgccctgccctgcctttggggtccaccggcactccagttggatggcacaacatatttatgaaacataaaaatcttctgtacttcactccaaggtacatttgcttactgacagcatttttgttaaaactgttattcttgaaaattgtgta

SEQ ID NO: 371981 - DNA, 832 bp, Homo sapiens
  misc_feature (32)..(33): n is a, c, g, or t
  misc_feature (60)..(60): n is a, c, g, or t
  misc_feature (186)..(186): n is a, c, g, or t
  misc_feature (216)..(216): n is a, c, g, or t
  misc_feature (293)..(293): n is a, c, g, or t
cccccccttccccaaacattcttgaggtaggnnggcctcattgtaaattgtaggtggccnttggaccaacaagtctcctttcttgagcaggtcggccgtaagaagtagacaatcttccacttggcccttgtaggtgaagcaccacatcagctcccagtagcaacatgtggtggactgcttccagtnctgctggcctcacaagcactcctcgaaacnccggatggctgcatcaatgtgcctttaatgacttcaatcctccctgcaaagaacaggaagatggcacccccaggganccctgcccgcggggactcctgagagcagcctccatgaggccctggaccagtgcatgaccgccctggacctcttcctcaccaaccagttctcagaagcactcagctacctcaagcccagaaccaaggaaagcatgtaccactcactgacatatgccaccatcctggagatgcaggccatgatgacctttgaccctcaggacatcctgcttgccggcaacatgatgaaggaggcacagatgctgtgtcagaggcaccggaggaagtcttctgtaacagattccttcagcagcctggtgaaccgccccacgctgggccaattcactgaaggtgtggcatccaggacatcctttcaaccatgctaagcccaggtggccagctccaggcccaggaaggggcagttttcttccctgtcatcgcctagggggccaggccctggtgtccatgccaggacacacatgggtcagagctggggccttttgaggcatggctctctagtgagggtgtggggggcaggtgagacccacttatgcgatagcact

SEQ ID NO: 371982 - DNA, 280 bp, Homo sapiens
ctgaagcactgggtgacgaggtaggggacaggagaggtgctgacataggttccctttgcttttggggaagttggggtgtgaggatttgtcccaggcctcctgactagagtcccaggaggccacggggctttggttttctccccacagaggaaatccacgctgaggtctgctatgcagagtgcctgctgcagcgagcagccctgaccttcctgcaggtagggacccccacttgtacaaagaggctgggatttcagaagatcagtttccacgtccaaccatg

SEQ ID NO: 371983 - DNA, 379 bp, Homo sapiens
actgagacctgtcatggatgattagagctagaaggtcctttagtgaacctctgatctgaactgcccattttgtagatgggaaaactgaggccccattagggaagaaacctaggactgacttgcccccctgccttcaggaaatgatgtacatctggaacggctacgccgtgattgggaagcagccgaaactcacggatgggatacttgagattatcactaaggctgaagagatgctggagaaaggcccaggtgacttccctcaggcccttgggcctgccatgctaggtcaggtctttacagctgaagcttccctctgccaaaaatgtccttcctcctttccctaccctggcaactctcctttatctctctagactgagct

SEQ ID NO: 371984 - DNA, 6253 bp, Homo sapiens
  misc_feature (2228)..(2228): n is a, c, g, or t
  misc_feature (2960)..(2960): n is a, c, g, or t
  misc_feature (3567)..(3567): n is a, c, g, or t
  misc_feature (3592)..(3592): n is a, c, g, or t
  misc_feature (3613)..(3613): n is a, c, g, or t
  misc_feature (3625)..(3625): n is a, c, g, or t
  misc_feature (3688)..(3688): n is a, c, g, or t
  misc_feature (4151)..(4151): n is a, c, g, or t
  misc_feature (5277)..(5277): n is a, c, g, or t
  misc_feature (6027)..(6027): n is a, c, g, or t
  misc_feature (6052)..(6052): n is a, c, g, or t
  misc_feature (6155)..(6155): n is a, c, g, or t
ggtggagacaccgcctcagggctcggtgcacagtggacatttggggagcgttgtgggtgacccccacacaggcactgggaatgcaggggagagggggccaagggggaaaggggccagagtgttggctttggattcaggagggatggattccagtcctagcttgccacttattaggactcctgagagcagcctccatgaggccctggaccagtgcatgaccgccctggacctcttcctcaccaaccagttctcagaagcactcagctacctcaagcccagaaccaaggaaagcatgtaccactcactgacatatgccaccatcctggagatgcaggccatgatgacctttgaccctcaggacatcctgcttgccggcaacatgatgaaggaggcacagatgctgtgtcagaggcaccggaggaagtcttctgtaacagattccttcagcagcctggtgaaccgccccacgctgggccaattcactgaagaggaaatccacgctgaggtctgctatgcagagtgcctgctgcagcgagcagccctgaccttcctgcagggttcctcacacggaggggcagtcaggcccagagccttgcatgatccctctcacgcctgcagctgcccacctgggccaggccgtcagcatcttttcctcctgcgacgagaacatggtgagcttcatcaaaggcggcatcaaagttcgaaacagctaccagacctacaaggagctggacagccttgttcagtcctcacaatactgcaagggtgagaaccacccgcactttgaaggaggagtgaagcttggtgtaggggccttcaacctgacactgtccatgcttcctactaggatcctgaggctgttggagtttgtggggttttcaggaaacaaggactatgggctgctgcagctggaggagggagcgtcagggcacagcttccgctctgtgctctgtgtcatgctcctgctgtgctaccacaccttcctcaccttcgtgctcggtactgggaacgtcaacatcgaggaggccgagaagctcttgaagccctacctgaaccggtaccctaagggtgccatcttcctgttctttgcagggaggattgaagtcattaaaggcaacattgatgcagtgagtgatgggggtccgggccggggctggggatccctcggggtctcccagaccagcaggaagtcaggcacatgtgacatactcagggacaggatagactgggggcggggggggggccaagagagaaccaaccagagagcaggggcaggagaggcccttctggcagagcagcctgggaagacaagggaggaggaggcatttgtggtgcctgggattttgactgggagatataggactgcagcattgcagtggagggaggtggagggaggtgcttgagggaggcagaggttaggaaagcccatctgtttagggcatgacgattaggctggagtctggtacctcccctccattatagctctctcctgctctttcattttgttactaaaaaccagagtcctaggcgggggctgtatttgagcccaacgtcatgtaagacttaggaggtaaaaccaggactggaggccagatctcctggctcctggggccccacctgagcctagcacagggctggaccactatgccctggaggagtcccggtctgctgtggtgttgggaggttcggaggatgcagaggggttggggctgggtgggcacccgtcaggctgaccagaaggtgcctgcaggccatccggcgtttcgaggagtgctgtgaggcccagcagcactggaagcagttccaccacatgtgctactgggagctgatgtggtgcttcacctacaagggccagtggaagatgtcctacttctacgccgacctgctcagcaaggagaactgctggtccaaggtgggctgatgccacgtgttaggggcattgggtgaccagggctgactgtgtgcctccagaccacgggccaaatccctaactgaacacagatgtctcagctggaatctaaacataaccttaaattctaataggactcaggcttggaaggaactaaagaccacaagagaaacttctgaaccacaatgtgtcacaaagagatttctagtcacaaaggacagaaacatggctccctctgtccagtagaactgtttctgtggtagaaatgttctacttatgcactgcccaaatatggtagtcaccagccacatgtgcacantgagcacatgaaatgtgcctagtgcaactgggaaactgattgttttcagttttatttaattttaattaactaaatgttaaatttaaatagccatgtagggcttgtggccactatattggactatgcaggtccaaaacacaaaaggctcatataactgaacattcttggcacatccgacttcaggtagggctggatccaggaattcaaatgatgtcgtctggcttggtctttccatttgtggctgtgctctctcctatgacatctttgtttctgctgcatctttgcaggaaggttctctccatgtgacaggcaaggtggccacgggctgcttctactcatatcctccccttggtttcaaccagagtcccacagtttgagcctcactggtctgacttgtcacctgccaatgcctggaacagaggggtgggaagattcctcatgggctgagagtaggagaggggtggttccacagaagaaaatgatgcacccagaaatagtggagggattaacaagatgccatacaggcaaaacaaagccaaacagatgcccgcctaccaaagatgaaatttatcatggtaagtattgaaataagtgttagcttgtaccatcatagtaatgatagtgcagaaattggaaccaagagtcttacaaccacctagctcagcaaacgtctaatctgttatttgtaaatacacaggacatgtgtcttcatggcttcatcccctgcccatngcagacattgctaatcaatcctctgccatgagcctagctgtgaccttagataccttccctgcaaagctccaggcagccgttagaactgacccacattggcacctgttaggagacctgtcatctgcatctggtccctccccctcctctgcatggaggtctcttccgtagccctgcctggggaccaagctgaaggggaattctctgggtctggggcaggtggggctggggaagggagcaggcttctactgagctctcaacatgtctggcacctgtcatgtcctccacaccacacccagtgaggagaagttattatctccattgggcacatgagggccactgatgctaagcgaggactgtgactttcccacccacatggctgttggtgacagacaccggatttgaggacagtcctgtgtgactcagaggcctctgcttctctcttgctcctagagtcctcctgaggagtcggggcttgccctgagcccaccctgctgttgaaggtgcttcctcaggcccagctcccatggcccccacaccccctcctcatcacctcctactcccaaaaaggacaaagcctcagggaaccttttttctttttttagagacngggtcttgctatgttggtcaggctngtcttgaactcctgggcccangcaatcttcccncctctgcctcctaaagtgctgggattctgggccttagggaacctttttgaactgaaagtgacnctcgaagccttcctgtagagtgaggtgggtggctggggctaaccatatggggaaggagagacctggtgggggcacacagctgctatatagaggaacagaaggtgggccaggcctcccagctgtcaggaaatctggctcagtccccagaccgctgtgtggctttggggtggccagtccctctctctctgcaacactctcctcatgaggacttctgtgaaaaatgggggttgtaaccctctgagttctggggccccacccatttctaatctccagaacttggccaccacagactccaccaacttctagtcctggggcctgggcctctggccattgccataggcaccacctgctctgtgcaggcagcgcccccctctgccaggatcctccgaggtcagctgctgggtctgacccgcagaccctggctgagcgacggatgaacggagtatgcagacacaggcttgcntgtcagcagatgggggacccctgccagagtcagcagcggcccccataagcctgccacgcttgcatttatttagtacagatgtaatgacaaaggcctaaagcaaactccatttgtgggtaattaacattgtcgcccccccagaaagagcagtcctccgcatgatgattaaaggccaggttccgaggcctaagtaaaccaacttatctagatcaattcccttacttcttgttatctactctgagagaattcagctgccttcagccaaatcctttcccgaagcttttgcaaaacctccgagccttccaaggtttgcttctttctgtaatttttctcaccaccctgacctatctcctgcagtcagccctgtggaggcctttgtgtttcccccagtgctggcagcctagaggctgagatggccagaaacaaggtggtgacagtggcgtgctcagggcttgggaaacccaaggagctaaaggcatgcccaggcaaccaaagaggacaggaaggcttctgaggagagacctctgaggtgggtcttggagaggaaggacttagggaggcagagtggaggaagtgagaggacaccccaagccaagagggcggcaggaccaaaggctcagaagccagggcgctgcagaggggctgtgtgccacagggtgaagagtttgtgtggcagaagggcagggggcttgcatcaggggtgacagctgctcttttgtcccagcatagcccctgtacatccctggagagctggggcgtccacaactctaagtcacagcccccatcctaaccctggtggtgcagtgagggtgagctgtctgtgggcaggagggaagactcttggagatgagcctggtgaagggataatggcatcccgggccgaggagcagcacaggcagaggcctggggagagtttaaggagtgtaggggaggaaatggcagaagatgagccagaaaaagaaaggttagggcaggtcctggaggacatgagtggctgtttgggctttatccagcagtgggggagccttggcaggcttgtggcttagataggtgctttagaaagcccaccagcagttgctgggccaccccgctggctgggtcctgttctaaggcaggaaatacaagnatgagcaggaaaagaccccctcaaggctcacgtcctagtggggagacaagaaacacagatgggcaatataacacgatgtctggttccagtaagtgcagtgaagaacaagcgaggctggatgcagggagtgatgggaggggctttgtaaggggaggtcgggggaagcctgtctcagaggacaccagaatggagcgcaggagcagcacgtggcagtcacatggcaggccgttagggcagagggagctgggcagggcacagcagggcaggagtgtgtttgatgtgtcctgggaaccgccctgaggccgtcgtgtggctggagtgctgcaggtgtcaaggaaattgtaggagatgtctcctgagtgtgatggaatataaccagatttccagaaggaactgacatgatctgacttaaaaaggtcagtgtgcgaaatggcttgcaggggacaggagtgggagcagggagataggagacaatgtgtaccaggacagcagaaagacatcccgggtagcctggaacagggagacggtgtggagatggtggcagtccgataatgagagccgtagggcaaggccagcaggatcctagagtgagacgggaggtaaagtcaccgggacttggtgtctccacgtcaggggcaggggaaagggagaggacaagggtgacccgggaggttaaagatgggaccggggccagacgcagtggctcatgcctgtaatcctagcactttgggaggctgaggcgggcggatngcttgaggtcaggagtttgaaaccngcctggccaacatggtgaaaccccgtctctactaaaatatacaaaaattagcctggcgtggtggtgcatgcctgcagtcccagctattcaggaggctgaggcnacaagaatcgcttgaacctgggaggcggaggttgcagtgagccgagatcgcgccatagcactccagccttagcctgggcgacagagcgagaccacatc

SEQ ID NO: 371985 - DNA, 7150 bp, Homo sapiens
  misc_feature (2095)..(2095): n is a, c, g, or t
  misc_feature (2827)..(2827): n is a, c, g, or t
  misc_feature (3434)..(3434): n is a, c, g, or t
  misc_feature (3459)..(3459): n is a, c, g, or t
  misc_feature (3480)..(3480): n is a, c, g, or t
  misc_feature (3492)..(3492): n is a, c, g, or t
  misc_feature (3555)..(3555): n is a, c, g, or t
  misc_feature (4018)..(4018): n is a, c, g, or t
  misc_feature (5144)..(5144): n is a, c, g, or t
aggcctgggggagggaggaggccttggagaaggaggagggaaaaaggggctgtgggatttagtggctgggctgcaccccctgggggggcagcagagcccaatgggccagaagggccacaaagactccctttacccttgtggagggactcctgagagcagcctccatgaggccctggaccagtgcatgaccgccctggacctcttcctcaccaaccagttctcagaagcactcagctacctcaagcccagaaccaaggaaagcatgtaccactcactgacatatgccaccatcctggagatgcaggccatgatgacctttgaccctcaggacatcctgcttgccggcaacatgatgaaggaggcacagatgctgtgtcagaggcaccggaggaagtcttctgtaacagattccttcagcagcctggtgaaccgccccacgctgggccaattcactgaagaggaaatccacgctgaggtctgctatgcagagtgcctgctgcagcgagcagccctgaccttcctgcaggacgagaacatggtgagcttcatcaaaggcggcatcaaagttcgaaacagctaccagacctacaaggagctggacagccttgttcagtcctcacaatactgcaagggtgagaaccacccgcactttgaaggaggagtgaagcttggtgtaggggccttcaacctgacactgtccatgcttcctactaggatcctgaggctgttggagtttgtggggttttcaggaaacaaggactatgggctgctgcagctggaggagggagcgtcagggcacagcttccgctctgtgctctgtgtcatgctcctgctgtgctaccacaccttcctcaccttcgtgctcggtactgggaacgtcaacatcgaggaggccgagaagctcttgaagccctacctgaaccggtaccctaagggtgccatcttcctgttctttgcagggaggattgaagtcattaaaggcaacattgatgcagtgagtgatgggggtccgggccggggctggggatccctcggggtctcccagaccagcaggaagtcaggcacatgtgacatactcagggacaggatagactgggggcggggggggggccaagagagaaccaaccagagagcaggggcaggagaggcccttctggcagagcagcctgggaagacaagggaggaggaggcatttgtggtgcctgggattttgactgggagatataggactgcagcattgcagtggagggaggtggagggaggtgcttgagggaggcagaggttaggaaagcccatctgtttagggcatgacgattaggctggagtctggtacctcccctccattatagctctctcctgctctttcattttgttactaaaaaccagagtcctaggcgggggctgtatttgagcccaacgtcatgtaagacttaggaggtaaaaccaggactggaggccagatctcctggctcctggggccccacctgagcctagcacagggctggaccactatgccctggaggagtcccggtctgctgtggtgttgggaggttcggaggatgcagaggggttggggctgggtgggcacccgtcaggctgaccagaaggtgcctgcaggccatccggcgtttcgaggagtgctgtgaggcccagcagcactggaagcagttccaccacatgtgctactgggagctgatgtggtgcttcacctacaagggccagtggaagatgtcctacttctacgccgacctgctcagcaaggagaactgctggtccaaggtgggctgatgccacgtgttaggggcattgggtgaccagggctgactgtgtgcctccagaccacgggccaaatccctaactgaacacagatgtctcagctggaatctaaacataaccttaaattctaataggactcaggcttggaaggaactaaagaccacaagagaaacttctgaaccacaatgtgtcacaaagagatttctagtcacaaaggacagaaacatggctccctctgtccagtagaactgtttctgtggtagaaatgttctacttatgcactgcccaaatatggtagtcaccagccacatgtgcacantgagcacatgaaatgtgcctagtgcaactgggaaactgattgttttcagttttatttaattttaattaactaaatgttaaatttaaatagccatgtagggcttgtggccactatattggactatgcaggtccaaaacacaaaaggctcatataactgaacattcttggcacatccgacttcaggtagggctggatccaggaattcaaatgatgtcgtctggcttggtctttccatttgtggctgtgctctctcctatgacatctttgtttctgctgcatctttgcaggaaggttctctccatgtgacaggcaaggtggccacgggctgcttctactcatatcctccccttggtttcaaccagagtcccacagtttgagcctcactggtctgacttgtcacctgccaatgcctggaacagaggggtgggaagattcctcatgggctgagagtaggagaggggtggttccacagaagaaaatgatgcacccagaaatagtggagggattaacaagatgccatacaggcaaaacaaagccaaacagatgcccgcctaccaaagatgaaatttatcatggtaagtattgaaataagtgttagcttgtaccatcatagtaatgatagtgcagaaattggaaccaagagtcttacaaccacctagctcagcaaacgtctaatctgttatttgtaaatacacaggacatgtgtcttcatggcttcatcccctgcccatngcagacattgctaatcaatcctctgccatgagcctagctgtgaccttagataccttccctgcaaagctccaggcagccgttagaactgacccacattggcacctgttaggagacctgtcatctgcatctggtccctccccctcctctgcatggaggtctcttccgtagccctgcctggggaccaagctgaaggggaattctctgggtctggggcaggtggggctggggaagggagcaggcttctactgagctctcaacatgtctggcacctgtcatgtcctccacaccacacccagtgaggagaagttattatctccattgggcacatgagggccactgatgctaagcgaggactgtgactttcccacccacatggctgttggtgacagacaccggatttgaggacagtcctgtgtgactcagaggcctctgcttctctcttgctcctagagtcctcctgaggagtcggggcttgccctgagcccaccctgctgttgaaggtgcttcctcaggcccagctcccatggcccccacaccccctcctcatcacctcctactcccaaaaaggacaaagcctcagggaaccttttttctttttttagagacngggtcttgctatgttggtcaggctngtcttgaactcctgggcccangcaatcttcccncctctgcctcctaaagtgctgggattctgggccttagggaacctttttgaactgaaagtgacnctcgaagccttcctgtagagtgaggtgggtggctggggctaaccatatggggaaggagagacctggtgggggcacacagctgctatatagaggaacagaaggtgggccaggcctcccagctgtcaggaaatctggctcagtccccagaccgctgtgtggctttggggtggccagtccctctctctctgcaacactctcctcatgaggacttctgtgaaaaatgggggttgtaaccctctgagttctggggccccacccatttctaatctccagaacttggccaccacagactccaccaacttctagtcctggggcctgggcctctggccattgccataggcaccacctgctctgtgcaggcagcgcccccctctgccaggatcctccgaggtcagctgctgggtctgacccgcagaccctggctgagcgacggatgaacggagtatgcagacacaggcttgcntgtcagcagatgggggacccctgccagagtcagcagcggcccccataagcctgccacgcttgcatttatttagtacagatgtaatgacaaaggcctaaagcaaactccatttgtgggtaattaacattgtcgcccccccagaaagagcagtcctccgcatgatgattaaaggccaggttccgaggcctaagtaaaccaacttatctagatcaattcccttacttcttgttatctactctgagagaattcagctgccttcagccaaatcctttcccgaagcttttgcaaaacctccgagccttccaaggtttgcttctttctgtaatttttctcaccaccctgacctatctcctgcagtcagccctgtggaggcctttgtgtttcccccagtgctggcagcctagaggctgagatggccagaaacaaggtggtgacagtggcgtgctcagggcttgggaaacccaaggagctaaaggcatgcccaggcaaccaaagaggacaggaaggcttctgaggagagacctctgaggtgggtcttggagaggaaggacttagggaggcagagtggaggaagtgagaggacaccccaagccaagagggcggcaggaccaaaggctcagaagccagggcgctgcagaggggctgtgtgccacagggtgaagagtttgtgtggcagaagggcagggggcttgcatcaggggtgacagctgctcttttgtcccagcatagcccctgtacatccctggagagctggggcgtccacaactctaagtcacagcccccatcctaaccctggtggtgcagtgagggtgagctgtctgtgggcaggagggaagactcttggagatgagcctggtgaagggataatggcatcccgggccgaggagcagcacaggcagaggcctggggagagtttaaggagtgtaggggaggaaatggcagaagatgagccagaaaaagaaaggttagggcaggtcctggaggacatgagtggctgtttgggctttatccagcagtgggggagccttggcaggcttgtggcttagataggtgctttagaaagcccaccagcagttgctgggccaccccgctggctgggtcctgttctaaggcaggaaatacaagnatgagcaggaaaagaccccctcaaggctcacgtcctagtggggagacaagaaacacagatgggcaatataacacgatgtctggttccagtaagtgcagtgaagaacaagcgaggctggatgcagggagtgatgggaggggctttgtaaggggaggtcgggggaagcctgtctcagaggacaccagaatggagcgcaggagcagcacgtggcagtcacatggcaggccgttagggcagagggagctgggcagggcacagcagggcaggagtgtgtttgatgtgtcctgggaaccgccctgaggccgtcgtgtggctggagtgctgcaggtgtcaaggaaattgtaggagatgtctcctgagtgtgatggaatataaccagatttccagaaggaactgacatgatctgacttaaaaaggccacctacatttacatgaaggccgcctacctcagcatgtttgggaaggaggaccacaagccgttcggggacgacgaagtggaattatttcgagctgtgccaggcctgaagctcaagattgctgggaaatctctacccacagagaagtttgccatccggaagtcccggcgctacttctcctccaaccctatctcgctgccagtgcctgctctggaaatgatgtacatctggaacggctacgccgtgattgggaagcagccgaaactcacggatgggatacttgagattatcactaaggctgaagagatgctggagaaaggcccagagaacgagtactcagtggatgacgagtgcttggtgaaattgttgaaaggcctgtgtctgaaatacctgggccgtgtccaggaggccgaggagaattttaggagcatctctgccaatgaaaagaagattaaatatgaccactacttgatcccaaacgccctgctggagctggccctgctgcttatggagcaagacagaaacgaagaggccatcaaacttttggaatctgccaagcaaaactacaagaattactccatggagtcaaggacacactttcgaatccaggcagccacactccaagccaagtcttccctagagaacagcagcagatccatggtctcatcagtgtccttgtagctttgtgcagcagttccgggctggaagacagagacagctggacagagctcctgaaaacatttcaaaataccccctccccctgccctgccctgcctttggggtccaccggcactccagttggatggcacaacatagtgtatccgtgcagaagccgagctggcattttcaccagtgtagccaagggcctttgccaagggcagagcaggtggagccctctgcctgccctatcacacatacgggtacttgcttttcactgtgatgtttaagagaatgtatgaacagtttacattttccttagaaatacattgatgggatcacagttggctttaaaaaccaacaacaatcaaccacctgtaagtctttgtcttcacctattatcatctggaggtaaatctctttatatgatgatgccaaagggcaaattgcttttcaaattcagcaagttctcagcttgtgtgacggaaggtccttcagaggacctgaggaatgcctgggagaggctaagcctcaggcttcaatgcttctggggttgggcatgaggatgtacacagacacccactaccttactactcacacttcatttcactccttttgtaaatttccaatttaaaaatcaagcacgtctttttagtgagataaaatctgagctcttctgtagaaaaatcaatctctaccagtagaaaatgccagggcttgatggaagagctgtgtagccctttctatgccaaagccaggaaatttggggggcaggaggaggttctcagaatccagtctgtatctttgctgtatgccaaactgaaaccactgggaataatttatgaaacataaaaatcttctgtacttcactccaaggtacatttgcttactgacagcatttttgttaaaactgttattcttgaaaattgtgta

SEQ ID NO: 371986 - DNA, 7312 bp, Homo sapiens
  misc_feature (32)..(33): n is a, c, g, or t
  misc_feature (60)..(60): n is a, c, g, or t
  misc_feature (186)..(186): n is a, c, g, or t
  misc_feature (216)..(216): n is a, c, g, or t
  misc_feature (293)..(293): n is a, c, g, or t
  misc_feature (2257)..(2257): n is a, c, g, or t
  misc_feature (2989)..(2989): n is a, c, g, or t
  misc_feature (3596)..(3596): n is a, c, g, or t
  misc_feature (3621)..(3621): n is a, c, g, or t
  misc_feature (3642)..(3642): n is a, c, g, or t
  misc_feature (3654)..(3654): n is a, c, g, or t
  misc_feature (3717)..(3717): n is a, c, g, or t
  misc_feature (4180)..(4180): n is a, c, g, or t
  misc_feature (5306)..(5306): n is a, c, g, or t
cccccccttccccaaacattcttgaggtaggnnggcctcattgtaaattgtaggtggccnttggaccaacaagtctcctttcttgagcaggtcggccgtaagaagtagacaatcttccacttggcccttgtaggtgaagcaccacatcagctcccagtagcaacatgtggtggactgcttccagtnctgctggcctcacaagcactcctcgaaacnccggatggctgcatcaatgtgcctttaatgacttcaatcctccctgcaaagaacaggaagatggcacccccaggganccctgcccgcggggactcctgagagcagcctccatgaggccctggaccagtgcatgaccgccctggacctcttcctcaccaaccagttctcagaagcactcagctacctcaagcccagaaccaaggaaagcatgtaccactcactgacatatgccaccatcctggagatgcaggccatgatgacctttgaccctcaggacatcctgcttgccggcaacatgatgaaggaggcacagatgctgtgtcagaggcaccggaggaagtcttctgtaacagattccttcagcagcctggtgaaccgccccacgctgggccaattcactgaagaggaaatccacgctgaggtctgctatgcagagtgcctgctgcagcgagcagccctgaccttcctgcaggacgagaacatggtgagcttcatcaaaggcggcatcaaagttcgaaacagctaccagacctacaaggagctggacagccttgttcagtcctcacaatactgcaagggtgagaaccacccgcactttgaaggaggagtgaagcttggtgtaggggccttcaacctgacactgtccatgcttcctactaggatcctgaggctgttggagtttgtggggttttcaggaaacaaggactatgggctgctgcagctggaggagggagcgtcagggcacagcttccgctctgtgctctgtgtcatgctcctgctgtgctaccacaccttcctcaccttcgtgctcggtactgggaacgtcaacatcgaggaggccgagaagctcttgaagccctacctgaaccggtaccctaagggtgccatcttcctgttctttgcagggaggattgaagtcattaaaggcaacattgatgcagtgagtgatgggggtccgggccggggctggggatccctcggggtctcccagaccagcaggaagtcaggcacatgtgacatactcagggacaggatagactgggggcggggggggggccaagagagaaccaaccagagagcaggggcaggagaggcccttctggcagagcagcctgggaagacaagggaggaggaggcatttgtggtgcctgggattttgactgggagatataggactgcagcattgcagtggagggaggtggagggaggtgcttgagggaggcagaggttaggaaagcccatctgtttagggcatgacgattaggctggagtctggtacctcccctccattatagctctctcctgctctttcattttgttactaaaaaccagagtcctaggcgggggctgtatttgagcccaacgtcatgtaagacttaggaggtaaaaccaggactggaggccagatctcctggctcctggggccccacctgagcctagcacagggctggaccactatgccctggaggagtcccggtctgctgtggtgttgggaggttcggaggatgcagaggggttggggctgggtgggcacccgtcaggctgaccagaaggtgcctgcaggccatccggcgtttcgaggagtgctgtgaggcccagcagcactggaagcagttccaccacatgtgctactgggagctgatgtggtgcttcacctacaagggccagtggaagatgtcctacttctacgccgacctgctcagcaaggagaactgctggtccaaggtgggctgatgccacgtgttaggggcattgggtgaccagggctgactgtgtgcctccagaccacgggccaaatccctaactgaacacagatgtctcagctggaatctaaacataaccttaaattctaataggactcaggcttggaaggaactaaagaccacaagagaaacttctgaaccacaatgtgtcacaaagagatttctagtcacaaaggacagaaacatggctccctctgtccagtagaactgtttctgtggtagaaatgttctacttatgcactgcccaaatatggtagtcaccagccacatgtgcacantgagcacatgaaatgtgcctagtgcaactgggaaactgattgttttcagttttatttaattttaattaactaaatgttaaatttaaatagccatgtagggcttgtggccactatattggactatgcaggtccaaaacacaaaaggctcatataactgaacattcttggcacatccgacttcaggtagggctggatccaggaattcaaatgatgtcgtctggcttggtctttccatttgtggctgtgctctctcctatgacatctttgtttctgctgcatctttgcaggaaggttctctccatgtgacaggcaaggtggccacgggctgcttctactcatatcctccccttggtttcaaccagagtcccacagtttgagcctcactggtctgacttgtcacctgccaatgcctggaacagaggggtgggaagattcctcatgggctgagagtaggagaggggtggttccacagaagaaaatgatgcacccagaaatagtggagggattaacaagatgccatacaggcaaaacaaagccaaacagatgcccgcctaccaaagatgaaatttatcatggtaagtattgaaataagtgttagcttgtaccatcatagtaatgatagtgcagaaattggaaccaagagtcttacaaccacctagctcagcaaacgtctaatctgttatttgtaaatacacaggacatgtgtcttcatggcttcatcccctgcccatngcagacattgctaatcaatcctctgccatgagcctagctgtgaccttagataccttccctgcaaagctccaggcagccgttagaactgacccacattggcacctgttaggagacctgtcatctgcatctggtccctccccctcctctgcatggaggtctcttccgtagccctgcctggggaccaagctgaaggggaattctctgggtctggggcaggtggggctggggaagggagcaggcttctactgagctctcaacatgtctggcacctgtcatgtcctccacaccacacccagtgaggagaagttattatctccattgggcacatgagggccactgatgctaagcgaggactgtgactttcccacccacatggctgttggtgacagacaccggatttgaggacagtcctgtgtgactcagaggcctctgcttctctcttgctcctagagtcctcctgaggagtcggggcttgccctgagcccaccctgctgttgaaggtgcttcctcaggcccagctcccatggcccccacaccccctcctcatcacctcctactcccaaaaaggacaaagcctcagggaaccttttttctttttttagagacngggtcttgctatgttggtcaggctngtcttgaactcctgggcccangcaatcttcccncctctgcctcctaaagtgctgggattctgggccttagggaacctttttgaactgaaagtgacnctcgaagccttcctgtagagtgaggtgggtggctggggctaaccatatggggaaggagagacctggtgggggcacacagctgctatatagaggaacagaaggtgggccaggcctcccagctgtcaggaaatctggctcagtccccagaccgctgtgtggctttggggtggccagtccctctctctctgcaacactctcctcatgaggacttctgtgaaaaatgggggttgtaaccctctgagttctggggccccacccatttctaatctccagaacttggccaccacagactccaccaacttctagtcctggggcctgggcctctggccattgccataggcaccacctgctctgtgcaggcagcgcccccctctgccaggatcctccgaggtcagctgctgggtctgacccgcagaccctggctgagcgacggatgaacggagtatgcagacacaggcttgcntgtcagcagatgggggacccctgccagagtcagcagcggcccccataagcctgccacgcttgcatttatttagtacagatgtaatgacaaaggcctaaagcaaactccatttgtgggtaattaacattgtcgcccccccagaaagagcagtcctccgcatgatgattaaaggccaggttccgaggcctaagtaaaccaacttatctagatcaattcccttacttcttgttatctactctgagagaattcagctgccttcagccaaatcctttcccgaagcttttgcaaaacctccgagccttccaaggtttgcttctttctgtaatttttctcaccaccctgacctatctcctgcagtcagccctgtggaggcctttgtgtttcccccagtgctggcagcctagaggctgagatggccagaaacaaggtggtgacagtggcgtgctcagggcttgggaaacccaaggagctaaaggcatgcccaggcaaccaaagaggacaggaaggcttctgaggagagacctctgaggtgggtcttggagaggaaggacttagggaggcagagtggaggaagtgagaggacaccccaagccaagagggcggcaggaccaaaggctcagaagccagggcgctgcagaggggctgtgtgccacagggtgaagagtttgtgtggcagaagggcagggggcttgcatcaggggtgacagctgctcttttgtcccagcatagcccctgtacatccctggagagctggggcgtccacaactctaagtcacagcccccatcctaaccctggtggtgcagtgagggtgagctgtctgtgggcaggagggaagactcttggagatgagcctggtgaagggataatggcatcccgggccgaggagcagcacaggcagaggcctggggagagtttaaggagtgtaggggaggaaatggcagaagatgagccagaaaaagaaaggttagggcaggtcctggaggacatgagtggctgtttgggctttatccagcagtgggggagccttggcaggcttgtggcttagataggtgctttagaaagcccaccagcagttgctgggccaccccgctggctgggtcctgttctaaggcaggaaatacaagnatgagcaggaaaagaccccctcaaggctcacgtcctagtggggagacaagaaacacagatgggcaatataacacgatgtctggttccagtaagtgcagtgaagaacaagcgaggctggatgcagggagtgatgggaggggctttgtaaggggaggtcgggggaagcctgtctcagaggacaccagaatggagcgcaggagcagcacgtggcagtcacatggcaggccgttagggcagagggagctgggcagggcacagcagggcaggagtgtgtttgatgtgtcctgggaaccgccctgaggccgtcgtgtggctggagtgctgcaggtgtcaaggaaattgtaggagatgtctcctgagtgtgatggaatataaccagatttccagaaggaactgacatgatctgacttaaaaaggccacctacatttacatgaaggccgcctacctcagcatgtttgggaaggaggaccacaagccgttcggggacgacgaagtggaattatttcgagctgtgccaggcctgaagctcaagattgctgggaaatctctacccacagagaagtttgccatccggaagtcccggcgctacttctcctccaaccctatctcgctgccagtgcctgctctggaaatgatgtacatctggaacggctacgccgtgattgggaagcagccgaaactcacggatgggatacttgagattatcactaaggctgaagagatgctggagaaaggcccagagaacgagtactcagtggatgacgagtgcttggtgaaattgttgaaaggcctgtgtctgaaatacctgggccgtgtccaggaggccgaggagaattttaggagcatctctgccaatgaaaagaagattaaatatgaccactacttgatcccaaacgccctgctggagctggccctgctgcttatggagcaagacagaaacgaagaggccatcaaacttttggaatctgccaagcaaaactacaagaattactccatggagtcaaggacacactttcgaatccaggcagccacactccaagccaagtcttccctagagaacagcagcagatccatggtctcatcagtgtccttgtagctttgtgcagcagttccgggctggaagacagagacagctggacagagctcctgaaaacatttcaaaataccccctccccctgccctgccctgcctttggggtccaccggcactccagttggatggcacaacatagtgtatccgtgcagaagccgagctggcattttcaccagtgtagccaagggcctttgccaagggcagagcaggtggagccctctgcctgccctatcacacatacgggtacttgcttttcactgtgatgtttaagagaatgtatgaacagtttacattttccttagaaatacattgatgggatcacagttggctttaaaaaccaacaacaatcaaccacctgtaagtctttgtcttcacctattatcatctggaggtaaatctctttatatgatgatgccaaagggcaaattgcttttcaaattcagcaagttctcagcttgtgtgacggaaggtccttcagaggacctgaggaatgcctgggagaggctaagcctcaggcttcaatgcttctggggttgggcatgaggatgtacacagacacccactaccttactactcacacttcatttcactccttttgtaaatttccaatttaaaaatcaagcacgtctttttagtgagataaaatctgagctcttctgtagaaaaatcaatctctaccagtagaaaatgccagggcttgatggaagagctgtgtagccctttctatgccaaagccaggaaatttggggggcaggaggaggttctcagaatccagtctgtatctttgctgtatgccaaactgaaaccactgggaataatttatgaaacataaaaatcttctgtacttcactccaaggtacatttgcttactgacagcatttttgttaaaactgttattcttgaaaattgtgta

SEQ ID NO: 371987 - DNA, 1808 bp, Homo sapiens
aaagggggcaggaactagtactaggtacgagaccggtgttaattcggcagaggggcacagcagggcaggagtgtgtttgatgtgtcctgggaaccgccctgaggccgtcgtgtggctggagtgctgcaggtgtcaaggaaattgtaggagatgtctcctgagtgtgatggaatataaccagatttccagaaggaactgacatgatctgacttaaaaaggccacctacatttacatgaaggccgcctacctcagcatgtttgggaaggaggaccacaagccgttcggggacgacgaagtggaattatttcgagctgtgccaggcctgaagctcaagattgctgggaaatctctacccacagagaagtttgccatccggaagtcccggcgctacttctcctccaaccctatctcgctgccagtgcctgctctggaaatgatgtacatctggaacggctacgccgtgattgggaagcagccgaaactcacggatgggatacttgagattatcactaaggctgaagagatgctggagaaaggcccagagaacgagtactcagtggatgacgagtgcttggtgaaattgttgaaaggcctgtgtctgaaatacctgggccgtgtccaggaggccgaggagaattttaggagcatctctgccaatgaaaagaagattaaatatgaccactacttgatcccaaacgccctgctggagctggccctgctgcttatggagcaagacagaaacgaagaggccatcaaacttttggaatctgccaagcaaaactacaagaattactccatggagtcaaggacacactttcgaatccaggcagccacactccaagccaagtcttccctagagaacagcagcagatccatggtctcatcagtgtccttgtagctttgtgcagcagttccgggctggaagacagagacagctggacagagctcctgaaaacatttcaaaataccccctccccctgccctgccctgcctttggggtccaccggcactccagttggatggcacaacatagtgtatccgtgcagaagccgagctggcattttcaccagtgtagccaagggcctttgccaagggcagagcaggtggagccctctgcctgccctatcacacatacgggtacttgcttttcactgtgatgtttaagagaatgtatgaacagtttacattttccttagaaatacattgatgggatcacagttggctttaaaaaccaacaacaatcaaccacctgtaagtctttgtcttcacctattatcatctggaggtaaatctctttatatgatgatgccaaagggcaaattgcttttcaaattcagcaagttctcagcttgtgtgacggaaggtccttcagaggacctgaggaatgcctgggagaggctaagcctcaggcttcaatgcttctggggttgggcatgaggatgtacacagacacccactaccttactactcacacttcatttcactccttttgtaaatttccaatttaaaaatcaagcacgtctttttagtgagataaaatctgagctcttctgtagaaaaatcaatctctaccagtagaaaatgccagggcttgatggaagagctgtgtagccctttctatgccaaagccaggaaatttggggggcaggaggaggttctcagaatccagtctgtatctttgctgtatgccaaactgaaaccactgggaataatttatgaaacataaaaatcttctgtacttcactccaaggtacatttgcttactgacagcatttttgttaaaactgttattcttgaaaattgtgta

SEQ ID NO: 371988 - DNA, 2124 bp, Homo sapiens
gacttagaggggacagagaactaagtcttgttcctgcatggagtgggggaaggtttcctacgggaggggacactgtccatgcttcctactaggatcctgaggctgttggagtttgtggggttttcaggaaacaaggactatgggctgctgcagctggaggagggagcgtcagggcacagcttccgctctgtgctctgtgtcatgctcctgctgtgctaccacaccttcctcaccttcgtgctcggtactgggaacgtcaacatcgaggaggccgagaagctcttgaagccctacctgaaccggtaccctaagggtgccatcttcctgttctttgcagggaggattgaagtcattaaaggcaacattgatgcagccatccggcgtttcgaggagtgctgtgaggcccagcagcactggaagcagttccaccacatgtgctactgggagctgatgtggtgcttcacctacaagggccagtggaagatgtcctacttctacgccgacctgctcagcaaggagaactgctggtccaaggccacctacatttacatgaaggccgcctacctcagcatgtttgggaaggaggaccacaagccgttcggggacgacgaagtggaattatttcgagctgtgccaggcctgaagctcaagattgctgggaaatctctacccacagagaagtttgccatccggaagtcccggcgctacttctcctccaaccctatctcgctgccagtgcctgctctggaaatgatgtacatctggaacggctacgccgtgattgggaagcagccgaaactcacggatgggatacttgagattatcactaaggctgaagagatgctggagaaaggcccagagaacgagtactcagtggatgacgagtgcttggtgaaattgttgaaaggcctgtgtctgaaatacctgggccgtgtccaggaggccgaggagaattttaggagcatctctgccaatgaaaagaagattaaatatgaccactacttgatcccaaacgccctgctggagctggccctgctgcttatggagcaagacagaaacgaagaggccatcaaacttttggaatctgccaagcaaaactacaagaattactccatggagtcaaggacacactttcgaatccaggcagccacactccaagccaagtcttccctagagaacagcagcagatccatggtctcatcagtgtccttgtagctttgtgcagcagttccgggctggaagacagagacagctggacagagctcctgaaaacatttcaaaataccccctccccctgccctgccctgcctttggggtccaccggcactccagttggatggcacaacatagtgtatccgtgcagaagccgagctggcattttcaccagtgtagccaagggcctttgccaagggcagagcaggtggagccctctgcctgccctatcacacatacgggtacttgcttttcactgtgatgtttaagagaatgtatgaacagtttacattttccttagaaatacattgatgggatcacagttggctttaaaaaccaacaacaatcaaccacctgtaagtctttgtcttcacctattatcatctggaggtaaatctctttatatgatgatgccaaagggcaaattgcttttcaaattcagcaagttctcagcttgtgtgacggaaggtccttcagaggacctgaggaatgcctgggagaggctaagcctcaggcttcaatgcttctggggttgggcatgaggatgtacacagacacccactaccttactactcacacttcatttcactccttttgtaaatttccaatttaaaaatcaagcacgtctttttagtgagataaaatctgagctcttctgtagaaaaatcaatctctaccagtagaaaatgccagggcttgatggaagagctgtgtagccctttctatgccaaagccaggaaatttggggggcaggaggaggttctcagaatccagtctgtatctttgctgtatgccaaactgaaaccactgggaataatttatgaaacataaaaatcttctgtacttcactccaaggtacatttgcttactgacagcatttttgttaaaactgttattcttgaaaattgtgta

SEQ ID NO: 371989 - DNA, 2560 bp, Homo sapiens
  misc_feature (2095)..(2095): n is a, c, g, or t
aggcctgggggagggaggaggccttggagaaggaggagggaaaaaggggctgtgggatttagtggctgggctgcaccccctgggggggcagcagagcccaatgggccagaagggccacaaagactccctttacccttgtggagggactcctgagagcagcctccatgaggccctggaccagtgcatgaccgccctggacctcttcctcaccaaccagttctcagaagcactcagctacctcaagcccagaaccaaggaaagcatgtaccactcactgacatatgccaccatcctggagatgcaggccatgatgacctttgaccctcaggacatcctgcttgccggcaacatgatgaaggaggcacagatgctgtgtcagaggcaccggaggaagtcttctgtaacagattccttcagcagcctggtgaaccgccccacgctgggccaattcactgaagaggaaatccacgctgaggtctgctatgcagagtgcctgctgcagcgagcagccctgaccttcctgcaggacgagaacatggtgagcttcatcaaaggcggcatcaaagttcgaaacagctaccagacctacaaggagctggacagccttgttcagtcctcacaatactgcaagggtgagaaccacccgcactttgaaggaggagtgaagcttggtgtaggggccttcaacctgacactgtccatgcttcctactaggatcctgaggctgttggagtttgtggggttttcaggaaacaaggactatgggctgctgcagctggaggagggagcgtcagggcacagcttccgctctgtgctctgtgtcatgctcctgctgtgctaccacaccttcctcaccttcgtgctcggtactgggaacgtcaacatcgaggaggccgagaagctcttgaagccctacctgaaccggtaccctaagggtgccatcttcctgttctttgcagggaggattgaagtcattaaaggcaacattgatgcagtgagtgatgggggtccgggccggggctggggatccctcggggtctcccagaccagcaggaagtcaggcacatgtgacatactcagggacaggatagactgggggcggggggggggccaagagagaaccaaccagagagcaggggcaggagaggcccttctggcagagcagcctgggaagacaagggaggaggaggcatttgtggtgcctgggattttgactgggagatataggactgcagcattgcagtggagggaggtggagggaggtgcttgagggaggcagaggttaggaaagcccatctgtttagggcatgacgattaggctggagtctggtacctcccctccattatagctctctcctgctctttcattttgttactaaaaaccagagtcctaggcgggggctgtatttgagcccaacgtcatgtaagacttaggaggtaaaaccaggactggaggccagatctcctggctcctggggccccacctgagcctagcacagggctggaccactatgccctggaggagtcccggtctgctgtggtgttgggaggttcggaggatgcagaggggttggggctgggtgggcacccgtcaggctgaccagaaggtgcctgcaggccatccggcgtttcgaggagtgctgtgaggcccagcagcactggaagcagttccaccacatgtgctactgggagctgatgtggtgcttcacctacaagggccagtggaagatgtcctacttctacgccgacctgctcagcaaggagaactgctggtccaaggtgggctgatgccacgtgttaggggcattgggtgaccagggctgactgtgtgcctccagaccacgggccaaatccctaactgaacacagatgtctcagctggaatctaaacataaccttaaattctaataggactcaggcttggaaggaactaaagaccacaagagaaacttctgaaccacaatgtgtcacaaagagatttctagtcacaaaggacagaaacatggctccctctgtccagtagaactgtttctgtggtagaaatgttctacttatgcactgcccaaatatggtagtcaccagccacatgtgcacantgagcacatgaaatgtgcctagtgcaactgggaaactgattgttttcagttttatttaattttaattaactaaatgttaaatttaaatagccatgtagggcttgtggccactatattggactatgcaggtccaaaacacaaaaggctcatataactgaacattcttggcacatccgacttcaggtagggctggatccaggaattcaaatgatgtcgtctggcttggtctttccatttgtggctgtgctctctcctatgacatctttgtttctgctgcatctttgcaggaaggttctctccatgtgacaggcaaggtggccacgggctgcttctactcatatcctccccttggtttcaaccagagtcccacagtttgagcctcactggtctgacttgtcacctggtctaaccccgaagtgcatcctcacgtgccggaactataattttaactacaaccatccacac

SEQ ID NO: 371990 - DNA, 4298 bp, Homo sapiens
gggccggctcgcgggcgctgccagtctcgggcggcggtgtccggcgcgcgggcggcctgctgggcgggctgaagggttagcggagcacgggcaaggcggagagtgacggagtcggcgagcccccgcggcgacaggttctctacttaaaagacaatgactactgatgaaggtgccaagaacaatgaagaaagccccacagccactgttgctgagcagggagaggatattacctccaaaaaagacaggggagtattaaagattgtcaaaagagtggggaatggtgaggaaacgccgatgattggagacaaagtttatgtccattacaaaggaaaattgtcaaatggaaagaagtttgattccagtcatgatagaaatgaaccatttgtctttagtcttggcaaaggccaagtcatcaaggcatgggacattggggtggctaccatgaagaaaggagagatatgccatttactgtgcaaaccagaatatgcatatggctcggctggcagtctccctaaaattccctcgaatgcaactctcttttttgagattgagctccttgatttcaaaggagaggatttatttgaagatggaggcattatccggagaaccaaacggaaaggagagggatattcaaatccaaacgaaggagcaacagtagaaatccacctggaaggccgctgtggtggaaggatgtttgactgcagagatgtggcattcactgtgggcgaaggagaagaccacgacattccaattggaattgacaaagctctggagaaaatgcagcgggaagaacaatgtattttatatcttggaccaagatatggttttggagaggcagggaagcctaaatttggcattgaacctaatgctgagcttatatatgaagttacacttaagagcttcgaaaaggccaaagaatcctgggagatggataccaaagaaaaattggagcaggctgccattgtcaaagagaagggaaccgtatacttcaagggaggcaaatacatgcaggcggtgattcagtatgggaagatagtgtcctggttagagatggaatatggtttatcagaaaaggaatcgaaagcttctgaatcatttctccttgctgcctttctgaacctggccatgtgctacctgaagcttagagaatacaccaaagctgttgaatgctgtgacaaggcccttggactggacagtgccaatgagaaaggcttgtataggaggggtgaagcccagctgctcatgaacgagtttgagtcagccaagggtgactttgagaaagtgctggaagtaaacccccagaataaggctgcaagactgcagatctccatgtgccagaaaaaggccaaggagcacaacgagcgggaccgcaggatatacgccaacatgttcaagaagtttgcagagcaggatgccaaggaagaggccaataaagcaatgggcaagaagacttcagaaggggtcactaatgaaaaaggaacagacagtcaagcaatggaagaagagaaacctgagggccacgtatgacgccacgccaaggagggaagagtcccagtgaactcggcccctcctcaatgggctttcccccaactcaggacagaacagtgtttaatgtaaagtttgttatagtctatgtgattctggaagcaaatggcaaaaccagtagcttcccaaaaacagcccccctgctgctgcccggagggttcactgaggggtggcacgggaccactccaggtggaacaaacagaaatgactgtggtgtggagggagtgagccagcagcttaagtccagctcatttcagtttctatcaaccttcaagtatccaattcagggtccctggagatcatcctaacaatgtggggctgttaggttttacctttgaactttcatagcactgcagaaacctttaaaaaaaaaatgcttcatgaatttctcctttcctacagttgggtagggtaggggaaggaggataagcttttgttttttaaatgactgaagtgctataaatgtagtctgttgcatttttaaccaacagaacccacagtagaggggtctcatgtctccccagttccacagcagtgtcacagacgtgaaagccagaacctcagaggccacttgcttgctgacttagcctcctcccaaagtccccctcctcagccagcctccttgtgagagtggctttctaccacacacagcctgtccctgggggagtaattctgtcattcctaaaacacccttcagcaatgataatgagcagatgagagtttctggattagcttttcctattttcgatgaagttctgagatactgaaatgtgaaaagagcaatcagaattgtgctttttctcccctcctctattccttttagggaataatattcaatacacagtacttcctcccagcattgctactgctcagcttcttctttcattctaatccttgctattaagaatttaagacttgtgcttacaatatttttgacctggagtggatctatttacatagtcatttaggatccatgcagctttttttgtctttttaagattattggctcataagcatatgtatactggtttatggaactttatttacactcctctatcatgcaaaaaaattttgactttttagtactaagcttaatttttaaaaacaaaatctgtagtgttgacaaataaatagttgctcttctacactaggggtttcacctgcaggtttgacacgcagttgctcgcttttcctgccctgtcaagcttctctgttctggcgtgagttgtgaaagagttgaagacagcttcccatgccggtacacagccagtagcctaaatctccagtacttgagctgaccattgaactagggcaagtcttaaatgtgtacatgtagttgaatttcagtccttacgggtaaacagattgagcatggctctctattccctcagcctaagaaacactcatgggaatgcatttggcaacccaaggaaccatttgcttaaacctggaacatctcacctttttaaatcctaaaaaacactggcagttatattttaaattagtttttatttttatgatggttttatcaaaagacttttattattagattgggacccccttcaaacctaaaaatcaagttatttccttttataatacttttcttccccatggaacaaatgggatcaatttgtgagttttttcctttaatgataactaaaatccctctaatttctcatttatgcttttgtcttttttatgaaatatttcttttaaaagccccagtctcacctacgaaatatgaagagcaaaagctgattttgcttacttgctaaactgttgggaaagctctgtagagcatggttccagtgaggccaagattgaaatttgatactaaaaaggccacctagctttttgcagataacaaacaagaaagctattccaagactcagatgatgccagctgtctcccacgtgtgtattatggttcaccagggggaactggcaaaagtgtgtgtggggaggggaagggtgtgtgagtggttctgagcaaataactacagggtgcccattaccactcaagaagacacttcacgtattcttgtatcaaattcaataatcttaaacaatttgtgtagaagtccacagacatctttcaaccaccttttaggctgcatatggattgccaagtcagcatatgaggaattaaagacattgttttttaaaaaaaaaaatcatttagatgcacttttttgtgtgttctttaaataaatccaaaaaaaatgtgaaaaaaaaaaaaaaaaaaaaaaaaaaaaaacaaaaaaaagaacgaaaaaaaaaaaaaaaaaaaaagagagagggggcgagcagcgagatcaaaagaataatccggctaaaggggcggccacaacgaatcgcggccgacacacgagtactgatggagaagaggaggggtggcccataaagtaggcggctaaaattaatgacgtcaagacgacgcgggcccgctgatatattcacaaacctgcttgcgtaagcgaggagagaaaacaacactgtacgtcaatgatggggaaactacttcgggagaaagagcgcccaccatcatacggtgggggggggcaacaacagatagtcgggaacaccactccccccctgacagaaatagaatgctgacgccactcaaggggaataaaatgaaacccatgaccgaggtgtacaactgggggggtacaccacaccaacacgtactatctgctgcgcgacacaaaagatgtcaaccagagagtcattaggaccaaaacatttaagagg

SEQ ID NO: 371991 - DNA, 3772 bp, Homo sapiens
gggccggctcgcgggcgctgccagtctcgggcggcggtgtccggcgcgcgggcggcctgctgggcgggctgaagggttagcggagcacgggcaaggcggagagtgacggagtcggcgagcccccgcggcgacaggttctctacttaaaagacaatgactactgatgaaggtgccaagaacaatgaagaaagccccacagccactgttgctgagcagggagaggatattacctccaaaaaagacaggggagtattaaagattgtcaaaagagtggggaatggtgaggaaacgccgatgattggagacaaagtttatgtccattacaaaggaaaattgtcaaatggaaagaagtttgattccagtcatgatagaaatgaaccatttgtctttagtcttggcaaaggccaagtcatcaaggcatgggacattggggtggctaccatgaagaaaggagagatatgccatttactgtgcaaaccagaatatgcatatggctcggctggcagtctccctaaaattccctcgaatgcaactctcttttttgagattgagctccttgatttcaaaggagaggatttatttgaagatggaggcattatccggagaaccaaacggaaaggagagggatattcaaatccaaacgaaggagcaacagtagaaatccacctggaaggccgctgtggtggaaggatgtttgactgcagagatgtggcattcactgtgggcgaaggagaagaccacgacattccaattggaattgacaaagctctggagaaaatgcagcgggaagaacaatgtattttatatcttggaccaagatatggttttggagaggcagggaagcctaaatttggcattgaacctaatgctgagcttatatatgaagttacacttaagagcttcgaaaaggccaaagaatcctgggagatggataccaaagaaaaattggagcaggctgccattgtcaaagagaagggaaccgtatacttcaagggaggcaaatacatgcaggcggtgattcagtatgggaagatagtgtcctggttagagatggaatatggtttatcagaaaaggaatcgaaagcttctgaatcatttctccttgctgcctttctgaacctggccatgtgctacctgaagcttagagaatacaccaaagctgttgaatgctgtgacaaggcccttggactggacagtgccaatgagaaaggcttgtataggaggggtgaagcccagctgctcatgaacgagtttgagtcagccaagggtgactttgagaaagtgctggaagtaaacccccagaataaggctgcaagactgcagatctccatgtgccagaaaaaggccaaggagcacaacgagcgggaccgcaggatatacgccaacatgttcaagaagtttgcagagcaggatgccaaggaagaggccaataaagcaatgggcaagaagacttcagaaggggtcactaatgaaaaaggaacagacagtcaagcaatggaagaagagaaacctgagggccacgtatgacgccacgccaaggagggaagagtcccagtgaactcggcccctcctcaatgggctttcccccaactcaggacagaacagtgtttaatgtaaagtttgttatagtctatgtgattctggaagcaaatggcaaaaccagtagcttcccaaaaacagcccccctgctgctgcccggagggttcactgaggggtggcacgggaccactccaggtggaacaaacagaaatgactgtggtgtggagggagtgagccagcagcttaagtccagctcatttcagtttctatcaaccttcaagtatccaattcagggtccctggagatcatcctaacaatgtggggctgttaggttttacctttgaactttcatagcactgcagaaacctttaaaaaaaaaatgcttcatgaatttctcctttcctacagttgggtagggtaggggaaggaggataagcttttgttttttaaatgactgaagtgctataaatgtagtctgttgcatttttaaccaacagaacccacagtagaggggtctcatgtctccccagttccacagcagtgtcacagacgtgaaagccagaacctcagaggccacttgcttgctgacttagcctcctcccaaagtccccctcctcagccagcctccttgtgagagtggctttctaccacacacagcctgtccctgggggagtaattctgtcattcctaaaacacccttcagcaatgataatgagcagatgagagtttctggattagcttttcctattttcgatgaagttctgagatactgaaatgtgaaaagagcaatcagaattgtgctttttctcccctcctctattccttttagggaataatattcaatacacagtacttcctcccagcattgctactgctcagcttcttctttcattctaatccttgctattaagaatttaagacttgtgcttacaatatttttgacctggagtggatctatttacatagtcatttaggatccatgcagctttttttgtctttttaagattattggctcataagcatatgtatactggtttatggaactttatttacactcctctatcatgcaaaaaaattttgactttttagtactaagcttaatttttaaaaacaaaatctgtagtgttgacaaataaatagttgctcttctacactaggggtttcacctgcaggtttgacacgcagttgctcgcttttcctgccctgtcaagcttctctgttctggcgtgagttgtgaaagagttgaagacagcttcccatgccggtacacagccagtagcctaaatctccagtacttgagctgaccattgaactagggcaagtcttaaatgtgtacatgtagttgaatttcagtccttacgggtaaacagattgagcatggctctctattccctcagcctaagaaacactcatgggaatgcatttggcaacccaaggaaccatttgcttaaacctggaacatctcacctttttaaatcctaaaaaacactggcagttatattttaaattagtttttatttttatgatggttttatcaaaagacttttattattagattgggacccccttcaaacctaaaaatcaagttatttccttttataatacttttcttccccatggaacaaatgggatcaatttgtgagttttttcctttaatgataactaaaatccctctaatttctcatttatgcttttgtcttttttatgaaatatttcttttaaaagccccagtctcacctacgaaatatgaagagcaaaagctgattttgcttacttgctaaactgttgggaaagctctgtagagcatggttccagtgaggccaagattgaaatttgatactaaaaaggccacctagctttttgcagataacaaacaagaaagctattccaagactcagatgatgccagctgtctcccacgtgtgtattatggttcaccagggggaactggcaaaagtgtgtgtggggaggggaagggtgtgtgagtggttctgagcaaataactacagggtgcccattaccactcaagaagacacttcacgtattcttgtatcaaattcaataatcttaaacaatttgtgtagaagtccacagacatctttcaaccaccttttaggctgcatatggattgccaagtcagcatatgaggaattaaagacattgttttttaaaaaaaaaaatcatttagatgcacttttttgtgtgttctttaaataaatccaaaaaaaatgtga

SEQ ID NO: 371992 - DNA, 3841 bp, Homo sapiens
gggccggctcgcgggcgctgccagtctcgggcggcggtgtccggcgcgcgggcggcctgctgggcgggctgaagggttagcggagcacgggcaaggcggagagtgacggagtcggcgagcccccgcggcgacaggttctctacttaaaagacaatgactactgatgaaggtgccaagaacaatgaagaaagccccacagccactgttgctgagcagggagaggatattacctccaaaaaagacaggggagtattaaagattgtcaaaagagtggggaatggtgaggaaacgccgatgattggagacaaagtttatgtccattacaaaggaaaattgtcaaatggaaagaagtttgattccagtcatgatagaaatgaaccatttgtctttagtcttggcaaaggccaagtcatcaaggcatgggacattggggtggctaccatgaagaaaggagagatatgccatttactgtgcaaaccagaatatgcatatggctcggctggcagtctccctaaaattccctcgaatgcaactctcttttttgagattgagctccttgatttcaaaggagaggatttatttgaagatggaggcattatccggagaaccaaacggaaaggagagggatattcaaatccaaacgaaggagcaacagtagaaatccacctggaaggccgctgtggtggaaggatgtttgactgcagagatgtggcattcactgtgggcgaaggagaagaccacgacattccaattggaattgacaaagctctggagaaaatgcagcgggaagaacaatgtattttatatcttggaccaagatatggttttggagaggcagggaagcctaaatttggcattgaacctaatgctgagcttatatatgaagttacacttaagagcttcgaaaaggccaaagaatcctgggagatggataccaaagaaaaattggagcaggctgccattgtcaaagagaagggaaccgtatacttcaagggaggcaaatacatgcaggcggtgattcagtatgggaagatagtgtcctggttagagatggaatatggtttatcagaaaaggaatcgaaagcttctgaatcatttctccttgctgcctttctgaacctggccatgtgctacctgaagcttagagaatacaccaaagctgttgaatgctgtgacaaggcccttggactggacagtgccaatgagaaaggcttgtataggaggggtgaagcccagctgctcatgaacgagtttgagtcagccaagggtgactttgagaaagtgctggaagtaaacccccagaataaggctgcaagactgcagatctccatgtgccagaaaaaggccaaggagcacaacgagcgggaccgcaggatatacgccaacatgttcaagaagtttgcagagcaggatgccaaggaagaggccaataaagcaatgggcaagaagacttcagaaggggtcactaatgaaaaaggaacagacagtcaagcaatggaagaagagaaacctgagggccacgtatgacgccacgccaaggagggaagagtcccagtgaactcggcccctcctcaatgggctttcccccaactcaggacagaacagtgtttaatgtaaagtttgttatagtctatgtgattctggaagcaaatggcaaaaccagtagcttcccaaaaacagcccccctgctgctgcccggagggttcactgaggggtggcacgggaccactccaggtggaacaaacagaaatgactgtggtgtggagggagtgagccagcagcttaagtccagctcatttcagtttctatcaaccttcaagtatccaattcagggtccctggagatcatcctaacaatgtggggctgttaggttttacctttgaactttcatagcactgcagaaacctttaaaaaaaaaatgcttcatgaatttctcctttcctacagttgggtagggtaggggaaggaggataagcttttgttttttaaatgactgaagtgctataaatgtagtctgttgcatttttaaccaacagaacccacagtagaggggtctcatgtctccccagttccacagcagtgtcacagacgtgaaagccagaacctcagaggccacttgcttgctgacttagcctcctcccaaagtccccctcctcagccagcctccttgtgagagtggctttctaccacacacagcctgtccctgggggagtaattctgtcattcctaaaacacccttcagcaatgataatgagcagatgagagtttctggattagcttttcctattttcgatgaagttctgagatactgaaatgtgaaaagagcaatcagaattgtgctttttctcccctcctctattccttttagggaataatattcaatacacagtacttcctcccagcattgctactgctcagcttcttctttcattctaatccttgctattaagaatttaagacttgtgcttacaatatttttgacctggagtggatctatttacatagtcatttaggatccatgcagctttttttgtctttttaagattattggctcataagcatatgtatactggtttatggaactttatttacactcctctatcatgcaaaaaaattttgactttttagtactaagcttaatttttaaaaacaaaatctgtagtgttgacaaataaatagttgctcttctacactaggggtttcacctgcaggtttgacacgcagttgctcgcttttcctgccctgtcaagcttctctgttctggcgtgagttgtgaaagagttgaagacagcttcccatgccggtacacagccagtagcctaaatctccagtacttgagctgaccattgaactagggcaagtcttaaatgtgtacatgtagttgaatttcagtccttacgggtaaacagattgagcatggctctctattccctcagcctaagaaacactcatgggaatgcatttggcaacccaaggaaccatttgcttaaacctggaacatctcacctttttaaatcctaaaaaacactggcagttatattttaaattagtttttatttttatgatggttttatcaaaagacttttattattagattgggacccccttcaaacctaaaaatcaagttatttccttttataatacttttcttccccatggaacaaatgggatcaatttgtgagttttttcctttaatgataactaaaatccctctaatttctcatttatgcttttgtcttttttatgaaatatttcttttaaaagccccagtctcacctacgaaatatgaagagcaaaagctgattttgcttacttgctaaactgttgggaaagctctgtagagcatggttccagtgaggccaagattgaaatttgatactaaaaaggccacctagctttttgcagataacaaacaagaaagctattccaagactcagatgatgccagctgtctcccacgtgtgtattatggttcaccagggggaactggcaaaagtgtgtgtggggaggggaagggtgtgtgagtggttctgagcaaataactacagggtgcccattaccactcaagaagacacttcacgtattcttgtatcaaattcaataatcttaaacaatttgtgtagaagtccacagacatctttcaaccaccttttaggctgcatatggattgccaagtcagcatatgaggaattaaagacattgttttttaaaaaaaaaaatcatttagatgcacttttttgtgtgttctttaaataaatccaaaaaaaatgtgaaaaaaaaaaatcaaaaatatcatatattattataattttatataaaaaatatttaatataatagggaaa

SEQ ID NO: 371993 - DNA, 3706 bp, Homo sapiens
gggccggctcgcgggcgctgccagtctcgggcggcggtgtccggcgcgcgggcggcctgctgggcgggctgaagggttagcggagcacgggcaaggcggagagtgacggagtcggcgagcccccgcggcgacaggttctctacttaaaagacaatgactactgatgaaggtgccaagaacaatgaagaaagccccacagccactgttgctgagcagggagaggatattacctccaaaaaagacaggggagtattaaagattgtcaaaagagtggggaatggtgaggaaacgccgatgattggagacaaagtttatgtccattacaaaggaaaattgtcaaatggaaagaagtttgattccagtcatgatagaaatgaaccatttgtctttagtcttggcaaaggccaagtcatcaaggcatgggacattggggtggctaccatgaagaaaggagagatatgccatttactgtgcaaaccagaatatgcatatggctcggctggcagtctccctaaaattccctcgaatgcaactctcttttttgagattgagctccttgatttcaaaggagaggatttatttgaagatggaggcattatccggagaaccaaacggaaaggagagggatattcaaatccaaacgaaggagcaacagtagaaatccacctggaaggccgctgtggtggaaggatgtttgactgcagagatgtggcattcactgtgggcgaaggagaagaccacgacattccaattggaattgacaaagctctggagaaaatgcagcgggaagaacaatgtattttatatcttggaccaagatatggttttggagaggcagggaagcctaaatttggcattgaacctaatgctgagcttatatatgaagttacacttaagagcttcgaaaaggccaaagaatcctgggagatggataccaaagaaaaattggagcaggctgccattgtcaaagagaagggaaccgtatacttcaagggaggcaaatacatgcaggcggtgattcagtatgggaagatagtgtcctggttagagatggaatatggtttatcagaaaaggaatcgaaagcttctgaatcatttctccttgctgcctttctgaacctggccatgtgctacctgaagcttagagaatacaccaaagctgttgaatgctgtgacaaggcccttggactggacagtgccaatgagaaaggcttgtataggaggggtgaagcccagctgctcatgaacgagtttgagtcagccaagggtgactttgagaaagtgctggaagtaaacccccagaataaggctgcaagactgcagatctccatgtgccagaaaaaggccaaggagcacaacgagcgggaccgcaggatatacgccaacatgttcaagaagtttgcagagcaggatgccaaggaagaggccaataaagcaatgggcaagaagacttcagaaggggtcactaatgaaaaaggaacagacagtcaagcaatggaagaagagaaacctgagggccacgtatgacgccacgccaaggagggaagagtcccagtgaactcggcccctcctcaatgggctttcccccaactcaggacagaacagtgtttaatgtaaagtttgttatagtctatgtgattctggaagcaaatggcaaaaccagtagcttcccaaaaacagcccccctgctgctgcccggagggttcactgaggggtggcacgggaccactccaggtggaacaaacagaaatgactgtggtgtggagggagtgagccagcagcttaagtccagctcatttcagtttctatcaaccttcaagtatccaattcagggtccctggagatcatcctaacaatgtggggctgttaggttttacctttgaactttcatagcactgcagaaacctttaaaaaaaaaatgcttcatgaatttctcctttcctacagttgggtagggtaggggaaggaggataagcttttgttttttaaatgactgaagtgctataaatgtagtctgttgcatttttaaccaacagaacccacagtagaggggtctcatgtctccccagttccacagcagtgtcacagacgtgaaagccagaacctcagaggccacttgcttgctgacttagcctcctcccaaagtccccctcctcagccagcctccttgtgagagtggctttctaccacacacagcctgtccctgggggagtaattctgtcattcctaaaacacccttcagcaatgataatgagcagatgagagtttctggattagcttttcctattttcgatgaagttctgagatactgaaatgtgaaaagagcaatcagaattgtgctttttctcccctcctctattccttttagggaataatattcaatacacagtacttcctcccagcattgctactgctcagcttcttctttcattctaatccttgctattaagaatttaagacttgtgcttacaatatttttgacctggagtggatctatttacatagtcatttaggatccatgcagctttttttgtctttttaagattattggctcataagcatatgtatactggtttatggaactttatttacactcctctatcatgcaaaaaaattttgactttttagtactaagcttaatttttaaaaacaaaatctgtagtgttgacaaataaatagttgctcttctacactaggggtttcacctgcaggtttgacacgcagttgctcgcttttcctgccctgtcaagcttctctgttctggcgtgagttgtgaaagagttgaagacagcttcccatgccggtacacagccagtagcctaaatctccagtacttgagctgaccattgaactagggcaagtcttaaatgtgtacatgtagttgaatttcagtccttacgggtaaacagattgagcatggctctctattccctcagcctaagaaacactcatgggaatgcatttggcaacccaaggaaccatttgcttaaacctggaacatctcacctttttaaatcctaaaaaacactggcagttatattttaaattagtttttatttttatgatggttttatcaaaagacttttattattagattgggacccccttcaaacctaaaaatcaagttatttccttttataatacttttcttccccatggaacaaatgggatcaatttgtgagttttttcctttaatgataactaaaatccctctaatttctcatttatgcttttgtcttttttatgaaatatttcttttaaaagccccagtctcacctacgaaatatgaagagcaaaagctgattttgcttacttgctaaactgttgggaaagctctgtagagcatggttccagtgaggccaagattgaaatttgatactaaaaaggccacctagctttttgcagataacaaacaagaaagctattccaagactcagatgatgccagctgtctcccacgtgtgtattatggttcaccagggggaactggcaaaagtgtgtgtggggaggggaagggtgtgtgagtggttctgagcaaataactacagggtgcccattaccactcaagaagacacttcacgtattcttgtatcaaattcaataatcttaaacaatttgtgtagaagtccacagacatctttcaaccaccttttaggctgcatatggattgccaagtcagcatatgaggaattaaagacattgttttt

SEQ ID NO: 371994 - DNA, 3366 bp, Homo sapiens
ttgcttttcttttgtaccccctcaagagctgagtacaagtaatgacgcttttttatcctagggaggcaaatacatgcaggcggtgattcagtatgggaagatagtgtcctggttagagatggaatatggtttatcagaaaaggaatcgaaagcttctgaatcatttctccttgctgcctttctgaacctggccatgtgctacctgaagcttagagaatacaccaaagctgttgaatgctgtgacaaggcccttggactggacagtgccaatgagaaaggcttgtataggaggggtgaagcccagctgctcatgaacgagtttgagtcagccaagggtgactttgagaaagtgctggaagtaaacccccagaataaggctgcaagactgcagatctccatgtgccagaaaaaggccaaggagcacaacgagcgggaccgcaggatatacgccaacatgttcaagaagtttgcagagcaggatgccaaggaagaggccaataaagcaatgggcaagaagacttcagaaggggtcactaatgaaaaaggaacagacagtcaagcaatggaagaagagaaacctgagggccacgtatgacgccacgccaaggagggaagagtcccagtgaactcggcccctcctcaatgggctttcccccaactcaggacagaacagtgtttaatgtaaagtttgttatagtctatgtgattctggaagcaaatggcaaaaccagtagcttcccaaaaacagcccccctgctgctgcccggagggttcactgaggggtggcacgggaccactccaggtggaacaaacagaaatgactgtggtgtggagggagtgagccagcagcttaagtccagctcatttcagtttctatcaaccttcaagtatccaattcagggtccctggagatcatcctaacaatgtggggctgttaggttttacctttgaactttcatagcactgcagaaacctttaaaaaaaaaatgcttcatgaatttctcctttcctacagttgggtagggtaggggaaggaggataagcttttgttttttaaatgactgaagtgctataaatgtagtctgttgcatttttaaccaacagaacccacagtagaggggtctcatgtctccccagttccacagcagtgtcacagacgtgaaagccagaacctcagaggccacttgcttgctgacttagcctcctcccaaagtccccctcctcagccagcctccttgtgagagtggctttctaccacacacagcctgtccctgggggagtaattctgtcattcctaaaacacccttcagcaatgataatgagcagatgagagtttctggattagcttttcctattttcgatgaagttctgagatactgaaatgtgaaaagagcaatcagaattgtgctttttctcccctcctctattccttttagggaataatattcaatacacagtacttcctcccagcattgctactgctcagcttcttctttcattctaatccttgctattaagaatttaagacttgtgcttacaatatttttgacctggagtggatctatttacatagtcatttaggatccatgcagctttttttgtctttttaagattattggctcataagcatatgtatactggtttatggaactttatttacactcctctatcatgcaaaaaaattttgactttttagtactaagcttaatttttaaaaacaaaatctgtagtgttgacaaataaatagttgctcttctacactaggggtttcacctgcaggtttgacacgcagttgctcgcttttcctgccctgtcaagcttctctgttctggcgtgagttgtgaaagagttgaagacagcttcccatgccggtacacagccagtagcctaaatctccagtacttgagctgaccattgaactagggcaagtcttaaatgtgtacatgtagttgaatttcagtccttacgggtaaacagattgagcatggctctctattccctcagcctaagaaacactcatgggaatgcatttggcaacccaaggaaccatttgcttaaacctggaacatctcacctttttaaatcctaaaaaacactggcagttatattttaaattagtttttatttttatgatggttttatcaaaagacttttattattagattgggacccccttcaaacctaaaaatcaagttatttccttttataatacttttcttccccatggaacaaatgggatcaatttgtgagttttttcctttaatgataactaaaatccctctaatttctcatttatgcttttgtcttttttatgaaatatttcttttaaaagccccagtctcacctacgaaatatgaagagcaaaagctgattttgcttacttgctaaactgttgggaaagctctgtagagcatggttccagtgaggccaagattgaaatttgatactaaaaaggccacctagctttttgcagataacaaacaagaaagctattccaagactcagatgatgccagctgtctcccacgtgtgtattatggttcaccagggggaactggcaaaagtgtgtgtggggaggggaagggtgtgtgagtggttctgagcaaataactacagggtgcccattaccactcaagaagacacttcacgtattcttgtatcaaattcaataatcttaaacaatttgtgtagaagtccacagacatctttcaaccaccttttaggctgcatatggattgccaagtcagcatatgaggaattaaagacattgttttttaaaaaaaaaaatcatttagatgcacttttttgtgtgttctttaaataaatccaaaaaaaatgtgaaaaaaaaaaaaaaaaaaaaaaaaaaaaaacaaaaaaaagaacgaaaaaaaaaaaaaaaaaaaaagagagagggggcgagcagcgagatcaaaagaataatccggctaaaggggcggccacaacgaatcgcggccgacacacgagtactgatggagaagaggaggggtggcccataaagtaggcggctaaaattaatgacgtcaagacgacgcgggcccgctgatatattcacaaacctgcttgcgtaagcgaggagagaaaacaacactgtacgtcaatgatggggaaactacttcgggagaaagagcgcccaccatcatacggtgggggggggcaacaacagatagtcgggaacaccactccccccctgacagaaatagaatgctgacgccactcaaggggaataaaatgaaacccatgaccgaggtgtacaactgggggggtacaccacaccaacacgtactatctgctgcgcgacacaaaagatgtcaaccagagagtcattaggaccaaaacatttaagagg

SEQ ID NO: 371995 - DNA, 3572 bp, Homo sapiens
gtagggtctggagcaggtataaggatctgggtctgttcatgtctgagaaggcaggatctggcccattaggattatgaggatctgggtctgtcagtagctgaagaggtagtatctgagcatgggtataaggatctggatctgtcaatatctgaggaagtaggatctggccctggtatgaggatctgagtctgtcaatgtcttaggaggtaggctctggtacaggtgagaggctctgggtctgtccatgtctgaggaggtaggatctggcatagatacaaggatctaggtttttcaatgtatgggaagatagtgtcctggttagagatggaatatggtttatcagaaaaggaatcgaaagcttctgaatcatttctccttgctgcctttctgaacctggccatgtgctacctgaagcttagagaatacaccaaagctgttgaatgctgtgacaaggcccttggactggacagtgccaatgagaaaggcttgtataggaggggtgaagcccagctgctcatgaacgagtttgagtcagccaagggtgactttgagaaagtgctggaagtaaacccccagaataaggctgcaagactgcagatctccatgtgccagaaaaaggccaaggagcacaacgagcgggaccgcaggatatacgccaacatgttcaagaagtttgcagagcaggatgccaaggaagaggccaataaagcaatgggcaagaagacttcagaaggggtcactaatgaaaaaggaacagacagtcaagcaatggaagaagagaaacctgagggccacgtatgacgccacgccaaggagggaagagtcccagtgaactcggcccctcctcaatgggctttcccccaactcaggacagaacagtgtttaatgtaaagtttgttatagtctatgtgattctggaagcaaatggcaaaaccagtagcttcccaaaaacagcccccctgctgctgcccggagggttcactgaggggtggcacgggaccactccaggtggaacaaacagaaatgactgtggtgtggagggagtgagccagcagcttaagtccagctcatttcagtttctatcaaccttcaagtatccaattcagggtccctggagatcatcctaacaatgtggggctgttaggttttacctttgaactttcatagcactgcagaaacctttaaaaaaaaaatgcttcatgaatttctcctttcctacagttgggtagggtaggggaaggaggataagcttttgttttttaaatgactgaagtgctataaatgtagtctgttgcatttttaaccaacagaacccacagtagaggggtctcatgtctccccagttccacagcagtgtcacagacgtgaaagccagaacctcagaggccacttgcttgctgacttagcctcctcccaaagtccccctcctcagccagcctccttgtgagagtggctttctaccacacacagcctgtccctgggggagtaattctgtcattcctaaaacacccttcagcaatgataatgagcagatgagagtttctggattagcttttcctattttcgatgaagttctgagatactgaaatgtgaaaagagcaatcagaattgtgctttttctcccctcctctattccttttagggaataatattcaatacacagtacttcctcccagcattgctactgctcagcttcttctttcattctaatccttgctattaagaatttaagacttgtgcttacaatatttttgacctggagtggatctatttacatagtcatttaggatccatgcagctttttttgtctttttaagattattggctcataagcatatgtatactggtttatggaactttatttacactcctctatcatgcaaaaaaattttgactttttagtactaagcttaatttttaaaaacaaaatctgtagtgttgacaaataaatagttgctcttctacactaggggtttcacctgcaggtttgacacgcagttgctcgcttttcctgccctgtcaagcttctctgttctggcgtgagttgtgaaagagttgaagacagcttcccatgccggtacacagccagtagcctaaatctccagtacttgagctgaccattgaactagggcaagtcttaaatgtgtacatgtagttgaatttcagtccttacgggtaaacagattgagcatggctctctattccctcagcctaagaaacactcatgggaatgcatttggcaacccaaggaaccatttgcttaaacctggaacatctcacctttttaaatcctaaaaaacactggcagttatattttaaattagtttttatttttatgatggttttatcaaaagacttttattattagattgggacccccttcaaacctaaaaatcaagttatttccttttataatacttttcttccccatggaacaaatgggatcaatttgtgagttttttcctttaatgataactaaaatccctctaatttctcatttatgcttttgtcttttttatgaaatatttcttttaaaagccccagtctcacctacgaaatatgaagagcaaaagctgattttgcttacttgctaaactgttgggaaagctctgtagagcatggttccagtgaggccaagattgaaatttgatactaaaaaggccacctagctttttgcagataacaaacaagaaagctattccaagactcagatgatgccagctgtctcccacgtgtgtattatggttcaccagggggaactggcaaaagtgtgtgtggggaggggaagggtgtgtgagtggttctgagcaaataactacagggtgcccattaccactcaagaagacacttcacgtattcttgtatcaaattcaataatcttaaacaatttgtgtagaagtccacagacatctttcaaccaccttttaggctgcatatggattgccaagtcagcatatgaggaattaaagacattgttttttaaaaaaaaaaatcatttagatgcacttttttgtgtgttctttaaataaatccaaaaaaaatgtgaaaaaaaaaaaaaaaaaaaaaaaaaaaaaacaaaaaaaagaacgaaaaaaaaaaaaaaaaaaaaagagagagggggcgagcagcgagatcaaaagaataatccggctaaaggggcggccacaacgaatcgcggccgacacacgagtactgatggagaagaggaggggtggcccataaagtaggcggctaaaattaatgacgtcaagacgacgcgggcccgctgatatattcacaaacctgcttgcgtaagcgaggagagaaaacaacactgtacgtcaatgatggggaaactacttcgggagaaagagcgcccaccatcatacggtgggggggggcaacaacagatagtcgggaacaccactccccccctgacagaaatagaatgctgacgccactcaaggggaataaaatgaaacccatgaccgaggtgtacaactgggggggtacaccacaccaacacgtactatctgctgcgcgacacaaaagatgtcaaccagagagtcattaggaccaaaacatttaagagg

SEQ ID NO: 371996 - DNA, 3718 bp, Homo sapiens
gggccggctcgcgggcgctgccagtctcgggcggcggtgtccggcgcgcgggcggcctgctgggcgggctgaagggttagcggagcacgggcaaggcggagagtgacggagtcggcgagcccccgcggcgacaggttctctacttaaaagacaatgactactgatgaaggtgccaagaacaatgaagaaagccccacagccactgttgctgagcagggagaggatattacctccaaaaaagacaggggagtattaaagattgtcaaaagagtggggaatggtgaggaaacgccgatgattggagacaaagtttatgtccattacaaaggaaaattgtcaaatggaaagaagtttgattccagtcatgatagaaatgaaccatttgtctttagtcttggcaaaggccaagtcatcaaggcatgggacattggggtggctaccatgaagaaaggagagatatgccatttactgtgcaaaccagaatatgcatatggctcggctggcagtctccctaaaattccctcgaatgcaactctcttttttgagattgagctccttgatttcaaaggagaggatttatttgaagatggaggcattatccggagaaccaaacggaaaggagagggatattcaaatccaaacgaaggagcaacagtagaaatccacctggaaggccgctgtggtggaaggatgtttgactgcagagatgtggcattcactgtgggcgaaggagaagaccacgacattccaattggaattgacaaagctctggagaaaatgcagcgggaagaacaatgtattttatatcttggaccaagatatggttttggagaggcagggaagcctaaatttggcattgaacctaatgctgagcttatatatgaagttacacttaagagcttcgaaaaggccaaagaatcctgggagatggataccaaagaaaaattggagcaggctgccattgtcaaagagaagggaaccgtatacttcaagggaggcaaatacatgcaggcggtgattcagtatgggaagatagtgtcctggttagagatggaatatggtttatcagaaaaggaatcgaaagcttctgaatcatttctccttgctgcctttctgaacctggccatgtgctacctgaagcttagagaatacaccaaagctgttgaatgctgtgacaaggcccttggactggacagtgccaatgagaaaggcttgtataggaggggtgaagcccagctgctcatgaacgagtttgagtcagccaagggtgactttgagaaagtgctggaagtaaacccccagaataaggctgcaagactgcagatctccatgtgccagaaaaaggccaaggagcacaacgagcgggaccgcaggatatacgccaacatgttcaagaagtttgcagagcaggatgccaaggaagaggccaataaagcaatgggcaagaagacttcagaaggggtcactaatgaaaaaggaacagacagtcaagcaatggaagaagagaaacctgagggccacgtatgacgccacgccaaggagggaagagtcccagtgaactcggcccctcctcaatgggctttcccccaactcaggacagaacagtgtttaatgtaaagtttgttatagtctatgtgattctggaagcaaatggcaaaaccagtagcttcccaaaaacagcccccctgctgctgcccggagggttcactgaggggtggcacgggaccactccaggtggaacaaacagaaatgactgtggtgtggagggagtgagccagcagcttaagtccagctcatttcagtttctatcaaccttcaagtatccaattcagggtccctggagatcatcctaacaatgtggggctgttaggttttacctttgaactttcatagcactgcagaaacctttaaaaaaaaaatgcttcatgaatttctcctttcctacagttgggtagggtaggggaaggaggataagcttttgttttttaaatgactgaagtgctataaatgtagtctgttgcatttttaaccaacagaacccacagtagaggggtctcatgtctccccagttccacagcagtgtcacagacgtgaaagccagaacctcagaggccacttgcttgctgacttagcctcctcccaaagtccccctcctcagccagcctccttgtgagagtggctttctaccacacacagcctgtccctgggggagtaattctgtcattcctaaaacacccttcagcaatgataatgagcagatgagagtttctggattagcttttcctattttcgatgaagttctgagatactgaaatgtgaaaagagcaatcagaattgtgctttttctcccctcctctattccttttagggaataatattcaatacacagtacttcctcccagcattgctactgctcagcttcttctttcattctaatccttgctattaagaatttaagacttgtgcttacaatatttttgacctggagtggatctatttacatagtcatttaggatccatgcagctttttttgtctttttaagattattggctcataagcatatgtatactggtttatggaactttatttacactcctctatcatgcaaaaaaattttgactttttagtactaagcttaatttttaaaaacaaaatctgtagtgttgacaaataaatagttgctcttctacactaggggtttcacctgcaggtttgacacgcagttgctcgcttttcctgccctgtcaagcttctctgttctggcgtgagttgtgaaagagttgaagacagcttcccatgccggtacacagccagtagcctaaatctccagtacttgagctgaccattgaactagggcaagtcttaaatgtgtacatgtagttgaatttcagtccttacgggtaaacagattgagcatggctctctattccctcagcctaagaaacactcatgggaatgcatttggcaacccaaggaaccatttgcttaaacctggaacatctcacctttttaaatcctaaaaaacactggcagttatattttaaattagtttttatttttatgatggttttatcaaaagacttttattattagattgggacccccttcaaacctaaaaatcaagttatttccttttataatacttttcttccccatggaacaaatgggatcaatttgtgagttttttcctttaatgataactaaaatccctctaatttctcatttatgcttttgtcttttttatgaaatatttcttttaaaagccccagtctcacctacgaaatatgaagagcaaaagctgattttgcttacttgctaaactgttgggaaagctctgtagagcatggttccagtgaggccaagattgaaatttgatactaaaatgatgccagctgtctcccacgtgtgtattatggttcaccagggggaactggcaaaagtgtgtgtggggaggggaagggtgtgtgagtggttctgagcaaataactacagggtgcccattaccactcaagaagacacttcacgtattcttgtatcaaattcaataatcttaaacaatttgtgtagaagtccacagacatctttcaaccaccttttaggctgcatatggattgccaagtcagcatatgaggaattaaagacattgttttttaaaaaaaaaaatcatttagatgcacttttttgtgtgttctttaaataaatccaaaaaaaatgtga

SEQ ID NO: 371997 - DNA, 2402 bp, Homo sapiens
gggccggctcgcgggcgctgccagtctcgggcggcggtgtccggcgcgcgggcggcctgctgggcgggctgaagggttagcggagcacgggcaaggcggagagtgacggagtcggcgagcccccgcggcgacaggttctctacttaaaagacaatgactactgatgaaggtgccaagaacaatgaagaaagccccacagccactgttgctgagcagggagaggatattacctccaaaaaagacaggggagtattaaagattgtcaaaagagtggggaatggtgaggaaacgccgatgattggagacaaagtttatgtccattacaaaggaaaattgtcaaatggaaagaagtttgattccagtcatgatagaaatgaaccatttgtctttagtcttggcaaaggccaagtcatcaaggcatgggacattggggtggctaccatgaagaaaggagagatatgccatttactgtgcaaaccagaatatgcatatggctcggctggcagtctccctaaaattccctcgaatgcaactctcttttttgagattgagctccttgatttcaaaggagaggatttatttgaagatggaggcattatccggagaaccaaacggaaaggagagggatattcaaatccaaacgaaggagcaacagtagaaatccacctggaaggccgctgtggtggaaggatgtttgactgcagagatgtggcattcactgtgggcgaaggagaagaccacgacattccaattggaattgacaaagctctggagaaaatgcagcgggaagaacaatgtattttatatcttggaccaagatatggttttggagaggcagggaagcctaaatttggcattgaacctaatgctgagcttatatatgaagttacacttaagagcttcgaaaaggccaaagaatcctgggagatggataccaaagaaaaattggagcaggctgccattgtcaaagagaagggaaccgtatacttcaagggaggcaaatacatgcaggcggtgattcagtatgggaagatagtgtcctggttagagatggaatatggtttatcagaaaaggaatcgaaagcttctgaatcatttctccttgctgcctttctgaacctggccatgtgctacctgaagcttagagaatacaccaaagctgttgaatgctgtgacaaggcccttggactggacagtgccaatgagaaaggcttgtataggaggggtgaagcccagctgctcatgaacgagtttgagtcagccaagggtgactttgagaaagtgctggaagtaaacccccagaataaggctgcaagactgcagatctccatgtgccagaaaaaggccaaggagcacaacgagcgggaccgcaggatatacgccaacatgttcaagaagtttgcagagcaggatgccaaggaagaggccaataaagcaatgggcaagaagacttcagaaggggtcactaatgaaaaaggaacagacagtcaagcaatggaagaagagaaacctgagggccacgtatgacgccacgccaaggagggaagagtcccagtgaactcggcccctcctcaatgggctttcccccaactcaggacagaacagtgtttaatgtaaagtttgttatagtctatgtgattctggaagcaaatggcaaaaccagtagcttcccaaaaacagcccccctgctgctgcccggagggttcactgaggggtggcacgggaccactccaggtggaacaaacagaaatgactgtggtgtggagggagtgagccagcagcttaagtccagctcatttcagtttctatcaaccttcaagtatccaattcagggtccctggagatcatcctaacaatgtggggctgttaggttttacctttgaactttcatagcactgcagaaacctttaaaaaaaaaatgcttcatgaatttctcctttcctacagttgggtagggtaggggaaggaggataagcttttgttttttaaatgactgaagtgctataaatgtagtctgttgcatttttaaccaacagaacccacagtagaggggtctcatgtctccccagttccacagcagtgtcacagacgtgaaagccagaacctcagaggccacttgcttgctgacttagcctcctcccaaagtccccctcctcagccagcctccttgtgagagtggctttctaccacacacagcctgtccctgggggagtaattctgtcattcctaaaacacccttcagcaatgataatgagcagatgagagtttctggattagcttttcctattttcgatgaagttctgagatactgaaatgtgaaaagagcaatcagaattgtgctttttctcccctcctctattccttttagggaataatattcaatacacagtacttcctcccag

SEQ ID NO: 371998 - DNA, 1322 bp, Homo sapiens
actctacatcctcccacaatgatactagacagacacactggcacacctcgaaatttctgggttgtgcacagcccgagagggctcatttaagctgccatgtccactcctccaacaaatccaggcaccatctaaagggaacatgccaagtcacagtctcctttgtgaattccataatggcaagagagctctcattcagatttgcgttcctggcacccagagcacatttaataaaagttgattatacaaaaataatgacttggtcctgaactgcattctacaactgctccttgagttttgtcccatcctacaataaccatcacaagctctgctatttattctaccatttctgccctgggtctagccagtagcctaaatctccagtacttgagctgaccattgaactagggcaagtcttaaatgtgtacatgtagttgaatttcagtccttacgggtaaacagattgagcatggctctctattccctcagcctaagaaacactcatgggaatgcatttggcaacccaaggaaccatttgcttaaacctggaacatctcacctttttaaatcctaaaaaacactggcagttatattttaaattagtttttatttttatgatggttttatcaaaagacttttattattagattgggacccccttcaaacctaaaaatcaagttatttccttttataatacttttcttccccatggaacaaatgggatcaatttgtgagttttttcctttaatgataactaaaatccctctaatttctcatttatgcttttgtcttttttatgaaatatttcttttaaaagccccagtctcacctacgaaatatgaagagcaaaagctgattttgcttacttgctaaactgttgggaaagctctgtagagcatggttccagtgaggccaagattgaaatttgatactaaaaaggccacctagctttttgcagataacaaacaagaaagctattccaagactcagatgatgccagctgtctcccacgtgtgtattatggttcaccagggggaactggcaaaagtgtgtgtggggaggggaagggtgtgtgagtggttctgagcaaataactacagggtgcccattaccactcaagaagacacttcacgtattcttgtatcaaattcaataatcttaaacaatttgtgtagaagtccacagacatctttcaaccaccttttaggctgcatatggattgccaagtcagcatatgaggaattaaagacattgttttttaaaaaaaaaaatcatttagatgcacttttttgtgtgttctttaaataaatccaaaaaaaatgtga

SEQ ID NO: 371999 - DNA, 1482 bp, Homo sapiens
gggccggctcgcgggcgctgccagtctcgggcggcggtgtccggcgcgcgggcggcctgctgggcgggctgaagggttagcggagcacgggcaaggcggagagtgacggagtcggcgagcccccgcggcgacaggttctctacttaaaagacaatgactactgatgaaggtgccaagaacaatgaagaaagccccacagccactgttgctgagcagggagaggatattacctccaaaaaagacaggggagtattaaagattgtcaaaagagtggggaatggtgaggaaacgccgatgattggagacaaagtttatgtccattacaaaggaaaattgtcaaatggaaagaagtttgattccagtcatgatagaaatgaaccatttgtctttagtcttggcaaaggccaagtcatcaaggcatgggacattggggtggctaccatgaagaaaggagagatatgccatttactgtgcaaaccagaatatgcatatggctcggctggcagtctccctaaaattccctcgaatgcaactctcttttttgagattgagctccttgatttcaaaggagaggatttatttgaagatggaggcattatccggagaaccaaacggaaaggagagggatattcaaatccaaacgaaggagcaacagtagaaatccacctggaaggccgctgtggtggaaggatgtttgactgcagagatgtggcattcactgtgggcgaaggagaagaccacgacattccaattggaattgacaaagctctggagaaaatgcagcgggaagaacaatgtattttatatcttggaccaagatatggttttggagaggcagggaagcctaaatttggcattgaacctaatgctgagcttatatatgaagttacacttaagagcttcgaaaaggccaaagaatcctgggagatggataccaaagaaaaattggagcaggctgccattgtcaaagagaagggaaccgtatacttcaagggaggcaaatacatgcaggcggtgattcagtatgggaagatagtgtcctggttagagatggaatatggtttatcagaaaaggaatcgaaagcttctgaatcatttctccttgctgcctttctgaacctggccatgtgctacctgaagcttagagaatacaccaaagctgttgaatgctgtgacaaggcccttggactggacagtgccaatgagaaaggcttgtataggaggggtgaagcccagctgctcatgaacgagtttgagtcagccaagggtgactttgagaaagtgctggaagtaaacccccagaataaggctgcaagactgcagatctccatgtgccagaaaaaggccaaggagcacaacgagcgggaccgcaggatatacgccaacatgttcaagaagtttgcagagcaggatgccaagcgcgtcgaccttctgcttttcgcgaagggagagtcaggtacattggaaggatcattgctgtgg

SEQ ID NO: 372000 - DNA, 970 bp, Homo sapiens
gaacaaactcctacctctgtttgcaactaagagttacatcccccatgccaagaccttccgaggcgtcccaaagggggaaattcctcgctgccggactgcgcccacccttgaggacctcacattctctttgggcagagcggaagccagacagagacagggactacgaagcgacaatccccagccctgtgtgtgcaaggagcccccgaggggcaggcagccacgctgcagaaggctagactctccgacccccagggagcctggtgtgggctgcagggacagaacgcttctcagaggaggttctctacttaaaagacaatgactactgatgaaggtgccaagaacaatgaagaaagccccacagccactgttgctgagcagggagaggatattacctccaaaaaagacaggggagtattaaagattgtcaaaagagtggggaatggtgaggaaacgccgatgattggagacaaagtttatgtccattacaaaggaaaattgtcaaatggaaagaagtttgattccagtcatgatagaaatgaaccatttgtctttagtcttggcaaaggccaagtcatcaaggcatgggacattggggtggctaccatgaagaaaggagagatatgccatttactgtgcaaaccagaatatgcatatggctcggctggcagtctccctaaaattccctcgaatgcaactctcttttttgagattgagctccttgatttcaaaggagaggatttatttgaagatggaggcattatccggagaaccaaacggaaaggagagggatattcaaatccaaacgaaggagcaacagtagaaatccacctggaaggccgctgtggtggaaggatgtttgactgcagagatgtggcattccctcctatacaagcctttctcattggcactgtccagtccaagggccttgtcacagcattcaacagctttggtgtattctctaagcttcagg

SEQ ID NO: 372001 - DNA, 498 bp, Homo sapiens
cggctcctctctcttgagcaacattgttcaagctacagcttggtcatgatggaaagtgagttcttcaaacagtatgaagaagcactggcctagcagtaaattggcactgacacacaatttcaacagccagagtgttttcagtttggagtatcttctagaattagctgctctttgttccaataggcctcaactgatgcttttctctctgttcatctaaccattgtcacaaatttacacacaggccaaagaatcctgggagatggataccaaagaaaaattggagcaggctgccattgtcaaagagaagggaaccgtatacttcaaggtgtgtgagtccctatgcaatcctttccatctcaaagaatttattcaagtgttggtgaattgtgctgatattccctactctgaattttgtcaacactgcttggtaagaataagctgcaatttttataaatctgtcattttcaatatgaaaaatggtgagaaaacaatcatgtg

SEQ ID NO: 372002 - DNA, 583 bp, Homo sapiens
tgtatatcgtatgccatactgccttaaagccaaggggaagtggctagatgtgggggtgcatatgggctctctggctgtgacagatcccctggggacaacttcagtcagctttagtcctataatcggattgcctgacacctgcggtggcatcgataaacacatatggctcggctggcagtctccctaaaattccctcgaatgcaactctcttttttgagattgagctccttgatttcaaaggagaggatttatttgaagatggaggcattatccggagaaccaaacggaaaggagagggatattcaaatccaaacgaaggagcaacagtagaaatccacctggaaggccgctgtggtggaaggatgtttgactgcagagatgtggcattccgataaacaccggtgtttatcgatgccacctgctgagaaaaaacagcagatggctcgagaatacagagagaaaattgagagggagctaagagatatctgcaatgatgtactgtctcttttggaaaagttcttgatccccaatgcttcacaagcagagagcaaagtcttctatttgaaaatgacaggagatacta

SEQ ID NO: 372003 - DNA, 4460 bp, Homo sapiens
gaacaaactcctacctctgtttgcaactaagagttacatcccccatgccaagaccttccgaggcgtcccaaagggggaaattcctcgctgccggactgcgcccacccttgaggacctcacattctctttgggcagagcggaagccagacagagacagggactacgaagcgacaatccccagccctgtgtgtgcaaggagcccccgaggggcaggcagccacgctgcagaaggctagactctccgacccccagggagcctggtgtgggctgcagggacagaacgcttctcagaggaggttctctacttaaaagacaatgactactgatgaaggtgccaagaacaatgaagaaagccccacagccactgttgctgagcagggagaggatattacctccaaaaaagacaggggagtattaaagattgtcaaaagagtggggaatggtgaggaaacgccgatgattggagacaaagtttatgtccattacaaaggaaaattgtcaaatggaaagaagtttgattccagtcatgatagaaatgaaccatttgtctttagtcttggcaaaggccaagtcatcaaggcatgggacattggggtggctaccatgaagaaaggagagatatgccatttactgtgcaaaccagaatatgcatatggctcggctggcagtctccctaaaattccctcgaatgcaactctcttttttgagattgagctccttgatttcaaaggagaggatttatttgaagatggaggcattatccggagaaccaaacggaaaggagagggatattcaaatccaaacgaaggagcaacagtagaaatccacctggaaggccgctgtggtggaaggatgtttgactgcagagatgtggcattcactgtgggcgaaggagaagaccacgacattccaattggaattgacaaagctctggagaaaatgcagcgggaagaacaatgtattttatatcttggaccaagatatggttttggagaggcagggaagcctaaatttggcattgaacctaatgctgagcttatatatgaagttacacttaagagcttcgaaaaggccaaagaatcctgggagatggataccaaagaaaaattggagcaggctgccattgtcaaagagaagggaaccgtatacttcaagggaggcaaatacatgcaggcggtgattcagtatgggaagatagtgtcctggttagagatggaatatggtttatcagaaaaggaatcgaaagcttctgaatcatttctccttgctgcctttctgaacctggccatgtgctacctgaagcttagagaatacaccaaagctgttgaatgctgtgacaaggcccttggactggacagtgccaatgagaaaggcttgtataggaggggtgaagcccagctgctcatgaacgagtttgagtcagccaagggtgactttgagaaagtgctggaagtaaacccccagaataaggctgcaagactgcagatctccatgtgccagaaaaaggccaaggagcacaacgagcgggaccgcaggatatacgccaacatgttcaagaagtttgcagagcaggatgccaaggaagaggccaataaagcaatgggcaagaagacttcagaaggggtcactaatgaaaaaggaacagacagtcaagcaatggaagaagagaaacctgagggccacgtatgacgccacgccaaggagggaagagtcccagtgaactcggcccctcctcaatgggctttcccccaactcaggacagaacagtgtttaatgtaaagtttgttatagtctatgtgattctggaagcaaatggcaaaaccagtagcttcccaaaaacagcccccctgctgctgcccggagggttcactgaggggtggcacgggaccactccaggtggaacaaacagaaatgactgtggtgtggagggagtgagccagcagcttaagtccagctcatttcagtttctatcaaccttcaagtatccaattcagggtccctggagatcatcctaacaatgtggggctgttaggttttacctttgaactttcatagcactgcagaaacctttaaaaaaaaaatgcttcatgaatttctcctttcctacagttgggtagggtaggggaaggaggataagcttttgttttttaaatgactgaagtgctataaatgtagtctgttgcatttttaaccaacagaacccacagtagaggggtctcatgtctccccagttccacagcagtgtcacagacgtgaaagccagaacctcagaggccacttgcttgctgacttagcctcctcccaaagtccccctcctcagccagcctccttgtgagagtggctttctaccacacacagcctgtccctgggggagtaattctgtcattcctaaaacacccttcagcaatgataatgagcagatgagagtttctggattagcttttcctattttcgatgaagttctgagatactgaaatgtgaaaagagcaatcagaattgtgctttttctcccctcctctattccttttagggaataatattcaatacacagtacttcctcccagcattgctactgctcagcttcttctttcattctaatccttgctattaagaatttaagacttgtgcttacaatatttttgacctggagtggatctatttacatagtcatttaggatccatgcagctttttttgtctttttaagattattggctcataagcatatgtatactggtttatggaactttatttacactcctctatcatgcaaaaaaattttgactttttagtactaagcttaatttttaaaaacaaaatctgtagtgttgacaaataaatagttgctcttctacactaggggtttcacctgcaggtttgacacgcagttgctcgcttttcctgccctgtcaagcttctctgttctggcgtgagttgtgaaagagttgaagacagcttcccatgccggtacacagccagtagcctaaatctccagtacttgagctgaccattgaactagggcaagtcttaaatgtgtacatgtagttgaatttcagtccttacgggtaaacagattgagcatggctctctattccctcagcctaagaaacactcatgggaatgcatttggcaacccaaggaaccatttgcttaaacctggaacatctcacctttttaaatcctaaaaaacactggcagttatattttaaattagtttttatttttatgatggttttatcaaaagacttttattattagattgggacccccttcaaacctaaaaatcaagttatttccttttataatacttttcttccccatggaacaaatgggatcaatttgtgagttttttcctttaatgataactaaaatccctctaatttctcatttatgcttttgtcttttttatgaaatatttcttttaaaagccccagtctcacctacgaaatatgaagagcaaaagctgattttgcttacttgctaaactgttgggaaagctctgtagagcatggttccagtgaggccaagattgaaatttgatactaaaaaggccacctagctttttgcagataacaaacaagaaagctattccaagactcagatgatgccagctgtctcccacgtgtgtattatggttcaccagggggaactggcaaaagtgtgtgtggggaggggaagggtgtgtgagtggttctgagcaaataactacagggtgcccattaccactcaagaagacacttcacgtattcttgtatcaaattcaataatcttaaacaatttgtgtagaagtccacagacatctttcaaccaccttttaggctgcatatggattgccaagtcagcatatgaggaattaaagacattgttttttaaaaaaaaaaatcatttagatgcacttttttgtgtgttctttaaataaatccaaaaaaaatgtgaaaaaaaaaaaaaaaaaaaaaaaaaaaaaacaaaaaaaagaacgaaaaaaaaaaaaaaaaaaaaagagagagggggcgagcagcgagatcaaaagaataatccggctaaaggggcggccacaacgaatcgcggccgacacacgagtactgatggagaagaggaggggtggcccataaagtaggcggctaaaattaatgacgtcaagacgacgcgggcccgctgatatattcacaaacctgcttgcgtaagcgaggagagaaaacaacactgtacgtcaatgatggggaaactacttcgggagaaagagcgcccaccatcatacggtgggggggggcaacaacagatagtcgggaacaccactccccccctgacagaaatagaatgctgacgccactcaaggggaataaaatgaaacccatgaccgaggtgtacaactgggggggtacaccacaccaacacgtactatctgctgcgcgacacaaaagatgtcaaccagagagtcattaggaccaaaacatttaagagg

SEQ ID NO: 372004 - DNA, 3992 bp, Homo sapiens
gggccggctcgcgggcgctgccagtctcgggcggcggtgtccggcgcgcgggcggcctgctgggcgggctgaagggttagcggagcacgggcaaggcggagagtgacggagtcggcgagcccccgcggcgacaggttctctacttaaaagacaatgactactgatgaaggtgccaagaacaatgaagaaagccccacagccactgttgctgagcagggagaggatattacctccaaaaaagacaggggagtattaaagattgtcaaaagagtggggaatggtgaggaaacgccgatgattggagacaaagtttatgtccattacaaaggaaaattgtcaaatggaaagaagtttgattccagtcatgatagaaatgaaccatttgtctttagtcttggcaaaggccaagtcatcaaggcatgggacattggggtggctaccatgaagaaaggagagatatgccatttactgtgcaaaccagaatatgcatatggctcggctggcagtctccctaaaattccctcgaatgcaactctcttttttgagattgagctccttgatttcaaaggagaggatttatttgaagatggaggcattatccggagaaccaaacggaaaggagagggatattcaaatccaaacgaaggagcaacagtagaaatccacctggaaggccgctgtggtggaaggatgtttgactgcagagatgtggcattcactgtgggcgaaggagaagaccacgacattccaattggaattgacaaagctctggagaaaatgcagcgggaagaacaatgtattttatatcttggaccaagatatggttttggagaggcagggaagcctaaatttggcattgaacctaatgctgagcttatatatgaagttacacttaagagcttcgaaaaggccaaagaatcctgggagatggataccaaagaaaaattggagcaggctgccattgtcaaagagaagggaaccgtatacttcaagggaggcaaatacatgcaggcggtgattcagtatgggaagatagtgtcctggttagagatggaatatggtttatcagaaaaggaatcgaaagcttctgaatcatttctccttgctgcctttctgaacctggccatgtgctacctgaagcttagagaatacaccaaagctgttgaatgctgtgacaaggcccttggactggacagtgccaatgagaaaggcttgtataggaggggtgaagcccagctgctcatgaacgagtttgagtcagccaagggtgactttgagaaagtgctggaagtaaacccccagaataaggctgcaagactgcagatctccatgtgccagaaaaaggccaaggagcacaacgagcgggaccgcaggatatacgccaacatgttcaagaagtttgcagagcaggatgccaaggaagaggccaataaagcaatgggcaagaagacttcagaaggggtcactaatgaaaaaggaacagacagtcaagcaatggaagaagagaaacctgagggccacgtatgacgccacgccaaggagggaagagtcccagtgaactcggcccctcctcaatgggctttcccccaactcaggacagaacagtgtttaatgtaaagtttgttatagtctatgtgattctggaagcaaatggcaaaaccagtagcttcccaaaaacagcccccctgctgctgcccggagggttcactgaggggtggcacgggaccactccaggtggaacaaacagaaatgactgtggtgtggagggagtgagccagcagcttaagtccagctcatttcagtttctatcaaccttcaagtatccaattcagggtccctggagatcatcctaacaatgtggggctgttaggttttacctttgaactttcatagcactgcagaaacctttaaaaaaaaaatgcttcatgaatttctcctttcctacagttgggtagggtaggggaaggaggataagcttttgttttttaaatgactgaagtgctataaatgtagtctgttgcatttttaaccaacagaacccacagtagaggggtctcatgtctccccagttccacagcagtgtcacagacgtgaaagccagaacctcagaggccacttgcttgctgacttagcctcctcccaaagtccccctcctcagccagcctccttgtgagagtggctttctaccacacacagcctgtccctgggggagtaattctgtcattcctaaaacacccttcagcaatgataatgagcagatgagagtttctggattagcttttcctattttcgatgaagttctgagatactgaaatgtgaaaagagcaatcagaattgtgctttttctcccctcctctattccttttagggaataatattcaatacacagtacttcctcccagcattgctactgctcagcttcttctttcattctaatccttgctattaagaatttaagacttgtgcttacaatatttttgacctggagtggatctatttacatagtcatttaggatccatgcagctttttttgtctttttaagattattggctcataagcatatgtatactggtttatggaactttatttacactcctctatcatgcaaaaaaattttgactttttagtactaagcttaatttttaaaaacaaaatctgtagtgttgacaaataaatagttgctcttctacactaggggtttcacctgcaggtttgacacgcagttgctcgcttttcctgccctgtcaagcttctctgttctggcgtgagttgtgaaagagttgaagacagcttcccatgccggtacacagccagtagcctaaatctccagtacttgagctgaccattgaactagggcaagtcttaaatgtgtacatgtagttgaatttcagtccttacgggtaaacagattgagcatggctctctattccctcagcctaagaaacactcatgggaatgcatttggcaacccaaggaaccatttgcttaaacctggaacatctcacctttttaaatcctaaaaaacactggcagttatattttaaattagtttttatttttatgatggttttatcaaaagacttttattattagattgggacccccttcaaacctaaaaatcaagttatttccttttataatacttttcttccccatggaacaaatgggatcaatttgtgagttttttcctttaatgataactaaaatccctctaatttctcatttatgcttttgtcttttttatgaaatatttcttttaaaagccccagtctcacctacgaaatatgaagagcaaaagctgattttgcttacttgctaaactgttgggaaagctctgtagagcatggttccagtgaggccaagattgaaatttgatactaaaaaggccacctagctttttgcagataacaaacaagaaagctattccaagactcagatgatgccagctgtctcccacgtgtgtattatggttcaccagggggaactggcaaaagtgtgtgtggggaggggaagggtgtgtgagtggttctgagcaaataactacagggtgcccattaccactcaagaagacacttcacgtattcttgtatcaaattcaataatcttaaacaatttgtgtagaagtccacagacatctttcaaccaccttttaggctgcatatggattgccaagtcagcatatgaggaattaaagacattgttttttaaaaaaaaaaatcatttagatgcacttttttgtgtgttctttaaataaatccaaaaaaaatgtgacttcccattgtttttggttttgcttaagtgattttcagggaaagctatattggttaaaaaaccatggtgggggccaacttgaagaaattagacatcagagaggtcaggcgtagtggctcatgcctgtaatcccagcactttgggaggccaaggcaggtgcatcacctgaggtcaggagtttgagaccagcctggccaatgtggtaaaaccctgtctctac

SEQ ID NO: 372005 - DNA, 1315 bp, Homo sapiens
gggccggctcgcgggcgctgccagtctcgggcggcggtgtccggcgcgcgggcggcctgctgggcgggctgaagggttagcggagcacgggcaaggcggagagtgacggagtcggcgagcccccgcggcgacaggttctctacttaaaagacaatgactactgatgaaggtgccaagaacaatgaagaaagccccacagccactgttgctgagcagggagaggatattacctccaaaaaagacaggggagtattaaagattgtcaaaagagtggggaatggtgaggaaacgccgatgattggagacaaagtttatgtccattacaaaggaaaattgtcaaatggaaagaagtttgattccagtcatgatagaaatgaaccatttgtctttagtcttggcaaaggccaagtcatcaaggcatgggacattggggtggctaccatgaagaaaggagagatatgccatttactgtgcaaaccagaatatgcatatggctcggctggcagtctccctaaaattccctcgaatgcaactctcttttttgagattgagctccttgatttcaaaggagaggatttatttgaagatggaggcattatccggagaaccaaacggaaaggagagggatattcaaatccaaacgaaggagcaacagtagaaatccacctggaaggccgctgtggtggaaggatgtttgactgcagagatgtggcattcactgtgggcgaaggagaagaccacgacattccaattggaattgacaaagctctggagaaaatgcagcgggaagaacaatgtattttatatcttggaccaagatatggttttggagaggcagggaagcctaaatttggcattgaacctaatgctgagcttatatatgaagttacacttaagagcttcgaaaaggccaaagaatcctgggagatggataccaaagaaaaattggagcaggctgccattgtcaaagagaagggaaccgtatacttcaagggaggcaaatacatgcaggcggtgattcagtatgggaagatagtgtcctggttagagatggaatatggtttatcagaaaaggaatcgaaagcttctgaatcatttctccttgctgcctttctgaacctggccatgtgctacctgaagcttagagaatacaccaaagctgttgaatgctgtgacaaggcccttggctgactcaaactcgttcatgagcagctgggcttcacccctcctatacaagcctttctcattggcactgtccagtccaagggccttgtcacagcattcaacagctttggtgtattctctaagcttcagg

SEQ ID NO: 372006 - DNA, 632 bp, Homo sapiens
gaacaaactcctacctctgtttgcaactaagagttacatcccccatgccaagaccttccgaggcgtcccaaagggggaaattcctcgctgccggactgcgcccacccttgaggacctcacattctctttgggcagagcggaagccagacagagacagggactacgaagcgacaatccccagccctgtgtgtgcaaggagcccccgaggggcaggcagccacgctgcagaaggctagactctccgacccccagggagcctggtgtgggctgcagggacagaacgcttctcagaggaggttctctacttaaaagacaatgactactgatgaaggtgccaagaacaatgaagaaagccccacagccactgttgctgagcagggagaggatattacctccaaaaaagacaggggagtattaaagattgtcaaaagagtggggaatggtgattatcctgatcttgtcccaattcctgccaggtatggaggagggtaaccacatgacaaaaaaataaactgctgagaatgacgaatatcaggtattcggaggattaggaagttaaggatacagaaagagagagaggatcaaacaaacatggcatcaggcaggtccacaagaaagaaagctgtgagaaa

SEQ ID NO: 372007 - DNA, 3178 bp, Homo sapiens
cgaagcgctatgtcaaaccgccagggctttaaacgacggcagtactataacgggcccgcccaggcggctgcccgtgacctgcctgggcgcggggaactgaaagccggaaggggcaagacgggttcagttcgtcatggggctgtttggaaagacccaggagaagccgcccaaagaactggtcaatgagtggtcattgaagataagaaaggaaatgagagttgttgacaggcaaataagggatatccaaagagaagaagaaaaagtgaaacgatctgtgaaagatgctgccaagaagggccagaaggatgtctgcatagttctggccaaggagatgatcaggtcaaggaaggctgtgagcaagctgtatgcatccaaagcacacatgaactcagtgctcatggggatgaagaaccagctcgcggtcttgcgagtggctggttccctgcagaagagcacagaagtgatgaaggccatgcaaagtcttgtgaagattccagagattcaggccaccatgagggagttgtccaaagaaatgatgaaggctgggatcatagaggagatgttagaggacacttttgaaagcatggacgatcaggaagaaatggaggaagaagcagaaatggaaattgacagaattctctttgaaattacagcaggggccttgggcaaagcacccagtaaagtgactgatgcccttccagagccagaacctccaggagcgatggctgcctcagaggatgaggaggaggaggaagaggctctggaggccatgcagtcccggctggccacactccgcagctaggggctgcctaccccgctgggtgtgcacacactcctctcaagagctgccattttatgtgtctcttgcactacacctctgttgtgaggactaccattttggagaaggttctgtttgtctcttttcattctctgcccaggttttgggatcgcaaagggattgttcttataaaagtggcataaataaatgcatcatttttaggagtatagacagatatatcttattgtggggaggggaaagaaatccatctgctcatgaagcacttctgaaaatataggtgattgcctgaatgtcgaagactctacttttgtctataaaacactatataaatgaattttaataaatttttgctttagcacttggccccattgtagattgccctgtgcagtaaactttcaaggtgtcggctgccccagattgcttcatttgctgggtgtggaaagagttgctatggccaggcatatgggatttggaagctcagcagaagtgacttctgctctgtggttgctgctccccggctttcacagacatggtatggcagccattcttttatctatttaaccaagaggatgctggggaattgtgctgcttgtcctgttggctggtggctgcattatgtcctggggtgtgcatgtgggtctatttagagcttctgtcccttccttcccattgcaagttgcacccagatgagacagctgtagtactaggtctctttcacctctcattgcctgtccctgcttcgagctggttgtcttgtgcgtgggacatgggccttcctatctgtgttttctcaaagtcaggagctgaccaggagcacactaaggtgtggtcatgcatcataaccaacattcactcatctgggacattcttaagatacatttataaatcatttcagcagtagtactttgtatgtgttgagagtttacagagctctttgacatacgcgatcttagtctttacaaataaggaaaacagctcagtttgggaagtatcagagatgggattcaaacccagatcctctggtccaagttgtatgtgcactgaactaatcaggcaggaaaaaagcccagccactgtctcacagattgttttttgtatattgtagcaaaatcctgaaacaatggggtccttccagtctcatcatacaaaatggcaatcttggctgggtgcggtggttcatgcctataatcccagtgctttacaaggctgaggcaggaggctctcttgagaataggagttcaagaccagcctgggcaacatagcaagatcctgtctctccaaaaaaaaaaaaaaaaaaaaaaaaaaatttcatttttgagtccagaggaccctcctattactcttgatttcatcttcagagtgtagttaaaaaattattttaaataattatttttttaaatcagttgtaggttcacagcaaaagtggacaaaaagaaatttctcatatatcccctgccctcacacatgcatagcctcccaccactatcagtatcccacaccagagtggtacatttgttacaatcaataaacctccattgacacatcattatcacccaaagtccatagtttacatgaagattcactctggtgttgtacattgtatgggcttagacaaatgtatgatgatatctacaattatagaatcatacagaatagtttcactgccctaaaacttctctatgcttcacctgttcatccctttcttccctaatcccctggcaaccactttaaaaaaaaaattaggttcagggggtacatgtgcaggtaaactcgtgacaagggggtttgttatacagattatttagtgacccaggtactaagcctagtacccaatagttacttttctggtcctgtcccttttcccaccctccaccctcaggtaggccccagtatgttattcctttgtgtccatgttatttcactcccacttgtgagaacatggaatatttggtttcctgttcctatgttagtttgttaaggataatggcctccagccccatccatgttcctgcaaaggacatgatctttctttggcaaccactttttactgtcgccatagttcttccttttctagaatgtcatattggaatcatatagtatgtagccttttcagactggcttctttcacttaataatatgcaattaaggttcctccatgtcatttcatggcttaatagtgcatttatttttagcactgaataatactccattgtctagatgaatagtttatccattcacctattgaaagacttcttggtggtttccaagttttggcaattatgaataaagctgttgtaaacatctttgtgcaggtttttctatgggcatgtttttaattcatttgaataaataccaagagcttcagtgctggatcataaa

SEQ ID NO: 372008 - DNA, 3186 bp, Homo sapiens
atcccctagtgccgccgctccctactctgggggttgggactacctccttttccgcgggcgggcccgcccaggcggctgcccgtgacctgcctgggcgcggggaactgaaagccggaaggggcaagacgggttcagttcgtcatggggctgtttggaaagacccaggagaagccgcccaaagaactggtcaatgagtggtcattgaagataagaaaggaaatgagagttgttgacaggcaaataagggatatccaaagagaagaagaaaaagtgaaacgatctgtgaaagatgctgccaagaagggccagaaggatgtctgcatagttctggccaaggagatgatcaggtcaaggaaggctgtgagcaagctgtatgcatccaaagcacacatgaactcagtgctcatggggatgaagaaccagctcgcggtcttgcgagtggctggttccctgcagaagagcacagaagtgatgaaggccatgcaaagtcttgtgaagattccagagattcaggccaccatgagggagttgtccaaagaaatgatgaaggctgggatcatagaggagatgttagaggacacttttgaaagcatggacgatcaggaagaaatggaggaagaagcagaaatggaaattgacagaattctctttgaaattacagcaggggccttgggcaaagcacccagtaaagtgactgatgcccttccagagccagaacctccaggagcgatggctgcctcagaggatgaggaggaggaggaagaggctctggaggccatgcagtcccggctggccacactccgcagctaggggctgcctaccccgctgggtgtgcacacactcctctcaagagctgccattttatgtgtctcttgcactacacctctgttgtgaggactaccattttggagaaggttctgtttgtctcttttcattctctgcccaggttttgggatcgcaaagggattgttcttataaaagtggcataaataaatgcatcatttttaggagtatagacagatatatcttattgtggggaggggaaagaaatccatctgctcatgaagcacttctgaaaatataggtgattgcctgaatgtcgaagactctacttttgtctataaaacactatataaatgaattttaataaatttttgctttagcacttggccccattgtagattgccctgtgcagtaaactttcaaggtgtcggctgccccagattgcttcatttgctgggtgtggaaagagttgctatggccaggcatatgggatttggaagctcagcagaagtgacttctgctctgtggttgctgctccccggctttcacagacatggtatggcagccattcttttatctatttaaccaagaggatgctggggaattgtgctgcttgtcctgttggctggtggctgcattatgtcctggggtgtgcatgtgggtctatttagagcttctgtcccttccttcccattgcaagttgcacccagatgagacagctgtagtactaggtctctttcacctctcattgcctgtccctgcttcgagctggttgtcttgtgcgtgggacatgggccttcctatctgtgttttctcaaagtcaggagctgaccaggagcacactaaggtgtggtcatgcatcataaccaacattcactcatctgggacattcttaagatacatttataaatcatttcagcagtagtactttgtatgtgttgagagtttacagagctctttgacatacgcgatcttagtctttacaaataaggaaaacagctcagtttgggaagtatcagagatgggattcaaacccagatcctctggtccaagttgtatgtgcactgaactaatcaggcaggaaaaaagcccagccactgtctcacagattgttttttgtatattgtagcaaaatcctgaaacaatggggtccttccagtctcatcatacaaaatggcaatcttggctgggtgcggtggttcatgcctataatcccagtgctttacaaggctgaggcaggaggctctcttgagaataggagttcaagaccagcctgggcaacatagcaagatcctgtctctccaaaaaaaaaaaaaaaaaaaaaaaaaaatttcatttttgagtccagaggaccctcctattactcttgatttcatcttcagagtgtagttaaaaaattattttaaataattatttttttaaatcagttgtaggttcacagcaaaagtggacaaaaagaaatttctcatatatcccctgccctcacacatgcatagcctcccaccactatcagtatcccacaccagagtggtacatttgttacaatcaataaacctccattgacacatcattatcacccaaagtccatagtttacatgaagattcactctggtgttgtacattgtatgggcttagacaaatgtatgatgatatctacaattatagaatcatacagaatagtttcactgccctaaaacttctctatgcttcacctgttcatccctttcttccctaatcccctggcaaccactttaaaaaaaaaattaggttcagggggtacatgtgcaggtaaactcgtgacaagggggtttgttatacagattatttagtgacccaggtactaagcctagtacccaatagttacttttctggtcctgtcccttttcccaccctccaccctcaggtaggccccagtatgttattcctttgtgtccatgttatttcactcccacttgtgagaacatggaatatttggtttcctgttcctatgttagtttgttaaggataatggcctccagccccatccatgttcctgcaaaggacatgatctttctttggcaaccactttttactgtcgccatagttcttccttttctagaatgtcatattggaatcatatagtatgtagccttttcagactggcttctttcacttaataatatgcaattaaggttcctccatgtcatttcatggcttaatagtgcatttatttttagcactgaataatactccattgtctagatgaatagtttatccattcacctattgaaagacttcttggtggtttccaagttttggcaattatgaataaagctgttgtaaacatctttgtgcaggtttttctatgggcatgtttttaattcatttgaataaataccaagagcttcagtgctggatcataaa

SEQ ID NO: 372009 - DNA, 2807 bp, Homo sapiens
agcggggaacaatcacttctgtgctcttctgcagggaaccagccactcgcaagaccgcgagctggttcatcatccccatgagcacagaagtgatgaaggccatgcaaagtcttgtgaagattccagagattcaggccaccatgagggagttgtccaaagaaatgatgaaggctgggatcatagaggagatgttagaggacacttttgaaagcatggacgatcaggaagaaatggaggaagaagcagaaatggaaattgacagaattctctttgaaattacagcaggggccttgggcaaagcacccagtaaagtgactgatgcccttccagagccagaacctccaggagcgatggctgcctcagaggatgaggaggaggaggaagaggctctggaggccatgcagtcccggctggccacactccgcagctaggggctgcctaccccgctgggtgtgcacacactcctctcaagagctgccattttatgtgtctcttgcactacacctctgttgtgaggactaccattttggagaaggttctgtttgtctcttttcattctctgcccaggttttgggatcgcaaagggattgttcttataaaagtggcataaataaatgcatcatttttaggagtatagacagatatatcttattgtggggaggggaaagaaatccatctgctcatgaagcacttctgaaaatataggtgattgcctgaatgtcgaagactctacttttgtctataaaacactatataaatgaattttaataaatttttgctttagcacttggccccattgtagattgccctgtgcagtaaactttcaaggtgtcggctgccccagattgcttcatttgctgggtgtggaaagagttgctatggccaggcatatgggatttggaagctcagcagaagtgacttctgctctgtggttgctgctccccggctttcacagacatggtatggcagccattcttttatctatttaaccaagaggatgctggggaattgtgctgcttgtcctgttggctggtggctgcattatgtcctggggtgtgcatgtgggtctatttagagcttctgtcccttccttcccattgcaagttgcacccagatgagacagctgtagtactaggtctctttcacctctcattgcctgtccctgcttcgagctggttgtcttgtgcgtgggacatgggccttcctatctgtgttttctcaaagtcaggagctgaccaggagcacactaaggtgtggtcatgcatcataaccaacattcactcatctgggacattcttaagatacatttataaatcatttcagcagtagtactttgtatgtgttgagagtttacagagctctttgacatacgcgatcttagtctttacaaataaggaaaacagctcagtttgggaagtatcagagatgggattcaaacccagatcctctggtccaagttgtatgtgcactgaactaatcaggcaggaaaaaagcccagccactgtctcacagattgttttttgtatattgtagcaaaatcctgaaacaatggggtccttccagtctcatcatacaaaatggcaatcttggctgggtgcggtggttcatgcctataatcccagtgctttacaaggctgaggcaggaggctctcttgagaataggagttcaagaccagcctgggcaacatagcaagatcctgtctctccaaaaaaaaaaaaaaaaaaaaaaaaaaatttcatttttgagtccagaggaccctcctattactcttgatttcatcttcagagtgtagttaaaaaattattttaaataattatttttttaaatcagttgtaggttcacagcaaaagtggacaaaaagaaatttctcatatatcccctgccctcacacatgcatagcctcccaccactatcagtatcccacaccagagtggtacatttgttacaatcaataaacctccattgacacatcattatcacccaaagtccatagtttacatgaagattcactctggtgttgtacattgtatgggcttagacaaatgtatgatgatatctacaattatagaatcatacagaatagtttcactgccctaaaacttctctatgcttcacctgttcatccctttcttccctaatcccctggcaaccactttaaaaaaaaaattaggttcagggggtacatgtgcaggtaaactcgtgacaagggggtttgttatacagattatttagtgacccaggtactaagcctagtacccaatagttacttttctggtcctgtcccttttcccaccctccaccctcaggtaggccccagtatgttattcctttgtgtccatgttatttcactcccacttgtgagaacatggaatatttggtttcctgttcctatgttagtttgttaaggataatggcctccagccccatccatgttcctgcaaaggacatgatctttctttggcaaccactttttactgtcgccatagttcttccttttctagaatgtcatattggaatcatatagtatgtagccttttcagactggcttctttcacttaataatatgcaattaaggttcctccatgtcatttcatggcttaatagtgcatttatttttagcactgaataatactccattgtctagatgaatagtttatccattcacctattgaaagacttcttggtggtttccaagttttggcaattatgaataaagctgttgtaaacatctttgtgcaggtttttctatgggcatgtttttaattcatttgaataaataccaagagcttcagtgctggatcataaa

SEQ ID NO: 372010 - DNA, 3124 bp, Homo sapiens
cgaagcgctatgtcaaaccgccagggctttaaacgacggcagtactataacgggcccgcccaggcggctgcccgtgacctgcctgggcgcggggaactgaaagccggaaggggcaagacgggttcagttcgtcatggggctgtttggaaagacccaggagaagccgcccaaagaactggtcaatgagtggtcattgaagataagaaaggaaatgagagttgttgacaggcaaataagggatatccaaagagaagaagaaaaagtgaaacgatctgtgaaagatgctgccaagaagggccagaaggatgtctgcatagttctggccaaggagatgatcaggtcaaggaaggctgtgagcaagctgtatgcatccaaagcacacatgaactcagtgctcatggggatgaagaaccagctcgcggtcttgcgagtggctggttccctgcagaagagcacagaagtgatgaaggccatgcaaagtcttgtgaagattccagagattcaggccaccatgagggagttgtccaaagaaatgatgaaggctgggatcatagaggagatgttagaggacacttttgaaagcatggacgatcaggaagaaatggaggaagaagcagaaatggaaattgacagaattctctttgaaattacagcaggggccttgggcaaagcacccagtaaagtgactgatgcccttccagagccagaacctccaggagcgatggctgcctcagaggatgaggaggaggaggaagaggctctggaggccatgcagtcccggctggccacactccgcagctaggggctgcctaccccgctgggtgtgcacacactcctctcaagagctgccattttatgtgtctcttgcactacacctctgttgtgaggactaccattttggagaaggttctgtttgtctcttttcattctctgcccaggttttgggatcgcaaagggattgttcttataaaagtggcataaataaatgcatcatttttaggagtatagacagatatatcttattgtggggaggggaaagaaatccatctgctcatgaagcacttctgaaaatataggtgattgcctgaatgtcgaagactctacttttgtctataaaacactatataaatgaattttaataaatttttgctttagcacttggccccattgtagattgccctgtgcagtaaactttcaaggtgtcggctgccccagattgcttcatttgctgggtgtggaaagagttgctatggccaggcatatgggatttggaagctcagcagaagtgacttctgctctgtggttgctgctccccggctttcacagacatggtatggcagccattcttttatctatttaaccaagaggatgctggggaattgtgctgcttgtcctgttggctggtggctgcattatgtcctggggtgtgcatgtgggtctatttagagcttctgtcccttccttcccattgcaagttgcacccagatgagacagctgtagtactaggtctctttcacctctcattgcctgtccctgcttcgagctggttgtcttgtgcgtgggacatgggccttcctatctgtgttttctcaaagtcaggagctgaccaggagcacactaaggtgtggtcatgcatcataaccaacattcactcatctgggacattcttaagatacatttataaatcatttcagcagtagtactttgtatgtgttgagagtttacagagctctttgacatacgcgatcttagtctttacaaataaggaaaacagctcagtttgggaagtatcagagatgggattcaaacccagatcctctggtccaagttgtatgtgcactgaactaatcaggcaggaaaaaagcccagccactgtctcacagattgttttttgtatattgtagcaaaatcctgaaacaatggggtccttccagtctcatcatacaaaaggctgaggcaggaggctctcttgagaataggagttcaagaccagcctgggcaacatagcaagatcctgtctctccaaaaaaaaaaaaaaaaaaaaaaaaaaatttcatttttgagtccagaggaccctcctattactcttgatttcatcttcagagtgtagttaaaaaattattttaaataattatttttttaaatcagttgtaggttcacagcaaaagtggacaaaaagaaatttctcatatatcccctgccctcacacatgcatagcctcccaccactatcagtatcccacaccagagtggtacatttgttacaatcaataaacctccattgacacatcattatcacccaaagtccatagtttacatgaagattcactctggtgttgtacattgtatgggcttagacaaatgtatgatgatatctacaattatagaatcatacagaatagtttcactgccctaaaacttctctatgcttcacctgttcatccctttcttccctaatcccctggcaaccactttaaaaaaaaaattaggttcagggggtacatgtgcaggtaaactcgtgacaagggggtttgttatacagattatttagtgacccaggtactaagcctagtacccaatagttacttttctggtcctgtcccttttcccaccctccaccctcaggtaggccccagtatgttattcctttgtgtccatgttatttcactcccacttgtgagaacatggaatatttggtttcctgttcctatgttagtttgttaaggataatggcctccagccccatccatgttcctgcaaaggacatgatctttctttggcaaccactttttactgtcgccatagttcttccttttctagaatgtcatattggaatcatatagtatgtagccttttcagactggcttctttcacttaataatatgcaattaaggttcctccatgtcatttcatggcttaatagtgcatttatttttagcactgaataatactccattgtctagatgaatagtttatccattcacctattgaaagacttcttggtggtttccaagttttggcaattatgaataaagctgttgtaaacatctttgtgcaggtttttctatgggcatgtttttaattcatttgaataaataccaagagcttcagtgctggatcataaa

SEQ ID NO: 372011 - DNA, 2259 bp, Homo sapiens
gtctggcgctcggttttacaagccagttcgatgactgatagaaccctgtgcgagtggcataaataaatgcatcatttttaggagtatagacagatatatcttattgtggggaggggaaagaaatccatctgctcatgaagcacttctgaaaatataggtgattgcctgaatgtcgaagactctacttttgtctataaaacactatataaatgaattttaataaatttttgctttagcacttggccccattgtagattgccctgtgcagtaaactttcaaggtgtcggctgccccagattgcttcatttgctgggtgtggaaagagttgctatggccaggcatatgggatttggaagctcagcagaagtgacttctgctctgtggttgctgctccccggctttcacagacatggtatggcagccattcttttatctatttaaccaagaggatgctggggaattgtgctgcttgtcctgttggctggtggctgcattatgtcctggggtgtgcatgtgggtctatttagagcttctgtcccttccttcccattgcaagttgcacccagatgagacagctgtagtactaggtctctttcacctctcattgcctgtccctgcttcgagctggttgtcttgtgcgtgggacatgggccttcctatctgtgttttctcaaagtcaggagctgaccaggagcacactaaggtgtggtcatgcatcataaccaacattcactcatctgggacattcttaagatacatttataaatcatttcagcagtagtactttgtatgtgttgagagtttacagagctctttgacatacgcgatcttagtctttacaaataaggaaaacagctcagtttgggaagtatcagagatgggattcaaacccagatcctctggtccaagttgtatgtgcactgaactaatcaggcaggaaaaaagcccagccactgtctcacagattgttttttgtatattgtagcaaaatcctgaaacaatggggtccttccagtctcatcatacaaaatggcaatcttggctgggtgcggtggttcatgcctataatcccagtgctttacaaggctgaggcaggaggctctcttgagaataggagttcaagaccagcctgggcaacatagcaagatcctgtctctccaaaaaaaaaaaaaaaaaaaaaaaaaaatttcatttttgagtccagaggaccctcctattactcttgatttcatcttcagagtgtagttaaaaaattattttaaataattatttttttaaatcagttgtaggttcacagcaaaagtggacaaaaagaaatttctcatatatcccctgccctcacacatgcatagcctcccaccactatcagtatcccacaccagagtggtacatttgttacaatcaataaacctccattgacacatcattatcacccaaagtccatagtttacatgaagattcactctggtgttgtacattgtatgggcttagacaaatgtatgatgatatctacaattatagaatcatacagaatagtttcactgccctaaaacttctctatgcttcacctgttcatccctttcttccctaatcccctggcaaccactttaaaaaaaaaattaggttcagggggtacatgtgcaggtaaactcgtgacaagggggtttgttatacagattatttagtgacccaggtactaagcctagtacccaatagttacttttctggtcctgtcccttttcccaccctccaccctcaggtaggccccagtatgttattcctttgtgtccatgttatttcactcccacttgtgagaacatggaatatttggtttcctgttcctatgttagtttgttaaggataatggcctccagccccatccatgttcctgcaaaggacatgatctttctttggcaaccactttttactgtcgccatagttcttccttttctagaatgtcatattggaatcatatagtatgtagccttttcagactggcttctttcacttaataatatgcaattaaggttcctccatgtcatttcatggcttaatagtgcatttatttttagcactgaataatactccattgtctagatgaatagtttatccattcacctattgaaagacttcttggtggtttccaagttttggcaattatgaataaagctgttgtaaacatctttgtgcaggtttttctatgggcatgtttttaattcatttgaataaataccaagagcttcagtgctggatcataaa

SEQ ID NO: 372012 - DNA, 1005 bp, Homo sapiens
cgaagcgctatgtcaaaccgccagggctttaaacgacggcagtactataacgggcccgcccaggcggctgcccgtgacctgcctgggcgcggggaactgaaagccggaaggggcaagacgggttcagttcgtcatggggctgtttggaaagacccaggagaagccgcccaaagaactggtcaatgagtggtcattgaagataagaaaggaaatgagagttgttgacaggcaaataagggatatccaaagagaagaagaaaaagtgaaacgatctgtgaaagatgctgccaagaagggccagaaggatgtctgcatagttctggccaaggagatgatcaggtcaaggaaggctgtgagcaagctgtatgcatccaaagcacacatgaactcagtgctcatggggatgaagaaccagctcgcggtcttgcgagtggctggttccctgcagaagagcacagaagtgatgaaggccatgcaaagtcttgtgaagattccagagattcaggccaccatgagggagttgtccaaagaaatgatgaaggctgggatcatagaggagatgttagaggacacttttgaaagcatggacgatcaggaagaaatggaggaagaagcagaaatggaaattgacagaattctctttgaaattacagcaggggccttgggcaaagcacccagtaaagtgactgatgcccttccagagccagaacctccaggagcgatggctgcctcagaggatgaggaggaggaggaagaggctctggaggccatgcagtcccggctggccacactccgcagctaggggctgcctaccccgctgggtgtgcacacactcctctcaagagctgccattttatgtgtctcttgcactacacctctgttgtgaggactaccattttggagaaggttctgtttgtctcttttcattctctgcccaggttttgggatcgcaaagggattgttcttataaaagtggcataaataaatgcatcatttttaggagta

SEQ ID NO: 372013 - DNA, 980 bp, Homo sapiens
atcccctagtgccgccgctccctactctgggggttgggactacctccttttccgcgggcgggcccgcccaggcggctgcccgtgacctgcctgggcgcggggaactgaaagccggaaggggcaagacgggttcagttcgtcatggggctgtttggaaagacccaggagaagccgcccaaagaactggtcaatgagtggtcattgaagataagaaaggaaatgagagttgttgacaggcaaataagggatatccaaagagaagaagaaaaagtgaaacgatctgtgaaagatgctgccaagaagggccagaaggatgtctgcatagttctggccaaggagatgatcaggtcaaggaaggctgtgagcaagctgtatgcatccaaagcacacatgaactcagtgctcatggggatgaagaaccagctcgcggtcttgcgagtggctggttccctgcagaagagcacagaagtgatgaaggccatgcaaagtcttgtgaagattccagagattcaggccaccatgagggagttgtccaaagaaatgatgaaggctgggatcatagaggagatgttagaggacacttttgaaagcatggacgatcaggaagaaatggaggaagaagcagaaatggaaattgacagaattctctttgaaattacagcaggggccttgggcaaagcacccagtaaagtgactgatgcccttccagagccagaacctccaggagcgatggctgcctcagaggatgaggaggaggaggaagaggctctggaggccatgcagtcccggctggccacactccgcagctaggggtgctaccggtggtggagcaatccctcaaatgcaagtagtgcctgacaaccctgtggggcactcgggagcggaggactaccgcggaggggcggagcaaaggaaaaggcaaggcagaattgggagaaacggagccaaggacgagaggaaacaaaaagggcaaaagacaa

SEQ ID NO: 372014 - DNA, 755 bp, Homo sapiens
atcccctagtgccgccgctccctactctgggggttgggactacctccttttccgcgggcgggcccgcccaggcggctgcccgtgacctgcctgggcgcggggaactgaaagccggaaggggcaagacgggttcagttcgtcatggggctgtttggaaagacccaggagaagccgcccaaagaactggtcaatgagtggtcattgaagataagaaaggaaatgagagttgttgacaggcaaataagggatatccaaagagaagaagaaaaagtgaaacgatctgtgaaagatgctgccaagaagggccagaaggatgtctgcatagttctggccaaggagatgatcaggtcaaggaaggctgtgagcaagctgtatgcatccaaagcacacatgaactcagtgctcatggggatgaagaaccagctcgcggtcttgcgagtggctggttccctgcagaagagcacagaagtgatgaaggccatgcaaagtcttgtgaagattccagagattcaggccaccatgagggagttgtccaaagaaatgatgaaggctgggatcatagaggagatgttagaggacacttttgaaagcatggacgatcaggaagaaatggtagtcctcacaacagaggtgtagtgcgagagacacataaaatggcagctcttgagaggagtgtgtgcacacccagcggggtagcagcccctagctgcggaggtggccagccgggactgcatgcctccagagcctctcatcat

SEQ ID NO: 372015 - DNA, 627 bp, Homo sapiens
atcccctagtgccgccgctccctactctgggggttgggactacctccttttccgcgggcgggcccgcccaggcggctgcccgtgacctgcctgggcgcggggaactgaaagccggaaggggcaagacgggttcagttcgtcatggggctgtttggaaagacccaggagaagccgcccaaagaactggtcaatgagtggtcattgaagataagaaaggaaatgagagttgttgacaggcaaataagggatatccaaagagaagaagaaaaagtgaaacgatctgtgaaagatgctgccaagaagggccagaaggatgtctgcatagttctggccaaggagatgatcaggtcaaggaaggctgtgagcaagctgtatgcatccaaagcacacatgaactcagtgctcatggggatgaagaaccagctcgagacggggttttaccatgttgcccaggatggtcttgaactgctgagctcaagtgatccactgcctcagtcttccaaagtgctgggattatagttgtgagccgctgcacctggcccagaactaatacaatttaacgttttgttgtatttgcctgcttctatattatatatatataaaaaaagcattattacaaaagttgaa

SEQ ID NO: 372016 - DNA, 484 bp, Homo sapiens
cgaagcgctatgtcaaaccgccagggctttaaacgacggcagtactataacgggcccgcccaggcggctgcccgtgacctgcctgggcgcggggaactgaaagccggaaggggcaagacgggttcagttcgtcatggggctgtttggaaagacccaggagaagccgcccaaagaactggctggagtgcagtggcgtgatctcagctcgctgcaacctccaccttccagccacctgccttggcctcccaaagtgctaagattacagcctctgcccggccgccaccccgtctgggaagtgaggagcgtatcagcccagccgcccattgtctgggaagtgagaagcgcctctgcccggccgccccgtctgggaggcgaggagcgcctctgcccggctgccccatctgggaggcgaggagcgcctcttcccggccaccccgcctgggaggcgaggagcacctctgcccggccgccccgtctgggaggc

SEQ ID NO: 372017 - DNA, 503 bp, Homo sapiens
cacatttttaaagactgttctagtatttttaacttatgtgttacagactttgatatgatttggctctgtgtctgcacctaaatctcatgttgaattgtgatcctgagtgttgaaggtggtcctggtgggaggtgattggatcatgggggtggtttctaatggtttagcaccatccccctagtggtgtctcatgatagaattctcatgatctggttgtttgaaagtgtatagcacctcccctatctctctctctctctctgtctcctgccggccagtggagatgtgcctgcttcccctttgccttccaccatggtgtaagtttactgaggcctccccagaagcagaagcctgtacagcccacagaactgtgagctgattaaacctcttttctttataaacaacccagtctcaggtatgtctttacagcagtgtgagaatggactaatattgacattgcttttaaaaatgctacagaaatatataaaataaaagtaattgttcac

SEQ ID NO: 372018 - DNA, 501 bp, Homo sapiens
  misc_feature (443)..(443): n is a, c, g, or t
agaattagttgcccaggtggtatgtggcgcgggaactgagcggaaggcagacgggtatccatggctggagacaaacgccagaacgtctgagtggtcatgaagataaaggaaatgagagttgtgacaggcaaataagggatatccaaagagaagaagaaaaagtgaaacgatctgtgaaagatgctgccaagaagggccagaaggatgtctgcatagttctggccaaggagatgatcaggtcaaggaaggctgtgagcaagctgtatgcatccaaagcacacatgaactcagtgctcatggggatgaagaaccagctcgcggtcttgcgagtggctggttccctgcagaagagcacagaagtgatgaaggccatgcaaagtcttgtgaagattccagagattcaggccaccatgagggagttgtccaaagaaatgatgaaggcngggatcataaggagatgttagaggacacgaagttacaggtactgagctgaattgtata

SEQ ID NO: 372019 - DNA, 3074 bp, Homo sapiens
ggggggccggaggaagagtctttaggagtcggctgtgggacgcgagagctcctggtgccatggctctcgaacaggtcaatgagtggtcattgaagataagaaaggaaatgagagttgttgacaggcaaataagggatatccaaagagaagaagaaaaagtgaaacgatctgtgaaagatgctgccaagaagggccagaaggatgtctgcatagttctggccaaggagatgatcaggtcaaggaaggctgtgagcaagctgtatgcatccaaagcacacatgaactcagtgctcatggggatgaagaaccagctcgcggtcttgcgagtggctggttccctgcagaagagcacagaagtgatgaaggccatgcaaagtcttgtgaagattccagagattcaggccaccatgagggagttgtccaaagaaatgatgaaggctgggatcatagaggagatgttagaggacacttttgaaagcatggacgatcaggaagaaatggaggaagaagcagaaatggaaattgacagaattctctttgaaattacagcaggggccttgggcaaagcacccagtaaagtgactgatgcccttccagagccagaacctccaggagcgatggctgcctcagaggatgaggaggaggaggaagaggctctggaggccatgcagtcccggctggccacactccgcagctaggggctgcctaccccgctgggtgtgcacacactcctctcaagagctgccattttatgtgtctcttgcactacacctctgttgtgaggactaccattttggagaaggttctgtttgtctcttttcattctctgcccaggttttgggatcgcaaagggattgttcttataaaagtggcataaataaatgcatcatttttaggagtatagacagatatatcttattgtggggaggggaaagaaatccatctgctcatgaagcacttctgaaaatataggtgattgcctgaatgtcgaagactctacttttgtctataaaacactatataaatgaattttaataaatttttgctttagcacttggccccattgtagattgccctgtgcagtaaactttcaaggtgtcggctgccccagattgcttcatttgctgggtgtggaaagagttgctatggccaggcatatgggatttggaagctcagcagaagtgacttctgctctgtggttgctgctccccggctttcacagacatggtatggcagccattcttttatctatttaaccaagaggatgctggggaattgtgctgcttgtcctgttggctggtggctgcattatgtcctggggtgtgcatgtgggtctatttagagcttctgtcccttccttcccattgcaagttgcacccagatgagacagctgtagtactaggtctctttcacctctcattgcctgtccctgcttcgagctggttgtcttgtgcgtgggacatgggccttcctatctgtgttttctcaaagtcaggagctgaccaggagcacactaaggtgtggtcatgcatcataaccaacattcactcatctgggacattcttaagatacatttataaatcatttcagcagtagtactttgtatgtgttgagagtttacagagctctttgacatacgcgatcttagtctttacaaataaggaaaacagctcagtttgggaagtatcagagatgggattcaaacccagatcctctggtccaagttgtatgtgcactgaactaatcaggcaggaaaaaagcccagccactgtctcacagattgttttttgtatattgtagcaaaatcctgaaacaatggggtccttccagtctcatcatacaaaatggcaatcttggctgggtgcggtggttcatgcctataatcccagtgctttacaaggctgaggcaggaggctctcttgagaataggagttcaagaccagcctgggcaacatagcaagatcctgtctctccaaaaaaaaaaaaaaaaaaaaaaaaaaatttcatttttgagtccagaggaccctcctattactcttgatttcatcttcagagtgtagttaaaaaattattttaaataattatttttttaaatcagttgtaggttcacagcaaaagtggacaaaaagaaatttctcatatatcccctgccctcacacatgcatagcctcccaccactatcagtatcccacaccagagtggtacatttgttacaatcaataaacctccattgacacatcattatcacccaaagtccatagtttacatgaagattcactctggtgttgtacattgtatgggcttagacaaatgtatgatgatatctacaattatagaatcatacagaatagtttcactgccctaaaacttctctatgcttcacctgttcatccctttcttccctaatcccctggcaaccactttaaaaaaaaaattaggttcagggggtacatgtgcaggtaaactcgtgacaagggggtttgttatacagattatttagtgacccaggtactaagcctagtacccaatagttacttttctggtcctgtcccttttcccaccctccaccctcaggtaggccccagtatgttattcctttgtgtccatgttatttcactcccacttgtgagaacatggaatatttggtttcctgttcctatgttagtttgttaaggataatggcctccagccccatccatgttcctgcaaaggacatgatctttctttggcaaccactttttactgtcgccatagttcttccttttctagaatgtcatattggaatcatatagtatgtagccttttcagactggcttctttcacttaataatatgcaattaaggttcctccatgtcatttcatggcttaatagtgcatttatttttagcactgaataatactccattgtctagatgaatagtttatccattcacctattgaaagacttcttggtggtttccaagttttggcaattatgaataaagctgttgtaaacatctttgtgcaggtttttctatgggcatgtttttaattcatttgaataaataccaagagcttcagtgctggatcataaa

SEQ ID NO: 372020 - DNA, 3312 bp, Homo sapiens
agattatttgttgtcttcagtgtttggccttggcattgccattcgtaaattgagataagattatggagaagcaaaaaagatgctggggaaatggttgctttattgtttaaactagtctctagtatatgtactactatactactctagtatattgtacacttagattgtttttaaatgataaattgctaagaacacgatattggtacactcttcagtagggtaatctacctgagaaagctgattgacactggaaaatggcagggttgatgcatgagattggtttttaaaactatgcttgccagagccgaacaggtcaatgagtggtcattgaagataagaaaggaaatgagagttgttgacaggcaaataagggatatccaaagagaagaagaaaaagtgaaacgatctgtgaaagatgctgccaagaagggccagaaggatgtctgcatagttctggccaaggagatgatcaggtcaaggaaggctgtgagcaagctgtatgcatccaaagcacacatgaactcagtgctcatggggatgaagaaccagctcgcggtcttgcgagtggctggttccctgcagaagagcacagaagtgatgaaggccatgcaaagtcttgtgaagattccagagattcaggccaccatgagggagttgtccaaagaaatgatgaaggctgggatcatagaggagatgttagaggacacttttgaaagcatggacgatcaggaagaaatggaggaagaagcagaaatggaaattgacagaattctctttgaaattacagcaggggccttgggcaaagcacccagtaaagtgactgatgcccttccagagccagaacctccaggagcgatggctgcctcagaggatgaggaggaggaggaagaggctctggaggccatgcagtcccggctggccacactccgcagctaggggctgcctaccccgctgggtgtgcacacactcctctcaagagctgccattttatgtgtctcttgcactacacctctgttgtgaggactaccattttggagaaggttctgtttgtctcttttcattctctgcccaggttttgggatcgcaaagggattgttcttataaaagtggcataaataaatgcatcatttttaggagtatagacagatatatcttattgtggggaggggaaagaaatccatctgctcatgaagcacttctgaaaatataggtgattgcctgaatgtcgaagactctacttttgtctataaaacactatataaatgaattttaataaatttttgctttagcacttggccccattgtagattgccctgtgcagtaaactttcaaggtgtcggctgccccagattgcttcatttgctgggtgtggaaagagttgctatggccaggcatatgggatttggaagctcagcagaagtgacttctgctctgtggttgctgctccccggctttcacagacatggtatggcagccattcttttatctatttaaccaagaggatgctggggaattgtgctgcttgtcctgttggctggtggctgcattatgtcctggggtgtgcatgtgggtctatttagagcttctgtcccttccttcccattgcaagttgcacccagatgagacagctgtagtactaggtctctttcacctctcattgcctgtccctgcttcgagctggttgtcttgtgcgtgggacatgggccttcctatctgtgttttctcaaagtcaggagctgaccaggagcacactaaggtgtggtcatgcatcataaccaacattcactcatctgggacattcttaagatacatttataaatcatttcagcagtagtactttgtatgtgttgagagtttacagagctctttgacatacgcgatcttagtctttacaaataaggaaaacagctcagtttgggaagtatcagagatgggattcaaacccagatcctctggtccaagttgtatgtgcactgaactaatcaggcaggaaaaaagcccagccactgtctcacagattgttttttgtatattgtagcaaaatcctgaaacaatggggtccttccagtctcatcatacaaaatggcaatcttggctgggtgcggtggttcatgcctataatcccagtgctttacaaggctgaggcaggaggctctcttgagaataggagttcaagaccagcctgggcaacatagcaagatcctgtctctccaaaaaaaaaaaaaaaaaaaaaaaaaaatttcatttttgagtccagaggaccctcctattactcttgatttcatcttcagagtgtagttaaaaaattattttaaataattatttttttaaatcagttgtaggttcacagcaaaagtggacaaaaagaaatttctcatatatcccctgccctcacacatgcatagcctcccaccactatcagtatcccacaccagagtggtacatttgttacaatcaataaacctccattgacacatcattatcacccaaagtccatagtttacatgaagattcactctggtgttgtacattgtatgggcttagacaaatgtatgatgatatctacaattatagaatcatacagaatagtttcactgccctaaaacttctctatgcttcacctgttcatccctttcttccctaatcccctggcaaccactttaaaaaaaaaattaggttcagggggtacatgtgcaggtaaactcgtgacaagggggtttgttatacagattatttagtgacccaggtactaagcctagtacccaatagttacttttctggtcctgtcccttttcccaccctccaccctcaggtaggccccagtatgttattcctttgtgtccatgttatttcactcccacttgtgagaacatggaatatttggtttcctgttcctatgttagtttgttaaggataatggcctccagccccatccatgttcctgcaaaggacatgatctttctttggcaaccactttttactgtcgccatagttcttccttttctagaatgtcatattggaatcatatagtatgtagccttttcagactggcttctttcacttaataatatgcaattaaggttcctccatgtcatttcatggcttaatagtgcatttatttttagcactgaataatactccattgtctagatgaatagtttatccattcacctattgaaagacttcttggtggtttccaagttttggcaattatgaataaagctgttgtaaacatctttgtgcaggtttttctatgggcatgtttttaattcatttgaataaataccaagagcttcagtgctggatcataaa

SEQ ID NO: 372021 - DNA, 3117 bp, Homo sapiens
cgaagcgctatgtcaaaccgccagggctttaaacgacggcagtactataacgggcccgcccaggcggctgcccgtgacctgcctgggcgcggggaactgaaagccggaaggggcaagacgggttcagttcgtcatggggctgtttggaaagacccaggagaagccgcccaaagaactgatatccaaagagaagaagaaaaagtgaaacgatctgtgaaagatgctgccaagaagggccagaaggatgtctgcatagttctggccaaggagatgatcaggtcaaggaaggctgtgagcaagctgtatgcatccaaagcacacatgaactcagtgctcatggggatgaagaaccagctcgcggtcttgcgagtggctggttccctgcagaagagcacagaagtgatgaaggccatgcaaagtcttgtgaagattccagagattcaggccaccatgagggagttgtccaaagaaatgatgaaggctgggatcatagaggagatgttagaggacacttttgaaagcatggacgatcaggaagaaatggaggaagaagcagaaatggaaattgacagaattctctttgaaattacagcaggggccttgggcaaagcacccagtaaagtgactgatgcccttccagagccagaacctccaggagcgatggctgcctcagaggatgaggaggaggaggaagaggctctggaggccatgcagtcccggctggccacactccgcagctaggggctgcctaccccgctgggtgtgcacacactcctctcaagagctgccattttatgtgtctcttgcactacacctctgttgtgaggactaccattttggagaaggttctgtttgtctcttttcattctctgcccaggttttgggatcgcaaagggattgttcttataaaagtggcataaataaatgcatcatttttaggagtatagacagatatatcttattgtggggaggggaaagaaatccatctgctcatgaagcacttctgaaaatataggtgattgcctgaatgtcgaagactctacttttgtctataaaacactatataaatgaattttaataaatttttgctttagcacttggccccattgtagattgccctgtgcagtaaactttcaaggtgtcggctgccccagattgcttcatttgctgggtgtggaaagagttgctatggccaggcatatgggatttggaagctcagcagaagtgacttctgctctgtggttgctgctccccggctttcacagacatggtatggcagccattcttttatctatttaaccaagaggatgctggggaattgtgctgcttgtcctgttggctggtggctgcattatgtcctggggtgtgcatgtgggtctatttagagcttctgtcccttccttcccattgcaagttgcacccagatgagacagctgtagtactaggtctctttcacctctcattgcctgtccctgcttcgagctggttgtcttgtgcgtgggacatgggccttcctatctgtgttttctcaaagtcaggagctgaccaggagcacactaaggtgtggtcatgcatcataaccaacattcactcatctgggacattcttaagatacatttataaatcatttcagcagtagtactttgtatgtgttgagagtttacagagctctttgacatacgcgatcttagtctttacaaataaggaaaacagctcagtttgggaagtatcagagatgggattcaaacccagatcctctggtccaagttgtatgtgcactgaactaatcaggcaggaaaaaagcccagccactgtctcacagattgttttttgtatattgtagcaaaatcctgaaacaatggggtccttccagtctcatcatacaaaatggcaatcttggctgggtgcggtggttcatgcctataatcccagtgctttacaaggctgaggcaggaggctctcttgagaataggagttcaagaccagcctgggcaacatagcaagatcctgtctctccaaaaaaaaaaaaaaaaaaaaaaaaaaatttcatttttgagtccagaggaccctcctattactcttgatttcatcttcagagtgtagttaaaaaattattttaaataattatttttttaaatcagttgtaggttcacagcaaaagtggacaaaaagaaatttctcatatatcccctgccctcacacatgcatagcctcccaccactatcagtatcccacaccagagtggtacatttgttacaatcaataaacctccattgacacatcattatcacccaaagtccatagtttacatgaagattcactctggtgttgtacattgtatgggcttagacaaatgtatgatgatatctacaattatagaatcatacagaatagtttcactgccctaaaacttctctatgcttcacctgttcatccctttcttccctaatcccctggcaaccactttaaaaaaaaaattaggttcagggggtacatgtgcaggtaaactcgtgacaagggggtttgttatacagattatttagtgacccaggtactaagcctagtacccaatagttacttttctggtcctgtcccttttcccaccctccaccctcaggtaggccccagtatgttattcctttgtgtccatgttatttcactcccacttgtgagaacatggaatatttggtttcctgttcctatgttagtttgttaaggataatggcctccagccccatccatgttcctgcaaaggacatgatctttctttggcaaccactttttactgtcgccatagttcttccttttctagaatgtcatattggaatcatatagtatgtagccttttcagactggcttctttcacttaataatatgcaattaaggttcctccatgtcatttcatggcttaatagtgcatttatttttagcactgaataatactccattgtctagatgaatagtttatccattcacctattgaaagacttcttggtggtttccaagttttggcaattatgaataaagctgttgtaaacatctttgtgcaggtttttctatgggcatgtttttaattcatttgaataaataccaagagcttcagtgctggatcataaa

SEQ ID NO: 372022 - DNA, 2937 bp, Homo sapiens
cgaagcgctatgtcaaaccgccagggctttaaacgacggcagtactataacgggcccgcccaggcggctgcccgtgacctgcctgggcgcggggaactgaaagccggaaggggcaagacgggttcagttcgtcatggggctgtttggaaagacccaggagaagccgcccaaagaactgcggtcttgcgagtggctggttccctgcagaagagcacagaagtgatgaaggccatgcaaagtcttgtgaagattccagagattcaggccaccatgagggagttgtccaaagaaatgatgaaggctgggatcatagaggagatgttagaggacacttttgaaagcatggacgatcaggaagaaatggaggaagaagcagaaatggaaattgacagaattctctttgaaattacagcaggggccttgggcaaagcacccagtaaagtgactgatgcccttccagagccagaacctccaggagcgatggctgcctcagaggatgaggaggaggaggaagaggctctggaggccatgcagtcccggctggccacactccgcagctaggggctgcctaccccgctgggtgtgcacacactcctctcaagagctgccattttatgtgtctcttgcactacacctctgttgtgaggactaccattttggagaaggttctgtttgtctcttttcattctctgcccaggttttgggatcgcaaagggattgttcttataaaagtggcataaataaatgcatcatttttaggagtatagacagatatatcttattgtggggaggggaaagaaatccatctgctcatgaagcacttctgaaaatataggtgattgcctgaatgtcgaagactctacttttgtctataaaacactatataaatgaattttaataaatttttgctttagcacttggccccattgtagattgccctgtgcagtaaactttcaaggtgtcggctgccccagattgcttcatttgctgggtgtggaaagagttgctatggccaggcatatgggatttggaagctcagcagaagtgacttctgctctgtggttgctgctccccggctttcacagacatggtatggcagccattcttttatctatttaaccaagaggatgctggggaattgtgctgcttgtcctgttggctggtggctgcattatgtcctggggtgtgcatgtgggtctatttagagcttctgtcccttccttcccattgcaagttgcacccagatgagacagctgtagtactaggtctctttcacctctcattgcctgtccctgcttcgagctggttgtcttgtgcgtgggacatgggccttcctatctgtgttttctcaaagtcaggagctgaccaggagcacactaaggtgtggtcatgcatcataaccaacattcactcatctgggacattcttaagatacatttataaatcatttcagcagtagtactttgtatgtgttgagagtttacagagctctttgacatacgcgatcttagtctttacaaataaggaaaacagctcagtttgggaagtatcagagatgggattcaaacccagatcctctggtccaagttgtatgtgcactgaactaatcaggcaggaaaaaagcccagccactgtctcacagattgttttttgtatattgtagcaaaatcctgaaacaatggggtccttccagtctcatcatacaaaatggcaatcttggctgggtgcggtggttcatgcctataatcccagtgctttacaaggctgaggcaggaggctctcttgagaataggagttcaagaccagcctgggcaacatagcaagatcctgtctctccaaaaaaaaaaaaaaaaaaaaaaaaaaatttcatttttgagtccagaggaccctcctattactcttgatttcatcttcagagtgtagttaaaaaattattttaaataattatttttttaaatcagttgtaggttcacagcaaaagtggacaaaaagaaatttctcatatatcccctgccctcacacatgcatagcctcccaccactatcagtatcccacaccagagtggtacatttgttacaatcaataaacctccattgacacatcattatcacccaaagtccatagtttacatgaagattcactctggtgttgtacattgtatgggcttagacaaatgtatgatgatatctacaattatagaatcatacagaatagtttcactgccctaaaacttctctatgcttcacctgttcatccctttcttccctaatcccctggcaaccactttaaaaaaaaaattaggttcagggggtacatgtgcaggtaaactcgtgacaagggggtttgttatacagattatttagtgacccaggtactaagcctagtacccaatagttacttttctggtcctgtcccttttcccaccctccaccctcaggtaggccccagtatgttattcctttgtgtccatgttatttcactcccacttgtgagaacatggaatatttggtttcctgttcctatgttagtttgttaaggataatggcctccagccccatccatgttcctgcaaaggacatgatctttctttggcaaccactttttactgtcgccatagttcttccttttctagaatgtcatattggaatcatatagtatgtagccttttcagactggcttctttcacttaataatatgcaattaaggttcctccatgtcatttcatggcttaatagtgcatttatttttagcactgaataatactccattgtctagatgaatagtttatccattcacctattgaaagacttcttggtggtttccaagttttggcaattatgaataaagctgttgtaaacatctttgtgcaggtttttctatgggcatgtttttaattcatttgaataaataccaagagcttcagtgctggatcataaa

SEQ ID NO: 372023 - DNA, 3074 bp, Homo sapiens
cgaagcgctatgtcaaaccgccagggctttaaacgacggcagtactataacgggcccgcccaggcggctgcccgtgacctgcctgggcgcggggaactgaaagccggaaggggcaagacgggttcagttcgtcatggggctgtttggaaagacccaggagaagccgcccaaagaactgtggagatgtgcctgcttcccctttgccttccaccatggtgtaagtttactgaggcctccccagaagcagaagcctgtacagcccacagaactgtgagctgattaaacctcttttctttataaacaacccagtctcagcggtcttgcgagtggctggttccctgcagaagagcacagaagtgatgaaggccatgcaaagtcttgtgaagattccagagattcaggccaccatgagggagttgtccaaagaaatgatgaaggctgggatcatagaggagatgttagaggacacttttgaaagcatggacgatcaggaagaaatggaggaagaagcagaaatggaaattgacagaattctctttgaaattacagcaggggccttgggcaaagcacccagtaaagtgactgatgcccttccagagccagaacctccaggagcgatggctgcctcagaggatgaggaggaggaggaagaggctctggaggccatgcagtcccggctggccacactccgcagctaggggctgcctaccccgctgggtgtgcacacactcctctcaagagctgccattttatgtgtctcttgcactacacctctgttgtgaggactaccattttggagaaggttctgtttgtctcttttcattctctgcccaggttttgggatcgcaaagggattgttcttataaaagtggcataaataaatgcatcatttttaggagtatagacagatatatcttattgtggggaggggaaagaaatccatctgctcatgaagcacttctgaaaatataggtgattgcctgaatgtcgaagactctacttttgtctataaaacactatataaatgaattttaataaatttttgctttagcacttggccccattgtagattgccctgtgcagtaaactttcaaggtgtcggctgccccagattgcttcatttgctgggtgtggaaagagttgctatggccaggcatatgggatttggaagctcagcagaagtgacttctgctctgtggttgctgctccccggctttcacagacatggtatggcagccattcttttatctatttaaccaagaggatgctggggaattgtgctgcttgtcctgttggctggtggctgcattatgtcctggggtgtgcatgtgggtctatttagagcttctgtcccttccttcccattgcaagttgcacccagatgagacagctgtagtactaggtctctttcacctctcattgcctgtccctgcttcgagctggttgtcttgtgcgtgggacatgggccttcctatctgtgttttctcaaagtcaggagctgaccaggagcacactaaggtgtggtcatgcatcataaccaacattcactcatctgggacattcttaagatacatttataaatcatttcagcagtagtactttgtatgtgttgagagtttacagagctctttgacatacgcgatcttagtctttacaaataaggaaaacagctcagtttgggaagtatcagagatgggattcaaacccagatcctctggtccaagttgtatgtgcactgaactaatcaggcaggaaaaaagcccagccactgtctcacagattgttttttgtatattgtagcaaaatcctgaaacaatggggtccttccagtctcatcatacaaaatggcaatcttggctgggtgcggtggttcatgcctataatcccagtgctttacaaggctgaggcaggaggctctcttgagaataggagttcaagaccagcctgggcaacatagcaagatcctgtctctccaaaaaaaaaaaaaaaaaaaaaaaaaaatttcatttttgagtccagaggaccctcctattactcttgatttcatcttcagagtgtagttaaaaaattattttaaataattatttttttaaatcagttgtaggttcacagcaaaagtggacaaaaagaaatttctcatatatcccctgccctcacacatgcatagcctcccaccactatcagtatcccacaccagagtggtacatttgttacaatcaataaacctccattgacacatcattatcacccaaagtccatagtttacatgaagattcactctggtgttgtacattgtatgggcttagacaaatgtatgatgatatctacaattatagaatcatacagaatagtttcactgccctaaaacttctctatgcttcacctgttcatccctttcttccctaatcccctggcaaccactttaaaaaaaaaattaggttcagggggtacatgtgcaggtaaactcgtgacaagggggtttgttatacagattatttagtgacccaggtactaagcctagtacccaatagttacttttctggtcctgtcccttttcccaccctccaccctcaggtaggccccagtatgttattcctttgtgtccatgttatttcactcccacttgtgagaacatggaatatttggtttcctgttcctatgttagtttgttaaggataatggcctccagccccatccatgttcctgcaaaggacatgatctttctttggcaaccactttttactgtcgccatagttcttccttttctagaatgtcatattggaatcatatagtatgtagccttttcagactggcttctttcacttaataatatgcaattaaggttcctccatgtcatttcatggcttaatagtgcatttatttttagcactgaataatactccattgtctagatgaatagtttatccattcacctattgaaagacttcttggtggtttccaagttttggcaattatgaataaagctgttgtaaacatctttgtgcaggtttttctatgggcatgtttttaattcatttgaataaataccaagagcttcagtgctggatcataaa

SEQ ID NO: 372024 - DNA, 2695 bp, Homo sapiens
taggctaggtagaggcggggtcaatcggacgagggagttgtccaaagaaatgatgaaggctgggatcatagaggagatgttagaggacacttttgaaagcatggacgatcaggaagaaatggaggaagaagcagaaatggaaattgacagaattctctttgaaattacagcaggggccttgggcaaagcacccagtaaagtgactgatgcccttccagagccagaacctccaggagcgatggctgcctcagaggatgaggaggaggaggaagaggctctggaggccatgcagtcccggctggccacactccgcagctaggggctgcctaccccgctgggtgtgcacacactcctctcaagagctgccattttatgtgtctcttgcactacacctctgttgtgaggactaccattttggagaaggttctgtttgtctcttttcattctctgcccaggttttgggatcgcaaagggattgttcttataaaagtggcataaataaatgcatcatttttaggagtatagacagatatatcttattgtggggaggggaaagaaatccatctgctcatgaagcacttctgaaaatataggtgattgcctgaatgtcgaagactctacttttgtctataaaacactatataaatgaattttaataaatttttgctttagcacttggccccattgtagattgccctgtgcagtaaactttcaaggtgtcggctgccccagattgcttcatttgctgggtgtggaaagagttgctatggccaggcatatgggatttggaagctcagcagaagtgacttctgctctgtggttgctgctccccggctttcacagacatggtatggcagccattcttttatctatttaaccaagaggatgctggggaattgtgctgcttgtcctgttggctggtggctgcattatgtcctggggtgtgcatgtgggtctatttagagcttctgtcccttccttcccattgcaagttgcacccagatgagacagctgtagtactaggtctctttcacctctcattgcctgtccctgcttcgagctggttgtcttgtgcgtgggacatgggccttcctatctgtgttttctcaaagtcaggagctgaccaggagcacactaaggtgtggtcatgcatcataaccaacattcactcatctgggacattcttaagatacatttataaatcatttcagcagtagtactttgtatgtgttgagagtttacagagctctttgacatacgcgatcttagtctttacaaataaggaaaacagctcagtttgggaagtatcagagatgggattcaaacccagatcctctggtccaagttgtatgtgcactgaactaatcaggcaggaaaaaagcccagccactgtctcacagattgttttttgtatattgtagcaaaatcctgaaacaatggggtccttccagtctcatcatacaaaatggcaatcttggctgggtgcggtggttcatgcctataatcccagtgctttacaaggctgaggcaggaggctctcttgagaataggagttcaagaccagcctgggcaacatagcaagatcctgtctctccaaaaaaaaaaaaaaaaaaaaaaaaaaatttcatttttgagtccagaggaccctcctattactcttgatttcatcttcagagtgtagttaaaaaattattttaaataattatttttttaaatcagttgtaggttcacagcaaaagtggacaaaaagaaatttctcatatatcccctgccctcacacatgcatagcctcccaccactatcagtatcccacaccagagtggtacatttgttacaatcaataaacctccattgacacatcattatcacccaaagtccatagtttacatgaagattcactctggtgttgtacattgtatgggcttagacaaatgtatgatgatatctacaattatagaatcatacagaatagtttcactgccctaaaacttctctatgcttcacctgttcatccctttcttccctaatcccctggcaaccactttaaaaaaaaaattaggttcagggggtacatgtgcaggtaaactcgtgacaagggggtttgttatacagattatttagtgacccaggtactaagcctagtacccaatagttacttttctggtcctgtcccttttcccaccctccaccctcaggtaggccccagtatgttattcctttgtgtccatgttatttcactcccacttgtgagaacatggaatatttggtttcctgttcctatgttagtttgttaaggataatggcctccagccccatccatgttcctgcaaaggacatgatctttctttggcaaccactttttactgtcgccatagttcttccttttctagaatgtcatattggaatcatatagtatgtagccttttcagactggcttctttcacttaataatatgcaattaaggttcctccatgtcatttcatggcttaatagtgcatttatttttagcactgaataatactccattgtctagatgaatagtttatccattcacctattgaaagacttcttggtggtttccaagttttggcaattatgaataaagctgttgtaaacatctttgtgcaggtttttctatgggcatgtttttaattcatttgaataaataccaagagcttcagtgctggatcataaa

SEQ ID NO: 372025 - DNA, 1364 bp, Homo sapiens
cgaagcgctatgtcaaaccgccagggctttaaacgacggcagtactataacgggcccgcccaggcggctgcccgtgacctgcctgggcgcggggaactgaaagccggaaggggcaagacgggttcagttcgtcatggggctgtttggaaagacccaggagaagccgcccaaagaactggtcaatgagtggtcattgaagataagaaaggaaatgagagttgttgacaggcaaataagggatatccaaagagaagaagaaaaagtgaaacgatctgtgaaagatgctgccaagaagggccagaaggatgtctgcatagttctggccaaggagatgatcaggtcaaggaaggctgtgagcaagctgtatgcatccaaagcacacatgaactcagtgctcatggggatgaagaaccagctcgcggtcttgcgagtggctggttccctgcagaagagcacagaagtgatgaaggccatgcaaagtcttgtgaagattccagagattcaggccaccatgagggagttgtccaaagaaatgatgaaggctgggatcatagaggagatgttagaggacacttttgaaagcatggacgatcaggaagaaatggaggaagaagcagaaatggaaattgacagaattctctttgaaattacagcaggggccttgggcaaagcacccagtaaagtgactgatgcccttccagagccagaacctccaggagcgatggctgcctcagaggatgaggaggaggaggaagaggctctggaggccatgcagtcccggctggccacactccgcagctaggggctgcctaccccgctgggtgtgcacacactcctctcaagagctgccattttatgtgtctcttgcactacacctctgttgtgaggactaccattttggagaaggttctgtttgtctcttttcattctctgcccaggttttgggatcgcaaagggattgttcttataaaagtggcataaataaatgcatcatttttaggagtaaaaaaaaaaaaaaaaaaaaaaaaaaaaaaaaaaaaaaaaaaaaaaaaaaaaaaaaaaaatgaaaagaaaacaaacaaaaaaacagcgaggggggggcaccccaataagacacccccgagcgggcgaccataacagaggcgagcacacacataatgcacacaaggggcccccacagagagaggcggcgattatataacacacgggcggacggcggcgggaaaacaaacacgcgaaggggggggaaacgacggtgcaccggaggcgacctgtggagagacgcgaccacgaccaccagggggggtgcgacaacatgagggccacgccgcagccgagagagagacgacccgcgcgggcgcacc

SEQ ID NO: 372026 - DNA, 1014 bp, Homo sapiens
atcccctagtgccgccgctccctactctgggggttgggactacctccttttccgcgggcgggcccgcccaggcggctgcccgtgacctgcctgggcgcggggaactgaaagccggaaggggcaagacgggttcagttcgtcatggggctgtttggaaagacccaggagaagccgcccaaagaactggtcaatgagtggtcattgaagataagaaaggaaatgagagttgttgacaggcaaataagggatatccaaagagaagaagaaaaagtgaaacgatctgtgaaagatgctgccaagaagggccagaaggatgtctgcatagttctggccaaggagatgatcaggtcaaggaaggctgtgagcaagctgtatgcatccaaagcacacatgaactcagtgctcatggggatgaagaaccagctcgcggtcttgcgagtggctggttccctgcagaagagcacagaagtgatgaaggccatgcaaagtcttgtgaagattccagagattcaggccaccatgagggagttgtccaaagaaatgatgaaggctgggatcatagaggagatgttagaggacacttttgaaagcatggacgatcaggaagaaatggaggaagaagcagaaatggaaattgacagaattctctttgaaattacagcaggggccttgggcaaagcacccagtaaagtgactgatgcccttccagagccagaacctccaggagcgatggctgcctcagaggatgaggaggaggaggaagaggctctggaggccatgcagtcccggctggcaagtcgagtaggggtgctaccgtgggtgtgaaaatctctcagagtgcatttatgtggttttgataactctttggagatacattggaaagtcgtgtctttaattctggcaggtggggtgaagggtgttataatgggtataatgattttgggaaaaaaaaggggttgtgggggaaagtgaagaggtaggttgacatttgaaggagggcatgggaagaagtgg

SEQ ID NO: 372027 - DNA, 610 bp, Homo sapiens
  misc_feature (552)..(552): n is a, c, g, or t
atcccctagtgccgccgctccctactctgggggttgggactacctccttttccgcgggcgggcccgcccaggcggctgcccgtgacctgcctgggcgcggggaactgaaagccggaaggggcaagacgggttcagttcgtcatggggctgtttggaaagacccaggagaagccgcccaaagaactggtcaatgagtggtcattgaagataagaaaggaaatgagagttgttgacaggcaaataagggatatccaaagagaagaagaaaaagtgaaacgatctgtgaaagatgctgccaagaagggccagaaggatgtctgcatagttctggccaaggagatgatcaggtcaaggaaggctgtgagcaagctgtatgcatccaaagcacacatgaactcagtgctcatggggatgaagaaccagctcgcggtcttgcgagtggctggttccctgcagaagagcacagaagtgatgaaggccatgcaaagtcttgtgaagattccagagattcaggccaccatgagggagttgtccaaagaaatgatgaaggcngggatcataaggagatgttagaggacacgaagttacaggtactgagctgaattgtata

SEQ ID NO: 372028 - DNA, 193 bp, Homo sapiens
tagggcaccggcaacagttttccgtttgtgcctactccacctgctgtctttgttgggtcagcgaacatcgcctccctctaccgctcaatcagcaaaagggaccgcccttgaggacctcacccgccgctcactcccctcccaacttcgcgggcatcgcctccggtcgcctcttccgaaggcctaacgagcatgt

SEQ ID NO: 372029 - DNA, 266 bp, Homo sapiens
aaatcttggctcacttgtaacctccacctccaggctcaagtgattctcctgcttcagggaggacgcttgagcccaggaggttgaggttgcagtgagctatgatcaaactactgccctcttggctgggtgacagagcaagatcttttctctaaaaataaataagaatttaaaaagcaagcaaaatatataaatagacattttactaaagaaggaacatccacttataaaaaagggtaaaaatttaaaagactatccatattctctgc

SEQ ID NO: 372030 - DNA, 288 bp, Homo sapiens
gaggtggagtttcgctctttgttgtccaggctggagcgcaatggtgcgatctggctcaccgcaacctctgtctcccaggggaggacgcttgagcccaggaggttgaggttgcagtgagctatgatcaaactactgccctcttggctgggtgacagagcaagatcttttctctaaaaataaataagaatttaaaaagcaagcaaaatatataaatagacattttactaaagaaggaacatccacttataaaaaagggtaaaaatttaaaagactatccatattctctgc

SEQ ID NO: 372031 - DNA, 2000 bp, Homo sapiens
cggcggcgcggtcggagggggccggcgcgcagagccagacgccgccgcttgttttggttggggctctcggcaactctccgaggaggaggaggaggagggaggaggggagaagtaactgcagcggcagcgccctcccgaggaacaggcgtcttccccgaacccttcccaaacctcccccatcccctctcgcccttgtcccctcccctcctccccagccgcctggagcgaggggcagggatgagtctgtccctccggccggtccccagctgcagtggctgcccggtatcgtttcgcatggaaaagccactttctccacccgccgagatgggcccggatgggggctgcagaggacgcgcccgcgggcggcggcagcagcagcagcagcagcagcagcaacagcaacagccgcagcgccgcggtctctgcgactgagctggtatttgggcggctggtggcggctgggacggttggggggtgggaggaggcgaaggaggagggagaaccccgtgcaacgttgggacttggcaacccgcctccccctgcccaaggatatttaatttgcctcgggaatcgctgcttccagaggggaactcaggagggaaggcgcgcgcgcgcgcgcgctcctggaggggcaccgcagggacccccgactgtcgcctccctgtgccggactccagccggggcgacgagagatgcatcttcgctccttcctggtggcggcggcggctgagaggagacttggctctcggaggatcggggctgccctcaccccggacgcactgcctccccgccggcgtgaagcgcccgaaaactccggtcgggctctctcctgggctcagcagctgcgtcctccttcagctgcccctccccggcgcggggggcggcgtggatttcagagtcggggtttctgctgcctccagccctgtttgcatgtgccgggccgcggcgaggagcctccgccccccacccggttgtttttcggagcctccctctgctcagcgttggtggtggcggtggcagcatggcgagccctccggagagcgatggcttctcggacgtgcgcaaggtgggctacctgcgcaaacccaagagcatgcacaaacgcttcttcgtactgcgcgcggccagcgaggctgggggcccggcgcgcctcgagtactacgagaacgagaagaagtggcggcacaagtcgagcgcccccaaacgctcgatcccccttgagagctgcttcaacatcaacaagcgggctgactccaagaacaagcacctggtggctctctacacccgggacgagcactttgccatcgcggcggacagcgaggccgagcaagacagctggtaccaggctctcctacagctgcacaaccgtgctaagggccaccacgacggagctgcggccctcggggcgggaggtggtgggggcagctgcagcggcagctccggccttggtgaggctggggaggacttgagctacggtgacgtgcccccaggacccgcattcaaagaggtctggcaagtgatcctgaagcccaagggcctgggtcagacaaagaacctgattggtatctaccgcctttgcctgaccagcaagaccatcagcttcgtgaagctgaactcggaggcagcggccgtggtgctgcagctgatgaacatcaggcgctgtggccactcggaaaacttcttcttcatcgaggtgggccgttctgccgtgacggggcccggggagttctggatgcaggtggatgactctgtggtggcccagaacatgcacgagaccatcctggaggccatgcgggccatgagtgatgagttccgccctcgcagcaagagccagtcctcgtccaactgctctaaccccatcagcgtccccctggcaaatgcacacacctcatgctagcctcacgaaactggaataagccttcgaaaagaaattgtccttgaagcttgtatctgatatcagcactgtattgtagaacttgttgctgattttgaccttgtat

SEQ ID NO: 372032 - DNA, 5862 bp, Homo sapiens
  misc_feature (5805)..(5805): n is a, c, g, or t
cggcggcgcggtcggagggggccggcgcgcagagccagacgccgccgcttgttttggttggggctctcggcaactctccgaggaggaggaggaggagggaggaggggagaagtaactgcagcggcagcgccctcccgaggaacaggcgtcttccccgaacccttcccaaacctcccccatcccctctcgcccttgtcccctcccctcctccccagccgcctggagcgaggggcagggatgagtctgtccctccggccggtccccagctgcagtggctgcccggtatcgtttcgcatggaaaagccactttctccacccgccgagatgggcccggatgggggctgcagaggacgcgcccgcgggcggcggcagcagcagcagcagcagcagcagcaacagcaacagccgcagcgccgcggtctctgcgactgagctggtatttgggcggctggtggcggctgggacggttggggggtgggaggaggcgaaggaggagggagaaccccgtgcaacgttgggacttggcaacccgcctccccctgcccaaggatatttaatttgcctcgggaatcgctgcttccagaggggaactcaggagggaaggcgcgcgcgcgcgcgcgctcctggaggggcaccgcagggacccccgactgtcgcctccctgtgccggactccagccggggcgacgagagatgcatcttcgctccttcctggtggcggcggcggctgagaggagacttggctctcggaggatcggggctgccctcaccccggacgcactgcctccccgccggcgtgaagcgcccgaaaactccggtcgggctctctcctgggctcagcagctgcgtcctccttcagctgcccctccccggcgcggggggcggcgtggatttcagagtcggggtttctgctgcctccagccctgtttgcatgtgccgggccgcggcgaggagcctccgccccccacccggttgtttttcggagcctccctctgctcagcgttggtggtggcggtggcagcatggcgagccctccggagagcgatggcttctcggacgtgcgcaaggtgggctacctgcgcaaacccaagagcatgcacaaacgcttcttcgtactgcgcgcggccagcgaggctgggggcccggcgcgcctcgagtactacgagaacgagaagaagtggcggcacaagtcgagcgcccccaaacgctcgatcccccttgagagctgcttcaacatcaacaagcgggctgactccaagaacaagcacctggtggctctctacacccgggacgagcactttgccatcgcggcggacagcgaggccgagcaagacagctggtaccaggctctcctacagctgcacaaccgtgctaagggccaccacgacggagctgcggccctcggggcgggaggtggtgggggcagctgcagcggcagctccggccttggtgaggctggggaggacttgagctacggtgacgtgcccccaggacccgcattcaaagaggtctggcaagtgatcctgaagcccaagggcctgggtcagacaaagaacctgattggtatctaccgcctttgcctgaccagcaagaccatcagcttcgtgaagctgaactcggaggcagcggccgtggtgctgcagctgatgaacatcaggcgctgtggccactcggaaaacttcttcttcatcgaggtgggccgttctgccgtgacggggcccggggagttctggatgcaggtggatgactctgtggtggcccagaacatgcacgagaccatcctggaggccatgcgggccatgagtgatgagttccgccctcgcagcaagagccagtcctcgtccaactgctctaaccccatcagcgtccccctgcgccggcaccatctcaacaatcccccgcccagccaggtggggctgacccgccgatcacgcactgagagcatcaccgccacctccccggccagcatggtgggcgggaagccaggctccttccgtgtccgcgcctccagtgacggcgaaggcaccatgtcccgcccagcctcggtggacggcagccctgtgagtcccagcaccaacagaacccacgcccaccggcatcggggcagcgcccggctgcaccccccgctcaaccacagccgctccatccccatgccggcttcccgctgctcgccttcggccaccagcccggtcagtctgtcgtccagtagcaccagtggccatggctccacctcggattgtctcttcccacggcgatctagtgcttcggtgtctggttcccccagcgatggcggtttcatctcctcggatgagtatggctccagtccctgcgatttccggagttccttccgcagtgtcactccggattccctgggccacaccccaccagcccgcggtgaggaggagctaagcaactatatctgcatgggtggcaaggggccctccaccctgaccgcccccaacggtcactacattttgtctcggggtggcaatggccaccgctgcaccccaggaacaggcttgggcacgagtccagccttggctggggatgaagcagccagtgctgcagatctggataatcggttccgaaagagaactcactcggcaggcacatcccctaccattacccaccagaagaccccgtcccagtcctcagtggcttccattgaggagtacacagagatgatgcctgcctacccaccaggaggtggcagtggaggccgactgccgggacacaggcactccgccttcgtgcccacccgctcctacccagaggagggtctggaaatgcaccccttggagcgtcggggggggcaccaccgcccagacagctccaccctccacacggatgatggctacatgcccatgtccccaggggtggccccagtgcccagtggccgaaagggcagtggagactatatgcccatgagccccaagagcgtatctgccccacagcagatcatcaatcccatcagacgccatccccagagagtggaccccaatggctacatgatgatgtcccccagcggtggctgctctcctgacattggaggtggccccagcagcagcagcagcagcagcaacgccgtcccttccgggaccagctatggaaagctgtggacaaacggggtagggggccaccactctcatgtcttgcctcaccccaaacccccagtggagagcagcggtggtaagctcttaccttgcacaggtgactacatgaacatgtcaccagtgggggactccaacaccagcagcccctccgactgctactacggccctgaggacccccagcacaagccagtcctctcctactactcattgccaagatcctttaagcacacccagcgccccggggagccggaggagggtgcccggcatcagcacctccgcctttccactagctctggtcgccttctctatgctgcaacagcagatgattcttcctcttccaccagcagcgacagcctgggtgggggatactgcggggctaggctggagcccagccttccacatccccaccatcaggttctgcagccccatctgcctcgaaaggtggacacagctgctcagaccaatagccgcctggcccggcccacgaggctgtccctgggggatcccaaggccagcaccttacctcgggcccgagagcagcagcagcagcagcagcccttgctgcaccctccagagcccaagagcccgggggaatatgtcaatattgaatttgggagtgatcagtctggctacttgtctggcccggtggctttccacagctcaccttctgtcaggtgtccatcccagctccagccagctcccagagaggaagagactggcactgaggagtacatgaagatggacctggggccgggccggagggcagcctggcaggagagcactggggtcgagatgggcagactgggccctgcacctcccggggctgctagcatttgcaggcctacccgggcagtgcccagcagccggggtgactacatgaccatgcagatgagttgtccccgtcagagctacgtggacacctcgccagctgcccctgtaagctatgctgacatgcgaacaggcattgctgcagaggaggtgagcctgcccagggccaccatggctgctgcctcctcatcctcagcagcctctgcttccccgactgggcctcaaggggcagcagagctggctgcccactcgtccctgctggggggcccacaaggacctgggggcatgagcgccttcacccgggtgaacctcagtcctaaccgcaaccagagtgccaaagtgatccgtgcagacccacaagggtgccggcggaggcatagctccgagactttctcctcaacacccagtgccacccgggtgggcaacacagtgccctttggagcgggggcagcagtagggggcggtggcggtagcagcagcagcagcgaggatgtgaaacgccacagctctgcttcctttgagaatgtgtggctgaggcctggggagcttgggggagcccccaaggagccagccaaactgtgtggggctgctgggggtttggagaatggtcttaactacatagacctggatttggtcaaggacttcaaacagtgccctcaggagtgcacccctgaaccgcagcctcccccacccccaccccctcatcaacccctgggcagcggtgagagcagctccacccgccgctcaagtgaggatttaagcgcctatgccagcatcagtttccagaagcagccagaggaccgtcagtagctcaactggacatcacagcagaatgaagacctaaatgacctcagcaaatcctcttctaactcatgggtacccagactctaaatatttcatgattcacaactaggacctcatatcttcctcatcagtagatggtacgatgcatccatttcagtttgtttactttatccaatcctcaggatttcattgactgaactgcacgttctatattgtgccaagcgaaaaaaaaaaatgcactgtgacaccagaataatgagtctgcataaacttcatcttcaaccttaaggacttagctggccacagtgagctgatgtgcccaccaccgtgtcatgagagaatgggtttactctcaatgcattttcaagatacatttcatctgctgctgaaactgtgtacgacaaagcatcattgtaaattatttcatacaaaactgttcacgttgggtggagagagtattaaatatttaacataggttttgatttatatgtgtaattttttaaatgaaaatgtaacttttcttacagcacatcttttttttggatgtgggatggaggtatacaatgttctgttgtaaagagtggagcaaatgcttaaaacaaggcttaaaagagtagaatagggtatgatccttgttttaagattgtaattcagaaaacataatataagaatcatagtgccatagatggttctcaattgtatagttatatttgctgatactatctcttgtcatataaacctgatgttgagctgagttccttataagaattaatcttaattttgtattttttcctgtaagacaataggccatgttaattaaactgaagaaggatatatttggctgggtgttttcaaatgtcagcttaaaattggtaattgaatggaagcaaaattataagaagaggaaattaaagtcttccattgcatgtattgtaaacagaaggagatgggtgattccttcaattcaaaagctctctttggaatgaacaatgtgggcgtttgtaaattctggaaatgtctttctattcataataacttttgaaacagagatgcgtccaggnttttttttttttttaaatttttctctttttattctcctctctcttttcttctcttct

SEQ ID NO: 372033 - DNA, 1243 bp, Homo sapiens
  misc_feature (6)..(6): n is a, c, g, or t
  misc_feature (10)..(10): n is a, c, g, or t
  misc_feature (18)..(18): n is a, c, g, or t
ccctgngggncactgacntctctaattaccaccgctacagaatgaagacctaaatgacctcagcaaatcctcttctaactcatgggtacccagactctaaatatttcatgattcacaactaggacctcatatcttcctcatcagtagatggtacgatgcatccatttcagtttgtttactttatccaatcctcaggatttcattgactgaactgcacgttctatattgtgccaagcgaaaaaaaaaaatgcactgtgacaccagaataatgagtctgcataaacttcatcttcaaccttaaggacttagctggccacagtgagctgatgtgcccaccaccgtgtcatgagagaatgggtttactctcaatgcattttcaagatacatttcatctgctgctgaaactgtgtacgacaaagcatcattgtaaattatttcatacaaaactgttcacgttgggtggagagagtattaaatatttaacataggttttgatttatatgtgtaattttttaaatgaaaatgtaacttttcttacagcacatcttttttttggatgtgggatggaggtatacaatgttctgttgtaaagagtggagcaaatgcttaaaacaaggcttaaaagagtagaatagggtatgatccttgttttaagattgtaattcagaaaacataatataagaatcatagtgccatagatggttctcaattgtatagttatatttgctgatactatctcttgtcatataaacctgatgttgagctgagttccttataagaattaatcttaattttgtattttttcctgtaagacaataggccatgttaattaaactgaagaaggatatatttggctgggtgttttcaaatgtcagcttaaaattggtaattgaatggaagcaaaattataagaagaggaaattaaagtcttccattgcatgtattgtaaacagaaggagatgggtgattccttcaattcaaaagctctctttggaatgaacaatgtgggcgtttgtaaattctggaaatgtctttctattcataataaactagatactgttgatcttttcttctgtcccctccccccaccacttctgtaagtttcctgctctattcccaccatttttttctgtgcacacattatgatatatttcatttcctgcattgtcttgagaaagatggtaaggcaagtgagctgttgctaaccagaaattaaaattccagtaagtgtttttcattatga

SEQ ID NO: 372034 - DNA, 1272 bp, Homo sapiens
tgcctatttggttccaagtcttctggtgacagcaaaagatagcactttggacttcagacagctttgatgaatgaagacctaaatgacctcagcaaatcctcttctaactcatgggtacccagactctaaatatttcatgattcacaactaggacctcatatcttcctcatcagtagatggtacgatgcatccatttcagtttgtttactttatccaatcctcaggatttcattgactgaactgcacgttctatattgtgccaagcgaaaaaaaaaaatgcactgtgacaccagaataatgagtctgcataaacttcatcttcaaccttaaggacttagctggccacagtgagctgatgtgcccaccaccgtgtcatgagagaatgggtttactctcaatgcattttcaagatacatttcatctgctgctgaaactgtgtacgacaaagcatcattgtaaattatttcatacaaaactgttcacgttgggtggagagagtattaaatatttaacataggttttgatttatatgtgtaattttttaaatgaaaatgtaacttttcttacagcacatcttttttttggatgtgggatggaggtatacaatgttctgttgtaaagagtggagcaaatgcttaaaacaaggcttaaaagagtagaatagggtatgatccttgttttaagattgtaattcagaaaacataatataagaatcatagtgccatagatggttctcaattgtatagttatatttgctgatactatctcttgtcatataaacctgatgttgagctgagttccttataagaattaatcttaattttgtattttttcctgtaagacaataggccatgttaattaaactgaagaaggatatatttggctgggtgttttcaaatgtcagcttaaaattggtaattgaatggaagcaaaattataagaagaggaaattaaagtcttccattgcatgtattgtaaacagaaggagatgggtgattccttcaattcaaaagctctctttggaatgaacaatgtgggcgtttgtaaattctggaaatgtctttctattcataataaactagatactgttgatcttttcttctgtcccctccccccaccacttctgtaagtttcctgctctattcccaccatttttttctgtgcacacattatgatatatttcatttcctgcattgtcttgagaaagatggtaaggcaagtgagctgttgctaaccagaaattaaaattccagtaagtgtttttcattatga

SEQ ID NO: 372035 - DNA, 7779 bp, Homo sapiens
cggcggcgcggtcggagggggccggcgcgcagagccagacgccgccgcttgttttggttggggctctcggcaactctccgaggaggaggaggaggagggaggaggggagaagtaactgcagcggcagcgccctcccgaggaacaggcgtcttccccgaacccttcccaaacctcccccatcccctctcgcccttgtcccctcccctcctccccagccgcctggagcgaggggcagggatgagtctgtccctccggccggtccccagctgcagtggctgcccggtatcgtttcgcatggaaaagccactttctccacccgccgagatgggcccggatgggggctgcagaggacgcgcccgcgggcggcggcagcagcagcagcagcagcagcagcaacagcaacagccgcagcgccgcggtctctgcgactgagctggtatttgggcggctggtggcggctgggacggttggggggtgggaggaggcgaaggaggagggagaaccccgtgcaacgttgggacttggcaacccgcctccccctgcccaaggatatttaatttgcctcgggaatcgctgcttccagaggggaactcaggagggaaggcgcgcgcgcgcgcgcgctcctggaggggcaccgcagggacccccgactgtcgcctccctgtgccggactccagccggggcgacgagagatgcatcttcgctccttcctggtggcggcggcggctgagaggagacttggctctcggaggatcggggctgccctcaccccggacgcactgcctccccgccggcgtgaagcgcccgaaaactccggtcgggctctctcctgggctcagcagctgcgtcctccttcagctgcccctccccggcgcggggggcggcgtggatttcagagtcggggtttctgctgcctccagccctgtttgcatgtgccgggccgcggcgaggagcctccgccccccacccggttgtttttcggagcctccctctgctcagcgttggtggtggcggtggcagcatggcgagccctccggagagcgatggcttctcggacgtgcgcaaggtgggctacctgcgcaaacccaagagcatgcacaaacgcttcttcgtactgcgcgcggccagcgaggctgggggcccggcgcgcctcgagtactacgagaacgagaagaagtggcggcacaagtcgagcgcccccaaacgctcgatcccccttgagagctgcttcaacatcaacaagcgggctgactccaagaacaagcacctggtggctctctacacccgggacgagcactttgccatcgcggcggacagcgaggccgagcaagacagctggtaccaggctctcctacagctgcacaaccgtgctaagggccaccacgacggagctgcggccctcggggcgggaggtggtgggggcagctgcagcggcagctccggccttggtgaggctggggaggacttgagctacggtgacgtgcccccaggacccgcattcaaagaggtctggcaagtgatcctgaagcccaagggcctgggtcagacaaagaacctgattggtatctaccgcctttgcctgaccagcaagaccatcagcttcgtgaagctgaactcggaggcagcggccgtggtgctgcagctgatgaacatcaggcgctgtggccactcggaaaacttcttcttcatcgaggtgggccgttctgccgtgacggggcccggggagttctggatgcaggtggatgactctgtggtggcccagaacatgcacgagaccatcctggaggccatgcgggccatgagtgatgagttccgccctcgcagcaagagccagtcctcgtccaactgctctaaccccatcagcgtccccctgcgccggcaccatctcaacaatcccccgcccagccaggtggggctgacccgccgatcacgcactgagagcatcaccgccacctccccggccagcatggtgggcgggaagccaggctccttccgtgtccgcgcctccagtgacggcgaaggcaccatgtcccgcccagcctcggtggacggcagccctgtgagtcccagcaccaacagaacccacgcccaccggcatcggggcagcgcccggctgcaccccccgctcaaccacagccgctccatccccatgccggcttcccgctgctcgccttcggccaccagcccggtcagtctgtcgtccagtagcaccagtggccatggctccacctcggattgtctcttcccacggcgatctagtgcttcggtgtctggttcccccagcgatggcggtttcatctcctcggatgagtatggctccagtccctgcgatttccggagttccttccgcagtgtcactccggattccctgggccacaccccaccagcccgcggtgaggaggagctaagcaactatatctgcatgggtggcaaggggccctccaccctgaccgcccccaacggtcactacattttgtctcggggtggcaatggccaccgctgcaccccaggaacaggcttgggcacgagtccagccttggctggggatgaagcagccagtgctgcagatctggataatcggttccgaaagagaactcactcggcaggcacatcccctaccattacccaccagaagaccccgtcccagtcctcagtggcttccattgaggagtacacagagatgatgcctgcctacccaccaggaggtggcagtggaggccgactgccgggacacaggcactccgccttcgtgcccacccgctcctacccagaggagggtctggaaatgcaccccttggagcgtcggggggggcaccaccgcccagacagctccaccctccacacggatgatggctacatgcccatgtccccaggggtggccccagtgcccagtggccgaaagggcagtggagactatatgcccatgagccccaagagcgtatctgccccacagcagatcatcaatcccatcagacgccatccccagagagtggaccccaatggctacatgatgatgtcccccagcggtggctgctctcctgacattggaggtggccccagcagcagcagcagcagcagcaacgccgtcccttccgggaccagctatggaaagctgtggacaaacggggtagggggccaccactctcatgtcttgcctcaccccaaacccccagtggagagcagcggtggtaagctcttaccttgcacaggtgactacatgaacatgtcaccagtgggggactccaacaccagcagcccctccgactgctactacggccctgaggacccccagcacaagccagtcctctcctactactcattgccaagatcctttaagcacacccagcgccccggggagccggaggagggtgcccggcatcagcacctccgcctttccactagctctggtcgccttctctatgctgcaacagcagatgattcttcctcttccaccagcagcgacagcctgggtgggggatactgcggggctaggctggagcccagccttccacatccccaccatcaggttctgcagccccatctgcctcgaaaggtggacacagctgctcagaccaatagccgcctggcccggcccacgaggctgtccctgggggatcccaaggccagcaccttacctcgggcccgagagcagcagcagcagcagcagcccttgctgcaccctccagagcccaagagcccgggggaatatgtcaatattgaatttgggagtgatcagtctggctacttgtctggcccggtggctttccacagctcaccttctgtcaggtgtccatcccagctccagccagctcccagagaggaagagactggcactgaggagtacatgaagatggacctggggccgggccggagggcagcctggcaggagagcactggggtcgagatgggcagactgggccctgcacctcccggggctgctagcatttgcaggcctacccgggcagtgcccagcagccggggtgactacatgaccatgcagatgagttgtccccgtcagagctacgtggacacctcgccagctgcccctgtaagctatgctgacatgcgaacaggcattgctgcagaggaggtgagcctgcccagggccaccatggctgctgcctcctcatcctcagcagcctctgcttccccgactgggcctcaaggggcagcagagctggctgcccactcgtccctgctggggggcccacaaggacctgggggcatgagcgccttcacccgggtgaacctcagtcctaaccgcaaccagagtgccaaagtgatccgtgcagacccacaagggtgccggcggaggcatagctccgagactttctcctcaacacccagtgccacccgggtgggcaacacagtgccctttggagcgggggcagcagtagggggcggtggcggtagcagcagcagcagcgaggatgtgaaacgccacagctctgcttcctttgagaatgtgtggctgaggcctggggagcttgggggagcccccaaggagccagccaaactgtgtggggctgctgggggtttggagaatggtcttaactacatagacctggatttggtcaaggacttcaaacagtgccctcaggagtgcacccctgaaccgcagcctcccccacccccaccccctcatcaacccctgggcagcggtgagagcagctccacccgccgctcaagtgaggatttaagcgcctatgccagcatcagtttccagaagcagccagaggaccgtcagtagctcaactggacatcacagcaggtgcgtttcatggtgacaaagtcagaagacaaaactgcttttaaccttgtccttgaattctgttcttcgcctctgccccttcctgttctttcccactgcttcctcagggagaatgcacttacattctcagggcacacaagatgctcaccccacactgacatctggcagagagtcaaacaaacatgtaggagcagccacaggagggctttttcgtttgagaattcccaagtgaagtagttactgcagtatttttaaaacatatatcctatgccagttctgcgttttgtagagttcctccgtaagaagcttgatttgtttgttgaagttttcttttcactatatatttaggtcagcccctggaagggacagttctacaaaaaatatttgttaacacaggggctaaacccttccttatcttaaactatcttaatagtttctgggagcccttaagggtgatcttatcaagttgttctctgtacttttgttctgtgatttcataatactagggcaacataaacagcagcgggaagcattgatttctattcatcctgccctaaaaagatcaggagtaagagctttttagaaatatgtatttagagagaagtacctatctattttgtgatctctcaagaaagtaattatgggtgacgttctccttttgttcatgtaccaggatttgtgaaatattattcacacaccgacccaccatcccacgggcctggcctctcttgtacaggatatgcaggaaactctgtatgtgtctgggacccattattaagagttatgggagttcatcctaggatgtctgccttatagttatctcttcttgcactgagacattacagatatcatttgggggctactatatatcttctgtaaaattacttttatttgttgagaagaatgcatactaagtcaggaacatgccttaatttgtttgttttgcattgagtagaagggctaaactgtataccctccacttttagggttatttgctgtgtgcctttaagttcaaaagtagacaccacagtaaatgctgaaagttggctttaggtcttctgtggctaatgccgtattaaaaatgaaaaacatttgtaataggaaattagcctgcccttcgttctgttgatcctgttttctggtggtcataattgtgggtagaagagagtacagtttgcaaataatgtgatgagttggcaatgcagaagtttccagcatttggaaacactttactctgacaaactgattatcttgtgaattttatctatgctccacagaatgagcttttaaaagcactgatttttcttaatttgtgtccattcataagaaattaatctgtgccctggtttcctattgacaggtatttatttatcatgtgttcatagtcttcttaattctgtttccaatatttgatccatataattctctattttatagaacaagaaaaaggtatatgaacactcaaatgaagattttgggtgatatgttacaaaaagcatttatttgatcagtatttacttcaacatttattttcatcattcactagaagaaagatttaattgtgtatatcaacatcagtagtacaaatcttgttatatcaaatgatgtttttgggagtcagaatccctcaacactttaagcatttgtattataaagtgcctcattggtaaaataatgagaatttgaagaaaaccagcccagcagaactaaaattttggttttaaaggagataaagagaataagtttttcttacttgtcatcttaatttgtttaggtttctttttatagagtagaataaatgatgtttgctctgaagagaattgatgaccaactagaattttcatttttaaaaagggctttaaaataaaattctcctatgtgttggatgcattaaaaaaacaaaaactctacaaaattctatccttaaccttctttgggaaaataaaatattctggaataatcatataatcctatttctaataattctggagtaacaatcgaccatgctttgcacagtgccaggaaaattctacaatgcgtatttgagatgtttgtgttggtgtttaaagtgaggcaccaaatgctacctggcacatttacatcctcaattctgcttgcttgcctgtgccctgttgagtccaaagatgttattctatagctatctgaaacagacagaagtcagacctgtgagtggcaaacagcttctgctccgaatgtgtgtgcaaacattattttcctcacttcctcagcaattgctgtctttgcttcttttcctcatttctcaggtaaaacctgagactcggtgaaaggaatagaggtatgatgaggcgtgggctctgttgaaacatctcggcttgtttaaaatttttcattgtctgttaagaggagaacacttgtgaagcactgagctcaggagctctacttgttggaagcctgtctgctttacctgtagtccagtgaccttttctgcctgccctttctcttgcatagcctcttagttctggcttgctcgttttctagtactatcccctgccatccctttgtttccacctcttatttcatgttcctgacattatcctttttttcttttgctccttttcagaatttcgcagtacttgtggcccactctctgcagagagtaaattgagagcccaagaagcagggcaaaaagagcctctcagactcggtcatagcagccctgccacctttacctggcatcaaatttatcttttagttttgaaactgcagctgacaaagacacagaccccagccatgccttttgggttcagtttttttgtttttgtcattctttgttatgccctccccctttaaaagaaaaaagaaaaagaaaaaaaacagaaaaagactctttccatttctttttcattcagtttccttttttgtgatgtcaaggattccgtacctccaaggttgcctcccctccctcccctttccccagccctgtggcctttttggctggcgcaaaccctctcggccctggcactttc

SEQ ID NO: 372036 - DNA, 5177 bp, Homo sapiens
cggcggcgcggtcggagggggccggcgcgcagagccagacgccgccgcttgttttggttggggctctcggcaactctccgaggaggaggaggaggagggaggaggggagaagtaactgcagcggcagcgccctcccgaggaacaggcgtcttccccgaacccttcccaaacctcccccatcccctctcgcccttgtcccctcccctcctccccagccgcctggagcgaggggcagggatgagtctgtccctccggccggtccccagctgcagtggctgcccggtatcgtttcgcatggaaaagccactttctccacccgccgagatgggcccggatgggggctgcagaggacgcgcccgcgggcggcggcagcagcagcagcagcagcagcagcaacagcaacagccgcagcgccgcggtctctgcgactgagctggtatttgggcggctggtggcggctgggacggttggggggtgggaggaggcgaaggaggagggagaaccccgtgcaacgttgggacttggcaacccgcctccccctgcccaaggatatttaatttgcctcgggaatcgctgcttccagaggggaactcaggagggaaggcgcgcgcgcgcgcgcgctcctggaggggcaccgcagggacccccgactgtcgcctccctgtgccggactccagccggggcgacgagagatgcatcttcgctccttcctggtggcggcggcggctgagaggagacttggctctcggaggatcggggctgccctcaccccggacgcactgcctccccgccggcgtgaagcgcccgaaaactccggtcgggctctctcctgggctcagcagctgcgtcctccttcagctgcccctccccggcgcggggggcggcgtggatttcagagtcggggtttctgctgcctccagccctgtttgcatgtgccgggccgcggcgaggagcctccgccccccacccggttgtttttcggagcctccctctgctcagcgttggtggtggcggtggcagcatggcgagccctccggagagcgatggcttctcggacgtgcgcaaggtgggctacctgcgcaaacccaagagcatgcacaaacgcttcttcgtactgcgcgcggccagcgaggctgggggcccggcgcgcctcgagtactacgagaacgagaagaagtggcggcacaagtcgagcgcccccaaacgctcgatcccccttgagagctgcttcaacatcaacaagcgggctgactccaagaacaagcacctggtggctctctacacccgggacgagcactttgccatcgcggcggacagcgaggccgagcaagacagctggtaccaggctctcctacagctgcacaaccgtgctaagggccaccacgacggagctgcggccctcggggcgggaggtggtgggggcagctgcagcggcagctccggccttggtgaggctggggaggacttgagctacggtgacgtgcccccaggacccgcattcaaagaggtctggcaagtgatcctgaagcccaagggcctgggtcagacaaagaacctgattggtatctaccgcctttgcctgaccagcaagaccatcagcttcgtgaagctgaactcggaggcagcggccgtggtgctgcagctgatgaacatcaggcgctgtggccactcggaaaacttcttcttcatcgaggtgggccgttctgccgtgacggggcccggggagttctggatgcaggtggatgactctgtggtggcccagaacatgcacgagaccatcctggaggccatgcgggccatgagtgatgagttccgccctcgcagcaagagccagtcctcgtccaactgctctaaccccatcagcgtccccctgcgccggcaccatctcaacaatcccccgcccagccaggtggggctgacccgccgatcacgcactgagagcatcaccgccacctccccggccagcatggtgggcgggaagccaggctccttccgtgtccgcgcctccagtgacggcgaaggcaccatgtcccgcccagcctcggtggacggcagccctgtgagtcccagcaccaacagaacccacgcccaccggcatcggggcagcgcccggctgcaccccccgctcaaccacagccgctccatccccatgccggcttcccgctgctcgccttcggccaccagcccggtcagtctgtcgtccagtagcaccagtggccatggctccacctcggattgtctcttcccacggcgatctagtgcttcggtgtctggttcccccagcgatggcggtttcatctcctcggatgagtatggctccagtccctgcgatttccggagttccttccgcagtgtcactccggattccctgggccacaccccaccagcccgcggtgaggaggagctaagcaactatatctgcatgggtggcaaggggccctccaccctgaccgcccccaacggtcactacattttgtctcggggtggcaatggccaccgctgcaccccaggaacaggcttgggcacgagtccagccttggctggggatgaagcagccagtgctgcagatctggataatcggttccgaaagagaactcactcggcaggcacatcccctaccattacccaccagaagaccccgtcccagtcctcagtggcttccattgaggagtacacagagatgatgcctgcctacccaccaggaggtggcagtggaggccgactgccgggacacaggcactccgccttcgtgcccacccgctcctacccagaggagggtctggaaatgcaccccttggagcgtcggggggggcaccaccgcccagacagctccaccctccacacggatgatggctacatgcccatgtccccaggggtggccccagtgcccagtggccgaaagggcagtggagactatatgcccatgagccccaagagcgtatctgccccacagcagatcatcaatcccatcagacgccatccccagagagtggaccccaatggctacatgatgatgtcccccagcggtggctgctctcctgacattggaggtggccccagcagcagcagcagcagcagcaacgccgtcccttccgggaccagctatggaaagctgtggacaaacggggtagggggccaccactctcatgtcttgcctcaccccaaacccccagtggagagcagcggtggtaagctcttaccttgcacaggtgactacatgaacatgtcaccagtgggggactccaacaccagcagcccctccgactgctactacggccctgaggacccccagcacaagccagtcctctcctactactcattgccaagatcctttaagcacacccagcgccccggggagccggaggagggtgcccggcatcagcacctccgcctttccactagctctggtcgccttctctatgctgcaacagcagatgattcttcctcttccaccagcagcgacagcctgggtgggggatactgcggggctaggctggagcccagccttccacatccccaccatcaggttctgcagccccatctgcctcgaaaggtggacacagctgctcagaccaatagccgcctggcccggcccacgaggctgtccctgggggatcccaaggccagcaccttacctcgggcccgagagcagcagcagcagcagcagcccttgctgcaccctccagagcccaagagcccgggggaatatgtcaatattgaatttgggagtgatcagtctggctacttgtctggcccggtggctttccacagctcaccttctgtcaggtgtccatcccagctccagccagctcccagagaggaagagactggcactgaggagtacatgaagatggacctggggccgggccggagggcagcctggcaggagagcactggggtcgagatgggcagactgggccctgcacctcccggggctgctagcatttgcaggcctacccgggcagtgcccagcagccggggtgactacatgaccatgcagatgagttgtccccgtcagagctacgtggacacctcgccagctgcccctgtaagctatgctgacatgcgaacaggcattgctgcagaggaggtgagcctgcccagggccaccatggctgctgcctcctcatcctcagcagcctctgcttccccgactgggcctcaaggggcagcagagctggctgcccactcgtccctgctggggggcccacaaggacctgggggcatgagcgccttcacccgggtgaacctcagtcctaaccgcaaccagagtgccaaagtgatccgtgcagacccacaagggtgccggcggaggcatagctccgagactttctcctcaacacccagtgccacccgggtgggcaacacagtgccctttggagcgggggcagcagtagggggcggtggcggtagcagcagcagcagcgaggatgtgaaacgccacagctctgcttcctttgagaatgtgtggctgaggcctggggagcttgggggagcccccaaggagccagccaaactgtgtggggctgctgggggtttggagaatggtcttaactacatagacctggatttggtcaaggacttcaaacagtgccctcaggagtgcacccctgaaccgcagcctcccccacccccaccccctcatcaacccctgggcagcggtgagagcagctccacccgccgctcaagtgaggatttaagcgcctatgccagcatcagtttccagaagcagccagaggaccgtcagtagctcaactggacatcacagcagaatttcgcagtacttgtggcccactctctgcagagagtaaattgagagcccaagaagcagggcaaaaagagcctctcagactcggtcatagcagccctgccacctttacctggcatcaaatttatcttttagttttgaaactgcagctgacaaagacacagaccccagccatgccttttgggttcagtttttttgtttttgtcattctttgttatgccctccccctttaaaagaaaaaagaaaaagaaaaaaaacagaaaaagactctttccatttctttttcattcagtttccttttttgtgatgtcaaggattccgtacctccaaggttgcctcccctccctcccctttccccagccctgtggcctttttggctggcgcaaaccctctcggccctggcactttc

SEQ ID NO: 372037 - DNA, 5974 bp, Homo sapiens
cggcggcgcggtcggagggggccggcgcgcagagccagacgccgccgcttgttttggttggggctctcggcaactctccgaggaggaggaggaggagggaggaggggagaagtaactgcagcggcagcgccctcccgaggaacaggcgtcttccccgaacccttcccaaacctcccccatcccctctcgcccttgtcccctcccctcctccccagccgcctggagcgaggggcagggatgagtctgtccctccggccggtccccagctgcagtggctgcccggtatcgtttcgcatggaaaagccactttctccacccgccgagatgggcccggatgggggctgcagaggacgcgcccgcgggcggcggcagcagcagcagcagcagcagcagcaacagcaacagccgcagcgccgcggtctctgcgactgagctggtatttgggcggctggtggcggctgggacggttggggggtgggaggaggcgaaggaggagggagaaccccgtgcaacgttgggacttggcaacccgcctccccctgcccaaggatatttaatttgcctcgggaatcgctgcttccagaggggaactcaggagggaaggcgcgcgcgcgcgcgcgctcctggaggggcaccgcagggacccccgactgtcgcctccctgtgccggactccagccggggcgacgagagatgcatcttcgctccttcctggtggcggcggcggctgagaggagacttggctctcggaggatcggggctgccctcaccccggacgcactgcctccccgccggcgtgaagcgcccgaaaactccggtcgggctctctcctgggctcagcagctgcgtcctccttcagctgcccctccccggcgcggggggcggcgtggatttcagagtcggggtttctgctgcctccagccctgtttgcatgtgccgggccgcggcgaggagcctccgccccccacccggttgtttttcggagcctccctctgctcagcgttggtggtggcggtggcagcatggcgagccctccggagagcgatggcttctcggacgtgcgcaaggtgggctacctgcgcaaacccaagagcatgcacaaacgcttcttcgtactgcgcgcggccagcgaggctgggggcccggcgcgcctcgagtactacgagaacgagaagaagtggcggcacaagtcgagcgcccccaaacgctcgatcccccttgagagctgcttcaacatcaacaagcgggctgactccaagaacaagcacctggtggctctctacacccgggacgagcactttgccatcgcggcggacagcgaggccgagcaagacagctggtaccaggctctcctacagctgcacaaccgtgctaagggccaccacgacggagctgcggccctcggggcgggaggtggtgggggcagctgcagcggcagctccggccttggtgaggctggggaggacttgagctacggtgacgtgcccccaggacccgcattcaaagaggtctggcaagtgatcctgaagcccaagggcctgggtcagacaaagaacctgattggtatctaccgcctttgcctgaccagcaagaccatcagcttcgtgaagctgaactcggaggcagcggccgtggtgctgcagctgatgaacatcaggcgctgtggccactcggaaaacttcttcttcatcgaggtgggccgttctgccgtgacggggcccggggagttctggatgcaggtggatgactctgtggtggcccagaacatgcacgagaccatcctggaggccatgcgggccatgagtgatgagttccgccctcgcagcaagagccagtcctcgtccaactgctctaaccccatcagcgtccccctgcgccggcaccatctcaacaatcccccgcccagccaggtggggctgacccgccgatcacgcactgagagcatcaccgccacctccccggccagcatggtgggcgggaagccaggctccttccgtgtccgcgcctccagtgacggcgaaggcaccatgtcccgcccagcctcggtggacggcagccctgtgagtcccagcaccaacagaacccacgcccaccggcatcggggcagcgcccggctgcaccccccgctcaaccacagccgctccatccccatgccggcttcccgctgctcgccttcggccaccagcccggtcagtctgtcgtccagtagcaccagtggccatggctccacctcggattgtctcttcccacggcgatctagtgcttcggtgtctggttcccccagcgatggcggtttcatctcctcggatgagtatggctccagtccctgcgatttccggagttccttccgcagtgtcactccggattccctgggccacaccccaccagcccgcggtgaggaggagctaagcaactatatctgcatgggtggcaaggggccctccaccctgaccgcccccaacggtcactacattttgtctcggggtggcaatggccaccgctgcaccccaggaacaggcttgggcacgagtccagccttggctggggatgaagcagccagtgctgcagatctggataatcggttccgaaagagaactcactcggcaggcacatcccctaccattacccaccagaagaccccgtcccagtcctcagtggcttccattgaggagtacacagagatgatgcctgcctacccaccaggaggtggcagtggaggccgactgccgggacacaggcactccgccttcgtgcccacccgctcctacccagaggagggtctggaaatgcaccccttggagcgtcggggggggcaccaccgcccagacagctccaccctccacacggatgatggctacatgcccatgtccccaggggtggccccagtgcccagtggccgaaagggcagtggagactatatgcccatgagccccaagagcgtatctgccccacagcagatcatcaatcccatcagacgccatccccagagagtggaccccaatggctacatgatgatgtcccccagcggtggctgctctcctgacattggaggtggccccagcagcagcagcagcagcagcaacgccgtcccttccgggaccagctatggaaagctgtggacaaacggggtagggggccaccactctcatgtcttgcctcaccccaaacccccagtggagagcagcggtggtaagctcttaccttgcacaggtgactacatgaacatgtcaccagtgggggactccaacaccagcagcccctccgactgctactacggccctgaggacccccagcacaagccagtcctctcctactactcattgccaagatcctttaagcacacccagcgccccggggagccggaggagggtgcccggcatcagcacctccgcctttccactagctctggtcgccttctctatgctgcaacagcagatgattcttcctcttccaccagcagcgacagcctgggtgggggatactgcggggctaggctggagcccagccttccacatccccaccatcaggttctgcagccccatctgcctcgaaaggtggacacagctgctcagaccaatagccgcctggcccggcccacgaggctgtccctgggggatcccaaggccagcaccttacctcgggcccgagagcagcagcagcagcagcagcccttgctgcaccctccagagcccaagagcccgggggaatatgtcaatattgaatttgggagtgatcagtctggctacttgtctggcccggtggctttccacagctcaccttctgtcaggtgtccatcccagctccagccagctcccagagaggaagagactggcactgaggagtacatgaagatggacctggggccgggccggagggcagcctggcaggagagcactggggtcgagatgggcagactgggccctgcacctcccggggctgctagcatttgcaggcctacccgggcagtgcccagcagccggggtgactacatgaccatgcagatgagttgtccccgtcagagctacgtggacacctcgccagctgcccctgtaagctatgctgacatgcgaacaggcattgctgcagaggaggtgagcctgcccagggccaccatggctgctgcctcctcatcctcagcagcctctgcttccccgactgggcctcaaggggcagcagagctggctgcccactcgtccctgctggggggcccacaaggacctgggggcatgagcgccttcacccgggtgaacctcagtcctaaccgcaaccagagtgccaaagtgatccgtgcagacccacaagggtgccggcggaggcatagctccgagactttctcctcaacacccagtgccacccgggtgggcaacacagtgccctttggagcgggggcagcagtagggggcggtggcggtagcagcagcagcagcgaggatgtgaaacgccacagctctgcttcctttgagaatgtgtggctgaggcctggggagcttgggggagcccccaaggagccagccaaactgtgtggggctgctgggggtttggagaatggtcttaactacatagacctggatttggtcaaggacttcaaacagtgccctcaggagtgcacccctgaaccgcagcctcccccacccccaccccctcatcaacccctgggcagcggtgagagcagctccacccgccgctcaagtgaggatttaagcgcctatgccagcatcagtttccagaagcagccagaggaccgtcagtagctcaactggacatcacagcagaatgaagacctaaatgacctcagcaaatcctcttctaactcatgggtacccagactctaaatatttcatgattcacaactaggacctcatatcttcctcatcagtagatggtacgatgcatccatttcagtttgtttactttatccaatcctcaggatttcattgactgaactgcacgttctatattgtgccaagcgaaaaaaaaaaatgcactgtgacaccagaataatgagtctgcataaacttcatcttcaaccttaaggacttagctggccacagtgagctgatgtgcccaccaccgtgtcatgagagaatgggtttactctcaatgcattttcaagatacatttcatctgctgctgaaactgtgtacgacaaagcatcattgtaaattatttcatacaaaactgttcacgttgggtggagagagtattaaatatttaacataggttttgatttatatgtgtaattttttaaatgaaaatgtaacttttcttacagcacatcttttttttggatgtgggatggaggtatacaatgttctgttgtaaagagtggagcaaatgcttaaaacaaggcttaaaagagtagaatagggtatgatccttgttttaagattgtaattcagaaaacataatataagaatcatagtgccatagatggttctcaattgtatagttatatttgctgatactatctcttgtcatataaacctgatgttgagctgagttccttataagaattaatcttaattttgtattttttcctgtaagacaataggccatgttaattaaactgaagaaggatatatttggctgggtgttttcaaatgtcagcttaaaattggtaattgaatggaagcaaaattataagaagaggaaattaaagtcttccattgcatgtattgtaaacagaaggagatgggtgattccttcaattcaaaagctctctttggaatgaacaatgtgggcgtttgtaaattctggaaatgtctttctattcataataaactagatactgttgatcttttcttctgtcccctccccccaccacttctgtaagtttcctgctctattcccaccatttttttctgtgcacacattatgatatatttcatttcctgcattgtcttgagaaagatggtaaggcaagtgagctgttgctaaccagaaattaaaattccagtaagtgtttttcattatga

SEQ ID NO: 372038 - DNA, 5820 bp, Homo sapiens
cggcggcgcggtcggagggggccggcgcgcagagccagacgccgccgcttgttttggttggggctctcggcaactctccgaggaggaggaggaggagggaggaggggagaagtaactgcagcggcagcgccctcccgaggaacaggcgtcttccccgaacccttcccaaacctcccccatcccctctcgcccttgtcccctcccctcctccccagccgcctggagcgaggggcagggatgagtctgtccctccggccggtccccagctgcagtggctgcccggtatcgtttcgcatggaaaagccactttctccacccgccgagatgggcccggatgggggctgcagaggacgcgcccgcgggcggcggcagcagcagcagcagcagcagcagcaacagcaacagccgcagcgccgcggtctctgcgactgagctggtatttgggcggctggtggcggctgggacggttggggggtgggaggaggcgaaggaggagggagaaccccgtgcaacgttgggacttggcaacccgcctccccctgcccaaggatatttaatttgcctcgggaatcgctgcttccagaggggaactcaggagggaaggcgcgcgcgcgcgcgcgctcctggaggggcaccgcagggacccccgactgtcgcctccctgtgccggactccagccggggcgacgagagatgcatcttcgctccttcctggtggcggcggcggctgagaggagacttggctctcggaggatcggggctgccctcaccccggacgcactgcctccccgccggcgtgaagcgcccgaaaactccggtcgggctctctcctgggctcagcagctgcgtcctccttcagctgcccctccccggcgcggggggcggcgtggatttcagagtcggggtttctgctgcctccagccctgtttgcatgtgccgggccgcggcgaggagcctccgccccccacccggttgtttttcggagcctccctctgctcagcgttggtggtggcggtggcagcatggcgagccctccggagagcgatggcttctcggacgtgcgcaaggtgggctacctgcgcaaacccaagagcatgcacaaacgcttcttcgtactgcgcgcggccagcgaggctgggggcccggcgcgcctcgagtactacgagaacgagaagaagtggcggcacaagtcgagcgcccccaaacgctcgatcccccttgagagctgcttcaacatcaacaagcgggctgactccaagaacaagcacctggtggctctctacacccgggacgagcactttgccatcgcggcggacagcgaggccgagcaagacagctggtaccaggctctcctacagctgcacaaccgtgctaagggccaccacgacggagctgcggccctcggggcgggaggtggtgggggcagctgcagcggcagctccggccttggtgaggctggggaggacttgagctacggtgacgtgcccccaggacccgcattcaaagaggtctggcaagtgatcctgaagcccaagggcctgggtcagacaaagaacctgattggtatctaccgcctttgcctgaccagcaagaccatcagcttcgtgaagctgaactcggaggcagcggccgtggtgctgcagctgatgaacatcaggcgctgtggccactcggaaaacttcttcttcatcgaggtgggccgttctgccgtgacggggcccggggagttctggatgcaggtggatgactctgtggtggcccagaacatgcacgagaccatcctggaggccatgcgggccatgagtgatgagttccgccctcgcagcaagagccagtcctcgtccaactgctctaaccccatcagcgtccccctgcgccggcaccatctcaacaatcccccgcccagccaggtggggctgacccgccgatcacgcactgagagcatcaccgccacctccccggccagcatggtgggcgggaagccaggctccttccgtgtccgcgcctccagtgacggcgaaggcaccatgtcccgcccagcctcggtggacggcagccctgtgagtcccagcaccaacagaacccacgcccaccggcatcggggcagcgcccggctgcaccccccgctcaaccacagccgctccatccccatgccggcttcccgctgctcgccttcggccaccagcccggtcagtctgtcgtccagtagcaccagtggccatggctccacctcggattgtctcttcccacggcgatctagtgcttcggtgtctggttcccccagcgatggcggtttcatctcctcggatgagtatggctccagtccctgcgatttccggagttccttccgcagtgtcactccggattccctgggccacaccccaccagcccgcggtgaggaggagctaagcaactatatctgcatgggtggcaaggggccctccaccctgaccgcccccaacggtcactacattttgtctcggggtggcaatggccaccgctgcaccccaggaacaggcttgggcacgagtccagccttggctggggatgaagcagccagtgctgcagatctggataatcggttccgaaagagaactcactcggcaggcacatcccctaccattacccaccagaagaccccgtcccagtcctcagtggcttccattgaggagtacacagagatgatgcctgcctacccaccaggaggtggcagtggaggccgactgccgggacacaggcactccgccttcgtgcccacccgctcctacccagaggagggtctggaaatgcaccccttggagcgtcggggggggcaccaccgcccagacagctccaccctccacacggatgatggctacatgcccatgtccccaggggtggccccagtgcccagtggccgaaagggcagtggagactatatgcccatgagccccaagagcgtatctgccccacagcagatcatcaatcccatcagacgccatccccagagagtggaccccaatggctacatgatgatgtcccccagcggtggctgctctcctgacattggaggtggccccagcagcagcagcagcagcagcaacgccgtcccttccgggaccagctatggaaagctgtggacaaacggggtagggggccaccactctcatgtcttgcctcaccccaaacccccagtggagagcagcggtggtaagctcttaccttgcacaggtgactacatgaacatgtcaccagtgggggactccaacaccagcagcccctccgactgctactacggccctgaggacccccagcacaagccagtcctctcctactactcattgccaagatcctttaagcacacccagcgccccggggagccggaggagggtgcccggcatcagcacctccgcctttccactagctctggtcgccttctctatgctgcaacagcagatgattcttcctcttccaccagcagcgacagcctgggtgggggatactgcggggctaggctggagcccagccttccacatccccaccatcaggttctgcagccccatctgcctcgaaaggtggacacagctgctcagaccaatagccgcctggcccggcccacgaggctgtccctgggggatcccaaggccagcaccttacctcgggcccgagagcagcagcagcagcagcagcccttgctgcaccctccagagcccaagagcccgggggaatatgtcaatattgaatttgggagtgatcagtctggctacttgtctggcccggtggctttccacagctcaccttctgtcaggtgtccatcccagctccagccagctcccagagaggaagagactggcactgaggagtacatgaagatggacctggggccgggccggagggcagcctggcaggagagcactggggtcgagatgggcagactgggccctgcacctcccggggctgctagcatttgcaggcctacccgggcagtgcccagcagccggggtgactacatgaccatgcagatgagttgtccccgtcagagctacgtggacacctcgccagctgcccctgtaagctatgctgacatgcgaacaggcattgctgcagaggaggtgagcctgcccagggccaccatggctgctgcctcctcatcctcagcagcctctgcttccccgactgggcctcaaggggcagcagagctggctgcccactcgtccctgctggggggcccacaaggacctgggggcatgagcgccttcacccgggtgaacctcagtcctaaccgcaaccagagtgccaaagtgatccgtgcagacccacaagggtgccggcggaggcatagctccgagactttctcctcaacacccagtgccacccgggtgggcaacacagtgccctttggagcgggggcagcagtagggggcggtggcggtagcagcagcagcagcgaggatgtgaaacgccacagctctgcttcctttgagaatgtgtggctgaggcctggggagcttgggggagcccccaaggagccagccaaactgtgtggggctgctgggggtttggagaatggtcttaactacatagacctggatttggtcaaggacttcaaacagtgccctcaggagtgcacccctgaaccgcagcctcccccacccccaccccctcatcaacccctgggcagcggtgagagcagctccacccgccgctcaagtgaggatttaagcgcctatgccagcatcagtttccagaagcagccagaggaccgtcagtagctcaactggacatcacagcagaatgaagacctaaatgacctcagcaaatcctcttctaactcatgggtacccagactctaaatatttcatgattcacaactaggacctcatatcttcctcatcagtagatggtacgatgcatccatttcagtttgtttactttatccaatcctcaggatttcattgactgaactgcacgttctatattgtgccaagcgaaaaaaaaaaatgcactgtgacaccagaataatgagtctgcataaacttcatcttcaaccttaaggacttagctggccacagtgagctgatgtgcccaccaccgtgtcatgagagaatgggtttactctcaatgcattttcaagatacatttcatctgctgctgaaactgtgtacgacaaagcatcattgtaaattatttcatacaaaactgttcacgttgggtggagagagtattaaatatttaacataggttttgatttatatgtgtaattttttaaatgaaaatgtaacttttcttacagcacatcttttttttggatgtgggatggaggtatacaatgttctgttgtaaagagtggagcaaatgcttaaaacaaggcttaaaagagtagaatagggtatgatccttgttttaagattgtaattcagaaaacataatataagaatcatagtgccatagatggttctcaattgtatagttatatttgctgatactatctcttgtcatataaacctgatgttgagctgagttccttataagaattaatcttaattttgtattttttcctgtaagacaataggccatgttaattaaactgaagaaggatatatttggctgggtgttttcaaatgtcagcttaaaattggtaattgaatggaagcaaaattataagaagaggaaattaaagtcttccattgcatgtattgtaaacagaaggagatgggtgattccttcaattcaaaagctctctttggaatgaacaatgtgggcgtttgtaaattctggaaatgtctttctattcataatgcggccgggtttttttttgtattatatttttgttcattccgtc

SEQ ID NO: 372039 - DNA, 7725 bp, Homo sapiens
cggcggcgcggtcggagggggccggcgcgcagagccagacgccgccgcttgttttggttggggctctcggcaactctccgaggaggaggaggaggagggaggaggggagaagtaactgcagcggcagcgccctcccgaggaacaggcgtcttccccgaacccttcccaaacctcccccatcccctctcgcccttgtcccctcccctcctccccagccgcctggagcgaggggcagggatgagtctgtccctccggccggtccccagctgcagtggctgcccggtatcgtttcgcatggaaaagccactttctccacccgccgagatgggcccggatgggggctgcagaggacgcgcccgcgggcggcggcagcagcagcagcagcagcagcagcaacagcaacagccgcagcgccgcggtctctgcgactgagctggtatttgggcggctggtggcggctgggacggttggggggtgggaggaggcgaaggaggagggagaaccccgtgcaacgttgggacttggcaacccgcctccccctgcccaaggatatttaatttgcctcgggaatcgctgcttccagaggggaactcaggagggaaggcgcgcgcgcgcgcgcgctcctggaggggcaccgcagggacccccgactgtcgcctccctgtgccggactccagccggggcgacgagagatgcatcttcgctccttcctggtggcggcggcggctgagaggagacttggctctcggaggatcggggctgccctcaccccggacgcactgcctccccgccggcgtgaagcgcccgaaaactccggtcgggctctctcctgggctcagcagctgcgtcctccttcagctgcccctccccggcgcggggggcggcgtggatttcagagtcggggtttctgctgcctccagccctgtttgcatgtgccgggccgcggcgaggagcctccgccccccacccggttgtttttcggagcctccctctgctcagcgttggtggtggcggtggcagcatggcgagccctccggagagcgatggcttctcggacgtgcgcaaggtgggctacctgcgcaaacccaagagcatgcacaaacgcttcttcgtactgcgcgcggccagcgaggctgggggcccggcgcgcctcgagtactacgagaacgagaagaagtggcggcacaagtcgagcgcccccaaacgctcgatcccccttgagagctgcttcaacatcaacaagcgggctgactccaagaacaagcacctggtggctctctacacccgggacgagcactttgccatcgcggcggacagcgaggccgagcaagacagctggtaccaggctctcctacagctgcacaaccgtgctaagggccaccacgacggagctgcggccctcggggcgggaggtggtgggggcagctgcagcggcagctccggccttggtgaggctggggaggacttgagctacggtgacgtgcccccaggacccgcattcaaagaggtctggcaagtgatcctgaagcccaagggcctgggtcagacaaagaacctgattggtatctaccgcctttgcctgaccagcaagaccatcagcttcgtgaagctgaactcggaggcagcggccgtggtgctgcagctgatgaacatcaggcgctgtggccactcggaaaacttcttcttcatcgaggtgggccgttctgccgtgacggggcccggggagttctggatgcaggtggatgactctgtggtggcccagaacatgcacgagaccatcctggaggccatgcgggccatgagtgatgagttccgccctcgcagcaagagccagtcctcgtccaactgctctaaccccatcagcgtccccctgcgccggcaccatctcaacaatcccccgcccagccaggtggggctgacccgccgatcacgcactgagagcatcaccgccacctccccggccagcatggtgggcgggaagccaggctccttccgtgtccgcgcctccagtgacggcgaaggcaccatgtcccgcccagcctcggtggacggcagccctgtgagtcccagcaccaacagaacccacgcccaccggcatcggggcagcgcccggctgcaccccccgctcaaccacagccgctccatccccatgccggcttcccgctgctcgccttcggccaccagcccggtcagtctgtcgtccagtagcaccagtggccatggctccacctcggattgtctcttcccacggcgatctagtgcttcggtgtctggttcccccagcgatggcggtttcatctcctcggatgagtatggctccagtccctgcgatttccggagttccttccgcagtgtcactccggattccctgggccacaccccaccagcccgcggtgaggaggagctaagcaactatatctgcatgggtggcaaggggccctccaccctgaccgcccccaacggtcactacattttgtctcggggtggcaatggccaccgctgcaccccaggaacaggcttgggcacgagtccagccttggctggggatgaagcagccagtgctgcagatctggataatcggttccgaaagagaactcactcggcaggcacatcccctaccattacccaccagaagaccccgtcccagtcctcagtggcttccattgaggagtacacagagatgatgcctgcctacccaccaggaggtggcagtggaggccgactgccgggacacaggcactccgccttcgtgcccacccgctcctacccagaggagggtctggaaatgcaccccttggagcgtcggggggggcaccaccgcccagacagctccaccctccacacggatgatggctacatgcccatgtccccaggggtggccccagtgcccagtggccgaaagggcagtggagactatatgcccatgagccccaagagcgtatctgccccacagcagatcatcaatcccatcagacgccatccccagagagtggaccccaatggctacatgatgatgtcccccagcggtggctgctctcctgacattggaggtggccccagcagcagcagcagcagcagcaacgccgtcccttccgggaccagctatggaaagctgtggacaaacggggtagggggccaccactctcatgtcttgcctcaccccaaacccccagtggagagcagcggtggtaagctcttaccttgcacaggtgactacatgaacatgtcaccagtgggggactccaacaccagcagcccctccgactgctactacggccctgaggacccccagcacaagccagtcctctcctactactcattgccaagatcctttaagcacacccagcgccccggggagccggaggagggtgcccggcatcagcacctccgcctttccactagctctggtcgccttctctatgctgcaacagcagatgattcttcctcttccaccagcagcgacagcctgggtgggggatactgcggggctaggctggagcccagccttccacatccccaccatcaggttctgcagccccatctgcctcgaaaggtggacacagctgctcagaccaatagccgcctggcccggcccacgaggctgtccctgggggatcccaaggccagcaccttacctcgggcccgagagcagcagcagcagcagcagcccttgctgcaccctccagagcccaagagcccgggggaatatgtcaatattgaatttgggagtgatcagtctggctacttgtctggcccggtggctttccacagctcaccttctgtcaggtgtccatcccagctccagccagctcccagagaggaagagactggcactgaggagtacatgaagatggacctggggccgggccggagggcagcctggcaggagagcactggggtcgagatgggcagactgggccctgcacctcccggggctgctagcatttgcaggcctacccgggcagtgcccagcagccggggtgactacatgaccatgcagatgagttgtccccgtcagagctacgtggacacctcgccagctgcccctgtaagctatgctgacatgcgaacaggcattgctgcagaggaggtgagcctgcccagggccaccatggctgctgcctcctcatcctcagcagcctctgcttccccgactgggcctcaaggggcagcagagctggctgcccactcgtccctgctggggggcccacaaggacctgggggcatgagcgccttcacccgggtgaacctcagtcctaaccgcaaccagagtgccaaagtgatccgtgcagacccacaagggtgccggcggaggcatagctccgagactttctcctcaacacccagtgccacccgggtgggcaacacagtgccctttggagcgggggcagcagtagggggcggtggcggtagcagcagcagcagcgaggatgtgaaacgccacagctctgcttcctttgagaatgtgtggctgaggcctggggagcttgggggagcccccaaggagccagccaaactgtgtggggctgctgggggtttggagaatggtcttaactacatagacctggatttggtcaaggacttcaaacagtgccctcaggagtgcacccctgaaccgcagcctcccccacccccaccccctcatcaacccctgggcagcggtgagagcagctccacccgccgctcaagtgaggatttaagcgcctatgccagcatcagtttccagaagcagccagaggaccgtcagtagctcaactggacatcacagcaggtgcgtttcatggtgacaaagtcagaagacaaaactgcttttaaccttgtccttgaattctgttcttcgcctctgccccttcctgttctttcccactgcttcctcagggagaatgcacttacattctcagggcacacaagatgctcaccccacactgacatctggcagagagtcaaacaaacatgtaggagcagccacaggagggctttttcgtttgagaattcccaagtgaagtagttactgcagtatttttaaaacatatatcctatgccagttctgcgttttgtagagttcctccgtaagaagcttgatttgtttgttgaagttttcttttcactatatatttaggtcagcccctggaagggacagttctacaaaaaatatttgttaacacaggggctaaacccttccttatcttaaactatcttaatagtttctgggagcccttaagggtgatcttatcaagttgttctctgtacttttgttctgtgatttcataatactagggcaacataaacagcagcgggaagcattgatttctattcatcctgccctaaaaagatcaggagtaagagctttttagaaatatgtatttagagagaagtacctatctattttgtgatctctcaagaaagtaattatgggtgacgttctccttttgttcatgtaccaggatttgtgaaatattattcacacaccgacccaccatcccacgggcctggcctctcttgtacaggatatgcaggaaactctgtatgtgtctgggacccattattaagagttatgggagttcatcctaggatgtctgccttatagttatctcttcttgcactgagacattacagatatcatttgggggctactatatatcttcttaatttgtttgttttgcattgagtagaagggctaaactgtataccctccacttttagggttatttgctgtgtgcctttaagttcaaaagtagacaccacagtaaatgctgaaagttggctttaggtcttctgtggctaatgccgtattaaaaatgaaaaacatttgtaataggaaattagcctgcccttcgttctgttgatcctgttttctggtggtcataattgtgggtagaagagagtacagtttgcaaataatgtgatgagttggcaatgcagaagtttccagcatttggaaacactttactctgacaaactgattatcttgtgaattttatctatgctccacagaatgagcttttaaaagcactgatttttcttaatttgtgtccattcataagaaattaatctgtgccctggtttcctattgacaggtatttatttatcatgtgttcatagtcttcttaattctgtttccaatatttgatccatataattctctattttatagaacaagaaaaaggtatatgaacactcaaatgaagattttgggtgatatgttacaaaaagcatttatttgatcagtatttacttcaacatttattttcatcattcactagaagaaagatttaattgtgtatatcaacatcagtagtacaaatcttgttatatcaaatgatgtttttgggagtcagaatccctcaacactttaagcatttgtattataaagtgcctcattggtaaaataatgagaatttgaagaaaaccagcccagcagaactaaaattttggttttaaaggagataaagagaataagtttttcttacttgtcatcttaatttgtttaggtttctttttatagagtagaataaatgatgtttgctctgaagagaattgatgaccaactagaattttcatttttaaaaagggctttaaaataaaattctcctatgtgttggatgcattaaaaaaacaaaaactctacaaaattctatccttaaccttctttgggaaaataaaatattctggaataatcatataatcctatttctaataattctggagtaacaatcgaccatgctttgcacagtgccaggaaaattctacaatgcgtatttgagatgtttgtgttggtgtttaaagtgaggcaccaaatgctacctggcacatttacatcctcaattctgcttgcttgcctgtgccctgttgagtccaaagatgttattctatagctatctgaaacagacagaagtcagacctgtgagtggcaaacagcttctgctccgaatgtgtgtgcaaacattattttcctcacttcctcagcaattgctgtctttgcttcttttcctcatttctcaggtaaaacctgagactcggtgaaaggaatagaggtatgatgaggcgtgggctctgttgaaacatctcggcttgtttaaaatttttcattgtctgttaagaggagaacacttgtgaagcactgagctcaggagctctacttgttggaagcctgtctgctttacctgtagtccagtgaccttttctgcctgccctttctcttgcatagcctcttagttctggcttgctcgttttctagtactatcccctgccatccctttgtttccacctcttatttcatgttcctgacattatcctttttttcttttgctccttttcagaatttcgcagtacttgtggcccactctctgcagagagtaaattgagagcccaagaagcagggcaaaaagagcctctcagactcggtcatagcagccctgccacctttacctggcatcaaatttatcttttagttttgaaactgcagctgacaaagacacagaccccagccatgccttttgggttcagtttttttgtttttgtcattctttgttatgccctccccctttaaaagaaaaaagaaaaagaaaaaaaacagaaaaagactctttccatttctttttcattcagtttccttttttgtgatgtcaaggattccgtacctccaaggttgcctcccctccctcccctttccccagccctgtggcctttttggctggcgcaaaccctctcggccctggcactttc

SEQ ID NO: 372040 - DNA, 1175 bp, Homo sapiens
atcgactctagaggtcccccacgccgcaccgccgaaagctgcatttgcctagaaagtggattgctgcgtatgaaccaagtgttgggctatataactccactgtcctaagctatttggggttggaaggaagaggggtgaagtagaaaggcaagaagctaatacaagaggagaaaaagtagatgagacacatcaagaaattctcacgagaaacagatgaagaggtggaaatgagtcagtccagcagcttaccaagtatcactgacaagaggagaggatgcatcctgtgtaaatactggggttcttgtctcagaagcacagggtatcatggaaatggagttgaaagctggggaactgatggaacgtctccatgaggagcaactaactggagccatgggttggtaccaagatgttccctctgccttctactttcgatagaaactaagccagtatggcatggggctctgaaaatgggctgaggggaacatcggcagcctccactaaccccctgcccctaccctgttcctgaagtcccaggcagttaagacgtccacagtgaacggcacttaatcaaaacaaaagttcagacacagtgaaaattcaggaatataagacaatgtaaaacactatcagaaaaatgaggcaaagaatgatataaaaaaggtaataggatgttcaagtctttgaggaagatttccaggttgaaaccaagccatagcttttagtatattttcattttaggttaggcaagaaagttagcgaactttgtcctcaaacctaggaccatttaaaaaagtgacaataaagaagactaagaaatcatgaagagagtataaatttatgaaaatataacatttggccaggcgtggtggctcatgcctgtaatcccaacactttgggaggctgaggcaggcagatcacgaggtcaggagattgagaccatcctggccaacatggtgaaaccatgcctctagtaaaataaaaaaaattagccgggcatggtggtgcgtgcctgcagtcccagctactcgggaggctgaggcaggggaatcgcttgaacctgggaggcggagattgcagtgagctgagattgcaccactgcactccaaacctggagacagagcgagactctatctcaaaaaaaaaaagtcgacgcggccgcgaatttagtagtagta

SEQ ID NO: 372041 - DNA, 1257 bp, Homo sapiens
gaaggaattcagttaactacagcagctgcatgtgaagcatttcaaaggagtttatgacatcaccgtataaaatccatttgacatgaaaaccggaactccaactatgagatagtttcaaagctgcatttgcctagaaagtggattgctgcgtatgaaccaagtgttgggctatataactccactgtcctaagctatttggggttggaaggaagaggggtgaagtagaaaggcaagaagctaatacaagaggagaaaaagtagatgagacacatcaagaaattctcacgagaaacagatgaagaggtggaaatgagtcagtccagcagcttaccaagtatcactgacaagaggagaggatgcatcctgtgtaaatactggggttcttgtctcagaagcacagggtatcatggaaatggagttgaaagctggggaactgatggaacgtctccatgaggagcaactaactggagccatgggttggtaccaagatgttccctctgccttctactttcgatagaaactaagccagtatggcatggggctctgaaaatgggctgaggggaacatcggcagcctccactaaccccctgcccctaccctgttcctgaagtcccaggcagttaagacgtccacagtgaacggcacttaatcaaaacaaaagttcagacacagtgaaaattcaggaatataagacaatgtaaaacactatcagaaaaatgaggcaaagaatgatataaaaaaggtaataggatgttcaagtctttgaggaagatttccaggttgaaaccaagccatagcttttagtatattttcattttaggttaggcaagaaagttagcgaactttgtcctcaaacctaggaccatttaaaaaagtgacaataaagaagactaagaaatcatgaagagagtataaatttatgaaaatataacatttggccaggcgtggtggctcatgcctgtaatcccaacactttgggaggctgaggcaggcagatcacgaggtcaggagattgagaccatcctggccaacatggtgaaaccatgcctctagtaaaataaaaaaaattagccgggcatggtggtgcgtgcctgcagtcccagctactcgggaggctgaggcaggggaatcgcttgaacctgggaggcggagattgcagtgagctgagattgcaccactgcactccaaacctggagacagagcgagactctatctcaaaaaaaaaaagtcgacgcggccgcgaatttagtagtagta

SEQ ID NO: 372042 - DNA, 2227 bp, Homo sapiens
atcgccagcctccagtcctgcctccacgacgcgcccttccccaaggctggccgggtctggatgtcgccatcccctattcggagctacagacctcgcagctgaactcttaaaaagaacctcgcttcttcctcacggtgctccagctccacacaccgtactgagcctcgccagccaccgtacgcgaggtcgcggcgcgtccgtgacgtcactgatgtgcgcttctcccgcactaagggaaacatggctctagcgcggccggtgcggctcttttccctcgtgactcggttgctcctggcgccgcgacggggcctcacggtccgcagtcccgacgaacccctgccggtggtgcgcatcccagtggctctacagcggcagttggaacagcggcagagcaggcggcggaacctcccgaggccggtgctggttcgacccggaccgctgctggtttcggcgcggcggccggagttgaaccagccggcgcgcctcacactgggccgttgggagcgcgcgccgctagcctctcaaggctggaagagtcgacgcgcgcgtcgggaccacttctccatcgagcgcgcgcaacaggaggcgccagcggtgcgaaagctctcgtctaagggcagctttgctgacctgggcctggagccccgtgtgctgcacgcactacaggaggctgcgcctgaagtcgttcagcccacaaccgtgcagtctagcaccatcccctcactacttcgcggccgccatgtcgtttgcgccgcagaaaccggcagtggcaagactctcagctacctcctgccgctgcttcaacggctcttgggccagccaagcctggactcccttcctatccccgcgccccgaggcctggtccttgttccttcccgagaattggcccaacaggtgcgggctgtggcccaacccttgggccgctccttgggcctgctggtgcgggacctggagggaggccacggcatgcgtaggatcaggctgcagctgtccagacagccttcagcagatgtgcttgtggccactccaggggctctgtggaaggccctgaaaagtcgactgatcagtctggagcaactctccttcttggtgttggatgaggcagacacactgctggatgaaagcttcctggaactggtggactacatcttagagaagagccacatagcagaaggcccagctgacttggaagaccccttcaatcccaaagctcagttagtgctggtaggagccacatttcccgaaggtgtaggccagttgctgaataaagtcgccagcccagatgctgtcaccaccatcaccagctccaagctccactgtatcatgcctcatgtgaaacagacatttctgagactgaagggagcagataaggtggccgagctggtgcacatcctcaagcatcgtgacagagcagaaaggactggtccctcaggaactgttctggtgttctgtaatagctccagcactgtgaactggctgggatatattctggatgaccacaaaatccaacacctaaggttgcaggggcaaatgccagccttgatgagggtaggaatcttccagtccttccagaagagctcccgagacatacttctctgcacagacatagcctctcggggcctggacagcactggtgtggagctggttgtcaattatgatttccccccaacgctgcaagattacatccacagagcagggagagtgggccgtgtggggagcgaggtgccaggcaccgtcatcagttttgtgacccatccctgggatgtgagcctggttcagaagattgagctggcggctcgccgaaggagaagtcttccaggactagcatcctcggtgaaagagcctttgccccaagcaacctgattttgacaaatctgattaaaatgtgatgctagaacagggatctttcccagtatcttgagtgggtgaccacacttgtcagtgggaggctctgggctgccctgtcggctccttgagggcgggatgaactgctttgtgacttggaaaggtacgctgctggccagcattggagaagaagctgctgagcatggctttctgtagtctttagcaagacacaagtggattttgactttgtatcatgtcatgatttctaacaataaatgatgtttttatgtgcaaaaaacacaacacaaaaaaacccgggcacataagcggggcggaaaaggtataaggggcaatgccaagcgttccgacccctttttgcaag

SEQ ID NO: 372043 - DNA, 1901 bp, Homo sapiens
atcgccagcctccagtcctgcctccacgacgcgcccttccccaaggctggccgggtctggatgtcgccatcccctattcggagctacagacctcgcagctgaactcttaaaaagaacctcgcttcttcctcacggtgctccagctccacacaccgtactgagcctcgccagccaccgtacgcgaggtcgcggcgcgtccgtgacgtcactgatgtgcgcttctcccgcactaagggaaacatggctctagcgcggccggtgcggctcttttccctcgtgactcggttgctcctggcgccgcgacggggcctcacggtccgcagtcccgacgaacccctgccggtggtgcgcatcccagtggctctacagcggcagttggaacagcggcagagcaggcggcggaacctcccgaggccggtgctggttcgacccggaccgctgctggtttcggcgcggcggccggagttgaaccagccggcgcgcctcacactgggccgttgggagcgcgcgccgctagcctctcaaggctggaagagtcgacgcgcgcgtcgggaccacttctccatcgagcgcgcgcaacaggaggcgccagcggtgcgaaagctctcgtctaagggcagctttgctgacctgggcctggagccccgtgtgctgcacgcactacaggaggctgcgcctgaagtcgttcagcccacaaccgtgcagtctagcaccatcccctcactacttcgcggccgccatgtcgtttgcgccgcagaaaccggcagtggcaagactctcagctacctcctgccgctgcttcaacggctcttgggccagccaagcctggactcccttcctatccccgcgccccgaggcctggtccttgttccttcccgagaattggcccaacaggtgcgggctgtggcccaacccttgggccgctccttgggcctgctggtgcgggacctggagggaggccacggcatgcgtaggatcaggctgcagctgtccagacagccttcagcagatgtgcttgtggccactccaggggctctgtggaaggccctgaaaagtcgactgatcagtctggagcaactctccttcttggtgttggatgaggcagacacactgctggatgaaagcttcctggaactggtggactacatcttagagaagagccacatagcagaaggcccagctgacttggaagaccccttcaatcccaaagctcagttagtgctggtaggagccacatttcccgaaggtgtaggccagttgctgaataaagtcgccagcccagatgctgtcaccaccatcaccagctccaagctccactgtatcatgcctcatgtgaaacagacatttctgagactgaagggagcagataaggtggccgagctggtgcacatcctcaagcatcgtgacagagcagaaaggactggtccctcaggaactgttctggtgttctgtaatagctccagcactgtgaactggctgggatatattctggatgaccacaaaatccaacacctaaggttgcaggggcaaatgccagccttgatgagggtaggaatcttccagtccttccagaagagctcccgagacatacttctctgcacagacatagcctctcggggcctggacagcactggtgtggagctggttgtcaattatgatttccccccaacgctgcaagattacatccacagagcagggagagtgggccgtgtggggagcgaggtgccaggcaccgtcatcagttttgtgacccatccctgggatgtgagcctggttcagaagattgagctggcggctcgccgaaggagaagtcttccaggactagcatcctcggtgaaagagcctttgccccaagcaacctgattttgacaaatctgattaaaatgtgatgctagaacagg

SEQ ID NO: 372044 - DNA, 1938 bp, Homo sapiens
  misc_feature (17)..(17): n is a, c, g, or t
  misc_feature (20)..(20): n is a, c, g, or t
tcacctgtgttcagtanccngggttattacgagggtgggtggcgcccctagcgcggccggtgcggctcttttccctcgtgactcggttgctcctggcgccgcgacggggcctcacggtccgcagtcccgacgaacccctgccggtggtgcgcatcccagtggctctacagcggcagttggaacagcggcagagcaggcggcggaacctcccgaggccggtgctggttcgacccggaccgctgctggtttcggcgcggcggccggagttgaaccagccggcgcgcctcacactgggccgttgggagcgcgcgccgctagcctctcaaggctggaagagtcgacgcgcgcgtcgggaccacttctccatcgagcgcgcgcaacaggaggcgccagcggtgcgaaagctctcgtctaagggcagctttgctgacctgggcctggagccccgtgtgctgcacgcactacaggaggctgcgcctgaagtcgttcagcccacaaccgtgcagtctagcaccatcccctcactacttcgcggccgccatgtcgtttgcgccgcagaaaccggcagtggcaagactctcagctacctcctgccgctgcttcaacggctcttgggccagccaagcctggactcccttcctatccccgcgccccgaggcctggtccttgttccttcccgagaattggcccaacaggtgcgggctgtggcccaacccttgggccgctccttgggcctgctggtgcgggacctggagggaggccacggcatgcgtaggatcaggctgcagctgtccagacagccttcagcagatgtgcttgtggccactccaggggctctgtggaaggccctgaaaagtcgactgatcagtctggagcaactctccttcttggtgttggatgaggcagacacactgctggatgaaagcttcctggaactggtggactacatcttagagaagagccacatagcagaaggcccagctgacttggaagaccccttcaatcccaaagctcagttagtgctggtaggagccacatttcccgaaggtgtaggccagttgctgaataaagtcgccagcccagatgctgtcaccaccatcaccagctccaagctccactgtatcatgcctcatgtgaaacagacatttctgagactgaagggagcagataaggtggccgagctggtgcacatcctcaagcatcgtgacagagcagaaaggactggtccctcaggaactgttctggtgttctgtaatagctccagcactgtgaactggctgggatatattctggatgaccacaaaatccaacacctaaggttgcaggggcaaatgccagccttgatgagggtaggaatcttccagtccttccagaagagctcccgagacatacttctctgcacagacatagcctctcggggcctggacagcactggtgtggagctggttgtcaattatgatttccccccaacgctgcaagattacatccacagagcagggagagtgggccgtgtggggagcgaggtgccaggcaccgtcatcagttttgtgacccatccctgggatgtgagcctggttcagaagattgagctggcggctcgccgaaggagaagtcttccaggactagcatcctcggtgaaagagcctttgccccaagcaacctgattttgacaaatctgattaaaatgtgatgctagaacagggatctttcccagtatcttgagtgggtgaccacacttgtcagtgggaggctctgggctgccctgtcggctccttgagggcgggatgaactgctttgtgacttggaaaggtacgctgctggccagcattggagaagaagctgctgagcatggctttctgtagtctttagcaagacacaagtggattttgactttgtatcatgtcatgatttctaacaataaatgatgtttttatgtgc

SEQ ID NO: 372045 - DNA, 320 bp, Homo sapiens
agtctttagcaagacacaagtggattttgactttgtatcatgtcatgatttctaacaataaatgatgtttttatgtgcctcccctaagaataattagcaccggggcggaattcagtagtttctgaggattcatacaccaaacctccacatctaggacaaaggctctttcagttgatgttttcatttataaacatttagtttgtatttcctgcccccaaaaaggtatccattaagcccccagggaaaggaaaggaaaggaaatgtgactagcagtagacagagttactctctaacaatgcccaagacaaacgggcgtcttg

SEQ ID NO: 372046 - DNA, 2137 bp, Homo sapiens
atcgccagcctccagtcctgcctccacgacgcgcccttccccaaggctggccgggtctggatgtcgccatcccctattcggagctacagacctcgcagctgaactcttaaaaagaacctcgcttcttcctcacggtgctccagctccacacaccgtactgagcctcgccagccaccgtacgcgaggtcgcggcgcgtccgtgacgtcactgatgtgcgcttctcccgcactaagggaaacatggctctagcgcggccggtgcggctcttttccctcgtgactcggttgctcctggcgccgcgacggggcctcacggtccgcagtcccgacgaacccctgccggtggtgcgcatcccagtggctctacagcggcagttggaacagcggcagagcaggcggcggaacctcccgaggccggtgctggttcgacccggaccgctgctggtttcggcgcggcggccggagttgaaccagccggcgcgcctcacactgggccgttgggagcgcgcgccgctagcctctcaaggctggaagagtcgacgcgcgcgtcgggaccacttctccatcgagcgcgcgcaacaggaggcgccagcggtgcgaaagctctcgtctaagggcagctttgctgacctgggcctggagccccgtgtgctgcacgcactacaggaggctgcgcctgaagtcgttcagcccacaaccgtgcagtctagcaccatcccctcactacttcgcggccgccatgtcgtttgcgccgcagaaaccggcagtggcaagactctcagctacctcctgccgctgcttcaacggctcttgggccagccaagcctggactcccttcctatccccgcgccccgaggcctggtccttgttccttcccgagaattggcccaacaggtgcgggctgtggcccaacccttgggccgctccttgggcctgctggtgcgggacctggagggaggccacggcatgcgtaggatcaggctgcagctgtccagacagccttcagcagatgtgcttgtggccactccaggggctctgtggaaggccctgaaaagtcgactgatcagtctggagcaactctccttcttggtgttggatgaggcagacacactgctggatgaaagcttcctggaactggtggactacatcttagagaagagccacatagcagaaggcccagctgacttggaagaccccttcaatcccaaagctcagttagtgctggtaggagccacatttcccgaaggtgtaggccagttgctgaataaagtcgccagcccagatgctgtcaccaccatcaccagctccaagctccactgtatcatgcctcatgtgaaacagacatttctgagactgaagggagcagataaggtggccgagctggtgcacatcctcaagcatcgtgacagagcagaaaggactggtccctcaggaactgttctggtgttctgtaatagctccagcactgtgaactggctgggatatattctggatgaccacaaaatccaacacctaaggttgcaggggcaaatgccagccttgatgagggtaggaatcttccagtccttccagaagagctcccgagacatacttctctgcacagacatagcctctcggggcctggacagcactggtgtggagctggttgtcaattatgatttccccccaacgctgcaagattacatccacagagcagggagagtgggccgtgtggggagcgaggtgccaggcaccgtcatcagttttgtgacccatccctgggatgtgagcctggttcagaagattgagctggcggctcgccgaaggagaagtcttccaggactagcatcctcggtgaaagagcctttgccccaagcaacctgattttgacaaatctgattaaaatgtgatgctagaacagggatctttcccagtatcttgagtgggtgaccacacttgtcagtgggaggctctgggctgccctgtcggctccttgagggcgggatgaactgctttgtgacttggaaaggtacgctgctggccagcattggagaagaagctgctgagcatggctttctgtagtctttagcaagacacaagtggattttgactttgtatcatgtcatgatttctaacaataaatgatgtttttatgtgc

SEQ ID NO: 372047 - DNA, 2681 bp, Homo sapiens
atcgccagcctccagtcctgcctccacgacgcgcccttccccaaggctggccgggtctggatgtcgccatcccctattcggagctacagacctcgcagctgaactcttaaaaagaacctcgcttcttcctcacggtgctccagctccacacaccgtactgagcctcgccagccaccgtacgcgaggtcgcggcgcgtccgtgacgtcactgatgtgcgcttctcccgcactaagggaaacatggctctagcgcggccggtgcggctcttttccctcgtgactcggttgctcctggcgccgcgacggggcctcacggtccgcagtcccgacgaacccctgccggtggtgcgcatcccagtggctctacagcggcagttggaacagcggcagagcaggcggcggaacctcccgaggccggtgctggttcgacccggaccgctgctggtttcggcgcggcggccggagttgaaccagccggcgcgcctcacactgggccgttgggagcgcgcgccgctagcctctcaaggctggaagagtcgacgcgcgcgtcgggaccacttctccatcgagcgcgcgcaacaggaggcgccagcggtgcgaaagctctcgtctaagggcagctttgctgacctgggcctggagccccgtgtgctgcacgcactacaggaggctgcgcctgaagtcgttcagcccacaaccgtgcagtctagcaccatcccctcactacttcgcggccgccatgtcgtttgcgccgcagaaaccggcagtggcaagactctcagctacctcctgccgctgcttcaacggctcttgggccagccaagcctggactcccttcctatccccgcgccccgaggcctggtccttgttccttcccgagaattggcccaacaggtgcgggctgtggcccaacccttgggccgctccttgggcctgctggtgcgggacctggagggaggccacggcatgcgtaggatcaggctgcagctgtccagacagccttcagcagatgtgcttgtggccactccaggggctctgtggaaggccctgaaaagtcgactgatcagtctggagcaactctccttcttggtgttggatgaggcagacacactgctggatgaaagcttcctggaactggtggactacatcttagagaagagccacatagcagaaggcccagctgacttggaagaccccttcaatcccaaagctcagttagtgctggtaggagccacatttcccgaaggtgtaggccagttgctgaataaagtcgccagcccagatgctgtcaccaccatcaccagctccaagctccactgtatcatgcctcatgtgaaacagacatttctgagactgaagggagcagataaggtggccgagctggtgcacatcctcaagcatcgtgacagagcagaaaggactggtccctcaggaactgttctggtgttctgtaatagctccagcactgtgaactggctgggatatattctggatgaccacaaaatccaacacctaaggttgcaggggcaaatgccagccttgatgagggtaggaatcttccagtccttccagaagagctcccgagacatacttctctgcacagacatagcctctcggggcctggacagcactggtgtggagctggttgtcaattatgatttccccccaacgctgcaagattacatccacagagcagggagagtgggccgtgtggggagcgaggtgccaggcaccgtcatcagttttgtgacccatccctgggatgtgagcctggttcagaagattgagctggcggctcgccgaaggagaagtcttccaggactagcatcctcggtgaaagagcctttgccccaagcaacctgattttgacaaatctgattaaaatgtgatgctagaacagggatctttcccagtatcttgagtgggtgaccacacttgtcagtgggaggctctgggctgccctgtcggctccttgagggcgggatgaactgctttgtgacttggaaaggtacgctgctggccagcattggagaagaagctgctgagcatggctttctgtagtctttagcaagacacaagtggattttgactttgtatcatgtcatgatttctaacaataaatgatgtttttatgtgcaaaaaaaaaaaaaaaaaaaaaaaaaaaaaaaaaaaaaaaaaaaaaaaaaaaaaaaaaaaaaaaaaaaaaaaacaaagagagggggcggcgcgcggcacaaaaagaatcctcccccggagggagggccacaataaacgggccaaccacgaacattggagaacaaaggggcgccccaaagggggggcgcgatataaaaaccgagggcggagggggcgcgcggtataaaaaccacggggtggcagaggtggcgaaaacatcactggccgcacggggaaaacagtggtgggggagagagacacccacatacggcgcgggggggggggacaacaaagggtggcgaccaaactattactcatcagagggagagatatatatactaagccccaaaggagggggggagatatattaaaaaaaattatagaggggcgatgatagtgggtgggtggtaaaaaacacgggaggataatatatgtggcgggggcgtaaaaaaaagagtgtggggatataagaagagaaattagtgtgagaagaaaattttatacgg

SEQ ID NO: 372048 - DNA, 2577 bp, Homo sapiens
atcgccagcctccagtcctgcctccacgacgcgcccttccccaaggctggccgggtctggatgtcgccatcccctattcggagctacagacctcgcagctgaactcttaaaaagaacctcgcttcttcctcacggtgctccagctccacacaccgtactgagcctcgccagccaccgtacgcgaggtcgcggcgcgtccgtgacgtcactgatgtgcgcttctcccgcactaagggaaacatggctctagcgcggccggtgcggctcttttccctcgtgactcggttgctcctggcgccgcgacggggcctcacggtccgcagtcccgacgaacccctgccggtggtgcgcatcccagtggctctacagcggcagttggaacagcggcagagcaggcggcggaacctcccgaggccggtgctggttcgacccggaccgctgctggtttcggcgcggcggccggagttgaaccagccggcgcgcctcacactgggccgttgggagcgcgcgccgctagcctctcaaggctggaagagtcgacgcgcgcgtcgggaccacttctccatcgagcgcgcgcaacaggaggcgccagcggtgcgaaagctctcgtctaagggcagctttgctgacctgggcctggagccccgtgtgctgcacgcactacaggaggctgcgcctgaagtcgttcagcccacaaccgtgcagtctagcaccatcccctcactacttcgcggccgccatgtcgtttgcgccgcagaaaccggcagtggcaagactctcagctacctcctgccgctgcttcaacggctcttgggccagccaagcctggactcccttcctatccccgcgccccgaggcctggtccttgttccttcccgagaattggcccaacaggtgcgggctgtggcccaacccttgggccgctccttgggcctgctggtgcgggacctggagggaggccacggcatgcgtaggatcaggctgcagctgtccagacagccttcagcagatgtgcttgtggccactccaggggctctgtggaaggccctgaaaagtcgactgatcagtctggagcaactctccttcttggtgttggatgaggcagacacactgctggatgaaagcttcctggaactggtggactacatcttagagaagagccacatagcagaaggcccagctgacttggaagaccccttcaatcccaaagctcagttagtgctggtaggagccacatttcccgaaggtgtaggccagttgctgaataaagtcgccagcccagatgctgtcaccaccatcaccagctccaagctccactgtatcatgcctcatgtgaaacagacatttctgagactgaagggagcagataaggtggccgagctggtgcacatcctcaagcatcgtgacagagcagaaaggactggtccctcaggaactgttctggtgttctgtaatagctccagcactgtgaactggctgggatatattctggatgaccacaaaatccaacacctaaggttgcaggggcaaatgccagccttgatgagggtaggaatcttccagtccttccagaagagctcccgagacatacttctctgcacagacatagcctctcggggcctggacagcactggtgtggagctggttgtcaattatgatttccccccaacgctgcaagattgagctggcggctcgccgaaggagaagtcttccaggactagcatcctcggtgaaagagcctttgccccaagcaacctgattttgacaaatctgattaaaatgtgatgctagaacagggatctttcccagtatcttgagtgggtgaccacacttgtcagtgggaggctctgggctgccctgtcggctccttgagggcgggatgaactgctttgtgacttggaaaggtacgctgctggccagcattggagaagaagctgctgagcatggctttctgtagtctttagcaagacacaagtggattttgactttgtatcatgtcatgatttctaacaataaatgatgtttttatgtgcaaaaaaaaaaaaaaaaaaaaaaaaaaaaaaaaaaaaaaaaaaaaaaaaaaaaaaaaaaaaaaaaaaaaaaaacaaagagagggggcggcgcgcggcacaaaaagaatcctcccccggagggagggccacaataaacgggccaaccacgaacattggagaacaaaggggcgccccaaagggggggcgcgatataaaaaccgagggcggagggggcgcgcggtataaaaaccacggggtggcagaggtggcgaaaacatcactggccgcacggggaaaacagtggtgggggagagagacacccacatacggcgcgggggggggggacaacaaagggtggcgaccaaactattactcatcagagggagagatatatatactaagccccaaaggagggggggagatatattaaaaaaaattatagaggggcgatgatagtgggtgggtggtaaaaaacacgggaggataatatatgtggcgggggcgtaaaaaaaagagtgtggggatataagaagagaaattagtgtgagaagaaaattttatacgg

SEQ ID NO: 372049 - DNA, 1296 bp, Homo sapiens
atcgccagcctccagtcctgcctccacgacgcgcccttccccaaggctggccgggtctggatgtcgccatcccctattcggagctacagacctcgcagctgaactcttaaaaagaacctcgcttcttcctcacggtgctccagctccacacaccgtactgagcctcgccagccaccgtacgcgaggtcgcggcgcgtccgtgacgtcactgatgtgcgcttctcccgcactaagggaaacatggctctagcgcggccggtgcggctcttttccctcgtgactcggttgctcctggcgccgcgacggggcctcacggtccgcagtcccgacgaacccctgccggtggtgcgcatcccagtggctctacagcggcagttggaacagcggcagagcaggcggcggaacctcccgaggccggtgctggttcgacccggaccgctgctggtttcggcgcggcggccggagttgaaccagccggcgcgcctcacactgggccgttgggagcgcgcgccgctagcctctcaaggctggaagagtcgacgcgcgcgtcgggaccacttctccatcgagcgcgcgcaacaggaggcgccagcggtgcgaaagctctcgtctaagggcagctttgctgacctgggcctggagccccgtgtgctgcacgcactacaggaggctgcgcctgaagtcgttcagcccacaaccgtgcagtctagcaccatcccctcactacttcgcggccgccatgtcgtttgcgccgcagaaaccggcagtggcaagactctcagctacctcctgccgctgcttcaacggctcttgggccagccaagcctggactcccttcctatccccgcgccccgaggcctggtccttgttccttcccgagaattggcccaacaggtgcgggctgtggcccaacccttgggccgctccttgggcctgctggtgcgggacctggagggaggccacggcatgcgtaggatcaggctgcagctgtccagacagccttcagcagatgtgcttgtggccactccaggggctctgtggaaggccctgaaaagtcgactgatcagtctggagcaactctccttcttggtgttggatgaggcagacacactgctggatgaaagcttcctggaactggtggactacatcttagagaagagccacatagcagaaggcccagctgaattggagaagaagctgctgagcatggctttctgtagtctttagcaagacacaagtggattttgactttgtatcatgtcatgatttctaacaataaatgatgtttttatgtgc

SEQ ID NO: 372050 - DNA, 1292 bp, Homo sapiens
ggcgcgccgcaggcagcactggcgggggcctttcctgccgccgacgccggggtcctccctcaggtctcattctgtgcctgtgaacatggcggcgcccgttgtcacggccccgggcagagctctgctgcgggcgggcgctggacggctgcttcggggaggcgtccaggagctactgcggccgcgacatgaagggaacgcccctgacctggcctgcaacttcagcctttctcaaaatcggggcacggtcatcgtggagcgctggtggaaggtaccgctggccggggagggccggaagccgcgcctgcaccggcgacatcgcgtctataagctggtggaggacacgaagcatcggcccaaagaaaacctggagctcatcctgacgcagtcggtggagaatgttggagtccggggtgacctggtctcagtgaagaaatctttaggccggaatcgactccttcctcagggactggctgtatatgcatcccctgaaaacaagaagctgtttgaagaggagaaattgctgagacaagaaggaaaattagagaagatccagaccaaggcaggtgaggcgacagtgaaatttctaaaaagctgtcgcctggaggtagggatgaagaacaatgtcaaatgggagctgaaccctgaaatagttgcccgccacttctttaagaatcttggtgttgtggttgccccacatacattaaagttaccagcagagcctatcacacggtggggcgagtattggtgtgaggtgacggtaaatgggcttgatactgtgagagtgcctatgtctgtcgtgaactttgagaagcccaagaccaaaagatataagtactggttagcccagcaagctgccaaggctatggcccccaccagcccccagatctaaatctactctccctccaaggcagcaaagcagaatcgggagcagtggagcagaaatgtgcaagcaccctgatctcactcccagctctgaccaaatacagaattttagagaacatctgaagacatcagactgcactgcgtatacatgttgaattcttcatttttgccatctttaactgtcatcactggggcagggaagtcctgttccagaagtaccaggctgtagatttgataagctagatgcagtagaccgaaaccatccaaaacctgtttagcttcttcctccattggagtttattgggacaaacaggagagccagccattgtctccagtacttgcctcattctcatcatccaaactgaacatttgtatcccaagcagaaataaagagaatatgttctttttaa

SEQ ID NO: 372051 - DNA, 1717 bp, Homo sapiens
ttcggctaggtacgaggctgggtttgaatcggccgaggactgtgaacatggcggcgcccgttgtcacggccccgggcagagctctgctgcgggcgggcgctggacggctgcttcggggaggcgtccaggagctactgcggccgcgacatgaagggaacgcccctgacctggcctgcaacttcagcctttctcaaaatcggggcacggtcatcgtggagcgctggtggaaggtaccgctggccggggagggccggaagccgcgcctgcaccggcgacatcgcgtctataagctggtggaggacacgaagcatcggcccaaagaaaacctggagctcatcctgacgcagtcggtggagaatgttggagtccggggtgacctggtctcagtgaagaaatctttaggccggaatcgactccttcctcagggactggctgtatatgcatcccctgaaaacaagaagctgtttgaagaggagaaattgctgagacaagaaggaaaattagagaagatccagaccaaggcaggtgaggcgacagtgaaatttctaaaaagctgtcgcctggaggtagggatgaagaacaatgtcaaatgggagctgaaccctgaaatagttgcccgccacttctttaagaatcttggtgttgtggttgccccacatacattaaagttaccagcagagcctatcacacggtggggcgagtattggtgtgaggtgacggtaaatgggcttgatactgtgagagtgcctatgtctgtcgtgaactttgagaagcccaagaccaaaagatataagtactggttagcccagcaagctgccaaggctatggcccccaccagcccccagatctaaatctactctccctccaaggcagcaaagcagaatcgggagcagtggagcagaaatgtgcaagcaccctgatctcactcccagctctgaccaaatacagaattttagagaacatctgaagacatcagactgcactgcgtatacatgttgaattcttcatttttgccatctttaactgtcatcactggggcagggaagtcctgttccagaagtaccaggctgtagatttgataagctagatgcagtagaccgaaaccatccaaaacctgtttagcttcttcctccattggagtttattgggacaaacaggagagccagccattgtctccagtacttgcctcattctcatcatccaaactgaacatttgtatcccaagcagaaataaagagaatatgttctttttaagtaaaaaaaacaaaaaaaaaaaaaaaaaaaaacaaaaaacacaaacacgaaaccaacaaacaacacaaacaacaccacagaacaacaaaaacaaagacaaaccaaaatcaacgcacccaacggaccccacatccaaccccccataaactacaaacagcatgccccgatccactgctgcctgtagaccacgcccataccaagagccaaaaaagcgtgaatatcgaacaccacaagccaaagggcccaccaccatactcgagcacgacccacaacccgacagcaactcacacgaacagacacaccaacgcccacagacgaataccaaccgccacagcccaacaacaagccataaaaaactacgagcgcccgacccgacagcaacgccacgtgccccacaaaacactagcactacgccgaaacgtacacggcgcaacccagaactccactacctaaaccagctcgc

SEQ ID NO: 372052 - DNA, 1141 bp, Homo sapiens
ggcgcgccgcaggcagcactggcgggggcctttcctgccgccgacgccggggtcctccctcaggtctcattctgtgcctgtgaacatggcggcgcccgttgtcacggccccgggcagagctctgctgcgggcgggcgctggacggctgcttcggggaggcgtccaggagctactgcggccgcgacatgaagggaacgcccctgacctggcctgcaacttcagcctttctcaaaatcggggcacggtcatcgtggagcgctggtggaaggtaccgctggccggggagggccggaagccgcgcctgcaccggcgacatcgcgtctataagctggtggaggacacgaagcatcggcccaaagaaaacctggagctcatcctgacgcagtcggtggagaatgttggagtccggggtgacctggtctcagtgaagaaatctttaggccggaatcgactccttcctcagggactggctgtatatgcatcccctgaaaacaagaagctgtttgaagaggagaaattgctgagacaagaaggaaaattagagaagatccagaccaaggcaggtgaggcgacagtgaaatttctaaaaagctgtcgcctggaggtagggatgaagaacaatgtcaaatgggagctgaaccctgaaatagttgcccgccacttctttaagaatcttggtgttgtggttgccccacatacattaaagttaccagcagagcctatcacacggtggggcgagtattggtgtgaggtgacgcagcaaagcagaatcgggagcagtggagcagaaatgtgcaagcaccctgatctcactcccagctctgaccaaatacagaattttagagaacatctgaagacatcagactgcactgcgtatacatgttgaattcttcatttttgccatctttaactgtcatcactggggcagggaagtcctgttccagaagtaccaggctgtagatttgataagctagatgcagtagaccgaaaccatccaaaacctgtttagcttcttcctccattggagtttattgggacaaacaggagagccagccattgtctccagtacttgcctcattctcatcatccaaactgaacatttgtatcccaagcagaaataaagagaatatgttctttttaa

SEQ ID NO: 372053 - DNA, 1313 bp, Homo sapiens
ttcggctaggtacgaggctgggtttgaatcggccgaggactgtgaacatggcggcgcccgttgtcacggccccgggcagagctctgctgcgggcgggcgctggacggctgcttcggggaggcgtccaggagctactgcggccgcgacatgaagggaacgcccctgacctggcctgcaacttcagcctttctcaaaatcggggcacggtcatcgtggagcgctggtggaaggtaccgctggccggggagggccggaagccgcgcctgcaccggcgacatcgcgtctataagctggtggaggacacgaagcatcggcccaaagaaaacctggagctcatcctgacgcagtcggtggagaatgttggagtccggggtgacctggtctcagtgaagaaatctttaggccggaatcgactccttcctcagggactggctgtatatgcatcccctgaaaacaagaagctgtttgaagaggagaaattgctgagacaagaaggaaaattagagaagatccagaccaaggcaggtgaggcggtgattgcagacccaagagtgggagaaaggggaagtgttgtggctgccccacaaaacagacagtgaaatttctaaaaagctgtcgcctggaggtagggatgaagaacaatgtcaaatgggagctgaaccctgaaatagttgcccgccacttctttaagaatcttggtgttgtggttgccccacatacattaaagttaccagcagagcctatcacacggtggggcgagtattggtgtgaggtgacggtaaatgggcttgatactgtgagagtgcctatgtctgtcgtgaactttgagaagcccaagaccaaaagatataagtactggttagcccagcaagctgccaaggctatggcccccaccagcccccagatctaaatctactctccctccaaggcagcaaagcagaatcgggagcagtggagcagaaatgtgcaagcaccctgatctcactcccagctctgaccaaatacagaattttagagaacatctgaagacatcagactgcactgcgtatacatgttgaattcttcatttttgccatctttaactgtcatcactggggcagggaagtcctgttccagaagtaccaggctgtagatttgataagctagatgcagtagaccgaaaccatccaaaacctgtttagcttcttcctccattggagtttattgggacaaacaggagagccagccattgtctccagtacttgcctcattctcatcatccaaactgaacatttgtatcccaagcagaaataaagagaatatgttctttttaa

SEQ ID NO: 372054 - DNA, 1152 bp, Homo sapiens
ttcggctaggtacgaggctgggtttgaatcggccgaggactgtgaacatggcggcgcccgttgtcacggccccgggcagagctctgctgcgggcgggcgctggacggctgcttcggggaggcgtccaggagctactgcggccgcgacatgaagggaacgcccctgacctggcctgcaacttcagcctttctcaaaatcggggcacggtcatcgtggagcgctggtggaaggtaccgctggccggggagggccggaagccgcgcctgcaccggcgacatcgcgtctataagctggtggaggacacgaagcatcggcccaaagaaaacctggagctcatcctgacgcagtcggtggagaatgttggagtccggggtgacctggtctcagtgaagaaatctttaggccggaatcgactccttcctcagggactggctgtatatgcatcccctgaaaacaagaagctgtttgaagaggagaaattgctgagacaagaaggaaaattagagaagatccagaccaaggcaggtgaggcgcttggtgttgtggttgccccacatacattaaagttaccagcagagcctatcacacggtggggcgagtattggtgtgaggtgacggtaaatgggcttgatactgtgagagtgcctatgtctgtcgtgaactttgagaagcccaagaccaaaagatataagtactggttagcccagcaagctgccaaggctatggcccccaccagcccccagatctaaatctactctccctccaaggcagcaaagcagaatcgggagcagtggagcagaaatgtgcaagcaccctgatctcactcccagctctgaccaaatacagaattttagagaacatctgaagacatcagactgcactgcgtatacatgttgaattcttcatttttgccatctttaactgtcatcactggggcagggaagtcctgttccagaagtaccaggctgtagatttgataagctagatgcagtagaccgaaaccatccaaaacctgtttagcttcttcctccattggagtttattgggacaaacaggagagccagccattgtctccagtacttgcctcattctcatcatccaaactgaacatttgtatcccaagcagaaataaagagaatatgttctttttaa

SEQ ID NO: 372055 - DNA, 795 bp, Homo sapiens
ctgtcgtctagctgtcaggtatcacggggcagtgatgctgagacatgaagtcattgtagcagatgtagacgagaacagtgaaatttctaaaaagctgtcgcctggaggtagggatgaagaacaatgtcaaatgggagctgaaccctgaaatagttgcccgccacttctttaagaatcttggtgttgtggttgccccacatacattaaagttaccagcagagcctatcacacggtggggcgagtattggtgtgaggtgacggtaaatgggcttgatactgtgagagtgcctatgtctgtcgtgaactttgagaagcccaagaccaaaagatataagtactggttagcccagcaagctgccaaggctatggcccccaccagcccccagatctaaatctactctccctccaaggcagcaaagcagaatcgggagcagtggagcagaaatgtgcaagcaccctgatctcactcccagctctgaccaaatacagaattttagagaacatctgaagacatcagactgcactgcgtatacatgttgaattcttcatttttgccatctttaactgtcatcactggggcagggaagtcctgttccagaagtaccaggctgtagatttgataagctagatgcagtagaccgaaaccatccaaaacctgtttagcttcttcctccattggagtttattgggacaaacaggagagccagccattgtctccagtacttgcctcattctcatcatccaaactgaacatttgtatcccaagcagaaataaagagaatatgttctttttaa

SEQ ID NO: 372056 - DNA, 853 bp, Homo sapiens
cgagctcggcacccaatgtattgatatgagtggagggactggttctttatttcaaaaagacacttgtcaatattcagtatcaaaacagttgcactattgatttctctttctcccaatcggccccaatgagaccacataaaaggagagtacattttaagccaataagctgcaggatgtacacctaacagacctcctagaaaccttaccagaaaatggggactgggtagggaaggaaacttaaaagatcaacaaactgccagcccacggactgcagaggctgtcacagccagatggggcgagtattggtgtgaggtgacggtaaatgggcttgatactgtgagagtgcctatgtctgtcgtgaactttgagaagcccaagaccaaaagatataagtactggttagcccagcaagctgccaaggctatggcccccaccagcccccagatctaaatctactctccctccaaggcagcaaagcagaatcgggagcagtggagcagaaatgtgcaagcaccctgatctcactcccagctctgaccaaatacagaattttagagaacatctgaagacatcagactgcactgcgtatacatgttgaattcttcatttttgccatctttaactgtcatcactggggcagggaagtcctgttccagaagtaccaggctgtagatttgataagctagatgcagtagaccgaaaccatccaaaacctgtttagcttcttcctccattggagtttattgggacaaacaggagagccagccattgtctccagtacttgcctcattctcatcatccaaactgaacatttgtatcccaagcagaaataaagagaatatgttctttttaa

SEQ ID NO: 372057 - DNA, 721 bp, Homo sapiens
ttcggctaggtacgaggctgggtttgaatcggccgaggactgtgaacatggcggcgcccgttgtcacggccccgggcagagctctgctgcgggcgggcgctggacggctgcttcggggaggcgtccaggagctactgcggccgcgacatgaagggaacgcccctgacctggcctgcaacttcagcctttctcaaaatcggggcacggtcatcgtggagcgctggtggaaggtaccgctggccggggagggccggaagccgcgcctgcaccggcgacatcgcgtctataagctggtggaggacacgaagcatcggcccaaagaaaacctggagctcatcctgacgcagtcggtggagagtaaggcccgggccgaggcgcttcctctcaggctggtccggtttggcatcagctttttctagcccgtccccctcaactatttgccttgctttttctttgtggaaacaatccaactctatatgtgagaagaggaagccataaaaactattgtgattgtgacactggcctccagcattgaaaattaaaacataaaggcagcaacatcattaacagtgtgtggggagaggagcctgacaatttgtgccacagatactgaaatcctccatgggacgacaactccctctatacaggggatattaaatttatacatcaagttctaaagaaactaattagcagtctcttaaatcttgttcctagtgaatat

SEQ ID NO: 372058 - DNA, 540 bp, Homo sapiens
ttcggctaggtacgaggctgggtttgaatcggccgaggactgtgaacatggcggcgcccgttgtcacggccccgggcagagctctgctgcgggcgggcgctggacggctgcttcggggaggcgtccaggagctactgcggccgcgacatgaagggaacgcccctgacctggcctgcaacttcagcctttctcaaaatcggggcacggtcatcgtggagcgctggtggaaggtaccgctggccggggagggccggaagccgcgcctgcaccggcgacatcgcgtctataagctggtggaggacacgaagcatcggcccaaagaaaacctggagctcatcctgacgcagtcggtggagaatgttggagtccggggtgacctggtctcagtgaagaaatctttaggccggaatcgactccttcctcagggactggctgtatatgcatcccctgaaaacaagaagctgtttgaagaggagaaattggtgagctcaaaggaaggacagagagacttggggagataaaacttcttttctcttgcag

SEQ ID NO: 372059 - DNA, 1254 bp, Homo sapiens
ttcggctaggtacgaggctgggtttgaatcggccgaggactgtgaacatggcggcgcccgttgtcacggccccgggcagagctctgctgcgggcgggcgctggacggctgcttcggggaggcgtccaggagctactgcggccgcgacatgaagggaacgcccctgacctggcctgcaacttcagcctttctcaaaatcggggcacggtcatcgtggagcgctggtggaaggtaccgctggccggggagggccggaagccgcgcctgcaccggcgacatcgcgtctataagctggtggaggacacgaagcatcggcccaaagaaaacctggagctcatcctgacgcagtcggtggagaatgttggagtccggggtgacctggtctcagtgaagaaatctttaggccggaatcgactccttcctcagggactggctgtatatgcatcccctgaaaacaagaagctgtttgaagaggagaaattgctgagacaagaaggaaaattagagaagatccagaccaaggcaggtgaggcgacagtgaaatttctaaaaagctgtcgcctggaggtagggatgaagaacaatgtcaaatgggagctgaaccctgaaatagttgcccgccacttctttaagaatcttggtgttgtggttgccccacatacattaaagttaccagcagagcctatcacacggtggggcgagtattggtgtgaggtgacggtaaatgggcttgatactgtgagagtgcctatgtctgtcgtgaactttgagaagcccaagaccaaaagatataagtactggttagcccagcaagctgccaaggctatggcccccaccagcccccagatctaaatctactctccctccaaggcagcaaagcagaatcgggagcagtggagcagaaatgtgcaagcaccctgatctcactcccagctctgaccaaatacagaattttagagaacatctgaagacatcagactgcactgcgtatacatgttgaattcttcatttttgccatctttaactgtcatcactggggcagggaagtcctgttccagaagtaccaggctgtagatttgataagctagatgcagtagaccgaaaccatccaaaacctgtttagcttcttcctccattggagtttattgggacaaacaggagagccagccattgtctccagtacttgcctcattctcatcatccaaactgaacatttgtatcccaagcagaaataaagagaatatgttctttttaa

SEQ ID NO: 372060 - DNA, 1283 bp, Homo sapiens
ttcggctaggtacgaggctgggtttgaatcggccgaggactgtgaacatggcggcgcccgttgtcacggccccgggcagagctctgctgcgggcgggcgctggacggctgcttcggggaggcgtccaggagctactgcggccgcgacatgaagggaacgcccctgacctggcctgcaacttcagcctttctcaaaatcggggcacggtcatcgtggagcgctggtggaaggtaccgctggccggggagggccggaagccgcgcctgcaccggcgacatcgcgtctataagctggtggaggacacgaagcatcggcccaaagaaaacctggagctcatcctgacgcagtcggtggagaatgttggagtccggggtgacctggtctcagtgaagaaatctttaggccggaatcgactccttcctcagggactggctgtatatgcatcccctgaaaacaagaagctgtttgaagaggagaaattgctgagacaagaaggaaaattagagaagatccagaccaaggcaggtgaggcgacagtgaaatttctaaaaagctgtcgcctggaggtagggatgaagaacaatgtcaaatgggagctgaaccctgaaatagttgcccgccacttctttaagaatcttggtgttgtggttgccccacatacattaaagttaccagcagagcctatcacacggtggggcgagtattggtgtgaggtgacggtaaatgggcttgatactgtgagagtgcctatgtctgtcgtgaactttgagaagcccaagaccaaaagatataagtactggttagcccagcaagctgccaaggctatggcccccaccagcccccagatctaaatctactctccctccaaggcagcaaagcagaatcgggagcagtggagcagaaatgtgcaagcaccctgatctcactcccagctctgaccaaatacagaattttagagaacatctgaagacatcagactgcactgcgtatacatgttgaattcttcatttttgccatctttaactgtcatcactggggcagggaagtcctgttccagaagtaccaggctgtagatttgataagctagatgcagtagaccgaaaccatccaaaacctgtttagcttcttcctccattggagtttattgggacaaacaggagagccagccattgtctccagtacttgcctcattctcatcatccaaactgaacatttgtatcccaagcagaaataaagagaatatgttctttttaaaaaaaaacacaccacacaccaaacaccag

SEQ ID NO: 372061 - DNA, 1112 bp, Homo sapiens
ccacttgtgtgctcatcccacctgtgtgctcatcccactgtgtgctcctgtgtgctatggcacggtcatcgtggagcgctggtggaaggtaccgctggccggggagggccggaagccgcgcctgcaccggcgacatcgcgtctataagctggtggaggacacgaagcatcggcccaaagaaaacctggagctcatcctgacgcagtcggtggagaatgttggagtccggggtgacctggtctcagtgaagaaatctttaggccggaatcgactccttcctcagggactggctgtatatgcatcccctgaaaacaagaagctgtttgaagaggagaaattgctgagacaagaaggaaaattagagaagatccagaccaaggcaggtgaggcgacagtgaaatttctaaaaagctgtcgcctggaggtagggatgaagaacaatgtcaaatgggagctgaaccctgaaatagttgcccgccacttctttaagaatcttggtgttgtggttgccccacatacattaaagttaccagcagagcctatcacacggtggggcgagtattggtgtgaggtgacggtaaatgggcttgatactgtgagagtgcctatgtctgtcgtgaactttgagaagcccaagaccaaaagatataagtactggttagcccagcaagctgccaaggctatggcccccaccagcccccagatctaaatctactctccctccaaggcagcaaagcagaatcgggagcagtggagcagaaatgtgcaagcaccctgatctcactcccagctctgaccaaatacagaattttagagaacatctgaagacatcagactgcactgcgtatacatgttgaattcttcatttttgccatctttaactgtcatcactggggcagggaagtcctgttccagaagtaccaggctgtagatttgataagctagatgcagtagaccgaaaccatccaaaacctgtttagcttcttcctccattggagtttattgggacaaacaggagagccagccattgtctccagtacttgcctcattctcatcatccaaactgaacatttgtatcccaagcagaaataaagagaatatgttctttttaa

SEQ ID NO: 372062 - DNA, 1291 bp, Homo sapiens
ttcggctaggtacgaggctgggtttgaatcggccgaggactgtgaacatggcggcgcccgttgtcacggccccgggcagagctctgctgcgggcgggcgctggacggctgcttcggggaggcgtccaggagctactgcggccgcgacatgaagggaacgcccctgacctggcctgcaacttcagcctttctcaaaatcggggcacggtcatcgtggagcgctggtggaaggtaccgctggccggggagggccggaagccgcgcctgcaccggcgacatcgcgtctataagctggtggaggacacgaagcatcggcccaaagaaaacctggagctcatcctgacgcagtcggtggagagtaaggcccgggccgaggcgcttcctctcaggctggtatgttggagtccggggtgacctggtctcagtgaagaaatctttaggccggaatcgactccttcctcagggactggctgtatatgcatcccctgaaaacaagaagctgtttgaagaggagaaattgctgagacaagaaggaaaattagagaagatccagaccaaggcaggtgaggcgacagtgaaatttctaaaaagctgtcgcctggaggtagggatgaagaacaatgtcaaatgggagctgaaccctgaaatagttgcccgccacttctttaagaatcttggtgttgtggttgccccacatacattaaagttaccagcagagcctatcacacggtggggcgagtattggtgtgaggtgacggtaaatgggcttgatactgtgagagtgcctatgtctgtcgtgaactttgagaagcccaagaccaaaagatataagtactggttagcccagcaagctgccaaggctatggcccccaccagcccccagatctaaatctactctccctccaaggcagcaaagcagaatcgggagcagtggagcagaaatgtgcaagcaccctgatctcactcccagctctgaccaaatacagaattttagagaacatctgaagacatcagactgcactgcgtatacatgttgaattcttcatttttgccatctttaactgtcatcactggggcagggaagtcctgttccagaagtaccaggctgtagatttgataagctagatgcagtagaccgaaaccatccaaaacctgtttagcttcttcctccattggagtttattgggacaaacaggagagccagccattgtctccagtacttgcctcattctcatcatccaaactgaacatttgtatcccaagcagaaataaagagaatatgttctttttaa

SEQ ID NO: 372063 - DNA, 1350 bp, Homo sapiens
ttcggctaggtacgaggctgggtttgaatcggccgaggactgtgaacatggcggcgcccgttgtcacggccccgggcagagctctgctgcgggcgggcgctggacggctgcttcggggaggcgtccaggagctactgcggccgcgacatgaagggaacgcccctgacctggcctgcaacttcagcctttctcaaaatcggggcacggtcatcgtggagcgctggtggaaggtaccgctggccggggagggccggaagccgcgcctgcaccggcgacatcgcgtctataagctggtggaggacacgaagcatcggcccaaagaaaacctggagctcatcctgacgcagtcggtggagagtaaggcccgggccgaggcgcttcctctcaggctggtatgttggagtccggggtgacctggtctcagtgaagaaatctttaggccggaatcgactccttcctcagggactggctgtatatgcatcccctgaaaacaagaagctgtttgaagaggagaaattgctgagacaagaaggaaaattagagaagatccagaccaaggcaggtgaggcggtgattgcagacccaagagtgggagaaaggggaagtgttgtggctgccccacaaaacagacagtgaaatttctaaaaagctgtcgcctggaggtagggatgaagaacaatgtcaaatgggagctgaaccctgaaatagttgcccgccacttctttaagaatcttggtgttgtggttgccccacatacattaaagttaccagcagagcctatcacacggtggggcgagtattggtgtgaggtgacggtaaatgggcttgatactgtgagagtgcctatgtctgtcgtgaactttgagaagcccaagaccaaaagatataagtactggttagcccagcaagctgccaaggctatggcccccaccagcccccagatctaaatctactctccctccaaggcagcaaagcagaatcgggagcagtggagcagaaatgtgcaagcaccctgatctcactcccagctctgaccaaatacagaattttagagaacatctgaagacatcagactgcactgcgtatacatgttgaattcttcatttttgccatctttaactgtcatcactggggcagggaagtcctgttccagaagtaccaggctgtagatttgataagctagatgcagtagaccgaaaccatccaaaacctgtttagcttcttcctccattggagtttattgggacaaacaggagagccagccattgtctccagtacttgcctcattctcatcatccaaactgaacatttgtatcccaagcagaaataaagagaatatgttctttttaa

SEQ ID NO: 372064 - DNA, 1068 bp, Homo sapiens
ttcggctaggtacgaggctgggtttgaatcggccgaggactgtgaacatggcggcgcccgttgtcacggccccgggcagagctctgctgcgggcgggcgctggacggctgcttcggggaggcgtccaggagctactgcggccgcgacatgaagggaacgcccctgacctggcctgcaacttcagcctttctcaaaatcggggcacggtcatcgtggagcgctggtggaaggtaccgctggccggggagggccggaagccgcgcctgcaccggcgacatcgcgtctataagctggtggaggacacgaagcatcggcccaaagaaaacctggagctcatcctgacgcagtcggtggagaatgttggagtccggggtgacctggtctcagtgaagaaatctttaggccggaatcgactccttcctcagggactggctgtatatgcatcccctgaaaacaagaagctgtttgaagaggagaaattgctgagacaagaaggaaaattagagaagatccagaccaaggcaggtgaggcggtaaatgggcttgatactgtgagagtgcctatgtctgtcgtgaactttgagaagcccaagaccaaaagatataagtactggttagcccagcaagctgccaaggctatggcccccaccagcccccagatctaaatctactctccctccaaggcagcaaagcagaatcgggagcagtggagcagaaatgtgcaagcaccctgatctcactcccagctctgaccaaatacagaattttagagaacatctgaagacatcagactgcactgcgtatacatgttgaattcttcatttttgccatctttaactgtcatcactggggcagggaagtcctgttccagaagtaccaggctgtagatttgataagctagatgcagtagaccgaaaccatccaaaacctgtttagcttcttcctccattggagtttattgggacaaacaggagagccagccattgtctccagtacttgcctcattctcatcatccaaactgaacatttgtatcccaagcagaaataaagagaatatgttctttttaa

SEQ ID NO: 372065 - DNA, 655 bp, Homo sapiens
ttcggctaggtacgaggctgggtttgaatcggccgaggactgtgaacatggcggcgcccgttgtcacggccccgggcagagctctgctgcgggcgggcgctggacggctgcttcggggaggcgtccaggagctactgcggccgcgacatgaagggaacgcccctgacctggcctgcaacttcagcctttctcaaaatcggggcacggtcatcgtggagcgctggtggaaggtaccgctggccggggagggccggaagccgcgcctgcaccggcgacatcgcgtctataagctggtggaggacacgaagcatcggcccaaagaaaacctggagctcatcctgacgcagtcggtggagaatgttggagtccggggtgacctggtctcagtgaagaaatctttaggccggaatcgactccttcctcagggactggctgtatatgcatcccctgaaaacaagaagctgtttgaagaggagaaattgctgagacaagaaggaaaattagagaagacccagcattctgtacttcgggggccttctctcttgttataaaactttttaccaagtgaaacatcgataccacctttgtttccattctcactggtgtaaatactgagtactaactgagaattttgactttgcattctgtcggaata

SEQ ID NO: 372066 - DNA, 1638 bp, Homo sapiens
cgcccgagcctgcgtctgccaatgatccaggagccgctcctttccactcgggaaaccttcagaggagtctcagaaaggacacggctggctgcttttctcagcgccgaagccgcgccatgctcgtcctcagaagcgccctgactcgggcgctggcctcacggacgctggcgcctcagatgtgctcatcttttgctacgggacccagacaatacgatggaatattctatgaatttcgttcttattaccttaagccctcaaagatgaatgagttcctggaaaattttgagaaaaacgctcatcttcggacagctcactctgaattggttggatactggagtgtagaatttggaggcagaatgaatacagtgtttcatatttggaagtatgataattttgctcatcgaactgaagttcggaaagccttggccaaagataaggaatggcaagaacaattcctcattccaaatttggctctcattgataaacaagagagtgagattacttatctggtaccatggtgcaaattagaaaaacctccaaaagaaggagtctatgaactggccacttttcagatgaaacctggtgggccagctctgtggggtgatgcatttaaaagggcagttcatgctcatgtcaatctaggctacacaaaactagttggagtgttccacacagagtacggagcactcaacagagttcatgttctttggtggaatgagagtgcagatagtcgtgcagctgggagacataagtcccatgaggatcccagagttgtggcagctgttcgggaaagtgtcaactacctagtatctcagcagaatatgcttctgattcctacatcgttttcaccactgaaatagttttctactgaaatacaaaacatttcattaactgctataggatctgtctgctaatggtgcttaaattctcccaagaggttctcacttttatttgaaggaggtggtaagttaatttgctatgtttcttgcattatgaaggctacatctgtgctttgtaagtaccacttcaaaaaatagttctgtttactttctgcatggtatttcagtgtctgtcatacattaaaaatacttgtcactgttttaagatcttgactcttcatttgtttcagaatagctcttctactgtattctgacaactctttgctttatagcattttgttgtattcaaatgataatggtagcatttccatgcttgtgacagcatttttaagttattaatatattttatcaacctttccatcatgtctgttttcctggttttttttggttgttttttgaccagtaaaatttattttgtaataccaaataggatttaagaaaattaacgtatttctttactatggaaaaccacattgtcatttgtgacatcatctatattaaatatggttttcacattagttatttgtcacttacttggaaaatgatgctgttaggtcctggtattaaaaatctagaaaagacttgttggtttatgtgctgaaatgtctttatttataattaattttaactactatttacttcatttcggatcctgtttaacaaagatacttgagacatccatttgttttaatgaaatctgtatggatatggaaatgcttgccctaataaaagcctacat

SEQ ID NO: 372067 - DNA, 1100 bp, Homo sapiens
cgcccgagcctgcgtctgccaatgatccaggagccgctcctttccactcgggaaaccttcagaggagtctcagaaaggacacggctggctgcttttctcagcgccgaagccgcgccatgctcgtcctcagaagcgccctgactcgggcgctggcctcacggacgctggcgcctcagatgtgctcatcttttgctacgggacccagacaatacgatggaatattctatgaatttcgttcttattaccttaagccctcaaagatgaatgagttcctggaaaattttgagaaaaacgctcatcttcggacagctcactctgaattggttggatactggagtgtagaatttggaggcagaatgaatacagtgtttcatatttggaagtatgataattttgctcatcgaactgaagttcggaaagccttggccaaagataaggaatggcaagaacaattcctcattccaaatttggctctcattgataaacaagagagtgagattacttatctggtaccatggtgcaaattagaaaaacctccaaaagaaggagtctatgaactggccacttttcagatgaaacctggtgggccagctctgtggggtgatgcatttaaaagggcagttcatgctcatgtcaatctaggctacacaaaactagttggagtgttccacacagagtacggagcactcaacagagttcatgttctttggtggaatgagagtgcagatagtcgtgcagctgggagacataagtcccatgaggatcccagagttgtggcagctgttcgggaaagtgtcaactacctagtatctcagcagaatatgcttctgattcctacatcgttttcaccactgaaatagttttctactgaaatacaaaacatttcattaactgctataggatctgtctgctaatggtgcttaaattctcccaagaggttctcacttttatttgaaggaggtggtaagttaatttgctatgtttcttgcattatgaaggctacatctgtgctttgtaagtaccacttcaaaaaatagttctgtttactttctgcatggtatttcagtgtctgtcatacattaaaaatacttgtcactgtt

SEQ ID NO: 372068 - DNA, 720 bp, Homo sapiens
cgcccgagcctgcgtctgccaatgatccaggagccgctcctttccactcgggaaaccttcagaggagtctcagaaaggacacggctggctgcttttctcagcgccgaagccgcgccatgctcgtcctcagaagcgccctgactcgggcgctggcctcacggacgctggcgcctcagatgtgctcatcttttgctacgggacccagacaatacgatggaatattctatgaatttcgttcttattaccttaagccctcaaagatgaatgagttcctggaaaattttgagaaaaacgctcatcttcggacagctcactctgaattggttggatactggagtgtagaatttggaggcagaatgaatacagtgtttcatatttggaagtatgataattttgctcatcgagctgaagttcggaaagccttagccaactgtaaggaatggcaagaacaatctatcattccaaatttggctcgcattgataaacaagagacggaaattacttacctgataccatggtccaaattagaaaagcctccaaaagaagttcatgttctttggtggaatgagagtgcagatagtcgtgcagctgggagacataagtcccatgaggatcccagagttgtggcggctgttcgggaaagtgtcaactacctagtttctcagcagaatatgcttctgattcctgcatcattttcaccattgaaatagttttctactg

SEQ ID NO: 372069 - DNA, 1592 bp, Homo sapiens
cgcccgagcctgcgtctgccaatgatccaggagccgctcctttccactcgggaaaccttcagaggagtctcagaaaggacacggctggctgcttttctcagcgccgaagccgcgccatgctcgtcctcagatgtgctcatcttttgctacgggacccagacaatacgatggaatattctatgaatttcgttcttattaccttaagccctcaaagatgaatgagttcctggaaaattttgagaaaaacgctcatcttcggacagctcactctgaattggttggatactggagtgtagaatttggaggcagaatgaatacagtgtttcatatttggaagtatgataattttgctcatcgaactgaagttcggaaagccttggccaaagataaggaatggcaagaacaattcctcattccaaatttggctctcattgataaacaagagagtgagattacttatctggtaccatggtgcaaattagaaaaacctccaaaagaaggagtctatgaactggccacttttcagatgaaacctggtgggccagctctgtggggtgatgcatttaaaagggcagttcatgctcatgtcaatctaggctacacaaaactagttggagtgttccacacagagtacggagcactcaacagagttcatgttctttggtggaatgagagtgcagatagtcgtgcagctgggagacataagtcccatgaggatcccagagttgtggcagctgttcgggaaagtgtcaactacctagtatctcagcagaatatgcttctgattcctacatcgttttcaccactgaaatagttttctactgaaatacaaaacatttcattaactgctataggatctgtctgctaatggtgcttaaattctcccaagaggttctcacttttatttgaaggaggtggtaagttaatttgctatgtttcttgcattatgaaggctacatctgtgctttgtaagtaccacttcaaaaaatagttctgtttactttctgcatggtatttcagtgtctgtcatacattaaaaatacttgtcactgttttaagatcttgactcttcatttgtttcagaatagctcttctactgtattctgacaactctttgctttatagcattttgttgtattcaaatgataatggtagcatttccatgcttgtgacagcatttttaagttattaatatattttatcaacctttccatcatgtctgttttcctggttttttttggttgttttttgaccagtaaaatttattttgtaataccaaataggatttaagaaaattaacgtatttctttactatggaaaaccacattgtcatttgtgacatcatctatattaaatatggttttcacattagttatttgtcacttacttggaaaatgatgctgttaggtcctggtattaaaaatctagaaaagacttgttggtttatgtgctgaaatgtctttatttataattaattttaactactatttacttcatttcggatcctgtttaacaaagatacttgagacatccatttgttttaatgaaatctgtatggatatggaaatgcttgccctaataaaagcctacat

SEQ ID NO: 372070 - DNA, 1315 bp, Homo sapiens
gtcatctgtatgattaagcataacaactcactcttaaacatgggcaaggactttctaagcataaaagcagagagtgcaaatataataaacatgtctacataatatgtatgcatgtctgatcctccaaatctgtgtgtgtagatagtgaaagactattcactgagaaacgtgattggatattgcttgaatgttttctgaaaaattctttttctccctattccaggagtctatgaactggccacttttcagatgaaacctggtgggccagctctgtggggtgatgcatttaaaagggcagttcatgctcatgtcaatctaggctacacaaaactagttggagtgttccacacagagtacggagcactcaacagagttcatgttctttggtggaatgagagtgcagatagtcgtgcagctgggagacataagtcccatgaggatcccagagttgtggcagctgttcgggaaagtgtcaactacctagtatctcagcagaatatgcttctgattcctacatcgttttcaccactgaaatagttttctactgaaatacaaaacatttcattaactgctataggatctgtctgctaatggtgcttaaattctcccaagaggttctcacttttatttgaaggaggtggtaagttaatttgctatgtttcttgcattatgaaggctacatctgtgctttgtaagtaccacttcaaaaaatagttctgtttactttctgcatggtatttcagtgtctgtcatacattaaaaatacttgtcactgttttaagatcttgactcttcatttgtttcagaatagctcttctactgtattctgacaactctttgctttatagcattttgttgtattcaaatgataatggtagcatttccatgcttgtgacagcatttttaagttattaatatattttatcaacctttccatcatgtctgttttcctggttttttttggttgttttttgaccagtaaaatttattttgtaataccaaataggatttaagaaaattaacgtatttctttactatggaaaaccacattgtcatttgtgacatcatctatattaaatatggttttcacattagttatttgtcacttacttggaaaatgatgctgttaggtcctggtattaaaaatctagaaaagacttgttggtttatgtgctgaaatgtctttatttataattaattttaactactatttacttcatttcggatcctgtttaacaaagatacttgagacatccatttgttttaatgaaatctgtatggatatggaaatgcttgccctaataaaagcctacat

SEQ ID NO: 372071 - DNA, 1111 bp, Homo sapiens
  misc_feature (2)..(2): n is a, c, g, or t
gnggttggcgcactagacctgtggatcccccgggctgttggaattcggcactaggaaaaacctttaaaagaaggagtctatgaactggccacttttcagatgaaacctggtgggccagctctgtggggtgatgcatttaaaagggcagttcatgctcatgtcaatctaggctacacaaaactagttggagtgttccacacagagtacggagcactcaacagagttcatgttctttggtggaatgagagtgcagatagtcgtgcagctgggagacataagtcccatgaggatcccagagttgtggcagctgttcgggaaagtgtcaactacctagtatctcagcagaatatgcttctgattcctacatcgttttcaccactgaaatagttttctactgaaatacccaagaggttctcacttttatttgaaggaggtggtaagttaatttgctatgtttcttgcattatgaaggctacatctgtgctttgtaagtaccacttcaaaaaatagttctgtttactttctgcatggtatttcagtgtctgtcatacattaaaaatacttgtcactgttttaagatcttgactcttcatttgtttcagaatagctcttctactgtattctgacaactctttgctttatagcattttgttgtattcaaatgataatggtagcatttccatgcttgtgacagcatttttaagttattaatatattttatcaacctttccatcatgtctgttttcctggttttttttggttgttttttgaccagtaaaatttattttgtaataccaaataggatttaagaaaattaacgtatttctttactatggaaaaccacattgtcatttgtgacatcatctatattaaatatggttttcacattagttatttgtcacttacttggaaaatgatgctgttaggtcctggtattaaaaatctagaaaagacttgttggtttatgtgctgaaatgtctttatttataattaattttaactactatttacttcatttcggatcctgtttaacaaagatacttgagacatccatttgttttaatgaaatctgtatggatatggaaatgcttgccctaataaaagcctacat

SEQ ID NO: 372072 - DNA, 1481 bp, Homo sapiens
cgcccgagcctgcgtctgccaatgatccaggagccgctcctttccactcgggaaaccttcagaggagtctcagaaaggacacggctggctgcttttctcagcgccgaagccgcgccatgctcgtcctcagaagcgccctgactcgggcgctggcctcacggacgctggcgcctcagatgtgctcatcttttgctacgggacccagacaatacgatggaatattctatgaatttcgttcttattaccttaagccctcaaagatgaatgagttcctggaaaattttgagaaaaacgctcatcttcggacagctcactctgaattggttggatactggagtgtagaatttggaggcagaatgaatacagtgtttcatatttggaagtatgataattttgctcatcgaactgaagttcggaaagccttggccaaagataaggaatggcaagaacaattcctcattccaaatttggctctcattgataaacaagagagtgagattacttatctggtaccatggtgcaaattagaaaaacctccaaaagaaggagtctatgaactggccacttttcagatgaaacctggtgggccagctctgtggggtgatgcatttaaaagggcagttcatgctcatgtcaatctaggctacacaaaactagttggagtgttccacacagagtacggagcactcaacagagttcatgttctttggtggaatgagagtgcagatagtcgtgcagctgggagacataagtcccatgaggatcccagagttgtggcagctgttcgggaaagtgtcaactacctagtatctcagcagaatatgcttctgattcctacatcgttttcaccactgaaatagttttctactgaaatacaaaacatttcattaactgctataggatctgtctgctaatggtgcttaaattctcccaagaggttctcacttttatttgaaggaggtggtaagttaatttgctatgtttcttgcattatgaaggctacatctgtgctttgtaagtaccacttcaaaaaatagttctgtttactttctgcatggtatttcagtgtctgtcatacattaaaaatacttgtcactgttttaagatcttgactcttcatttgtttcagaatagctcttctactgtattctgacaactctttgctttatagcattttgttgtattcaaatgataatggtagcatttccatgcttgtgacagcatttttaagttattaatatattttatcaacctttccatcatgtctgttttcctggttttttttggttgttttttgaccagtaaaatttattttgtaataccaaataggatttaagaaaattaacgtatttctttactatggaaaaccacattgtcatttgtgacatcatctatattaaatatggttttcacattagttatttgtcacttacttggaaaatgatgctgttaggtcctggtattaaaaatctagaaaagac

SEQ ID NO: 372073 - DNA, 1728 bp, Homo sapiens
cgcccgagcctgcgtctgccaatgatccaggagccgctcctttccactcgggaaaccttcagaggagtctcagaaaggacacggctggctgcttttctcagcgccgaagccgcgccatgctcgtcctcagaagcgccctgactcgggcgctggcctcacggacgctggcgcctcagatgtgctcatcttttgctacgggacccagacaatacgatggaatattctatgaatttcgttcttattaccttaagccctcaaagatgaatgagttcctggaaaattttgagaaaaacgctcatcttcggacagctcactctgaattggttggatactggagtgtagaatttggaggcagaatgaatacagtgtttcatatttggaagtatgataattttgctcatcgaactgaagttcggaaagccttggccaaagataaggaatggcaagaacaattcctcattccaaatttggctctcattgataaacaagagagtgagattacttatctggtaccatggtgcaaattagaaaaacctccaaaagaaggagtctatgaactggccacttttcagatgaaacctggtgggccagctctgtggggtgatgcatttaaaagggcagttcatgctcatgtcaatctaggctacacaaaactagttggagtgttccacacagagtacggagcactcaacagagttcatgttctttggtggaatgagagtgcagatagtcgtgcagctgggagacataagtcccatgaggatcccagagttgtggcagctggtaagctgtttgactaggcatgaattatttttagaacaaatgtgtttcagtcagtaactctatatgcctttctatgaaatgtttttccagttcgggaaagtgtcaactacctagtatctcagcagaatatgcttctgattcctacatcgttttcaccactgaaatagttttctactgaaatacaaaacatttcattaactgctataggatctgtctgctaatggtgcttaaattctcccaagaggttctcacttttatttgaaggaggtggtaagttaatttgctatgtttcttgcattatgaaggctacatctgtgctttgtaagtaccacttcaaaaaatagttctgtttactttctgcatggtatttcagtgtctgtcatacattaaaaatacttgtcactgttttaagatcttgactcttcatttgtttcagaatagctcttctactgtattctgacaactctttgctttatagcattttgttgtattcaaatgataatggtagcatttccatgcttgtgacagcatttttaagttattaatatattttatcaacctttccatcatgtctgttttcctggttttttttggttgttttttgaccagtaaaatttattttgtaataccaaataggatttaagaaaattaacgtatttctttactatggaaaaccacattgtcatttgtgacatcatctatattaaatatggttttcacattagttatttgtcacttacttggaaaatgatgctgttaggtcctggtattaaaaatctagaaaagacttgttggtttatgtgctgaaatgtctttatttataattaattttaactactatttacttcatttcggatcctgtttaacaaagatacttgagacatccatttgttttaatgaaatctgtatggatatggaaatgcttgccctaataaaagcctacat

SEQ ID NO: 372074 - DNA, 3619 bp, Homo sapiens
tcctttgcgtgggctcccgatgggctgcctgagcgggtgcgcgggcaacttccggtgtgggtgacgagtggtggccgaagcagggggacagcaagggacgctcaggcggggaccatggcggacggcggctcggagcgggctgacgggcgcatcgtcaagatggaggtggactacagcgccacggtggatcagcgcctacccgagtgtgcgaagctagccaaggaaggaagacttcaagaagtcattgaaacccttctctctctggaaaagcagactcgtactgcttccgatatggtatcgacatcccgtatcttagttgcagtagtgaagatgtgctatgaggctaaagaatgggatttacttaatgaaaatattatgcttttgtccaaaaggcggagtcagttaaaacaagctgttgccaaaatggttcaacagtgctgtacttatgttgaggaaatcacagaccttcctatcaaacttcgattaattgatactctacgaatggttaccgaaggcaagatttatgttgaaattgagcgtgcgcgactgactaaaacattagcaactataaaagaacaaaatggtgatgtgaaagaggcagcctccattttacaggagttacaggtggaaacctacgggtcaatggaaaagaaagagcgagtggaatttattttggagcaaatgaggctctgcctagctgtgaaggattacattcgaacacaaatcatcagcaagaaaattaacaccaaatttttccaggaagaaaatacagagaaattaaagttgaagtactataatttaatgattcagctggatcaacatgagggatcctatttgtctatttgtaagcactacagagcaatatatgatactccctgtatacaggcagaaagtgaaaaatggcagcaggctctgaagagtgttgtactctatgttatcctggctccttttgacaatgaacagtcagatttggttcaccgaataagtggtgacaagaagttagaagaaattcccaaatacaaggatcttttaaagctttttaccacaatggagttgatgcgttggtccacacttgttgaggactatggaatggaattaagaaaaggttcccttgagagtcctgcaacggatgtttttggttctacagaggaaggtgaaaaaaggtggaaagacttgaagaacagagttgttgaacataatattagaataatggccaagtattatactcggataacaatgaaaaggatggcacagcttctggatctatctgttgatgagtccgaagcctttctctcaaatctagtagttaacaagaccatctttgctaaagtagacagattagcaggaattatcaacttccagagacccaaggatccaaataatttattaaatgactggtctcagaaactgaactcattaatgtctctggttaacaaaactacgcatctcatagccaaagaggagatgatacataatctacaataagggtcttagtgctttagaaaaaagttaaaattggaagtcattaaaaaaagactgttataatggtgtatatgttggggttttttttctaagcttctttgtcttaaattttaaaatagtgaatatgtttgagactccctttgacctttcagttccccaagttcattgttaactttgcatttgcaattggtgcaaaaatacagatttctgtcgtctgaatacacaaaaagttgtgtcataacttacccagatatgtttttctatcatttgaaacctttttagctactgtttgttttcattcaactaacaaacatattccaataataaaagcagtatatacatatttcctttctacagttacctctgattctcaacattttgtggggtagtgatttggcaagtgttttttaaataaaacaaatctcattgtaaagttatcagtcatttagtagaatagaaaagcaacatagagcatacaagaacatttgggatagagttgtgatttgtgaagaatttgtactttgatattgtggcggaaagtctagactgagtgtgtatgctggtaaactgtagacttttttttttttttttgagtccggctggttccaatcacagtagcttgattgctttcagccctcatcctctcacttgatcagttgttcaacagaatcagctgacataattgacacagtttattgggtgttaagtccgctctatagggatagtgactacttttttttttttttttttttttgctcttcttcctctcccctttctttatatgggtttaaatttaacataaagttgtttttataaggcttatttgtggctttaacttgtaagtctgattacatcattattgttccaaattcattatctctgtaggaacttttagttccattatatgaacactggataacctaattttttttaatgctttaaaaaaatggcaaaaagacgtcaggccaccctcatagtaagtggtgtagtattaaaatattttcacggaattaaaagtagcttgctgtcaaagaaacacctgagatgaattggtgtgaacgaattttgcaagtttaatttgatttatttcagagaaaatagaaaaaacaatgttagaaggttatttaaaatgatacttaaataaagaaagtgtgaggtctactttaaaaaaattcaaatgaagagaaaaagaaaaacagcattctagaaatggcatttctcctaattaattttccacttaatggaagattatcaattgtcctattttatgatcccaggactgaagacagttgtgggatatctgtcatatttatcctgtgagtcattgtgaataatgacatacagtactgaagtaatctgattttattctttggaaattcaatgcattggtcacactaataacatcaacatctgctatcacttatctttttaaaactaaccaaaaaaggctgggattacaggcatgagccactgcacccaactcctctttcgtctttctttaacacacactaggctctttgtgtattatgattcagtgctatttgtaactgtgtcccagtgaccaaattgcactcgactcgatcagctgttcatccatttcgtgttttttcctgtcaaacattaatccagcaaatatatgaggtatttaccaatttattttcttagtattacaaaataattcattagcataaagtacaatagtgaaatatttgagttgttcggaacctcaattaatcctgttttacatttcagacctaaagctggcaatcaggagaagaagcactttgttttaaatgtggagaagataacacttgattccatttcattgtcattagtgtattaaccagcaggagaggtgatgagccatttttcaaatgaaataccttttatttccatataatttttttattttagagttcaatagctgtttctatgattatcctcaatttccatatgttactgaatctgaaaaacatctttaaaattcaaacagttccattttctctcttgtaagtgttaaatgtgataaaagtacatattttaaattgttttcagctcttggatatagcagcaataaaaacactaatttgtgggtatttaagaaaacctggagaataaactcatactttaaaagatc

SEQ ID NO: 372075 - DNA, 562 bp, Homo sapiens
tcctttgcgtgggctcccgatgggctgcctgagcgggtgcgcgggcaacttccggtgtgggtgacgagtggtggccgaagcagggggacagcaagggacgctcaggcggggaccatggcggacggcggctcggagcgggctgacgggcgcatcgtcaagatggaggtggactacagcgccacggtggatcagcgcctacccgagtgtgcgaagctagccaaggaaggaagacttcaagaagtcattgaaacccttctctctctggaaaagcagactcgtactgcttccgatatggtatcgacatcccgtatcttagttgcagtagtgaagatgtgctatgaggctaaagaatgggatttacttaatgaaaatattatgcttttgtccaaaaggcggagtcagttaaaacaagtgagttcatgatcatgtctgctccaaacacaaaagcatttgtatttcagaacttttcacaagctcttctataagtctgtttaaaatgtgttaagtcaacgttgtaacatcctagagggtgttttaaaattcagtctacattctcacaatg

SEQ ID NO: 372076 - DNA, 2746 bp, Homo sapiens
ggctgttctagaggatccctcataggtcgcaggcaggctctgaagagtgttgtactctatgttatcctggctccttttgacaatgaacagtcagatttggttcaccgaataagtggtgacaagaagttagaagaaattcccaaatacaaggatcttttaaagctttttaccacaatggagttgatgcgttggtccacacttgttgaggactatggaatggaattaagaaaaggttcccttgagagtcctgcaacggatgtttttggttctacagaggaaggtgaaaaaaggtggaaagacttgaagaacagagttgttgaacataatattagaataatggccaagtattatactcggataacaatgaaaaggatggcacagcttctggatctatctgttgatgagtccgaagcctttctctcaaatctagtagttaacaagaccatctttgctaaagtagacagattagcaggaattatcaacttccagagacccaaggatccaaataatttattaaatgactggtctcagaaactgaactcattaatgtctctggttaacaaaactacgcatctcatagccaaagaggagatgatacataatctacaataagggtcttagtgctttagaaaaaagttaaaattggaagtcattaaaaaaagactgttataatggtgtatatgttggggttttttttctaagcttctttgtcttaaattttaaaatagtgaatatgtttgagactccctttgacctttcagttccccaagttcattgttaactttgcatttgcaattggtgcaaaaatacagatttctgtcgtctgaatacacaaaaagttgtgtcataacttacccagatatgtttttctatcatttgaaacctttttagctactgtttgttttcattcaactaacaaacatattccaataataaaagcagtatatacatatttcctttctacagttacctctgattctcaacattttgtggggtagtgatttggcaagtgttttttaaataaaacaaatctcattgtaaagttatcagtcatttagtagaatagaaaagcaacatagagcatacaagaacatttgggatagagttgtgatttgtgaagaatttgtactttgatattgtggcggaaagtctagactgagtgtgtatgctggtaaactgtagacttttttttttttttttgagtccggctggttccaatcacagtagcttgattgctttcagccctcatcctctcacttgatcagttgttcaacagaatcagctgacataattgacacagtttattgggtgttaagtccgctctatagggatagtgactacttttttttttttttttttttttgctcttcttcctctcccctttctttatatgggtttaaatttaacataaagttgtttttataaggcttatttgtggctttaacttgtaagtctgattacatcattattgttccaaattcattatctctgtaggaacttttagttccattatatgaacactggataacctaattttttttaatgctttaaaaaaatggcaaaaagacgtcaggccaccctcatagtaagtggtgtagtattaaaatattttcacggaattaaaagtagcttgctgtcaaagaaacacctgagatgaattggtgtgaacgaattttgcaagtttaatttgatttatttcagagaaaatagaaaaaacaatgttagaaggttatttaaaatgatacttaaataaagaaagtgtgaggtctactttaaaaaaattcaaatgaagagaaaaagaaaaacagcattctagaaatggcatttctcctaattaattttccacttaatggaagattatcaattgtcctattttatgatcccaggactgaagacagttgtgggatatctgtcatatttatcctgtgagtcattgtgaataatgacatacagtactgaagtaatctgattttattctttggaaattcaatgcattggtcacactaataacatcaacatctgctatcacttatctttttaaaactaaccaaaaaaggctgggattacaggcatgagccactgcacccaactcctctttcgtctttctttaacacacactaggctctttgtgtattatgattcagtgctatttgtaactgtgtcccagtgaccaaattgcactcgactcgatcagctgttcatccatttcgtgttttttcctgtcaaacattaatccagcaaatatatgaggtatttaccaatttattttcttagtattacaaaataattcattagcataaagtacaatagtgaaatatttgagttgttcggaacctcaattaatcctgttttacatttcagacctaaagctggcaatcaggagaagaagcactttgttttaaatgtggagaagataacacttgattccatttcattgtcattagtgtattaaccagcaggagaggtgatgagccatttttcaaatgaaataccttttatttccatataatttttttattttagagttcaatagctgtttctatgattatcctcaatttccatatgttactgaatctgaaaaacatctttaaaattcaaacagttccattttctctcttgtaagtgttaaatgtgataaaagtacatattttaaattgttttcagctcttggatatagcagcaataaaaacactaatttgtgggtatttaagaaaacctggagaataaactcatactttaaaagatc

SEQ ID NO: 372077 - DNA, 246 bp, Homo sapiens
gaaggattacattcgaacacaaatcatcagcaagaaaattaacaccaaatttttccaggaagaaaatacagaggtgagcatatctgtgaccacatgtttactttaaaagtatgaataaaacccataaaccccaatttgttttgtcaacttttttgcagaaattaaagttgaagtactataatttaatgattcagctggatcaacatgagggatcctatttgtctatttgtaagcactacagagcaa

SEQ ID NO: 372078 - DNA, 543 bp, Homo sapiens
ttttttatttttgtatttttagtagagatggggtttcactgtgttagccaggatagcctcgatctgacctcaggagatctgcccaccttggcctcccaaagtgctgggattacagacgtgagccactgcgcccggccaagactttaaaatttgaaatggatatatagttattccatgattgttcagtttttgtcaaagtttccattatgtccagtcttgcatataacttgttgtacaactctttcaggctctgaagagtgttgtactctatgttatcctggctccttttgacaatgaacagtcagatttggttcaccgaataagtggtgacaagaagttagaagaaattcccaaatacaagtaagtacttttgaaattagcatgatatatctcagtcgaaacaccattttgaaagaaaattggctaacctaagtgtatacttctgtgtatgcttctttttttgagatggagttttactattgttgcccacactggagtgtaatggtgtaatctcagctcactgcaacttctgcctcctgggtt

SEQ ID NO: 372079 - DNA, 535 bp, Homo sapiens
tttgagacagtctcactctgttgttgaggctagagtgcagtggcctgatcatggctcactgtagccttgaactctggggctcaagtgatcctcctgtggcaccctcccaagtagctgggactaaaggtgcatgccaccacactcagctaatgttttgatttttagtagagacgggctcaacatgtttcccaggctggtctcaaactcctggactcaagcgatcctcctgcctcagccttccaaaatgtcaggattacaggtgtgagccaacatacccagcctactttttaaattttaacacgtttccatggaattttgattgtgtaaatttctcatttgtagatttatgttgaaattgagcgtgcgcgactgactaaaacattagcaactataaaagaacaaaatggtgatgtgaaagaggcagcctccattttacaggagttacaggtaaggtattgcattttagagttggtaaaactttgttttgtcagcagcattttctaatggaaatataggttgagtatcccttatccaa

SEQ ID NO: 372080 - DNA, 3651 bp, Homo sapiens
tcctttgcgtgggctcccgatgggctgcctgagcgggtgcgcgggcaacttccggtgtgggtgacgagtggtggccgaagcagggggacagcaagggacgctcaggcggggaccatggcggacggcggctcggagcgggctgacgggcgcatcgtcaagatggaggtggactacagcgccacggtggatcagcgcctacccgagtgtgcgaagctagccaaggaaggaagacttcaagaagtcattgaaacccttctctctctggaaaagcagactcgtactgcttccgatatggtatcgacatcccgtatcttagttgcagtagtgaagatgtgctatgaggctaaagaatgggatttacttaatgaaaatattatgcttttgtccaaaaggcggagtcagttaaaacaagctgttgccaaaatggttcaacagtgctgtacttatgttgaggaaatcacagaccttcctatcaaacttcgattaattgatactctacgaatggttaccgaaggcaagatttatgttgaaattgagcgtgcgcgactgactaaaacattagcaactataaaagaacaaaatggtgatgtgaaagaggcagcctccattttacaggagttacaggtggaaacctacgggtcaatggaaaagaaagagcgagtggaatttattttggagcaaatgaggctctgcctagctgtgaaggattacattcgaacacaaatcatcagcaagaaaattaacaccaaatttttccaggaagaaaatacagagaaattaaagttgaagtactataatttaatgattcagctggatcaacatgagggatcctatttgtctatttgtaagcactacagagcaatatatgatactccctgtatacaggcagaaagtgaaaaatggcagcaggctctgaagagtgttgtactctatgttatcctggctccttttgacaatgaacagtcagatttggttcaccgaataagtggtgacaagaagttagaagaaattcccaaatacaaatttggaatattaagatgtatacaattttcagggatcttttaaagctttttaccacaatggagttgatgcgttggtccacacttgttgaggactatggaatggaattaagaaaaggttcccttgagagtcctgcaacggatgtttttggttctacagaggaaggtgaaaaaaggtggaaagacttgaagaacagagttgttgaacataatattagaataatggccaagtattatactcggataacaatgaaaaggatggcacagcttctggatctatctgttgatgagtccgaagcctttctctcaaatctagtagttaacaagaccatctttgctaaagtagacagattagcaggaattatcaacttccagagacccaaggatccaaataatttattaaatgactggtctcagaaactgaactcattaatgtctctggttaacaaaactacgcatctcatagccaaagaggagatgatacataatctacaataagggtcttagtgctttagaaaaaagttaaaattggaagtcattaaaaaaagactgttataatggtgtatatgttggggttttttttctaagcttctttgtcttaaattttaaaatagtgaatatgtttgagactccctttgacctttcagttccccaagttcattgttaactttgcatttgcaattggtgcaaaaatacagatttctgtcgtctgaatacacaaaaagttgtgtcataacttacccagatatgtttttctatcatttgaaacctttttagctactgtttgttttcattcaactaacaaacatattccaataataaaagcagtatatacatatttcctttctacagttacctctgattctcaacattttgtggggtagtgatttggcaagtgttttttaaataaaacaaatctcattgtaaagttatcagtcatttagtagaatagaaaagcaacatagagcatacaagaacatttgggatagagttgtgatttgtgaagaatttgtactttgatattgtggcggaaagtctagactgagtgtgtatgctggtaaactgtagacttttttttttttttttgagtccggctggttccaatcacagtagcttgattgctttcagccctcatcctctcacttgatcagttgttcaacagaatcagctgacataattgacacagtttattgggtgttaagtccgctctatagggatagtgactacttttttttttttttttttttttgctcttcttcctctcccctttctttatatgggtttaaatttaacataaagttgtttttataaggcttatttgtggctttaacttgtaagtctgattacatcattattgttccaaattcattatctctgtaggaacttttagttccattatatgaacactggataacctaattttttttaatgctttaaaaaaatggcaaaaagacgtcaggccaccctcatagtaagtggtgtagtattaaaatattttcacggaattaaaagtagcttgctgtcaaagaaacacctgagatgaattggtgtgaacgaattttgcaagtttaatttgatttatttcagagaaaatagaaaaaacaatgttagaaggttatttaaaatgatacttaaataaagaaagtgtgaggtctactttaaaaaaattcaaatgaagagaaaaagaaaaacagcattctagaaatggcatttctcctaattaattttccacttaatggaagattatcaattgtcctattttatgatcccaggactgaagacagttgtgggatatctgtcatatttatcctgtgagtcattgtgaataatgacatacagtactgaagtaatctgattttattctttggaaattcaatgcattggtcacactaataacatcaacatctgctatcacttatctttttaaaactaaccaaaaaaggctgggattacaggcatgagccactgcacccaactcctctttcgtctttctttaacacacactaggctctttgtgtattatgattcagtgctatttgtaactgtgtcccagtgaccaaattgcactcgactcgatcagctgttcatccatttcgtgttttttcctgtcaaacattaatccagcaaatatatgaggtatttaccaatttattttcttagtattacaaaataattcattagcataaagtacaatagtgaaatatttgagttgttcggaacctcaattaatcctgttttacatttcagacctaaagctggcaatcaggagaagaagcactttgttttaaatgtggagaagataacacttgattccatttcattgtcattagtgtattaaccagcaggagaggtgatgagccatttttcaaatgaaataccttttatttccatataatttttttattttagagttcaatagctgtttctatgattatcctcaatttccatatgttactgaatctgaaaaacatctttaaaattcaaacagttccattttctctcttgtaagtgttaaatgtgataaaagtacatattttaaattgttttcagctcttggatatagcagcaataaaaacactaatttgtgggtatttaagaaaacctggagaataaactcatactttaaaagatc

SEQ ID NO: 372081 - DNA, 3427 bp, Homo sapiens
agctcggtaccccctgatatttctggccaggaaggaagacttcaagaagtcattgaaacccttctctctctggaaaagcagactcgtactgcttccgatatggtatcgacatcccgtatcttagttgcagtagtgaagatgtgctatgaggctaaagaatgggatttacttaatgaaaatattatgcttttgtccaaaaggcggagtcagttaaaacaagctgttgccaaaatggttcaacagtgctgtacttatgttgaggaaatcacagaccttcctatcaaacttcgattaattgatactctacgaatggttaccgaaggcaagatttatgttgaaattgagcgtgcgcgactgactaaaacattagcaactataaaagaacaaaatggtgatgtgaaagaggcagcctccattttacaggagttacaggtggaaacctacgggtcaatggaaaagaaagagcgagtggaatttattttggagcaaatgaggctctgcctagctgtgaaggattacattcgaacacaaatcatcagcaagaaaattaacaccaaatttttccaggaagaaaatacagagaaattaaagttgaagtactataatttaatgattcagctggatcaacatgagggatcctatttgtctatttgtaagcactacagagcaatatatgatactccctgtatacaggcagaaagtgaaaaatggcagcaggctctgaagagtgttgtactctatgttatcctggctccttttgacaatgaacagtcagatttggttcaccgaataagtggtgacaagaagttagaagaaattcccaaatacaaggatcttttaaagctttttaccacaatggagttgatgcgttggtccacacttgttgaggactatggaatggaattaagaaaaggttcccttgagagtcctgcaacggatgtttttggttctacagaggaaggtgaaaaaaggtggaaagacttgaagaacagagttgttgaacataatattagaataatggccaagtattatactcggataacaatgaaaaggatggcacagcttctggatctatctgttgatgagtccgaagcctttctctcaaatctagtagttaacaagaccatctttgctaaagtagacagattagcaggaattatcaacttccagagacccaaggatccaaataatttattaaatgactggtctcagaaactgaactcattaatgtctctggttaacaaaactacgcatctcatagccaaagaggagatgatacataatctacaataagggtcttagtgctttagaaaaaagttaaaattggaagtcattaaaaaaagactgttataatggtgtatatgttggggttttttttctaagcttctttgtcttaaattttaaaatagtgaatatgtttgagactccctttgacctttcagttccccaagttcattgttaactttgcatttgcaattggtgcaaaaatacagatttctgtcgtctgaatacacaaaaagttgtgtcataacttacccagatatgtttttctatcatttgaaacctttttagctactgtttgttttcattcaactaacaaacatattccaataataaaagcagtatatacatatttcctttctacagttacctctgattctcaacattttgtggggtagtgatttggcaagtgttttttaaataaaacaaatctcattgtaaagttatcagtcatttagtagaatagaaaagcaacatagagcatacaagaacatttgggatagagttgtgatttgtgaagaatttgtactttgatattgtggcggaaagtctagactgagtgtgtatgctggtaaactgtagacttttttttttttttttgagtccggctggttccaatcacagtagcttgattgctttcagccctcatcctctcacttgatcagttgttcaacagaatcagctgacataattgacacagtttattgggtgttaagtccgctctatagggatagtgactacttttttttttttttttttttttgctcttcttcctctcccctttctttatatgggtttaaatttaacataaagttgtttttataaggcttatttgtggctttaacttgtaagtctgattacatcattattgttccaaattcattatctctgtaggaacttttagttccattatatgaacactggataacctaattttttttaatgctttaaaaaaatggcaaaaagacgtcaggccaccctcatagtaagtggtgtagtattaaaatattttcacggaattaaaagtagcttgctgtcaaagaaacacctgagatgaattggtgtgaacgaattttgcaagtttaatttgatttatttcagagaaaatagaaaaaacaatgttagaaggttatttaaaatgatacttaaataaagaaagtgtgaggtctactttaaaaaaattcaaatgaagagaaaaagaaaaacagcattctagaaatggcatttctcctaattaattttccacttaatggaagattatcaattgtcctattttatgatcccaggactgaagacagttgtgggatatctgtcatatttatcctgtgagtcattgtgaataatgacatacagtactgaagtaatctgattttattctttggaaattcaatgcattggtcacactaataacatcaacatctgctatcacttatctttttaaaactaaccaaaaaaggctgggattacaggcatgagccactgcacccaactcctctttcgtctttctttaacacacactaggctctttgtgtattatgattcagtgctatttgtaactgtgtcccagtgaccaaattgcactcgactcgatcagctgttcatccatttcgtgttttttcctgtcaaacattaatccagcaaatatatgaggtatttaccaatttattttcttagtattacaaaataattcattagcataaagtacaatagtgaaatatttgagttgttcggaacctcaattaatcctgttttacatttcagacctaaagctggcaatcaggagaagaagcactttgttttaaatgtggagaagataacacttgattccatttcattgtcattagtgtattaaccagcaggagaggtgatgagccatttttcaaatgaaataccttttatttccatataatttttttattttagagttcaatagctgtttctatgattatcctcaatttccatatgttactgaatctgaaaaacatctttaaaattcaaacagttccattttctctcttgtaagtgttaaatgtgataaaagtacatattttaaattgttttcagctcttggatatagcagcaataaaaacactaatttgtgggtatttaagaaaacctggagaataaactcatactttaaaagatc

SEQ ID NO: 372082 - DNA, 307 bp, Homo sapiens
gcaatgagggagagtcaattccacccaagtcctatggaaagggctccccacagcagaggggttctgtccaccagtactggggggaaagggaaactacatgaacaaaaattgtaactactagagtctgtttccattctgctcatagaaaccagaattattttatttcatccttttgaagttaaatctgatggtatatcattctcctgcttcaaatcatttaatggctttctattgcttttaggataatattcaaactctctcagatggctcaaagtcctttatgctccaagccttgcctacatcccca

SEQ ID NO: 372083 - DNA, 127 bp, Homo sapiens
ctgcagagcgagcgggagcaggggcaatgccagctcagggcccagcaggagctgctgcagagcctgcagagggagaagcaaggcctggagcaggcgactacggacctgcggctaaccatcctggagc

SEQ ID NO: 372084 - DNA, 381 bp, Homo sapiens
gccacttctacctccattcctctttttccaaagatgttgcgattcctgcgacatgggaacacgcagctgctggtgaggaagaggtggcttcttaccacttaggtcaatgacagccacttcctccctttttaacaagcaggtacatctcctccccatcccccagcattgagtctagattcgcacaaattgttttgttactgttgcttgcacacaccagagaagaaaacagaagaaagaaggaacacagtgacccaggccccacctgtgctgaggggctgctggcctctgcgggtgagttcctggtgtgtctccttcccccaaatccctcccgggtctggctgctctaagcacgtgtgtgctcacaggcaggtacttgtgggc

SEQ ID NO: 372085 - DNA, 2509 bp, Homo sapiens
ggcacgaggctgcggccgccagctcccgcgaccgcctctcctgcccctcgccggtacctcagcaaggtgccactagaagcgccaggctggggccgcctctgagcgccccgcgggggccatggatggtgaaacagcagaggagcaggggggccctgtgcccccgccagttgcacccggcggacccggcttgggcggtgctccgggggggcggcgggagcccaagaagtacgcagtgaccgacgactaccagttgtccaagcaggtgctgggcctgggtgtgaacggcaaagtgctggagtgcttccatcggcgcactggacagaagtgtgccctgaagctcctgtatgacagccccaaggcccggcaggaggtagaccatcactggcaggcttctggcggcccccatattgtctgcatcctggatgtgtatgagaacatgcaccatggcaagcgctgtctcctcatcatcatggaatgcatggaaggtggtgagttgttcagcaggattcaggagcgtggcgaccaggctttcactgagagagaagctgcagagataatgcgggatattggcactgccatccagtttctgcacagccataacattgcccaccgagatgtcaagcctgaaaacctactctacacatctaaggagaaagacgcagtgcttaagctcaccgattttggctttgctaaggagaccacccaaaatgccctgcagacaccctgctatactccctattatgtggcccctgaggtcctgggtccagagaagtatgacaagtcatgtgacatgtggtccctgggtgtcatcatgtacatcctcctttgtggcttcccacccttctactccaacacgggccaggccatctccccggggatgaagaggaggattcgcctgggccagtacggcttccccaatcctgagtggtcagaagtctctgaggatgccaagcagctgatccgcctcctgttgaagacagaccccacagagaggctgaccatcactcagttcatgaaccacccctggatcaaccaatcgatggtagtgccacagaccccactccacacggcccgagtgctgcaggaggacaaagaccactgggacgaagtcaaggaggagatgaccagtgccttggccactatgcgggtagactacgaccaggtgaagatcaaggacctgaagacctctaacaaccggctcctcaacaagaggagaaaaaagcaggcaggcagctcctctgcctcacagggctgcaacaaccagtagctcatggggccttggaggagcctggcctctcagcctgcataacagactgaaatgtgctcaggccctggccaggagggcccagggtcattcttttaacaaaaggattattttgttgtgttttaatttgtcactcggaacttcaggatggaggaccctgaccctaagcctccttcagatctctggcccaggctcaagccctagagatgggcagggcctaggggctgggagctgcctgctgccatagcagcacctttagctaggttggcccgagtgaggcctctgtgctgtcctgccctggtgcatggccttagctttctaggccactgggagttgtggctgggcttcccatcttccacagagacatctccctgtgggatgggcagatgggcctggccttgagaaaggcattggccattggttgccatggtgaccagggaccacgttgctgcctgtgaatgctgagtgagcgagtaagggaggaggggcgattgagggttcacctctgccttggggaggctgatttctcacacactggctggccctctcattctcactcctccttgggccctgaggctgctggatccagtctgcctgcctccctgtgcagtccagccctgccttgctgcagccccagcccagatggcactcagcgctctcccctgagggagtccctgggcctagccatcccctcactattcccgacccaaagggtgacttttcatctgaacttaaggtgggagatatttttaacttttttccactttggaaaatgtcactgtgacaaaagccagcatactttccctgcacccatctgctcaccagatctcaggcaggaaagcccctctctgttgaagtcaggggctatcttttggtatacttgtgtgaaagtggctggttgggagcagagctaagtggcttcccattaacctgaggtctctttctttactctgggtcagacctgaggttggggaaggcgactgagccatgctcagaatgtctggtcctggcttgggcctgagtagggcagagagggcctttcatggctgatcagagcttaccagccccaccccaccatggtagccttagggtgctgagtgcctgatactgcctgacaagtgcctgacacgcagcctagttccttcctggcccctctctcactggctgggaaaccctagaccatgtcagataggacaacactgctgggttttacatccagatagtaataaacaccatttcatcatt

SEQ ID NO: 372086 - DNA, 2518 bp, Homo sapiens
ccggctggtacggcccgagatttatggatagctcccgcgaccgcctctcctgcccctcgccggtacctcagcaaggtgccactagaagcgccaggctggggccgcctctgagcgccccgcgggggccatggatggtgaaacagcagaggagcaggggggccctgtgcccccgccagttgcacccggcggacccggcttgggcggtgctccgggggggcggcgggagcccaagaagtacgcagtgaccgacgactaccagttgtccaagcaggtgctgggcctgggtgtgaacggcaaagtgctggagtgcttccatcggcgcactggacagaagtgtgccctgaagctcctgtatgacagccccaaggcccggcaggaggtagaccatcactggcaggcttctggcggcccccatattgtctgcatcctggatgtgtatgagaacatgcaccatggcaagcgctgtctcctcatcatcatggaatgcatggaaggtggtgagttgttcagcaggattcaggagcgtggcgaccaggctttcactgagagagaagctgcagagataatgcgggatattggcactgccatccagtttctgcacagccataacattgcccaccgagatgtcaagcctgaaaacctactctacacatctaaggagaaagacgcagtgcttaagctcaccgattttggctttgctaaggagaccacccaaaatgccctgcagacaccctgctatactccctattatgtggcccctgaggtcctgggtccagagaagtatgacaagtcatgtgacatgtggtccctgggtgtcatcatgtacatcctcctttgtggcttcccacccttctactccaacacgggccaggccatctccccggggatgaagaggaggattcgcctgggccagtacggcttccccaatcctgagtggtcagaagtctctgaggatgccaagcagctgatccgcctcctgttgaagacagaccccacagagaggctgaccatcactcagttcatgaaccacccctggatcaaccaatcgatggtagtgccacagaccccactccacacggcccgagtgctgcaggaggacaaagaccactgggacgaagtcaaggaggagatgaccagtgccttggccactatgcgggtagactacgaccaggtgaagatcaaggacctgaagacctctaacaaccggctcctcaacaagaggagaaaaaagcaggcaggcagctcctctgcctcacagggctgcaacaaccagtagctcatggggccttggaggagcctggcctctcagcctgcataacagactgaaatgtgctcaggccctggccaggagggcccagggtcattcttttaacaaaaggattattttgttgtgttttaatttgtcactcggaacttcaggatggaggaccctgaccctaagcctccttcagatctctggcccaggctcaagccctagagatgggcagggcctaggggctgggagctgcctgctgccatagcagcacctttagctaggttggcccgagtgaggcctctgtgctgtcctgccctggtgcatggccttagctttctaggccactgggagttgtggctgggcttcccatcttccacagagacatctccctgtgggatgggcagatgggcctggccttgagaaaggcattggccattggttgccatggtgaccagggaccacgttgctgcctgtgaatgctgagtgagcgagtaagggaggaggggcgattgagggttcacctctgccttggggaggctgatttctcacacactggctggccctctcattctcactcctccttgggccctgaggctgctggatccagtctgcctgcctccctgtgcagtccagccctgccttgctgcagccccagcccagatggcactcagcgctctcccctgagggagtccctgggcctagccatcccctcactattcccgacccaaagggtgacttttcatctgaacttaaggtgggagatatttttaacttttttccactttggaaaatgtcactgtgacaaaagccagcatactttccctgcacccatctgctcaccagatctcaggcaggaaagcccctctctgttgaagtcaggggctatcttttggtatacttgtgtgaaagtggctggttgggagcagagctaagtggcttcccattaacctgaggtctctttctttactctgggtcagacctgaggttggggaaggcgactgagccatgctcagaatgtctggtcctggcttgggcctgagtagggcagagagggcctttcatggctgatcagagcttaccagccccaccccaccatggtagccttagggtgctgagtgcctgatactgcctgacaagtgcctgacacgcagcctagttccttcctggcccctctctcactggctgggaaaccctagaccatgtcagataggacaacactgctgggttttacatccagatagtaataaacaccatttcatcatt

SEQ ID NO: 372087 - DNA, 2910 bp, Homo sapiens
ggcacgaggctgcggccgccagctcccgcgaccgcctctcctgcccctcgccggtacctcagcaaggtgccactagaagcgccaggctggggccgcctctgagcgccccgcgggggccatggatggtgaaacagcagaggagcaggggggccctgtgcccccgccagttgcacccggcggacccggcttgggcggtgctccgggggggcggcgggagcccaagaagtacgcagtgaccgacgactaccagttgtccaagcaggtgctgggcctgggtgtgaacggcaaagtgctggagtgcttccatcggcgcactggacagaagtgtgccctgaagctcctgtatgacagccccaaggcccggcaggaggtagaccatcactggcaggcttctggcggcccccatattgtctgcatcctggatgtgtatgagaacatgcaccatggcaagcgctgtctcctcatcatcatggaatgcatggaaggtggtgagttgttcagcaggattcaggagcgtggcgaccaggctttcactgagagagaagctgcagagataatgcgggatattggcactgccatccagtttctgcacagccataacattgcccaccgagatgtcaagcctgaaaacctactctacacatctaaggagaaagacgcagtgcttaagctcaccgattttggctttgctaaggagaccacccaaaatgccctgcagacaccctgctatactccctattatgtggcccctgaggtcctgggtccagagaagtatgacaagtcatgtgacatgtggtccctgggtgtcatcatgtacatcctcctttgtggcttcccacccttctactccaacacgggccaggccatctccccggggatgaagaggaggattcgcctgggccagtacggcttccccaatcctgagtggtcagaagtctctgaggatgccaagcagctgatccgcctcctgttgaagacagaccccacagagaggctgaccatcactcagttcatgaaccacccctggatcaaccaatcgatggtagtgccacagaccccactccacacggcccgagtgctgcaggaggacaaagaccactgggacgaagtcaaggaggagatgaccagtgccttggccactatgcgggtagactacgaccaggtgaagatcaaggacctgaagacctctaacaaccggctcctcaacaagaggagaaaaaagcaggcaggcagctcctctgcctcacagggctgcaacaaccagtagctcatggggccttggaggagcctggcctctcagcctgcataacagactgaaatgtgctcaggccctggccaggagggcccagggtcattcttttaacaaaaggattattttgttgtgttttaatttgtcactcggaacttcaggatggaggaccctgaccctaagcctccttcagatctctggcccaggctcaagccctagagatgggcagggcctaggggctgggagctgcctgctgccatagcagcacctttagctaggttggcccgagtgaggcctctgtgctgtcctgccctggtgcatggccttagctttctaggccactgggagttgtggctgggcttcccatcttccacagagacatctccctgtgggatgggcagatgggcctggccttgagaaaggcattggccattggttgccatggtgaccagggaccacgttgctgcctgtgaatgctgagtgagcgagtaagggaggaggggcgattgagggttcacctctgccttggggaggctgatttctcacacactggctggccctctcattctcactcctccttgggccctgaggctgctggatccagtctgcctgcctccctgtgcagtccagccctgccttgctgcagccccagcccagatggcactcagcgctctcccctgagggagtccctgggcctagccatcccctcactattcccgacccaaagggtgacttttcatctgaacttaaggtgggagatatttttaacttttttccactttggaaaatgtcactgtgacaaaagccagcatactttccctgcacccatctgctcaccagatctcaggcaggaaagcccctctctgttgaagtcaggggctatcttttggtatacttgtgtgaaagtggctggttgggagcagagctaagtggcttcccattaacctgaggtctctttctttactctgggtcagacctgaggttggggaaggcgactgagccatgctcagaatgtctggtcctggcttgggcctgagtagggcagagagggcctttcatggctgatcagagcttaccagccccaccccaccatggtagccttagggtgctgagtgcctgatactgcctgacaagtgcctgacacgcagcctagttccttcctggcccctctctcactggctgggaaaccctagaccatgtcagataggacaacactgctgggttttacatccagatagtaataaacaccatttcatcattttctcttggctcctgggtttactctttgtctacaggggtggacaaaggtggcccaagggcagcttctcagacccactagtgatttcaccccagctggagggggtgcctcaggcctgataagcatgccatgctaactccaaggccagagtcctcgccaggcctagaaaggtcagaagagctgagggatggcagctgccacatgcccccagctctgtgctgcccctgtgcagtgtgtgtgacacctacccccggtcctgtgtgtgccagcatctgcccagagtggccacccccagctgtgtgccagcctgctgaagggcgggcagagtgcctgctgcagcgctgagctattttcagaaactgccagatttcatttggcagtgagaatatcgaggaggggaggg

SEQ ID NO: 372088 - DNA, 2555 bp, Homo sapiens
cctacccctctcccccccccctccccccactacagtctgtatgtcggggttctggccgagggcggcgcagctcttagacgcctctctgcccctcgccggtacctcagcaatggtgccactagaagcgccaggctggggccgcctctgagcgccccgcgggggccatggatggtgaaacagcagaggagcaggggggccctgtgcccccgccagttgcacccggcggacccggcttgggcggtgctccgggggggcggcgggagcccaagaagtacgcagtgaccgacgactaccagttgtccaagcaggtgctgggcctgggtgtgaacggcaaagtgctggagtgcttccatcggcgcactggacagaagtgtgccctgaagctcctgtatgacagccccaaggcccggcaggaggtagaccatcactggcaggcttctggcggcccccatattgtctgcatcctggatgtgtatgagaacatgcaccatggcaagcgctgtctcctcatcatcatggaatgcatggaaggtggtgagttgttcagcaggattcaggagcgtggcgaccaggctttcactgagagagaagctgcagagataatgcgggatattggcactgccatccagtttctgcacagccataacattgcccaccgagatgtcaagcctgaaaacctactctacacatctaaggagaaagacgcagtgcttaagctcaccgattttggctttgctaaggagaccacccaaaatgccctgcagacaccctgctatactccctattatgtggcccctgaggtcctgggtccagagaagtatgacaagtcatgtgacatgtggtccctgggtgtcatcatgtacatcctcctttgtggcttcccacccttctactccaacacgggccaggccatctccccggggatgaagaggaggattcgcctgggccagtacggcttccccaatcctgagtggtcagaagtctctgaggatgccaagcagctgatccgcctcctgttgaagacagaccccacagagaggctgaccatcactcagttcatgaaccacccctggatcaaccaatcgatggtagtgccacagaccccactccacacggcccgagtgctgcaggaggacaaagaccactgggacgaagtcaaggaggagatgaccagtgccttggccactatgcgggtagactacgaccaggtgaagatcaaggacctgaagacctctaacaaccggctcctcaacaagaggagaaaaaagcaggcaggcagctcctctgcctcacagggctgcaacaaccagtagctcatggggccttggaggagcctggcctctcagcctgcataacagactgaaatgtgctcaggccctggccaggagggcccagggtcattcttttaacaaaaggattattttgttgtgttttaatttgtcactcggaacttcaggatggaggaccctgaccctaagcctccttcagatctctggcccaggctcaagccctagagatgggcagggcctaggggctgggagctgcctgctgccatagcagcacctttagctaggttggcccgagtgaggcctctgtgctgtcctgccctggtgcatggccttagctttctaggccactgggagttgtggctgggcttcccatcttccacagagacatctccctgtgggatgggcagatgggcctggccttgagaaaggcattggccattggttgccatggtgaccagggaccacgttgctgcctgtgaatgctgagtgagcgagtaagggaggaggggcgattgagggttcacctctgccttggggaggctgatttctcacacactggctggccctctcattctcactcctccttgggccctgaggctgctggatccagtctgcctgcctccctgtgcagtccagccctgccttgctgcagccccagcccagatggcactcagcgctctcccctgagggagtccctgggcctagccatcccctcactattcccgacccaaagggtgacttttcatctgaacttaaggtgggagatatttttaacttttttccactttggaaaatgtcactgtgacaaaagccagcatactttccctgcacccatctgctcaccagatctcaggcaggaaagcccctctctgttgaagtcaggggctatcttttggtatacttgtgtgaaagtggctggttgggagcagagctaagtggcttcccattaacctgaggtctctttctttactctgggtcagacctgaggttggggaaggcgactgagccatgctcagaatgtctggtcctggcttgggcctgagtagggcagagagggcctttcatggctgatcagagcttaccagccccaccccaccatggtagccttagggtgctgagtgcctgatactgcctgacaagtgcctgacacgcagcctagttccttcctggcccctctctcactggctgggaaaccctagaccatgtcagataggacaacactgctgggttttacatccagatagtaataaacaccatttcatcatt

SEQ ID NO: 372089 - DNA, 2992 bp, Homo sapiens
accgcgggctgagcggtggggcccgggcggggtgcgggggccccgtcgccgggtctggggccctgagcagtgaaaggaaatactttgacagatttccaagaactttccaggaaaacggggcggggccccgcgagctgaccaatcgcgacgctgaaggtggagccgtgcggtcggggagggccaatagcagcgcgtggacccggggctgaagctacccagaggggcagggagtacttgctgcatttgatcctctacaactggtgttgctcccgttatgcggacagaagacagccccagggaacaaatgctaggaaatggcagggtgagaaaactgaggcatggagaggttacaatataacttagatctcccagctggcaagtaatggtttaagccaggagcctacacacttcctcctacttcctctatgggtgctggtgatctgccgactcctagacatccagctttaaggtcctcagtgaagcttctctgcccccaggcctgtccatgtcagagcaccatgggtgtccctttgaaagtatctcctacaggtgccactagaagcgccaggctggggccgcctctgagcgccccgcgggggccatggatggtgaaacagcagaggagcaggggggccctgtgcccccgccagttgcacccggcggacccggcttgggcggtgctccgggggggcggcgggagcccaagaagtacgcagtgaccgacgactaccagttgtccaagcaggtgctgggcctgggtgtgaacggcaaagtgctggagtgcttccatcggcgcactggacagaagtgtgccctgaagctcctgtatgacagccccaaggcccggcaggaggtagaccatcactggcaggcttctggcggcccccatattgtctgcatcctggatgtgtatgagaacatgcaccatggcaagcgctgtctcctcatcatcatggaatgcatggaaggtggtgagttgttcagcaggattcaggagcgtggcgaccaggctttcactgagagagaagctgcagagataatgcgggatattggcactgccatccagtttctgcacagccataacattgcccaccgagatgtcaagcctgaaaacctactctacacatctaaggagaaagacgcagtgcttaagctcaccgattttggctttgctaaggagaccacccaaaatgccctgcagacaccctgctatactccctattatgtggcccctgaggtcctgggtccagagaagtatgacaagtcatgtgacatgtggtccctgggtgtcatcatgtacatcctcctttgtggcttcccacccttctactccaacacgggccaggccatctccccggggatgaagaggaggattcgcctgggccagtacggcttccccaatcctgagtggtcagaagtctctgaggatgccaagcagctgatccgcctcctgttgaagacagaccccacagagaggctgaccatcactcagttcatgaaccacccctggatcaaccaatcgatggtagtgccacagaccccactccacacggcccgagtgctgcaggaggacaaagaccactgggacgaagtcaaggaggagatgaccagtgccttggccactatgcgggtagactacgaccaggtgaagatcaaggacctgaagacctctaacaaccggctcctcaacaagaggagaaaaaagcaggcaggcagctcctctgcctcacagggctgcaacaaccagtagctcatggggccttggaggagcctggcctctcagcctgcataacagactgaaatgtgctcaggccctggccaggagggcccagggtcattcttttaacaaaaggattattttgttgtgttttaatttgtcactcggaacttcaggatggaggaccctgaccctaagcctccttcagatctctggcccaggctcaagccctagagatgggcagggcctaggggctgggagctgcctgctgccatagcagcacctttagctaggttggcccgagtgaggcctctgtgctgtcctgccctggtgcatggccttagctttctaggccactgggagttgtggctgggcttcccatcttccacagagacatctccctgtgggatgggcagatgggcctggccttgagaaaggcattggccattggttgccatggtgaccagggaccacgttgctgcctgtgaatgctgagtgagcgagtaagggaggaggggcgattgagggttcacctctgccttggggaggctgatttctcacacactggctggccctctcattctcactcctccttgggccctgaggctgctggatccagtctgcctgcctccctgtgcagtccagccctgccttgctgcagccccagcccagatggcactcagcgctctcccctgagggagtccctgggcctagccatcccctcactattcccgacccaaagggtgacttttcatctgaacttaaggtgggagatatttttaacttttttccactttggaaaatgtcactgtgacaaaagccagcatactttccctgcacccatctgctcaccagatctcaggcaggaaagcccctctctgttgaagtcaggggctatcttttggtatacttgtgtgaaagtggctggttgggagcagagctaagtggcttcccattaacctgaggtctctttctttactctgggtcagacctgaggttggggaaggcgactgagccatgctcagaatgtctggtcctggcttgggcctgagtagggcagagagggcctttcatggctgatcagagcttaccagccccaccccaccatggtagccttagggtgctgagtgcctgatactgcctgacaagtgcctgacacgcagcctagttccttcctggcccctctctcactggctgggaaaccctagaccatgtcagataggacaacactgctgggttttacatccagatagtaataaacaccatttcatcatt

SEQ ID NO: 372090 - DNA, 2428 bp, Homo sapiens
ggcacgaggctgcggccgccagctcccgcgaccgcctctcctgcccctcgccggtacctcagcaaggtgccactagaagcgccaggctggggccgcctctgagcgccccgcgggggccatggatggtgaaacagcagaggagcaggggggccctgtgcccccgccagttgcacccggcggacccggcttgggcggtgctccgggggggcggcgggagcccaagaagtacgcagtgaccgacgactaccagttgtccaagcaggtgctgggcctgggtgtgaacggcaaagtgctggagtgcttccatcggcgcactggacagaagtgtgccctgaagctcctgtatgacagccccaaggcccggcaggaggtagaccatcactggcaggcttctggcggcccccatattgtctgcatcctggatgtgtatgagaacatgcaccatggcaagcgctgtctcctcatcatcatggaatgcatggaaggtggtgagttgttcagcaggattcaggagcgtggcgaccaggctttcactgagagagaagctgcagagataatgcgggatattggcactgccatccagtttctgcacagccataacattgcccaccgagatgtcaagcctgaaaacctactctacacatctaaggagaaagacgcagtgcttaagctcaccgattttggctttgctaaggagaccacccaaaatgccctgcagacaccctgctatactccctattatgtggcccctgaggtcctgggtccagagaagtatgacaagtcatgtgacatgtggtccctgggtgtcatcatgtacatcctcctttgtggcttcccacccttctactccaacacgggccaggccatctccccggggatgaagaggaggattcgcctgggccagtacggcttccccaatcctgagtggtcagaagtctctgaggatgccaagcagctgatccgcctcctgttgaagacagaccccacagagaggctgaccatcactcagttcatgaaccacccctggatcaacgaggagatgaccagtgccttggccactatgcgggtagactacgaccaggtgaagatcaaggacctgaagacctctaacaaccggctcctcaacaagaggagaaaaaagcaggcaggcagctcctctgcctcacagggctgcaacaaccagtagctcatggggccttggaggagcctggcctctcagcctgcataacagactgaaatgtgctcaggccctggccaggagggcccagggtcattcttttaacaaaaggattattttgttgtgttttaatttgtcactcggaacttcaggatggaggaccctgaccctaagcctccttcagatctctggcccaggctcaagccctagagatgggcagggcctaggggctgggagctgcctgctgccatagcagcacctttagctaggttggcccgagtgaggcctctgtgctgtcctgccctggtgcatggccttagctttctaggccactgggagttgtggctgggcttcccatcttccacagagacatctccctgtgggatgggcagatgggcctggccttgagaaaggcattggccattggttgccatggtgaccagggaccacgttgctgcctgtgaatgctgagtgagcgagtaagggaggaggggcgattgagggttcacctctgccttggggaggctgatttctcacacactggctggccctctcattctcactcctccttgggccctgaggctgctggatccagtctgcctgcctccctgtgcagtccagccctgccttgctgcagccccagcccagatggcactcagcgctctcccctgagggagtccctgggcctagccatcccctcactattcccgacccaaagggtgacttttcatctgaacttaaggtgggagatatttttaacttttttccactttggaaaatgtcactgtgacaaaagccagcatactttccctgcacccatctgctcaccagatctcaggcaggaaagcccctctctgttgaagtcaggggctatcttttggtatacttgtgtgaaagtggctggttgggagcagagctaagtggcttcccattaacctgaggtctctttctttactctgggtcagacctgaggttggggaaggcgactgagccatgctcagaatgtctggtcctggcttgggcctgagtagggcagagagggcctttcatggctgatcagagcttaccagccccaccccaccatggtagccttagggtgctgagtgcctgatactgcctgacaagtgcctgacacgcagcctagttccttcctggcccctctctcactggctgggaaaccctagaccatgtcagataggacaacactgctgggttttacatccagatagtaataaacaccatttcatcatt

SEQ ID NO: 372091 - DNA, 2050 bp, Homo sapiens
gtcatagctgactctagaggatacacccgcggcgagttcatgcaggattcaggagcgtggcgaccaggctttcactgagagagaagctgcagagataatgcgggatattggcactgccatccagtttctgcacagccataacattgcccaccgagatgtcaagcctgaaaacctactctacacatctaaggagaaagacgcagtgcttaagctcaccgattttggctttgctaaggagaccacccaaaatgccctgcagacaccctgctatactccctattatgtggcccctgaggtcctgggtccagagaagtatgacaagtcatgtgacatgtggtccctgggtgtcatcatgtacatcctcctttgtggcttcccacccttctactccaacacgggccaggccatctccccggggatgaagaggaggattcgcctgggccagtacggcttccccaatcctgagtggtcagaagtctctgaggatgccaagcagctgatccgcctcctgttgaagacagaccccacagagaggctgaccatcactcagttcatgaaccacccctggatcaaccaatcgatggtagtgccacagaccccactccacacggcccgagtgctgcaggaggacaaagaccactgggacgaagtcaaggaggagatgaccagtgccttggccactatgcgggtagactacgaccaggtgaagatcaaggacctgaagacctctaacaaccggctcctcaacaagaggagaaaaaagcaggcaggcagctcctctgcctcacagggctgcaacaaccagtagctcatggggccttggaggagcctggcctctcagcctgcataacagactgaaatgtgctcaggccctggccaggagggcccagggtcattcttttaacaaaaggattattttgttgtgttttaatttgtcactcggaacttcaggatggaggaccctgaccctaagcctccttcagatctctggcccaggctcaagccctagagatgggcagggcctaggggctgggagctgcctgctgccatagcagcacctttagctaggttggcccgagtgaggcctctgtgctgtcctgccctggtgcatggccttagctttctaggccactgggagttgtggctgggcttcccatcttccacagagacatctccctgtgggatgggcagatgggcctggccttgagaaaggcattggccattggttgccatggtgaccagggaccacgttgctgcctgtgaatgctgagtgagcgagtaagggaggaggggcgattgagggttcacctctgccttggggaggctgatttctcacacactggctggccctctcattctcactcctccttgggccctgaggctgctggatccagtctgcctgcctccctgtgcagtccagccctgccttgctgcagccccagcccagatggcactcagcgctctcccctgagggagtccctgggcctagccatcccctcactattcccgacccaaagggtgacttttcatctgaacttaaggtgggagatatttttaacttttttccactttggaaaatgtcactgtgacaaaagccagcatactttccctgcacccatctgctcaccagatctcaggcaggaaagcccctctctgttgaagtcaggggctatcttttggtatacttgtgtgaaagtggctggttgggagcagagctaagtggcttcccattaacctgaggtctctttctttactctgggtcagacctgaggttggggaaggcgactgagccatgctcagaatgtctggtcctggcttgggcctgagtagggcagagagggcctttcatggctgatcagagcttaccagccccaccccaccatggtagccttagggtgctgagtgcctgatactgcctgacaagtgcctgacacgcagcctagttccttcctggcccctctctcactggctgggaaaccctagaccatgtcagataggacaacactgctgggttttacatccagatagtaataaacaccatttcatcatt

SEQ ID NO: 372092 - DNA, 1818 bp, Homo sapiens
ggactaggcagatcagtctgctgctccctgtgcagtcagcctgcctattatgtggcccctgaggtcctgggtccagagaagtatgacaagtcatgtgacatgtggtccctgggtgtcatcatgtacatcctcctttgtggcttcccacccttctactccaacacgggccaggccatctccccggggatgaagaggaggattcgcctgggccagtacggcttccccaatcctgagtggtcagaagtctctgaggatgccaagcagctgatccgcctcctgttgaagacagaccccacagagaggctgaccatcactcagttcatgaaccacccctggatcaaccaatcgatggtagtgccacagaccccactccacacggcccgagtgctgcaggaggacaaagaccactgggacgaagtcaaggaggagatgaccagtgccttggccactatgcgggtagactacgaccaggtgaagatcaaggacctgaagacctctaacaaccggctcctcaacaagaggagaaaaaagcaggcaggcagctcctctgcctcacagggctgcaacaaccagtagctcatggggccttggaggagcctggcctctcagcctgcataacagactgaaatgtgctcaggccctggccaggagggcccagggtcattcttttaacaaaaggattattttgttgtgttttaatttgtcactcggaacttcaggatggaggaccctgaccctaagcctccttcagatctctggcccaggctcaagccctagagatgggcagggcctaggggctgggagctgcctgctgccatagcagcacctttagctaggttggcccgagtgaggcctctgtgctgtcctgccctggtgcatggccttagctttctaggccactgggagttgtggctgggcttcccatcttccacagagacatctccctgtgggatgggcagatgggcctggccttgagaaaggcattggccattggttgccatggtgaccagggaccacgttgctgcctgtgaatgctgagtgagcgagtaagggaggaggggcgattgagggttcacctctgccttggggaggctgatttctcacacactggctggccctctcattctcactcctccttgggccctgaggctgctggatccagtctgcctgcctccctgtgcagtccagccctgccttgctgcagccccagcccagatggcactcagcgctctcccctgagggagtccctgggcctagccatcccctcactattcccgacccaaagggtgacttttcatctgaacttaaggtgggagatatttttaacttttttccactttggaaaatgtcactgtgacaaaagccagcatactttccctgcacccatctgctcaccagatctcaggcaggaaagcccctctctgttgaagtcaggggctatcttttggtatacttgtgtgaaagtggctggttgggagcagagctaagtggcttcccattaacctgaggtctctttctttactctgggtcagacctgaggttggggaaggcgactgagccatgctcagaatgtctggtcctggcttgggcctgagtagggcagagagggcctttcatggctgatcagagcttaccagccccaccccaccatggtagccttagggtgctgagtgcctgatactgcctgacaagtgcctgacacgcagcctagttccttcctggcccctctctcactggctgggaaaccctagaccatgtcagataggacaacactgctgggttttacatccagatagtaataaacaccatttcatcatt

SEQ ID NO: 372093 - DNA, 988 bp, Homo sapiens
ggcacgaggctgcggccgccagctcccgcgaccgcctctcctgcccctcgccggtacctcagcaaggtgccactagaagcgccaggctggggccgcctctgagcgccccgcgggggccatggatggtgaaacagcagaggagcaggggggccctgtgcccccgccagttgcacccggcggacccggcttgggcggtgctccgggggggcggcgggagcccaagaagtacgcagtgaccgacgactaccagttgtccaagcaggtgctgggcctgggtgtgaacggcaaagtgctggagtgcttccatcggcgcactggacagaagtgtgccctgaagctcctgtatgacagccccaaggcccggcaggaggtagaccatcactggcaggcttctggcggcccccatattgtctgcatcctggatgtgtatgagaacatgcaccatggcaagcgctgtctcctcatcatcatggaatgcatggaaggtggtgagttgttcagcaggattcaggagcgtggcgaccaggctttcactgagagagaagctgcagagataatgcgggatattggcactgccatccagtttctgcacagccataacattgcccaccgagatgtcaagcctgaaaacctactctacacatctaaggagaaagacgcagtgcttaagctcaccgattttggctttgctaaggagaccacccaaaatgccctgcagacaccctgctatactccctattatgtggcccctgaggtcctgggtccagagaagtatgacaagtcatgtgacatgtggtccctgggtgtcatcatgtacatcctcctttgtggcttcccacccttctactccaacacgggccaggccatctccccggggatgaagaggaggattcgcctgggccagtacggcttccccaatcctgagtggtcagaagtctctgaggatgtgcctgagtgaacctctctgtcccagcctgactcacctggc

SEQ ID NO: 372094 - DNA, 1017 bp, Homo sapiens
ggcacgaggctgcggccgccagctcccgcgaccgcctctcctgcccctcgccggtacctcagcaaggtgccactagaagcgccaggctggggccgcctctgagcgccccgcgggggccatggatggtgaaacagcagaggagcaggggggccctgtgcccccgccagttgcacccggcggacccggcttgggcggtgctccgggggggcggcgggagcccaagaagtacgcagtgaccgacgactaccagttgtccaagcaggtgctgggcctgggtgtgaacggcaaagtgctggagtgcttccatcggcgcactggacagaagtgtgccctgaagctcctgtatgacagccccaaggcccggcaggaggtagaccatcactggcaggcttctggcggcccccatattgtctgcatcctggatgtgtatgagaacatgcaccatggcaagcgctgtctcctcatcatcatggaatgcatggaaggtggtgagttgttcagcaggattcaggagcgtggcgaccaggctttcactgagagagaagctgcagagataatgcgggatattggcactgccatccagtttctgcacagccataacattgcccaccgagatgtcaagcctgaaaacctactctacacatctaaggagaaagacgcagtgcttaagctcaccgattttggctttgctaaggagaccacccaaaatgccctgcagacaccctgctatactccctattatgtggcccctgaggtcctgggtccagagaagtatgacaagtcatgtgacatgtggtccctgggtgtcatcatgtacatcctcctttgtggcttcccacccttctactccaacacgggccaggccatctccccggggatgaagaggaggattcgcctgggccagtacggcttccccaatcctgagtggtcagaagtctctgaggatgccagtcgcgccgtggtagatgtactgcgtagcgggctgcgcgggacgcttgcagaatgtcgacgtcgcta

SEQ ID NO: 372095 - DNA, 1000 bp, Homo sapiens
ggcacgaggctgcggccgccagctcccgcgaccgcctctcctgcccctcgccggtacctcagcaaggtgccactagaagcgccaggctggggccgcctctgagcgccccgcgggggccatggatggtgaaacagcagaggagcaggggggccctgtgcccccgccagttgcacccggcggacccggcttgggcggtgctccgggggggcggcgggagcccaagaagtacgcagtgaccgacgactaccagttgtccaagcaggtgctgggcctgggtgtgaacggcaaagtgctggagtgcttccatcggcgcactggacagaagtgtgccctgaagctcctgtatgacagccccaaggcccggcaggaggtagaccatcactggcaggcttctggcggcccccatattgtctgcatcctggatgtgtatgagaacatgcaccatggcaagcgctgtctcctcatcatcatggaatgcatggaaggtggtgagttgttcagcaggattcaggagcgtggcgaccaggctttcactgagagagaagctgcagagataatgcgggatattggcactgccatccagtttctgcacagccataacattgcccaccgagatgtcaagcctgaaaacctactctacacatctaaggagaaagacgcagtgcttaagctcaccgattttggctttgctaaggagaccacccaaaatgccctgcagacaccctgctatactccctattatgtggcccctgaggtcctgggtccagagaagtatgacaagtcatgtgacatgtggtccctgggtgtcatcatgtacatcctcctttgtggcttcccacccttctactccaacacgggccaggccatctccccggggatgaagaggaggattcgcctgggccagtacggcttgactaattcgatgattgctatgtcgtctttgtcgaatcccaatcacgtgctccaactccatcgttcagagaacacacgccaagcagag

SEQ ID NO: 372096 - DNA, 1340 bp, Homo sapiens
ggcacgaggctgcggccgccagctcccgcgaccgcctctcctgcccctcgccggtacctcagcaaggtgccactagaagcgccaggctggggccgcctctgagcgccccgcgggggccatggatggtgaaacagcagaggagcaggggggccctgtgcccccgccagttgcacccggcggacccggcttgggcggtgctccgggggggcggcgggagcccaagaagtacgcagtgaccgacgactaccagttgtccaagcaggtgctgggcctgggtgtgaacggcaaagtgctggagtgcttccatcggcgcactggacagaagtgtgccctgaagctcctgtatgacagccccaaggcccggcaggaggtagaccatcactggcaggcttctggcggcccccatattgtctgcatcctggatgtgtatgagaacatgcaccatggcaagcgctgtctcctcatcatcatggaatgcatggaaggtggtgagttgttcagcaggattcaggagcgtggcgaccaggctttcactgagagagaagctgcagagataatgcgggatattggcactgccatccagtttctgcacagccataacattgcccaccgagatgtcaagcctgaaaacctactctacacatctaaggagaaagacgcagtgcttaagctcaccgattcaggctattgcatacggcaaacacaaccaaaaatgaccccagcaagaaccaccctagaaatactaccctaattaatagttgaaccgccataggagggttcaatggaggaaccaacagcaaaagtatatgacaaaggtaattggtgaccactcgtgagacacctgcgagctagtaaacaacttgatacactaccatcctataggtggcatacacacagcatattaatccccacgaaggggacacagggcagactcacacgagaaatgaaaacgcaggattaccgaccgcggggccaacagcgggagttagcgcaagactcgaccgtgcgcacaaccgcctcgcagaagcgcccgcaccgacagacgcgcaagaaccgggtgcgaaacgaggaacaacaaaacaagtagagaaatataaaaggaacagagacagcaacaggagagacaacgcagagtacgaagatcacgaacgcaatactcacgagcatagtaggcagaaggaaaacgaagcacagcacaaccaagaaaagacgagttcaataagcaacaccgaagagaagtaggcaataagacccgcggaacaggcgggacggcacgtcggactgaagacgcgcggacaggagccttgctccaccgctgtcctaaatgactgtcgtgacaa

SEQ ID NO: 372097 - DNA, 2525 bp, Homo sapiens
gctagtagaggctggtttaatcggcagagggcggcgagctcccgcgaccgcctctcctgcccctcgccggtacctcagcaaggtgccactagaagcgccaggctggggccgcctctgagcgccccgcgggggccatggatggtgaaacagcagaggagcaggggggccctgtgcccccgccagttgcacccggcggacccggcttgggcggtgctccgggggggcggcgggagcccaagaagtacgcagtgaccgacgactaccagttgtccaagcaggtgctgggcctgggtgtgaacggcaaagtgctggagtgcttccatcggcgcactggacagaagtgtgccctgaagctcctgtatgacagccccaaggcccggcaggaggtagaccatcactggcaggcttctggcggcccccatattgtctgcatcctggatgtgtatgagaacatgcaccatggcaagcgctgtctcctcatcatcatggaatgcatggaaggtggtgagttgttcagcaggattcaggagcgtggcgaccaggctttcactgagagagaagctgcagagataatgcgggatattggcactgccatccagtttctgcacagccataacattgcccaccgagatgtcaagcctgaaaacctactctacacatctaaggagaaagacgcagtgcttaagctcaccgattttggctttgctaaggagaccacccaaaatgccctgcagacaccctgctatactccctattatgtggcccctgaggtcctgggtccagagaagtatgacaagtcatgtgacatgtggtccctgggtgtcatcatgtacatcctcctttgtggcttcccacccttctactccaacacgggccaggccatctccccggggatgaagaggaggattcgcctgggccagtacggcttccccaatcctgagtggtcagaagtctctgaggatgccaagcagctgatccgcctcctgttgaagacagaccccacagagaggctgaccatcactcagttcatgaaccacccctggatcaaccaatcgatggtagtgccacagaccccactccacacggcccgagtgctgcaggaggacaaagaccactgggacgaagtcaaggaggagatgaccagtgccttggccactatgcgggtagactacgaccaggtgaagatcaaggacctgaagacctctaacaaccggctcctcaacaagaggagaaaaaagcaggcaggcagctcctctgcctcacagggctgcaacaaccagtagctcatggggccttggaggagcctggcctctcagcctgcataacagactgaaatgtgctcaggccctggccaggagggcccagggtcattcttttaacaaaaggattattttgttgtgttttaatttgtcactcggaacttcaggatggaggaccctgaccctaagcctccttcagatctctggcccaggctcaagccctagagatgggcagggcctaggggctgggagctgcctgctgccatagcagcacctttagctaggttggcccgagtgaggcctctgtgctgtcctgccctggtgcatggccttagctttctaggccactgggagttgtggctgggcttcccatcttccacagagacatctccctgtgggatgggcagatgggcctggccttgagaaaggcattggccattggttgccatggtgaccagggaccacgttgctgcctgtgaatgctgagtgagcgagtaagggaggaggggcgattgagggttcacctctgccttggggaggctgatttctcacacactggctggccctctcattctcactcctccttgggccctgaggctgctggatccagtctgcctgcctccctgtgcagtccagccctgccttgctgcagccccagcccagatggcactcagcgctctcccctgagggagtccctgggcctagccatcccctcactattcccgacccaaagggtgacttttcatctgaacttaaggtgggagatatttttaacttttttccactttggaaaatgtcactgtgacaaaagccagcatactttccctgcacccatctgctcaccagatctcaggcaggaaagcccctctctgttgaagtcaggggctatcttttggtatacttgtgtgaaagtggctggttgggagcagagctaagtggcttcccattaacctgaggtctctttctttactctgggtcagacctgaggttggggaaggcgactgagccatgctcagaatgtctggtcctggcttgggcctgagtagggcagagagggcctttcatggctgatcagagcttaccagccccaccccaccatggtagccttagggtgctgagtgcctgatactgcctgacaagtgcctgacacgcagcctagttccttcctggcccctctctcactggctgggaaaccctagaccatgtcagataggacaacactgctgggttttacatccagatagtaataaacaccatttcatcatt

SEQ ID NO: 372098 - DNA, 2568 bp, Homo sapiens
tctcaggccgttcgtcccgcactcccagcttgccccgggctcgcagcccagcccagttcagaggctccaaggctggggtgtgttggaaaagtctgggcgggactcactcttcccctttcccccaggtgccactagaagcgccaggctggggccgcctctgagcgccccgcgggggccatggatggtgaaacagcagaggagcaggggggccctgtgcccccgccagttgcacccggcggacccggcttgggcggtgctccgggggggcggcgggagcccaagaagtacgcagtgaccgacgactaccagttgtccaagcaggtgctgggcctgggtgtgaacggcaaagtgctggagtgcttccatcggcgcactggacagaagtgtgccctgaagctcctgtatgacagccccaaggcccggcaggaggtagaccatcactggcaggcttctggcggcccccatattgtctgcatcctggatgtgtatgagaacatgcaccatggcaagcgctgtctcctcatcatcatggaatgcatggaaggtggtgagttgttcagcaggattcaggagcgtggcgaccaggctttcactgagagagaagctgcagagataatgcgggatattggcactgccatccagtttctgcacagccataacattgcccaccgagatgtcaagcctgaaaacctactctacacatctaaggagaaagacgcagtgcttaagctcaccgattttggctttgctaaggagaccacccaaaatgccctgcagacaccctgctatactccctattatgtggcccctgaggtcctgggtccagagaagtatgacaagtcatgtgacatgtggtccctgggtgtcatcatgtacatcctcctttgtggcttcccacccttctactccaacacgggccaggccatctccccggggatgaagaggaggattcgcctgggccagtacggcttccccaatcctgagtggtcagaagtctctgaggatgccaagcagctgatccgcctcctgttgaagacagaccccacagagaggctgaccatcactcagttcatgaaccacccctggatcaaccaatcgatggtagtgccacagaccccactccacacggcccgagtgctgcaggaggacaaagaccactgggacgaagtcaaggaggagatgaccagtgccttggccactatgcgggtagactacgaccaggtgaagatcaaggacctgaagacctctaacaaccggctcctcaacaagaggagaaaaaagcaggcaggcagctcctctgcctcacagggctgcaacaaccagtagctcatggggccttggaggagcctggcctctcagcctgcataacagactgaaatgtgctcaggccctggccaggagggcccagggtcattcttttaacaaaaggattattttgttgtgttttaatttgtcactcggaacttcaggatggaggaccctgaccctaagcctccttcagatctctggcccaggctcaagccctagagatgggcagggcctaggggctgggagctgcctgctgccatagcagcacctttagctaggttggcccgagtgaggcctctgtgctgtcctgccctggtgcatggccttagctttctaggccactgggagttgtggctgggcttcccatcttccacagagacatctccctgtgggatgggcagatgggcctggccttgagaaaggcattggccattggttgccatggtgaccagggaccacgttgctgcctgtgaatgctgagtgagcgagtaagggaggaggggcgattgagggttcacctctgccttggggaggctgatttctcacacactggctggccctctcattctcactcctccttgggccctgaggctgctggatccagtctgcctgcctccctgtgcagtccagccctgccttgctgcagccccagcccagatggcactcagcgctctcccctgagggagtccctgggcctagccatcccctcactattcccgacccaaagggtgacttttcatctgaacttaaggtgggagatatttttaacttttttccactttggaaaatgtcactgtgacaaaagccagcatactttccctgcacccatctgctcaccagatctcaggcaggaaagcccctctctgttgaagtcaggggctatcttttggtatacttgtgtgaaagtggctggttgggagcagagctaagtggcttcccattaacctgaggtctctttctttactctgggtcagacctgaggttggggaaggcgactgagccatgctcagaatgtctggtcctggcttgggcctgagtagggcagagagggcctttcatggctgatcagagcttaccagccccaccccaccatggtagccttagggtgctgagtgcctgatactgcctgacaagtgcctgacacgcagcctagttccttcctggcccctctctcactggctgggaaaccctagaccatgtcagataggacaacactgctgggttttacatccagatagtaataaacaccatttcatcatt

SEQ ID NO: 372099 - DNA, 2504 bp, Homo sapiens
ctggccgcttaagctttattactggcgtcttcggcctccctcgctccggtacctcagcaaggtgccactagaagcgccaggctggggccgcctctgagcgccccgcgggggccatggatggtgaaacagcagaggagcaggggggccctgtgcccccgccagttgcacccggcggacccggcttgggcggtgctccgggggggcggcgggagcccaagaagtacgcagtgaccgacgactaccagttgtccaagcaggtgctgggcctgggtgtgaacggcaaagtgctggagtgcttccatcggcgcactggacagaagtgtgccctgaagctcctgtatgacagccccaaggcccggcaggaggtagaccatcactggcaggcttctggcggcccccatattgtctgcatcctggatgtgtatgagaacatgcaccatggcaagcgctgtctcctcatcatcatggaatgcatggaaggtggtgagttgttcagcaggattcaggagcgtggcgaccaggctttcactgagagagaagctgcagagataatgcgggatattggcactgccatccagtttctgcacagccataacattgcccaccgagatgtcaagcctgaaaacctactctacacatctaaggagaaagacgcagtgcttaagctcaccgattttggctttgctaaggagaccacccaaaatgccctgcagacaccctgctatactccctattatgtggcccctgaggtcctgggtccagagaagtatgacaagtcatgtgacatgtggtccctgggtgtcatcatgtacatcctcctttgtggcttcccacccttctactccaacacgggccaggccatctccccggggatgaagaggaggattcgcctgggccagtacggcttccccaatcctgagtggtcagaagtctctgaggatgccaagcagctgatccgcctcctgttgaagacagaccccacagagaggctgaccatcactcagttcatgaaccacccctggatcaaccaatcgatggtagtgccacagaccccactccacacggcccgagtgctgcaggaggacaaagaccactgggacgaagtcaaggaggagatgaccagtgccttggccactatgcgggtagactacgaccaggtgaagatcaaggacctgaagacctctaacaaccggctcctcaacaagaggagaaaaaagcaggcaggcagctcctctgcctcacagggctgcaacaaccagtagctcatggggccttggaggagcctggcctctcagcctgcataacagactgaaatgtgctcaggccctggccaggagggcccagggtcattcttttaacaaaaggattattttgttgtgttttaatttgtcactcggaacttcaggatggaggaccctgaccctaagcctccttcagatctctggcccaggctcaagccctagagatgggcagggcctaggggctgggagctgcctgctgccatagcagcacctttagctaggttggcccgagtgaggcctctgtgctgtcctgccctggtgcatggccttagctttctaggccactgggagttgtggctgggcttcccatcttccacagagacatctccctgtgggatgggcagatgggcctggccttgagaaaggcattggccattggttgccatggtgaccagggaccacgttgctgcctgtgaatgctgagtgagcgagtaagggaggaggggcgattgagggttcacctctgccttggggaggctgatttctcacacactggctggccctctcattctcactcctccttgggccctgaggctgctggatccagtctgcctgcctccctgtgcagtccagccctgccttgctgcagccccagcccagatggcactcagcgctctcccctgagggagtccctgggcctagccatcccctcactattcccgacccaaagggtgacttttcatctgaacttaaggtgggagatatttttaacttttttccactttggaaaatgtcactgtgacaaaagccagcatactttccctgcacccatctgctcaccagatctcaggcaggaaagcccctctctgttgaagtcaggggctatcttttggtatacttgtgtgaaagtggctggttgggagcagagctaagtggcttcccattaacctgaggtctctttctttactctgggtcagacctgaggttggggaaggcgactgagccatgctcagaatgtctggtcctggcttgggcctgagtagggcagagagggcctttcatggctgatcagagcttaccagccccaccccaccatggtagccttagggtgctgagtgcctgatactgcctgacaagtgcctgacacgcagcctagttccttcctggcccctctctcactggctgggaaaccctagaccatgtcagataggacaacactgctgggttttacatccagatagtaataaacaccatttcatcatt

SEQ ID NO: 372100 - DNA, 2664 bp, Homo sapiens
ggcacgaggctgcggccgccagctcccgcgaccgcctctcctgcccctcgccggtacctcagcaaggtgccactagaagcgccaggctggggccgcctctgagcgccccgcgggggccatggatggtgaaacagcagaggagcaggggggccctgtgcccccgccagttgcacccggcggacccggcttgggcggtgctccgggggggcggcgggagcccaagaagtacgcagtgaccgacgactaccagttgtccaagcaggtgctgggcctgggtgtgaacggcaaagtgctggagtgcttccatcggcgcactggacagaagtgtgccctgaagctcctgtatgacagccccaaggcccggcaggaggtagaccatcactggcaggcttctggcggcccccatattgtctgcatcctggatgtgtatgagaacatgcaccatggcaagcgctgtctcctcatcatcatggaatgcatggaaggtggtgagttgttcagcaggattcaggagcgtggcgaccaggctttcactgagagagaagctgcagagataatgcgggatattggcactgccatccagtttctgcacagccataacattgcccaccgagatgtcaagcctgaaaacctactctacacatctaaggagaaagacgcagtgcttaagctcaccgattttggctttgctaaggagaccacccaaaatgccctgcagacaccctgctatactccctattatgtggcccctgaggtcctgggtccagagaagtatgacaagtcatgtgacatgtggtccctgggtgtcatcatgtacatcctcctttgtggcttcccacccttctactccaacacgggccaggccatctccccggggatgaagaggaggattcgcctgggccagtacggcttccccaatcctgagtggtcagaagtctctgaggatgccaagcagctgatccgcctcctgttgaagacagaccccacagagaggctgaccatcactcagttcatgaaccacccctggatcaacgtgagcccctcctcctcccatggcagtgaggctccttccccaccctgagccttggtttttccatctgagtctgggagaagaggatggagtggggggaaccagtgctgtcccaggtgcctccagtttctaatccacgggcgtggggctccttccagcaatcgatggtagtgccacagaccccactccacacggcccgagtgctgcaggaggacaaagaccactgggacgaagtcaaggaggagatgaccagtgccttggccactatgcgggtagactacgaccaggtgaagatcaaggacctgaagacctctaacaaccggctcctcaacaagaggagaaaaaagcaggcaggcagctcctctgcctcacagggctgcaacaaccagtagctcatggggccttggaggagcctggcctctcagcctgcataacagactgaaatgtgctcaggccctggccaggagggcccagggtcattcttttaacaaaaggattattttgttgtgttttaatttgtcactcggaacttcaggatggaggaccctgaccctaagcctccttcagatctctggcccaggctcaagccctagagatgggcagggcctaggggctgggagctgcctgctgccatagcagcacctttagctaggttggcccgagtgaggcctctgtgctgtcctgccctggtgcatggccttagctttctaggccactgggagttgtggctgggcttcccatcttccacagagacatctccctgtgggatgggcagatgggcctggccttgagaaaggcattggccattggttgccatggtgaccagggaccacgttgctgcctgtgaatgctgagtgagcgagtaagggaggaggggcgattgagggttcacctctgccttggggaggctgatttctcacacactggctggccctctcattctcactcctccttgggccctgaggctgctggatccagtctgcctgcctccctgtgcagtccagccctgccttgctgcagccccagcccagatggcactcagcgctctcccctgagggagtccctgggcctagccatcccctcactattcccgacccaaagggtgacttttcatctgaacttaaggtgggagatatttttaacttttttccactttggaaaatgtcactgtgacaaaagccagcatactttccctgcacccatctgctcaccagatctcaggcaggaaagcccctctctgttgaagtcaggggctatcttttggtatacttgtgtgaaagtggctggttgggagcagagctaagtggcttcccattaacctgaggtctctttctttactctgggtcagacctgaggttggggaaggcgactgagccatgctcagaatgtctggtcctggcttgggcctgagtagggcagagagggcctttcatggctgatcagagcttaccagccccaccccaccatggtagccttagggtgctgagtgcctgatactgcctgacaagtgcctgacacgcagcctagttccttcctggcccctctctcactggctgggaaaccctagaccatgtcagataggacaacactgctgggttttacatccagatagtaataaacaccatttcatcatt

SEQ ID NO: 372101 - DNA, 2423 bp, Homo sapiens
ggcacgaggctgcggccgccagctcccgcgaccgcctctcctgcccctcgccggtacctcagcaaggtgccactagaagcgccaggctggggccgcctctgagcgccccgcgggggccatggatggtgaaacagcagaggagcaggggggccctgtgcccccgccagttgcacccggcggacccggcttgggcggtgctccgggggggcggcgggagcccaagaagtacgcagtgaccgacgactaccagttgtccaagcaggtgctgggcctgggtgtgaacggcaaagtgctggagtgcttccatcggcgcactggacagaagtgtgccctgaagctcctgtatgacagccccaaggcccggcaggaggtagaccatcactggcaggcttctggcggcccccatattgtctgcatcctggatgtgtatgagaacatgcaccatggcaagcgctgtctcctcatcatcatggaatgcatggaaggtggtgagttgttcagcaggattcaggagcgtggcgaccaggctttcactgagagagaagctgcagagataatgcgggatattggcactgccatccagtttctgcacagccataacattgcccaccgagatgtcaagcctgaaaacctactctacacatctaaggagaaagacgcagtgcttaagctcaccgattttggctttgctaaggagaccacccaaaatgccctgcagacaccctgctatactccctattatgtggcccctgaggtcctgggtccagagaagtatgacaagtcatgtgacatgtggtccctgggtgtcatcatgtacatcctcctttgtggcttcccacccttctactccaacacgggccaggccatctccccggggatgaagaggaggattcgcctgggccagtacggcttccccaatcctgagtggtcagaagtctctgaggatgcaatcgatggtagtgccacagaccccactccacacggcccgagtgctgcaggaggacaaagaccactgggacgaagtcaaggaggagatgaccagtgccttggccactatgcgggtagactacgaccaggtgaagatcaaggacctgaagacctctaacaaccggctcctcaacaagaggagaaaaaagcaggcaggcagctcctctgcctcacagggctgcaacaaccagtagctcatggggccttggaggagcctggcctctcagcctgcataacagactgaaatgtgctcaggccctggccaggagggcccagggtcattcttttaacaaaaggattattttgttgtgttttaatttgtcactcggaacttcaggatggaggaccctgaccctaagcctccttcagatctctggcccaggctcaagccctagagatgggcagggcctaggggctgggagctgcctgctgccatagcagcacctttagctaggttggcccgagtgaggcctctgtgctgtcctgccctggtgcatggccttagctttctaggccactgggagttgtggctgggcttcccatcttccacagagacatctccctgtgggatgggcagatgggcctggccttgagaaaggcattggccattggttgccatggtgaccagggaccacgttgctgcctgtgaatgctgagtgagcgagtaagggaggaggggcgattgagggttcacctctgccttggggaggctgatttctcacacactggctggccctctcattctcactcctccttgggccctgaggctgctggatccagtctgcctgcctccctgtgcagtccagccctgccttgctgcagccccagcccagatggcactcagcgctctcccctgagggagtccctgggcctagccatcccctcactattcccgacccaaagggtgacttttcatctgaacttaaggtgggagatatttttaacttttttccactttggaaaatgtcactgtgacaaaagccagcatactttccctgcacccatctgctcaccagatctcaggcaggaaagcccctctctgttgaagtcaggggctatcttttggtatacttgtgtgaaagtggctggttgggagcagagctaagtggcttcccattaacctgaggtctctttctttactctgggtcagacctgaggttggggaaggcgactgagccatgctcagaatgtctggtcctggcttgggcctgagtagggcagagagggcctttcatggctgatcagagcttaccagccccaccccaccatggtagccttagggtgctgagtgcctgatactgcctgacaagtgcctgacacgcagcctagttccttcctggcccctctctcactggctgggaaaccctagaccatgtcagataggacaacactgctgggttttacatccagatagtaataaacaccatttcatcatt

SEQ ID NO: 372102 - DNA, 1683 bp, Homo sapiens
ggacgcgtgggtcgacccacgcgtcgcacgggccaggccatctccccggggatgaagaggaggattcgcctgggccagtacggcttccccaatcctgagtggtcagaagtctctgaggatgccaagcagctgatccgcctcctgttgaagacagaccccacagagaggctgaccatcactcagttcatgaaccacccctggatcaaccaatcgatggtagtgccacagaccccactccacacggcccgagtgctgcaggaggacaaagaccactgggacgaagtcaaggaggagatgaccagtgccttggccactatgcgggtagactacgaccaggtgaagatcaaggacctgaagacctctaacaaccggctcctcaacaagaggagaaaaaagcaggcaggcagctcctctgcctcacagggctgcaacaaccagtagctcatggggccttggaggagcctggcctctcagcctgcataacagactgaaatgtgctcaggccctggccaggagggcccagggtcattcttttaacaaaaggattattttgttgtgttttaatttgtcactcggaacttcaggatggaggaccctgaccctaagcctccttcagatctctggcccaggctcaagccctagagatgggcagggcctaggggctgggagctgcctgctgccatagcagcacctttagctaggttggcccgagtgaggcctctgtgctgtcctgccctggtgcatggccttagctttctaggccactgggagttgtggctgggcttcccatcttccacagagacatctccctgtgggatgggcagatgggcctggccttgagaaaggcattggccattggttgccatggtgaccagggaccacgttgctgcctgtgaatgctgagtgagcgagtaagggaggaggggcgattgagggttcacctctgccttggggaggctgatttctcacacactggctggccctctcattctcactcctccttgggccctgaggctgctggatccagtctgcctgcctccctgtgcagtccagccctgccttgctgcagccccagcccagatggcactcagcgctctcccctgagggagtccctgggcctagccatcccctcactattcccgacccaaagggtgacttttcatctgaacttaaggtgggagatatttttaacttttttccactttggaaaatgtcactgtgacaaaagccagcatactttccctgcacccatctgctcaccagatctcaggcaggaaagcccctctctgttgaagtcaggggctatcttttggtatacttgtgtgaaagtggctggttgggagcagagctaagtggcttcccattaacctgaggtctctttctttactctgggtcagacctgaggttggggaaggcgactgagccatgctcagaatgtctggtcctggcttgggcctgagtagggcagagagggcctttcatggctgatcagagcttaccagccccaccccaccatggtagccttagggtgctgagtgcctgatactgcctgacaagtgcctgacacgcagcctagttccttcctggcccctctctcactggctgggaaaccctagaccatgtcagataggacaacactgctgggttttacatccagatagtaataaacaccatttcatcatt

SEQ ID NO: 372103 - DNA, 1027 bp, Homo sapiens
ggcacgaggctgcggccgccagctcccgcgaccgcctctcctgcccctcgccggtacctcagcaaggtgccactagaagcgccaggctggggccgcctctgagcgccccgcgggggccatggatggtgaaacagcagaggagcaggggggccctgtgcccccgccagttgcacccggcggacccggcttgggcggtgctccgggggggcggcgggagcccaagaagtacgcagtgaccgacgactaccagttgtccaagcaggtgctgggcctgggtgtgaacggcaaagtgctggagtgcttccatcggcgcactggacagaagtgtgccctgaagctcctgtatgacagccccaaggcccggcaggaggtagaccatcactggcaggcttctggcggcccccatattgtctgcatcctggatgtgtatgagaacatgcaccatggcaagcgctgtctcctcatcatcatggaatgcatggaaggtggtgagttgttcagcaggattcaggagcgtggcgaccaggctttcactgagagagaagctgcagagataatgcgggatattggcactgccatccagtttctgcacagccataacattgcccaccgagatgtcaagcctgaaaacctactctacacatctaaggagaaagacgcagtgcttaagctcaccgattttggctttgctaaggagaccacccaaaatgccctgcagacaccctgctatactccctattatgtggcccctgaggtcctgggtccagagaagtatgacaagtcatgtgacatgtggtccctgggtgtcatcatgtacatcctcctttgtggcttcccacccttctactccaacacgggccaggccatctccccggggatgaagaggaggattcgcctgggccagtacggcttccccaatcctgagtggtcagaagtctctgaggatgcattataacacacgacggccagtccccatcctgcagtaccccagcctcgactgatagagatcccctcctcaccgcacggc

SEQ ID NO: 372104 - DNA, 868 bp, Homo sapiens
ggcacgaggctgcggccgccagctcccgcgaccgcctctcctgcccctcgccggtacctcagcaaggtgccactagaagcgccaggctggggccgcctctgagcgccccgcgggggccatggatggtgaaacagcagaggagcaggggggccctgtgcccccgccagttgcacccggcggacccggcttgggcggtgctccgggggggcggcgggagcccaagaagtacgcagtgaccgacgactaccagttgtccaagcaggtgctgggcctgggtgtgaacggcaaagtgctggagtgcttccatcggcgcactggacagaagtgtgccctgaagctcctgtatgacagccccaaggcccggcaggaggtagaccatcactggcaggcttctggcggcccccatattgtctgcatcctggatgtgtatgagaacatgcaccatggcaagcgctgtctcctcatcatcatggaatgcatggaaggtggtgagttgttcagcaggattcaggagcgtggcgaccaggctttcactgagagagaagctgcagagataatgcgggatattggcactgccatccagtttctgcacagccataacattgcccaccgagatgtcaagcctgaaaacctactctacacatctaaggagaaagacgcagtgcttaagctcaccgattttggctttgctaaggagaccacccaaaatgccctgcagacaccctgctatactccctattatgtggcccctgaggtcctgggtccagagaagtatgacaagtcatgtgacatgtggtccctgggtgtcatcatgtacatcctaaaaaataaagccctcctggggacttggaatcagtcggcagtcata

SEQ ID NO: 372105 - DNA, 289 bp, Homo sapiens
atgtaccgggtggggcttgaccttagactggcatcactgaccccctcctcctctgtttctgcagaagctgcagagataatgcgggatattggcactgccatccagtttctgcacagccataacattgcccaccgagatgtcaaggtgaggctccaggattcaggttgggggcccggggaagaggatattgtcccactccacaatccctgatggcatccaggacccactggatggaggccatgttccctagtcacattcaaagcctctgctctgtgtcccagactgcttt

SEQ ID NO: 372106 - DNA, 414 bp, Homo sapiens
  misc_feature (393)..(393): n is a, c, g, or t
  misc_feature (414)..(414): n is a, c, g, or t
ttctgccgcgtcgactggacacggtctttcttattcagtacctgttcctgacttttccacggattgtcttcatgctgggctttgtcgtggttctgagcttcctcctgggtggctacctgttgtttgtcctgtatctggcggccaccaaccagactactaacgagtggtacagaggtgactgggcctggtgccagcgttgtccccttgtggcctggcctccgtcagcagagccccaagtccaccggaacattcactcccatgggcttcggagcaaccttcaagagatctttctacctgcctttccatgtcatgagaggaagaaacaagaatgacaagtgtatgaaataaacgggaactacagctcaaaggcagtcatacacttggtcgaccggnagcgaatttagtagtagtagn

SEQ ID NO: 372107 - DNA, 2498 bp, Homo sapiens
aggggcgccgtgctgatgtcacgagcccgcaggaagtctcgtatcgcgcccgggaggcgccggagcccagcggctggcgggccgccgtcccacccccacctcgccggagtccggggcggccccggtgtcccctccgagcctgctgcactccacgtccccctaccagggctccagcccccagggaaatctccgaccaggcccgcccaggagccagatccaggctcctggaagaaccatgtccggcagctactggtcatgccaggcacacactgctgcccaagaggagctgctgtttgaattatctgtgaatgttgggaagaggaatgccagagctgccggctgaaaattacccaaccaagagaaatctgcaggatggactttctggtcctcttcttgttctacctggcttcggtgctgatgggtcttgttcttatctgcgtctgctcgaaaacccatagcttgaaaggcctggccaggggaggagcacagatattttcctgtataattccagaatgtcttcagagagccgtgcatggattgcttcattaccttttccatacgagaaaccacaccttcattgtcctgcacctggtcttgcaagggatggtttatactgagtacacctgggaagtatttggctactgtcaggagctggagttgtccttgcattaccttcttctgccctatctgctgctaggtgtaaacctgttttttttcaccctgacttgtggaaccaatcctggcattataacaaaagcaaatgaattattatttcttcatgtttatgaatttgatgaagtgatgtttccaaagaacgtgaggtgctctacttgtgatttaaggaaaccagctcgatccaagcactgcagtgtgtgtaactggtgtgtgcaccgtttcgaccatcactgtgtttgggtgaacaactgcatcggggcctggaacatcaggtacttcctcatctacgtcttgaccttgacggcctcggctgccaccgtcgccattgtgagcaccacttttctggtccacttggtggtgatgtcagatttataccaggagacttacatcgatgaccttggacacctccatgttatggacacggtctttcttattcagtacctgttcctgacttttccacggattgtcttcatgctgggctttgtcgtggttctgagcttcctcctgggtggctacctgttgtttgtcctgtatctggcggccaccaaccagactactaacgagtggtacagaggtgactgggcctggtgccagcgttgtccccttgtggcctggcctccgtcagcagagccccaagtccaccggaacattcactcccatgggcttcggagcaaccttcaagagatctttctacctgcctttccatgtcatgagaggaagaaacaagaatgacaagtgtatgactgcctttgagctgtagttcccgtttatttacacatgtggatcctcgttttccaagcatggcttgtttgttttgatttctgctgtgcttataaatcactttcggtgggcaagggagagaggggaaaattgggtgttgactgaggaatcccccttgcttgtcttcttttgaaaccgggcatctctgaagtcctggtgtcaaggggatcaagagatgacttctcagaggttctaggtgatgctgagaccttggtgtctctaaactctgggcatgtggacaggaggggcttgcggccgtgtctctgacctgtgtgatgtgcaggagggtctcattgactcagcgcctgcgcgttgtgcctggctgtgctctcttttatgccccctctattctcctctctcccccaggggattttcatctcaacaacagagtgtcctcacccaggcctgccttccggccagtatgggcttgtacatcaggcaccttcctgcatgtgtggcctccggcctgccctcctctagccacattcaagtcctttctcaccagtttaaaaattgtgaaagtgaactgccacctatttcagaggagagatgactgccagaaacgaggtcttggtgcggaaggtctttggagtgggagggctctcaggtgcaggtggcaggtgttctgcaccttgctaggccaaggagcccgcagtcagagaggctgggaagtgggagtcaggggcagggggccttccagccatcttcccccgtaccccccagctgagaacagatggaaacgtgaagacgggtagctggggcggccagggaacccaagtccgctggccgaagccaaagcccggcaccacccccaattcttgctggtggaaagcaccgtgaaatcaaccagcggcagctctgaacgcgacgcacagcccgcgagggagcctgggcaaggacggagcgggcctgcaccggcggttgggcgggctccgggggcggggtccacctgggaccgcggcgcgcccctcaccgctcgcgccgccagggggcgccctccggagagcgcgcctaggccgcggcctgcgcttggcccctgcggg

SEQ ID NO: 372108 - DNA, 1348 bp, Homo sapiens
aaagaccgtgtccataacatggaggtgtccaaggtcatcgatgtaagtctcctggtataaatctgacatcaccaccaagtggaccagaaaagtggtgctcacaatgggcctggtgccagcgttgtccccttgtggcctggcctccgtcagcagagccccaagtccaccggaacattcactcccatgggcttcggagcaaccttcaagagatctttctacctgcctttccatgtcatgagaggaagaaacaagaatgacaagtgtatgactgcctttgagctgtagttcccgtttatttacacatgtggatcctcgttttccaagcatggcttgtttgttttgatttctgctgtgcttataaatcactttcggtgggcaagggagagaggggaaaattgggtgttgactgaggaatcccccttgcttgtcttcttttgaaaccgggcatctctgaagtcctggtgtcaaggggatcaagagatgacttctcagaggttctaggtgatgctgagaccttggtgtctctaaactctgggcatgtggacaggaggggcttgcggccgtgtctctgacctgtgtgatgtgcaggagggtctcattgactcagcgcctgcgcgttgtgcctggctgtgctctcttttatgccccctctattctcctctctcccccaggggattttcatctcaacaacagagtgtcctcacccaggcctgccttccggccagtatgggcttgtacatcaggcaccttcctgcatgtgtggcctccggcctgccctcctctagccacattcaagtcctttctcaccagtttaaaaattgtgaaagtgaactgccacctatttcagaggagagatgactgccagaaacgaggtcttggtgcggaaggtctttggagtgggagggctctcaggtgcaggtggcaggtgttctgcaccttgctaggccaaggagcccgcagtcagagaggctgggaagtgggagtcaggggcagggggccttccagccatcttcccccgtaccccccagctgagaacagatggaaacgtgaagacgggtagctggggcggccagggaacccaagtccgctggccgaagccaaagcccggcaccacccccaattcttgctggtggaaagcaccgtgaaatcaaccagcggcagctctgaacgcgacgcacagcccgcgagggagcctgggcaaggacggagcgggcctgcaccggcggttgggcgggctccgggggcggggtccacctgggaccgcggcgcgcccctcaccgctcgcgccgccagggggcgccctccggagagcgcgcctaggccgcggcctgcgcttggcccctgcggg

SEQ ID NO: 372109 - DNA, 2654 bp, Homo sapiens
aggggcgccgtgctgatgtcacgagcccgcaggaagtctcgtatcgcgcccgggaggcgccggagcccagcggctggcggtaaggccgcctccgcggggctgtgggaagcttgggctgtcccaggaccgtcagtctcctcctctgaccctccctttccccttgtgtgtagggccgccgtcccacccccacctcgccggagtccggggcggccccggtgtcccctccgagcctgctgcactccacgtccccctaccagggctccagcccccagggaaatctccgaccaggcccgcccaggaggtattctgcctttgactgcaactcttgtcgtcttatgtgggtgttgaattgatctgtctctgcagccagatccaggctcctggaagaaccatgtccggcagctactggtcatgccaggcacacactgctgcccaagaggagctgctgtttgaattatctgtgaatgttgggaagaggaatgccagagctgccggctgaaaattacccaaccaagagaaatctgcaggatggactttctggtcctcttcttgttctacctggcttcggtgctgatgggtcttgttcttatctgcgtctgctcgaaaacccatagcttgaaaggcctggccaggggaggagcacagatattttcctgtataattccagaatgtcttcagagagccgtgcatggattgcttcattaccttttccatacgagaaaccacaccttcattgtcctgcacctggtcttgcaagggatggtttatactgagtacacctgggaagtatttggctactgtcaggagctggagttgtccttgcattaccttcttctgccctatctgctgctaggtgtaaacctgttttttttcaccctgacttgtggaaccaatcctggcattataacaaaagcaaatgaattattatttcttcatgtttatgaatttgatgaagtgatgtttccaaagaacgtgaggtgctctacttgtgatttaaggaaaccagctcgatccaagcactgcagtgtgtgtaactggtgtgtgcaccgtttcgaccatcactgtgtttgggtgaacaactgcatcggggcctggaacatcaggtacttcctcatctacgtcttgaccttgacggcctcggctgccaccgtcgccattgtgagcaccacttttctggtccacttggtggtgatgtcagatttataccaggagacttacatcgatgaccttggacacctccatgttatggacacggtctttcttattcagtacctgttcctgacttttccacggattgtcttcatgctgggctttgtcgtggttctgagcttcctcctgggtggctacctgttgtttgtcctgtatctggcggccaccaaccagactactaacgagtggtacagaggtgactgggcctggtgccagcgttgtccccttgtggcctggcctccgtcagcagagccccaagtccaccggaacattcactcccatgggcttcggagcaaccttcaagagatctttctacctgcctttccatgtcatgagaggaagaaacaagaatgacaagtgtatgactgcctttgagctgtagttcccgtttatttacacatgtggatcctcgttttccaagcatggcttgtttgttttgatttctgctgtgcttataaatcactttcggtgggcaagggagagaggggaaaattgggtgttgactgaggaatcccccttgcttgtcttcttttgaaaccgggcatctctgaagtcctggtgtcaaggggatcaagagatgacttctcagaggttctaggtgatgctgagaccttggtgtctctaaactctgggcatgtggacaggaggggcttgcggccgtgtctctgacctgtgtgatgtgcaggagggtctcattgactcagcgcctgcgcgttgtgcctggctgtgctctcttttatgccccctctattctcctctctcccccaggggattttcatctcaacaacagagtgtcctcacccaggcctgccttccggccagtatgggcttgtacatcaggcaccttcctgcatgtgtggcctccggcctgccctcctctagccacattcaagtcctttctcaccagtttaaaaattgtgaaagtgaactgccacctatttcagaggagagatgactgccagaaacgaggtcttggtgcggaaggtctttggagtgggagggctctcaggtgcaggtggcaggtgttctgcaccttgctaggccaaggagcccgcagtcagagaggctgggaagtgggagtcaggggcagggggccttccagccatcttcccccgtaccccccagctgagaacagatggaaacgtgaagacgggtagctggggcggccagggaacccaagtccgctggccgaagccaaagcccggcaccacccccaattcttgctggtggaaagcaccgtgaaatcaaccagcggcagctctgaacgcgacgcacagcccgcgagggagcctgggcaaggacggagcgggcctgcaccggcggttgggcgggctccgggggcggggtccacctgggaccgcggcgcgcccctcaccgctcgcgccgccagggggcgccctccggagagcgcgcctaggccgcggcctgcgcttggcccctgcggg

SEQ ID NO: 372110 - DNA, 2432 bp, Homo sapiens
aggggcgccgtgctgatgtcacgagcccgcaggaagtctcgtatcgcgcccgggaggcgccggagcccagcggctggcggtattctgcctttgactgcaactcttgtcgtcttatgtgggtgttgaattgatctgtctctgcagccagatccaggctcctggaagaaccatgtccggcagctactggtcatgccaggcacacactgctgcccaagaggagctgctgtttgaattatctgtgaatgttgggaagaggaatgccagagctgccggctgaaaattacccaaccaagagaaatctgcaggatggactttctggtcctcttcttgttctacctggcttcggtgctgatgggtcttgttcttatctgcgtctgctcgaaaacccatagcttgaaaggcctggccaggggaggagcacagatattttcctgtataattccagaatgtcttcagagagccgtgcatggattgcttcattaccttttccatacgagaaaccacaccttcattgtcctgcacctggtcttgcaagggatggtttatactgagtacacctgggaagtatttggctactgtcaggagctggagttgtccttgcattaccttcttctgccctatctgctgctaggtgtaaacctgttttttttcaccctgacttgtggaaccaatcctggcattataacaaaagcaaatgaattattatttcttcatgtttatgaatttgatgaagtgatgtttccaaagaacgtgaggtgctctacttgtgatttaaggaaaccagctcgatccaagcactgcagtgtgtgtaactggtgtgtgcaccgtttcgaccatcactgtgtttgggtgaacaactgcatcggggcctggaacatcaggtacttcctcatctacgtcttgaccttgacggcctcggctgccaccgtcgccattgtgagcaccacttttctggtccacttggtggtgatgtcagatttataccaggagacttacatcgatgaccttggacacctccatgttatggacacggtctttcttattcagtacctgttcctgacttttccacggattgtcttcatgctgggctttgtcgtggttctgagcttcctcctgggtggctacctgttgtttgtcctgtatctggcggccaccaaccagactactaacgagtggtacagaggtgactgggcctggtgccagcgttgtccccttgtggcctggcctccgtcagcagagccccaagtccaccggaacattcactcccatgggcttcggagcaaccttcaagagatctttctacctgcctttccatgtcatgagaggaagaaacaagaatgacaagtgtatgactgcctttgagctgtagttcccgtttatttacacatgtggatcctcgttttccaagcatggcttgtttgttttgatttctgctgtgcttataaatcactttcggtgggcaagggagagaggggaaaattgggtgttgactgaggaatcccccttgcttgtcttcttttgaaaccgggcatctctgaagtcctggtgtcaaggggatcaagagatgacttctcagaggttctaggtgatgctgagaccttggtgtctctaaactctgggcatgtggacaggaggggcttgcggccgtgtctctgacctgtgtgatgtgcaggagggtctcattgactcagcgcctgcgcgttgtgcctggctgtgctctcttttatgccccctctattctcctctctcccccaggggattttcatctcaacaacagagtgtcctcacccaggcctgccttccggccagtatgggcttgtacatcaggcaccttcctgcatgtgtggcctccggcctgccctcctctagccacattcaagtcctttctcaccagtttaaaaattgtgaaagtgaactgccacctatttcagaggagagatgactgccagaaacgaggtcttggtgcggaaggtctttggagtgggagggctctcaggtgcaggtggcaggtgttctgcaccttgctaggccaaggagcccgcagtcagagaggctgggaagtgggagtcaggggcagggggccttccagccatcttcccccgtaccccccagctgagaacagatggaaacgtgaagacgggtagctggggcggccagggaacccaagtccgctggccgaagccaaagcccggcaccacccccaattcttgctggtggaaagcaccgtgaaatcaaccagcggcagctctgaacgcgacgcacagcccgcgagggagcctgggcaaggacggagcgggcctgcaccggcggttgggcgggctccgggggcggggtccacctgggaccgcggcgcgcccctcaccgctcgcgccgccagggggcgccctccggagagcgcgcctaggccgcggcctgcgcttggcccctgcggg

SEQ ID NO: 372111 - DNA, 2589 bp, Homo sapiens
aggggcgccgtgctgatgtcacgagcccgcaggaagtctcgtatcgcgcccgggaggcgccggagcccagcggctggcggtaaggccgcctccgcggggctgtgggaagcttgggctgtcccaggaccgtcagtctcctcctctgaccctccctttccccttgtgtgtagggccgccgtcccacccccacctcgccggagtccggggcggccccggtgtcccctccgagcctgctgcactccacgtccccctaccagggctccagcccccagggaaatctccgaccaggcccgcccaggagccagatccaggctcctggaagaaccatgtccggcagctactggtcatgccaggcacacactgctgcccaagaggagctgctgtttgaattatctgtgaatgttgggaagaggaatgccagagctgccggctgaaaattacccaaccaagagaaatctgcaggatggactttctggtcctcttcttgttctacctggcttcggtgctgatgggtcttgttcttatctgcgtctgctcgaaaacccatagcttgaaaggcctggccaggggaggagcacagatattttcctgtataattccagaatgtcttcagagagccgtgcatggattgcttcattaccttttccatacgagaaaccacaccttcattgtcctgcacctggtcttgcaagggatggtttatactgagtacacctgggaagtatttggctactgtcaggagctggagttgtccttgcattaccttcttctgccctatctgctgctaggtgtaaacctgttttttttcaccctgacttgtggaaccaatcctggcattataacaaaagcaaatgaattattatttcttcatgtttatgaatttgatgaagtgatgtttccaaagaacgtgaggtgctctacttgtgatttaaggaaaccagctcgatccaagcactgcagtgtgtgtaactggtgtgtgcaccgtttcgaccatcactgtgtttgggtgaacaactgcatcggggcctggaacatcaggtacttcctcatctacgtcttgaccttgacggcctcggctgccaccgtcgccattgtgagcaccacttttctggtccacttggtggtgatgtcagatttataccaggagacttacatcgatgaccttggacacctccatgttatggacacggtctttcttattcagtacctgttcctgacttttccacggattgtcttcatgctgggctttgtcgtggttctgagcttcctcctgggtggctacctgttgtttgtcctgtatctggcggccaccaaccagactactaacgagtggtacagaggtgactgggcctggtgccagcgttgtccccttgtggcctggcctccgtcagcagagccccaagtccaccggaacattcactcccatgggcttcggagcaaccttcaagagatctttctacctgcctttccatgtcatgagaggaagaaacaagaatgacaagtgtatgactgcctttgagctgtagttcccgtttatttacacatgtggatcctcgttttccaagcatggcttgtttgttttgatttctgctgtgcttataaatcactttcggtgggcaagggagagaggggaaaattgggtgttgactgaggaatcccccttgcttgtcttcttttgaaaccgggcatctctgaagtcctggtgtcaaggggatcaagagatgacttctcagaggttctaggtgatgctgagaccttggtgtctctaaactctgggcatgtggacaggaggggcttgcggccgtgtctctgacctgtgtgatgtgcaggagggtctcattgactcagcgcctgcgcgttgtgcctggctgtgctctcttttatgccccctctattctcctctctcccccaggggattttcatctcaacaacagagtgtcctcacccaggcctgccttccggccagtatgggcttgtacatcaggcaccttcctgcatgtgtggcctccggcctgccctcctctagccacattcaagtcctttctcaccagtttaaaaattgtgaaagtgaactgccacctatttcagaggagagatgactgccagaaacgaggtcttggtgcggaaggtctttggagtgggagggctctcaggtgcaggtggcaggtgttctgcaccttgctaggccaaggagcccgcagtcagagaggctgggaagtgggagtcaggggcagggggccttccagccatcttcccccgtaccccccagctgagaacagatggaaacgtgaagacgggtagctggggcggccagggaacccaagtccgctggccgaagccaaagcccggcaccacccccaattcttgctggtggaaagcaccgtgaaatcaaccagcggcagctctgaacgcgacgcacagcccgcgagggagcctgggcaaggacggagcgggcctgcaccggcggttgggcgggctccgggggcggggtccacctgggaccgcggcgcgcccctcaccgctcgcgccgccagggggcgccctccggagagcgcgcctaggccgcggcctgcgcttggcccctgcggg

SEQ ID NO: 372112 - DNA, 2615 bp, Homo sapiens
aggggcgccgtgctgatgtcacgagcccgcaggaagtctcgtatcgcgcccgggaggcgccggagcccagcggctggcggtaaggccgcctccgcggggctgtgggaagcttgggctgtcccaggaccgtcagtctcctcctctgaccctccctttccccttgtgtgtagggccgccgtcccacccccacctcgccggagtccggggcggccccggtgtcccctccgagcctgctgcactccacgtccccctaccagggctccagcccccagggaaatctccgaccaggcccgcccaggagccagatccaggctcctggaagaaccatgtccggcagctactggtcatgccaggcacacactgctgcccaagaggagctgctgtttgaattatctgtgaatgttgggaagaggaatgccagagctgccggctgaaaattacccaaccaagagaaatgtaggctgggtaccctgaatcaccccctgcaggatggactttctggtcctcttcttgttctacctggcttcggtgctgatgggtcttgttcttatctgcgtctgctcgaaaacccatagcttgaaaggcctggccaggggaggagcacagatattttcctgtataattccagaatgtcttcagagagccgtgcatggattgcttcattaccttttccatacgagaaaccacaccttcattgtcctgcacctggtcttgcaagggatggtttatactgagtacacctgggaagtatttggctactgtcaggagctggagttgtccttgcattaccttcttctgccctatctgctgctaggtgtaaacctgttttttttcaccctgacttgtggaaccaatcctggcattataacaaaagcaaatgaattattatttcttcatgtttatgaatttgatgaagtgatgtttccaaagaacgtgaggtgctctacttgtgatttaaggaaaccagctcgatccaagcactgcagtgtgtgtaactggtgtgtgcaccgtttcgaccatcactgtgtttgggtgaacaactgcatcggggcctggaacatcaggtacttcctcatctacgtcttgaccttgacggcctcggctgccaccgtcgccattgtgagcaccacttttctggtccacttggtggtgatgtcagatttataccaggagacttacatcgatgaccttggacacctccatgttatggacacggtctttcttattcagtacctgttcctgacttttccacggattgtcttcatgctgggctttgtcgtggttctgagcttcctcctgggtggctacctgttgtttgtcctgtatctggcggccaccaaccagactactaacgagtggtacagaggtgactgggcctggtgccagcgttgtccccttgtggcctggcctccgtcagcagagccccaagtccaccggaacattcactcccatgggcttcggagcaaccttcaagagatctttctacctgcctttccatgtcatgagaggaagaaacaagaatgacaagtgtatgactgcctttgagctgtagttcccgtttatttacacatgtggatcctcgttttccaagcatggcttgtttgttttgatttctgctgtgcttataaatcactttcggtgggcaagggagagaggggaaaattgggtgttgactgaggaatcccccttgcttgtcttcttttgaaaccgggcatctctgaagtcctggtgtcaaggggatcaagagatgacttctcagaggttctaggtgatgctgagaccttggtgtctctaaactctgggcatgtggacaggaggggcttgcggccgtgtctctgacctgtgtgatgtgcaggagggtctcattgactcagcgcctgcgcgttgtgcctggctgtgctctcttttatgccccctctattctcctctctcccccaggggattttcatctcaacaacagagtgtcctcacccaggcctgccttccggccagtatgggcttgtacatcaggcaccttcctgcatgtgtggcctccggcctgccctcctctagccacattcaagtcctttctcaccagtttaaaaattgtgaaagtgaactgccacctatttcagaggagagatgactgccagaaacgaggtcttggtgcggaaggtctttggagtgggagggctctcaggtgcaggtggcaggtgttctgcaccttgctaggccaaggagcccgcagtcagagaggctgggaagtgggagtcaggggcagggggccttccagccatcttcccccgtaccccccagctgagaacagatggaaacgtgaagacgggtagctggggcggccagggaacccaagtccgctggccgaagccaaagcccggcaccacccccaattcttgctggtggaaagcaccgtgaaatcaaccagcggcagctctgaacgcgacgcacagcccgcgagggagcctgggcaaggacggagcgggcctgcaccggcggttgggcgggctccgggggcggggtccacctgggaccgcggcgcgcccctcaccgctcgcgccgccagggggcgccctccggagagcgcgcctaggccgcggcctgcgcttggcccctgcggg

SEQ ID NO: 372113 - DNA, 2458 bp, Homo sapiens
aggggcgccgtgctgatgtcacgagcccgcaggaagtctcgtatcgcgcccgggaggcgccggagcccagcggctggcggtattctgcctttgactgcaactcttgtcgtcttatgtgggtgttgaattgatctgtctctgcagccagatccaggctcctggaagaaccatgtccggcagctactggtcatgccaggcacacactgctgcccaagaggagctgctgtttgaattatctgtgaatgttgggaagaggaatgccagagctgccggctgaaaattacccaaccaagagaaatgtaggctgggtaccctgaatcaccccctgcaggatggactttctggtcctcttcttgttctacctggcttcggtgctgatgggtcttgttcttatctgcgtctgctcgaaaacccatagcttgaaaggcctggccaggggaggagcacagatattttcctgtataattccagaatgtcttcagagagccgtgcatggattgcttcattaccttttccatacgagaaaccacaccttcattgtcctgcacctggtcttgcaagggatggtttatactgagtacacctgggaagtatttggctactgtcaggagctggagttgtccttgcattaccttcttctgccctatctgctgctaggtgtaaacctgttttttttcaccctgacttgtggaaccaatcctggcattataacaaaagcaaatgaattattatttcttcatgtttatgaatttgatgaagtgatgtttccaaagaacgtgaggtgctctacttgtgatttaaggaaaccagctcgatccaagcactgcagtgtgtgtaactggtgtgtgcaccgtttcgaccatcactgtgtttgggtgaacaactgcatcggggcctggaacatcaggtacttcctcatctacgtcttgaccttgacggcctcggctgccaccgtcgccattgtgagcaccacttttctggtccacttggtggtgatgtcagatttataccaggagacttacatcgatgaccttggacacctccatgttatggacacggtctttcttattcagtacctgttcctgacttttccacggattgtcttcatgctgggctttgtcgtggttctgagcttcctcctgggtggctacctgttgtttgtcctgtatctggcggccaccaaccagactactaacgagtggtacagaggtgactgggcctggtgccagcgttgtccccttgtggcctggcctccgtcagcagagccccaagtccaccggaacattcactcccatgggcttcggagcaaccttcaagagatctttctacctgcctttccatgtcatgagaggaagaaacaagaatgacaagtgtatgactgcctttgagctgtagttcccgtttatttacacatgtggatcctcgttttccaagcatggcttgtttgttttgatttctgctgtgcttataaatcactttcggtgggcaagggagagaggggaaaattgggtgttgactgaggaatcccccttgcttgtcttcttttgaaaccgggcatctctgaagtcctggtgtcaaggggatcaagagatgacttctcagaggttctaggtgatgctgagaccttggtgtctctaaactctgggcatgtggacaggaggggcttgcggccgtgtctctgacctgtgtgatgtgcaggagggtctcattgactcagcgcctgcgcgttgtgcctggctgtgctctcttttatgccccctctattctcctctctcccccaggggattttcatctcaacaacagagtgtcctcacccaggcctgccttccggccagtatgggcttgtacatcaggcaccttcctgcatgtgtggcctccggcctgccctcctctagccacattcaagtcctttctcaccagtttaaaaattgtgaaagtgaactgccacctatttcagaggagagatgactgccagaaacgaggtcttggtgcggaaggtctttggagtgggagggctctcaggtgcaggtggcaggtgttctgcaccttgctaggccaaggagcccgcagtcagagaggctgggaagtgggagtcaggggcagggggccttccagccatcttcccccgtaccccccagctgagaacagatggaaacgtgaagacgggtagctggggcggccagggaacccaagtccgctggccgaagccaaagcccggcaccacccccaattcttgctggtggaaagcaccgtgaaatcaaccagcggcagctctgaacgcgacgcacagcccgcgagggagcctgggcaaggacggagcgggcctgcaccggcggttgggcgggctccgggggcggggtccacctgggaccgcggcgcgcccctcaccgctcgcgccgccagggggcgccctccggagagcgcgcctaggccgcggcctgcgcttggcccctgcggg

SEQ ID NO: 372114 - DNA, 1358 bp, Homo sapiens
  misc_feature (1337)..(1337): n is a, c, g, or t
  misc_feature (1358)..(1358): n is a, c, g, or t
aggggcgccgtgctgatgtcacgagcccgcaggaagtctcgtatcgcgcccgggaggcgccggagcccagcggctggcgccagatccaggctcctggaagaaccatgtccggcagctactggtcatgccaggcacacactgctgcccaagaggagctgctgtttgaattatctgtgaatgttgggaagaggaatgccagagctgccggctgaaaattacccaaccaagagaaatctgcaggatggactttctggtcctcttcttgttctacctggcttcggtgctgatgggtcttgttcttatctgcgtctgctcgaaaacccatagcttgaaaggcctggccaggggaggagcacagatattttcctgtataattccagaatgtcttcagagagccgtgcatggattgcttcattaccttttccatacgagaaaccacaccttcattgtcctgcacctggtcttgcaagggatggtttatactgagtacacctgggaagtatttggctactgtcaggagctggagttgtccttgcattaccttcttctgccctatctgctgctaggtgtaaacctgttttttttcaccctgacttgtggaaccaatcctggcattataacaaaagcaaatgaattattatttcttcatgtttatgaatttgatgaagtgatgtttccaaagaacgtgaggtgctctacttgtgatttaaggaaaccagctcgatccaagcactgcagtgtgtgtaactggtgtgtgcaccgtttcgaccatcactgtgtttgggtgaacaactgcatcggggcctggaacatcaggtacttcctcatctacgtcttgaccttgacggcctcggctgccaccgtcgccattgtgagcaccacttttctggtccacttggtggtgatgtcagatttataccaggagacttacatcgatgaccttggacacctccatgttatggacacggtctttcttattcagtacctgttcctgacttttccacggattgtcttcatgctgggctttgtcgtggttctgagcttcctcctgggtggctacctgttgtttgtcctgtatctggcggccaccaaccagactactaacgagtggtacagaggtgactgggcctggtgccagcgttgtccccttgtggcctggcctccgtcagcagagccccaagtccaccggaacattcactcccatgggcttcggagcaaccttcaagagatctttctacctgcctttccatgtcatgagaggaagaaacaagaatgacaagtgtatgaaataaacgggaactacagctcaaaggcagtcatacacttggtcgaccggnagcgaatttagtagtagtagn

SEQ ID NO: 372115 - DNA, 1713 bp, Homo sapiens
tcttttgtccatctggattttatattgatgaatgaagtctgcatttattttataaatagctaactggaatagcacatttcctaagtaaactttcccttttccttcagtgtgaacacttcattcatcccacaggaaactcttgtatgtactgggattattctgggctgcttctcagtgctgtttatgttcagtttgtcacatctggacacaagtaggtgggctgaggaagcagcgctggtggctgtggcaggcccagggttggccagtgttcactctcatggatgtcacagtccagctgcctaaagcactaccttttctctgctcctagtacctgttcctgacttttccacggattgtcttcatgctgggctttgtcgtggttctgagcttcctcctgggtggctacctgttgtttgtcctgtatctggcggccaccaaccagactactaacgagtggtacagaggtgactgggcctggtgccagcgttgtccccttgtggcctggcctccgtcagcagagccccaagtccaccggaacattcactcccatgggcttcggagcaaccttcaagagatctttctacctgcctttccatgtcatgagaggaagaaacaagaatgacaagtgtatgactgcctttgagctgtagttcccgtttatttacacatgtggatcctcgttttccaagcatggcttgtttgttttgatttctgctgtgcttataaatcactttcggtgggcaagggagagaggggaaaattgggtgttgactgaggaatcccccttgcttgtcttcttttgaaaccgggcatctctgaagtcctggtgtcaaggggatcaagagatgacttctcagaggttctaggtgatgctgagaccttggtgtctctaaactctgggcatgtggacaggaggggcttgcggccgtgtctctgacctgtgtgatgtgcaggagggtctcattgactcagcgcctgcgcgttgtgcctggctgtgctctcttttatgccccctctattctcctctctcccccaggggattttcatctcaacaacagagtgtcctcacccaggcctgccttccggccagtatgggcttgtacatcaggcaccttcctgcatgtgtggcctccggcctgccctcctctagccacattcaagtcctttctcaccagtttaaaaattgtgaaagtgaactgccacctatttcagaggagagatgactgccagaaacgaggtcttggtgcggaaggtctttggagtgggagggctctcaggtgcaggtggcaggtgttctgcaccttgctaggccaaggagcccgcagtcagagaggctgggaagtgggagtcaggggcagggggccttccagccatcttcccccgtaccccccagctgagaacagatggaaacgtgaagacgggtagctggggcggccagggaacccaagtccgctggccgaagccaaagcccggcaccacccccaattcttgctggtggaaagcaccgtgaaatcaaccagcggcagctctgaacgcgacgcacagcccgcgagggagcctgggcaaggacggagcgggcctgcaccggcggttgggcgggctccgggggcggggtccacctgggaccgcggcgcgcccctcaccgctcgcgccgccagggggcgccctccggagagcgcgcctaggccgcggcctgcgcttggcccctgcggg

SEQ ID NO: 372116 - DNA, 1808 bp, Homo sapiens
aggggcgccgtgctgatgtcacgagcccgcaggaagtctcgtatcgcgcccgggaggcgccggagcccagcggctggcggtaaggccgcctccgcggggctgtgggaagcttgggctgtcccaggaccgtcagtctcctcctctgaccctccctttccccttgtgtgtagggccgccgtcccacccccacctcgccggagtccggggcggccccggtgtcccctccgagcctgctgcactccacgtccccctaccagggctccagcccccagggaaatctccgaccaggcccgcccaggagccagatccaggctcctggaagaaccatgtccggcagctactggtcatgccaggcacacactgctgcccaagaggagctgctgtttgaattatctgtgaatgttgggaagaggaatgccagagctgccggctgaaaattacccaaccaagagaaatctgcaggatggactttctggtcctcttcttgttctacctggcttcggtgctgatgggtcttgttcttatctgcgtctgctcgaaaacccatagcttgaaaggcctggccaggggaggagcacagatattttcctgtataattccagaatgtcttcagagagccgtgcatggattgcttcattaccttttccatacgagaaaccacaccttcattgtcctgcacctggtcttgcaagggatggtttatactgagtacacctgggaagtatttggctactgtcaggagctggagttgtccttgcattaccttcttctgccctatctgctgctaggtgtaaacctgttttttttcaccctgacttgtggaaccaatcctggcattataacaaaagcaaatgaattattatttcttcatgtttatgaatttgatgaagtgatgtttccaaagaacgtgaggtgctctacttgtgatttaaggaaaccagctcgatccaagcactgcagtgagtgtggctctcgtgactccagcggcacctccaacagcacatgtgtgggcttcgtctgtgagggaatgtttcctgaatccgaaagcagagccagttcacccccagatatggtgtggccactacttgtagagttgagataatggtttctttcagatgagtgagggtcaggtcttgtgttcctgtgtagtagacagtcctcatctctgggcataacagcccttccctcgccacgtggcaggacatgctccccacaagttgtttctgcggatgttgtgtttgcagatttcagtcctacaaagcctagtcttctggggagggcccaagattctagacccgtgctgtctaacaaaaatagaatgtggctgggcgcagcggttcatgccaggaattccagtactttgggaggcaggcagatctcttgagcctaggagttcaagaccagcttgggcaccatggggaaaccccacctctacaaaaaatacaaaagatgtagtcctggctactcaggaggctgaggcgggaggatcacttgagcccaggagatcgaggctgcagtgagctatgattaaaccactgcactccagcctcagcaacagagcaagaccctgttctcagaaaaaaaaaaaaaggccatgaatagaaagtttttaaaaatgtttttcaaaatgtggctgtgcttggagacagttttaatcaggatgttatttaacctacatatgtaaaatatcattttaacatgtaatcaatgtaaaaaattcttcatgagatagtttatattctttttttcatactaagcctttgaaatctggtgtgtatcttacatttatagcacatcttgatttggac

SEQ ID NO: 372117 - DNA, 1873 bp, Homo sapiens
aggggcgccgtgctgatgtcacgagcccgcaggaagtctcgtatcgcgcccgggaggcgccggagcccagcggctggcggtaaggccgcctccgcggggctgtgggaagcttgggctgtcccaggaccgtcagtctcctcctctgaccctccctttccccttgtgtgtagggccgccgtcccacccccacctcgccggagtccggggcggccccggtgtcccctccgagcctgctgcactccacgtccccctaccagggctccagcccccagggaaatctccgaccaggcccgcccaggaggtattctgcctttgactgcaactcttgtcgtcttatgtgggtgttgaattgatctgtctctgcagccagatccaggctcctggaagaaccatgtccggcagctactggtcatgccaggcacacactgctgcccaagaggagctgctgtttgaattatctgtgaatgttgggaagaggaatgccagagctgccggctgaaaattacccaaccaagagaaatctgcaggatggactttctggtcctcttcttgttctacctggcttcggtgctgatgggtcttgttcttatctgcgtctgctcgaaaacccatagcttgaaaggcctggccaggggaggagcacagatattttcctgtataattccagaatgtcttcagagagccgtgcatggattgcttcattaccttttccatacgagaaaccacaccttcattgtcctgcacctggtcttgcaagggatggtttatactgagtacacctgggaagtatttggctactgtcaggagctggagttgtccttgcattaccttcttctgccctatctgctgctaggtgtaaacctgttttttttcaccctgacttgtggaaccaatcctggcattataacaaaagcaaatgaattattatttcttcatgtttatgaatttgatgaagtgatgtttccaaagaacgtgaggtgctctacttgtgatttaaggaaaccagctcgatccaagcactgcagtgagtgtggctctcgtgactccagcggcacctccaacagcacatgtgtgggcttcgtctgtgagggaatgtttcctgaatccgaaagcagagccagttcacccccagatatggtgtggccactacttgtagagttgagataatggtttctttcagatgagtgagggtcaggtcttgtgttcctgtgtagtagacagtcctcatctctgggcataacagcccttccctcgccacgtggcaggacatgctccccacaagttgtttctgcggatgttgtgtttgcagatttcagtcctacaaagcctagtcttctggggagggcccaagattctagacccgtgctgtctaacaaaaatagaatgtggctgggcgcagcggttcatgccaggaattccagtactttgggaggcaggcagatctcttgagcctaggagttcaagaccagcttgggcaccatggggaaaccccacctctacaaaaaatacaaaagatgtagtcctggctactcaggaggctgaggcgggaggatcacttgagcccaggagatcgaggctgcagtgagctatgattaaaccactgcactccagcctcagcaacagagcaagaccctgttctcagaaaaaaaaaaaaaggccatgaatagaaagtttttaaaaatgtttttcaaaatgtggctgtgcttggagacagttttaatcaggatgttatttaacctacatatgtaaaatatcattttaacatgtaatcaatgtaaaaaattcttcatgagatagtttatattctttttttcatactaagcctttgaaatctggtgtgtatcttacatttatagcacatcttgatttggac

SEQ ID NO: 372118 - DNA, 1281 bp, Homo sapiens
aggggcgccgtgctgatgtcacgagcccgcaggaagtctcgtatcgcgcccgggaggcgccggagcccagcggctggcggtaaggccgcctccgcggggctgtgggaagcttgggctgtcccaggaccgtcagtctcctcctctgaccctccctttccccttgtgtgtagggccgccgtcccacccccacctcgccggagtccggggcggccccggtgtcccctccgagcctgctgcactccacgtccccctaccagggctccagcccccagggaaatctccgaccaggcccgcccaggagccagatccaggctcctggaagaaccatgtccggcagctactggtcatgccaggcacacactgctgcccaagaggagctgctgtttgaattatctgtgaatgttgggaagaggaatgccagagctgccggctgaaaattacccaaccaagagaaatctgcaggatggactttctggtcctcttcttgttctacctggcttcggtgctgatgggtcttgttcttatctgcgtctgctcgaaaacccatagcttgaaaggcctggccaggggaggagcacagatattttcctgtataattccagaatgtcttcagagagccgtgcatggattgcttcattaccttttccatacgagaaaccacaccttcattgtcctgcacctggtcttgcaagggatggtttatactgagtacacctgggaagtatttggctactgtcaggagctggagttgtccttgcattaccttcttctgccctatctgctgctaggtgtaaacctgttttttttcaccctgacttgtggaaccaatcctggcattataacaaaagcaaatgaattattatttcttcatgtttatgaatttgatgaagtgatgtttccaaagaacgtgaggtgctctacttgtgatttaaggaaaccagctcgatccaagcactgcagtgagtgtggctctcgtgactccagcggcacctccaacagcacatgtgtgggcttcgtctgtgagggaatgtttcctgaatccgaaagcagagccagttcacccccagatatggtgtggccactacttgtagagttgagataatggtttctttcagatgagtgagggtcaggtcttgtgttcctgtgtagtagacagtcctcatctctgggcataacagcccttccctcgccacgtggcaggacatgctccccacaagttgtttctgcggatgttgttgatcctcccgcctagcctctgagtagctgggaccatgggtgcat

SEQ ID NO: 372119 - DNA, 548 bp, Homo sapiens
gctcaggaccattttggaggccccactgagaggcagcaggcctctgttatgtgtgcctaagaattggtgaattctgttctgtttgtctttctgctttttgctttgagatgtcattaaagtctagatgaattctgttttggtagccatttgggagttgatgtctgagaatgtgtgccatggaagaaacctttcagtagcagatagtcacactctttctgttcctttgtagctgcaggatggactttctggtcctcttcttgttctacctggcttcggtgctgatgggtcttgttcttatctgcgtctgctcgaaaacccatagcttgaaaggcctggccaggggaggagcacaggtaaggatgatccttggatggcactggaatttgaatactgtgttagtctaagagactcacaggttttgctacaggacaaaaaagagatgccaggccgggtgcagtgcctcacacctgtaatcccgctactcaggaagctgaggcaggaggatcccttgagccaggagtctgaagttgccatgagctatgatcacg

SEQ ID NO: 372120 - DNA, 1407 bp, Homo sapiens
ggcacgaggagcccatgcgtggcgccagatccaggctcctggaagaaccatgtccggcagctactggtcatgccaggcacacactgctgcccaagaggagctgttgtttgtcctgtatctggcggccaccaaccagactactaacgagtggtacagaggtgactgggcctggtgccagcgttgtccccttgtggcctggcctccgtcagcagagccccaagtccaccggaacattcactcccatgggcttcggagcaaccttcaagagatctttctacctgcctttccatgtcatgagaggaagaaacaagaatgacaagtgtatgactgcctttgagctgtagttcccgtttatttacacatgtggatcctcgttttccaagcatggcttgtttgttttgatttctgctgtgcttataaatcactttcggtgggcaagggagagaggggaaaattgggtgttgactgaggaatcccccttgcttgtcttcttttgaaaccgggcatctctgaagtcctggtgtcaaggggatcaagagatgacttctcagaggttctaggtgatgctgagaccttggtgtctctaaactctgggcatgtggacaggaggggcttgcggccgtgtctctgacctgtgtgatgtgcaggagggtctcattgactcagcgcctgcgcgttgtgcctggctgtgctctcttttatgccccctctattctcctctctcccccaggggattttcatctcaacaacagagtgtcctcacccaggcctgccttccggccagtatgggcttgtacatcaggcaccttcctgcatgtgtggcctccggcctgccctcctctagccacattcaagtcctttctcaccagtttaaaaattgtgaaagtgaactgccacctatttcagaggagagatgactgccagaaacgaggtcttggtgcggaaggtctttggagtgggagggctctcaggtgcaggtggcaggtgttctgcaccttgctaggccaaggagcccgcagtcagagaggctgggaagtgggagtcaggggcagggggccttccagccatcttcccccgtaccccccagctgagaacagatggaaacgtgaagacgggtagctggggcggccagggaacccaagtccgctggccgaagccaaagcccggcaccacccccaattcttgctggtggaaagcaccgtgaaatcaaccagcggcagctctgaacgcgacgcacagcccgcgagggagcctgggcaaggacggagcgggcctgcaccggcggttgggcgggctccgggggcggggtccacctgggaccgcggcgcgcccctcaccgctcgcgccgccagggggcgccctccggagagcgcgcctaggccgcggcctgcgcttggcccctgcggg

SEQ ID NO: 372121 - DNA, 2367 bp, Homo sapiens
aggggcgccgtgctgatgtcacgagcccgcaggaagtctcgtatcgcgcccgggaggcgccggagcccagcggctggcgccagatccaggctcctggaagaaccatgtccggcagctactggtcatgccaggcacacactgctgcccaagaggagctgctgtttgaattatctgtgaatgttgggaagaggaatgccagagctgccggctgaaaattacccaaccaagagaaatctgcaggatggactttctggtcctcttcttgttctacctggcttcggtgctgatgggtcttgttcttatctgcgtctgctcgaaaacccatagcttgaaaggcctggccaggggaggagcacagatattttcctgtataattccagaatgtcttcagagagccgtgcatggattgcttcattaccttttccatacgagaaaccacaccttcattgtcctgcacctggtcttgcaagggatggtttatactgagtacacctgggaagtatttggctactgtcaggagctggagttgtccttgcattaccttcttctgccctatctgctgctaggtgtaaacctgttttttttcaccctgacttgtggaaccaatcctggcattataacaaaagcaaatgaattattatttcttcatgtttatgaatttgatgaagtgatgtttccaaagaacgtgaggtgctctacttgtgatttaaggaaaccagctcgatccaagcactgcagtgtgtgtaactggtgtgtgcaccgtttcgaccatcactgtgtttgggtgaacaactgcatcggggcctggaacatcaggtacttcctcatctacgtcttgaccttgacggcctcggctgccaccgtcgccattgtgagcaccacttttctggtccacttggtggtgatgtcagatttataccaggagacttacatcgatgaccttggacacctccatgttatggacacggtctttcttattcagtacctgttcctgacttttccacggattgtcttcatgctgggctttgtcgtggttctgagcttcctcctgggtggctacctgttgtttgtcctgtatctggcggccaccaaccagactactaacgagtggtacagaggtgactgggcctggtgccagcgttgtccccttgtggcctggcctccgtcagcagagccccaagtccaccggaacattcactcccatgggcttcggagcaaccttcaagagatctttctacctgcctttccatgtcatgagaggaagaaacaagaatgacaagtgtatgactgcctttgagctgtagttcccgtttatttacacatgtggatcctcgttttccaagcatggcttgtttgttttgatttctgctgtgcttataaatcactttcggtgggcaagggagagaggggaaaattgggtgttgactgaggaatcccccttgcttgtcttcttttgaaaccgggcatctctgaagtcctggtgtcaaggggatcaagagatgacttctcagaggttctaggtgatgctgagaccttggtgtctctaaactctgggcatgtggacaggaggggcttgcggccgtgtctctgacctgtgtgatgtgcaggagggtctcattgactcagcgcctgcgcgttgtgcctggctgtgctctcttttatgccccctctattctcctctctcccccaggggattttcatctcaacaacagagtgtcctcacccaggcctgccttccggccagtatgggcttgtacatcaggcaccttcctgcatgtgtggcctccggcctgccctcctctagccacattcaagtcctttctcaccagtttaaaaattgtgaaagtgaactgccacctatttcagaggagagatgactgccagaaacgaggtcttggtgcggaaggtctttggagtgggagggctctcaggtgcaggtggcaggtgttctgcaccttgctaggccaaggagcccgcagtcagagaggctgggaagtgggagtcaggggcagggggccttccagccatcttcccccgtaccccccagctgagaacagatggaaacgtgaagacgggtagctggggcggccagggaacccaagtccgctggccgaagccaaagcccggcaccacccccaattcttgctggtggaaagcaccgtgaaatcaaccagcggcagctctgaacgcgacgcacagcccgcgagggagcctgggcaaggacggagcgggcctgcaccggcggttgggcgggctccgggggcggggtccacctgggaccgcggcgcgcccctcaccgctcgcgccgccagggggcgccctccggagagcgcgcctaggccgcggcctgcgcttggcccctgcggg

SEQ ID NO: 372122 - DNA, 1473 bp, Homo sapiens
aggggcgccgtgctgatgtcacgagcccgcaggaagtctcgtatcgcgcccgggaggcgccggagcccagcggctggcgccagatccaggctcctggaagaaccatgtccggcagctactggtcatgccaggcacacactgctgcccaagaggagctgctgtttgaattatctgtgaatgttgggaagaggaatgccagagctgccggctgaaaattacccaaccaagagaaatctgcaggatggactttctggtcctcttcttgttctacctggcttcggtgctgatgggtcttgttcttatctgcgtctgctcgaaaacccatagcttgaaaggcctggccaggggaggagcacagatattttcctgtataattccagaatgtcttcagagagccgtgcatggattgcttcattaccttttccatacgagaaaccacaccttcattgtcctgcacctggtcttgcaagggatggtttatactgagtacacctgggaagtatttggctactgtcaggagctggagttgtccttgcattaccttcttctgccctatctgctgctaggtgtaaacctgttttttttcaccctgacttgtggaaccaatcctggcattataacaaaagcaaatgaattattatttcttcatgtttatgaatttgatgaagtgatgtttccaaagaacgtgaggtgctctacttgtgatttaaggaaaccagctcgatccaagcactgcagtgtgtgtaactggtgtgtgcaccgtttcgaccatcactgtgtttgggtgaacaactgcatcggggcctggaacatcaggtacttcctcatctacgtcttgaccttgacggcctcggctgccaccgtcgccattgtgagcaccacttttctggtccacttggtggtgatgtcagatttataccaggagacttacatcgatgaccttggacacctccatgttatggacacggtctttcttattcagtacctgttcctgacttttccacggattgtcttcatgctgggctttgtcgtggttctgagcttcctcctgggtggctacctgttgtttgtcctgtatctggcggccaccaaccagactactaacgagtggtacagaggtgactgggcctggtgccagcgttgtccccttgtggcctggcctccgtcagcagagccccaagtccaccggaacattcactcccatgggcttcggagcaaccttcaagagatctttctacctgcctttccatgtcatgagaggaagaaacaagaatgacaagtgtatgagcaaaaaaaaaaaggggcgtctaaattccctcgagggccaaggttcgggtacccgttttgtccaagtggccttagggggataaagaaggcgccgcttcaagtcgccggaaggcccggtttgtaggcccccggtgccctggacccccgtagcgaatatatttggaacgcttgggatgtgttacacca

SEQ ID NO: 372123 - DNA, 2588 bp, Homo sapiens
aggggcgccgtgctgatgtcacgagcccgcaggaagtctcgtatcgcgcccgggaggcgccggagcccagcggctggcgccagatccaggctcctggaagaaccatgtccggcagctactggtcatgccaggcacacactgctgcccaagaggagctgctgtttgaattatctgtgaatgttgggaagaggaatgccagagctgccggctgaaaattacccaaccaagagaaatctgcaggatggactttctggtcctcttcttgttctacctggcttcggtgctgatgggtcttgttcttatctgcgtctgctcgaaaacccatagcttgaaaggcctggccaggggaggagcacagatattttcctgtataattccagaatgtcttcagagagccgtgcatggattgcttcattaccttttccatacgagaaaccacaccttcattgtcctgcacctggtcttgcaagggatggtttatactgagtacacctgggaagtatttggctactgtcaggagctggagttgtccttgcattaccttcttctgccctatctgctgctaggtgtaaacctgttttttttcaccctgacttgtggaaccaatcctggcattataacaaaagcaaatgaattattatttcttcatgtttatgaatttgatgaagtgatgtttccaaagaacgtgaggtgctctacttgtgatttaaggaaaccagctcgatccaagcactgcagtgtgtgtaactggtgtgtgcaccgtttcgaccatcactgtgtttgggtgaacaactgcatcggggcctggaacatcaggtacttcctcatctacgtcttgaccttgacggcctcggctgccaccgtcgccattgtgagcaccacttttctggtccacttggtggtgatgtcagatttataccaggagacttacatcgatgaccttggacacctccatgttatggacacggtctttcttattcagtgtgaacacttcattcatcccacaggaaactcttgtatgtactgggattattctgggctgcttctcagtgctgtttatgttcagtttgtcacatctggacacaagtaggtgggctgaggaagcagcgctggtggctgtggcaggcccagggttggccagtgttcactctcatggatgtcacagtccagctgcctaaagcactaccttttctctgctcctagtacctgttcctgacttttccacggattgtcttcatgctgggctttgtcgtggttctgagcttcctcctgggtggctacctgttgtttgtcctgtatctggcggccaccaaccagactactaacgagtggtacagaggtgactgggcctggtgccagcgttgtccccttgtggcctggcctccgtcagcagagccccaagtccaccggaacattcactcccatgggcttcggagcaaccttcaagagatctttctacctgcctttccatgtcatgagaggaagaaacaagaatgacaagtgtatgactgcctttgagctgtagttcccgtttatttacacatgtggatcctcgttttccaagcatggcttgtttgttttgatttctgctgtgcttataaatcactttcggtgggcaagggagagaggggaaaattgggtgttgactgaggaatcccccttgcttgtcttcttttgaaaccgggcatctctgaagtcctggtgtcaaggggatcaagagatgacttctcagaggttctaggtgatgctgagaccttggtgtctctaaactctgggcatgtggacaggaggggcttgcggccgtgtctctgacctgtgtgatgtgcaggagggtctcattgactcagcgcctgcgcgttgtgcctggctgtgctctcttttatgccccctctattctcctctctcccccaggggattttcatctcaacaacagagtgtcctcacccaggcctgccttccggccagtatgggcttgtacatcaggcaccttcctgcatgtgtggcctccggcctgccctcctctagccacattcaagtcctttctcaccagtttaaaaattgtgaaagtgaactgccacctatttcagaggagagatgactgccagaaacgaggtcttggtgcggaaggtctttggagtgggagggctctcaggtgcaggtggcaggtgttctgcaccttgctaggccaaggagcccgcagtcagagaggctgggaagtgggagtcaggggcagggggccttccagccatcttcccccgtaccccccagctgagaacagatggaaacgtgaagacgggtagctggggcggccagggaacccaagtccgctggccgaagccaaagcccggcaccacccccaattcttgctggtggaaagcaccgtgaaatcaaccagcggcagctctgaacgcgacgcacagcccgcgagggagcctgggcaaggacggagcgggcctgcaccggcggttgggcgggctccgggggcggggtccacctgggaccgcggcgcgcccctcaccgctcgcgccgccagggggcgccctccggagagcgcgcctaggccgcggcctgcgcttggcccctgcggg

SEQ ID NO: 372124 - DNA, 1651 bp, Homo sapiens
aggggcgccgtgctgatgtcacgagcccgcaggaagtctcgtatcgcgcccgggaggcgccggagcccagcggctggcggtattctgcctttgactgcaactcttgtcgtcttatgtgggtgttgaattgatctgtctctgcagccagatccaggctcctggaagaaccatgtccggcagctactggtcatgccaggcacacactgctgcccaagaggagctgctgtttgaattatctgtgaatgttgggaagaggaatgccagagctgccggctgaaaattacccaaccaagagaaatctgcaggatggactttctggtcctcttcttgttctacctggcttcggtgctgatgggtcttgttcttatctgcgtctgctcgaaaacccatagcttgaaaggcctggccaggggaggagcacagatattttcctgtataattccagaatgtcttcagagagccgtgcatggattgcttcattaccttttccatacgagaaaccacaccttcattgtcctgcacctggtcttgcaagggatggtttatactgagtacacctgggaagtatttggctactgtcaggagctggagttgtccttgcattaccttcttctgccctatctgctgctaggtgtaaacctgttttttttcaccctgacttgtggaaccaatcctggcattataacaaaagcaaatgaattattatttcttcatgtttatgaatttgatgaagtgatgtttccaaagaacgtgaggtgctctacttgtgatttaaggaaaccagctcgatccaagcactgcagtgagtgtggctctcgtgactccagcggcacctccaacagcacatgtgtgggcttcgtctgtgagggaatgtttcctgaatccgaaagcagagccagttcacccccagatatggtgtggccactacttgtagagttgagataatggtttctttcagatgagtgagggtcaggtcttgtgttcctgtgtagtagacagtcctcatctctgggcataacagcccttccctcgccacgtggcaggacatgctccccacaagttgtttctgcggatgttgtgtttgcagatttcagtcctacaaagcctagtcttctggggagggcccaagattctagacccgtgctgtctaacaaaaatagaatgtggctgggcgcagcggttcatgccaggaattccagtactttgggaggcaggcagatctcttgagcctaggagttcaagaccagcttgggcaccatggggaaaccccacctctacaaaaaatacaaaagatgtagtcctggctactcaggaggctgaggcgggaggatcacttgagcccaggagatcgaggctgcagtgagctatgattaaaccactgcactccagcctcagcaacagagcaagaccctgttctcagaaaaaaaaaaaaaggccatgaatagaaagtttttaaaaatgtttttcaaaatgtggctgtgcttggagacagttttaatcaggatgttatttaacctacatatgtaaaatatcattttaacatgtaatcaatgtaaaaaattcttcatgagatagtttatattctttttttcatactaagcctttgaaatctggtgtgtatcttacatttatagcacatcttgatttggac

SEQ ID NO: 372125 - DNA, 1677 bp, Homo sapiens
aggggcgccgtgctgatgtcacgagcccgcaggaagtctcgtatcgcgcccgggaggcgccggagcccagcggctggcggtattctgcctttgactgcaactcttgtcgtcttatgtgggtgttgaattgatctgtctctgcagccagatccaggctcctggaagaaccatgtccggcagctactggtcatgccaggcacacactgctgcccaagaggagctgctgtttgaattatctgtgaatgttgggaagaggaatgccagagctgccggctgaaaattacccaaccaagagaaatgtaggctgggtaccctgaatcaccccctgcaggatggactttctggtcctcttcttgttctacctggcttcggtgctgatgggtcttgttcttatctgcgtctgctcgaaaacccatagcttgaaaggcctggccaggggaggagcacagatattttcctgtataattccagaatgtcttcagagagccgtgcatggattgcttcattaccttttccatacgagaaaccacaccttcattgtcctgcacctggtcttgcaagggatggtttatactgagtacacctgggaagtatttggctactgtcaggagctggagttgtccttgcattaccttcttctgccctatctgctgctaggtgtaaacctgttttttttcaccctgacttgtggaaccaatcctggcattataacaaaagcaaatgaattattatttcttcatgtttatgaatttgatgaagtgatgtttccaaagaacgtgaggtgctctacttgtgatttaaggaaaccagctcgatccaagcactgcagtgagtgtggctctcgtgactccagcggcacctccaacagcacatgtgtgggcttcgtctgtgagggaatgtttcctgaatccgaaagcagagccagttcacccccagatatggtgtggccactacttgtagagttgagataatggtttctttcagatgagtgagggtcaggtcttgtgttcctgtgtagtagacagtcctcatctctgggcataacagcccttccctcgccacgtggcaggacatgctccccacaagttgtttctgcggatgttgtgtttgcagatttcagtcctacaaagcctagtcttctggggagggcccaagattctagacccgtgctgtctaacaaaaatagaatgtggctgggcgcagcggttcatgccaggaattccagtactttgggaggcaggcagatctcttgagcctaggagttcaagaccagcttgggcaccatggggaaaccccacctctacaaaaaatacaaaagatgtagtcctggctactcaggaggctgaggcgggaggatcacttgagcccaggagatcgaggctgcagtgagctatgattaaaccactgcactccagcctcagcaacagagcaagaccctgttctcagaaaaaaaaaaaaaggccatgaatagaaagtttttaaaaatgtttttcaaaatgtggctgtgcttggagacagttttaatcaggatgttatttaacctacatatgtaaaatatcattttaacatgtaatcaatgtaaaaaattcttcatgagatagtttatattctttttttcatactaagcctttgaaatctggtgtgtatcttacatttatagcacatcttgatttggac

SEQ ID NO: 372126 - DNA, 481 bp, Homo sapiens
ttgagggatactttgtccacccaccactgccaaggagaccttagtctatacgccaggttgcaatgtctgaagctttgctgtccaatatggtagccattggccacatgtggctattgaatgcttgtaaaggtaggtggtacagctgaggaatggaattttaaatttgtttaatttaaaatttaagacagagattcgattcagttattggaaaatgttttatgtttgaaaaaacttagatgtgtgaatccactttctcaacagtgacctgtatgaaatatagatttttctggtgaaaatttagtaactgaattgcgatgttgagatgtactgtaagtgtaaaatatacactggattttaaagacctaatatgaaaaaatgttaaatattttatgattgatttttatattgataatatattgaaatgataatagtttgggtatattgggttaaataaagtaagtatttaaatgtatccgtttca

SEQ ID NO: 372127 - DNA, 722 bp, Homo sapiens
cattgcccctgtaacctgtcaaagaagagctaagggagctttcggggttggcttcttggaggctgctttctcctttacttggaaggcttcgctagtgatggacccatacatgattcagatgagcagcaaaggcaacctcccctcaattctggacgtgcatgtcaacgttggtgggagaagctctgtgccgggaaaaatgaaaggcagaaaggccaggtggtctgtgaggccctcagacatggccaagaaaactttcaaccccatccgagccattgtggacaacatgaaggtgaaaccaaatccaaacaaaaccatgatttccctgtccattggggaccctactgtgtttggaaacctgcctacagaccctgaagttacccaggcaatgaaagatgccctggactcgggcaaatataatggctatgccccatccatcggtaagctcctcctgagactccatacctggtgactgccaaatctttagtgctcttataacaggactaaatgtctagcaatcctcttcactttcctgatgcacaattcctaaggagaggctaagattacatggtcctttggatttgggaaccgggtctcgggatgcttaaatacaaggcatcaaggtccaacttctttcctggctttctttgacatatgggcacttcccctctagggtcccaaacatacttatttgtcaagtaaagctcctatcctatcattactaa

SEQ ID NO: 372128 - DNA, 3098 bp, Homo sapiens
  misc_feature (577)..(577): n is a, c, g, or t
cattgcccctgtaacctgtcaaagaagagctaagggagctttcggggttggcttcttggaggctgctttctcctttacttggaaggcttcgctagtgatggacccatacatgattcagatgagcagcaaaggcaacctcccctcaattctggacgtgcatgtcaacgttggtgggagaagctctgtgccgggaaaaatgaaaggcagaaaggccaggtggtctgtgaggccctcagacatggccaagaaaactttcaaccccatccgagccattgtggacaacatgaaggtgaaaccaaatccaaacaaaaccatgatttccctgtccattggggaccctactgtgtttggaaacctgcctacagaccctgaagttacccaggcaatgaaagatgccctggactcgggcaaatataatggctatgccccatccatcggcttcctatccagtcgggaggagattgcttcttattaccactgtcctgaggcacccctagaagctaaggacgtcattctgacaagtggctgcagccaagctattgacctttgtttagctgtgttggccaacccagggcanaacatcctggttccaagacctggtttctctctctacaagactctggctgagtctatgggaattgaggtcaaactctacaatttgttgccagagaaatcttgggaaattgacctgaaacaactggaatatctaattgatgaaaagacagcttgtctcattgtcaataatccatcaaacccctgtgggtcagtgttcagcaaacgtcatcttcagaagattctggcagtggctgcacggcagtgtgtccccatcttagctgatgagatctatggagacatggtgttttcggattgcaaatatgaaccactggccaccctcagcaccgatgtccccatcctgtcctgtggagggctggccaagcgctggctggttcctggctggaggttgggctggatcctcattcatgaccgaagagacatttttggcaatgagatccgagatgggctggtgaagctgagtcagcgcattttgggaccctgtaccattgtccagggagctctgctcaagcatcctatgtcgcaccccgggagagttttaccacaacactctgagcttcctcaagtccaatgctgatctctgttatggggcgttggctgccatccctggactccggccagtccgcccttctggggctatgtacctcatggttggaattgagatggaacatttcccagaatttgagaacgatgtggagttcacggagcggttagttgctgagcagtctgtccactgcctcccagcaacgtgctttgagtacccgaatttcatccgagtggtcatcacagtccccgaggtgatgatgctggaggcgtgcagccggatccaggagttctgtgagcagcactaccattgtgctgaaggcagccaggaggagtgtgataaataggcctgcatccattctcctgaggatgtgtcccatctagggaaggctggactaggccttgcggctcctcagggactcaggtggccctactgggagaggggcctcaaatgcaccatgtcaagggttcaagattgttcctgcttttccccaagtacaaccacacccacactcagatcctcctcattcacatcgcagattctcccttgctctgcgctgctagagtgactcactaattcattaatctgcctccctctcgtaagatttccttctttttttcttgaaagtaccaggtgaacaaagtttaccagaaagcagttgagacaagaaaataagagctcaggatgagggaaaagaaaaagattgagagaatttgtgcccccaaccatttcctcagactctaagaaagaacacgctctctccaggcaggtctgaagctcaactctcttattgcctcacttcaggtatacctcactttacacaatagaattataactggaaagaagttggggacacatgtatttggtgattacattttaaacacattaggaaaagttgctatttgaactttttattgatttttggggggagtaaagaattattttgtgatgcaaataaatatcctttaattgatcgacttgccaaatttagatttgtgtgcatcaggctttcttttttttctttttttagagaagttcaatataagcttttcttttctttgtttctttctttctttattttgagatggagtcttgctctgtcgcccatgctggagtgcagtggcgcgatctcggctcactgcaacctccacctcctgggttcaagcgattctcttgcctcaacctcccaagcagttgggactacaggcgtgagccaccatgcccggctaatttttgtatttttagtagagacagggtttcaccatgttagccaggctggtctcaaactcctgacctcaggcaatctgcccgcctgggtctcctaaagtactgggattacaggcgtgagccacctcgcccagcggcatcaggctttcttaaagtgagagcacgcctgtactagagcaagcaggaatcagagaccttccagaaatactactgtgtaagggccagaaatatcttcacttgtcattgttatataatcattattacttttgctgtaatgttaatattgatttattaatatatattatcttttcatacattttctaagaaacatttatattgataagatcttttattttgccaagggcataaattattgtttttctttttttttttttaataaatttcaccaagtatggctcgtgccaaaaaaaaaacagaaaaacacaaaacaacaaaacttgtggtggggccgcgcctgggcgacccagaaaagaagttttctacaacacctcccgtggggggggcgcgccgagcacccgagaggttagtggcgacacagtggggccaacagacgtggggtgccaaagaggaaacactccggcccacgaacagatggtcgcgtggtgtttcccccccaaataaaaaaaagcggcgggggcaacccggacgcggttggggacccacctccacagagggcggttcggagggccaagcgggggcctcacagcgagggcgcccagggagcgaaaaaata

SEQ ID NO: 372129 - DNA, 2416 bp, Homo sapiens
ccgtctgggagacagagtgagaccccatccgaaaagaaaaaaaaaaaagatttaatttttcagtacagagaatcattttatatatgtagatacagggaagatttaaaacacaaataagaggcttttcataccattgtaattctcaactgggagtgatactggttccctaagggtatctgggaatgtatgggaattttgtttgttttcagaatgactaggggctgccattttgtgggtcagggatgttaaatatcctgcaaggggtgggctagtctcatgccataaagagttgcctggccctaatgccagtagtgtctcttttgagacatactagcattctatttccagcttttatttatcagcatcagggaaggaactctttaatatttattaataaaaatatatcctgtcttccctgagaaaaatatcttttaaagtagcccctaccttaatttctggcacaggaaattggcctgttctccctccttctgataagttggcctctccctcctgttggtataggttggaattgagatggaacatttcccagaatttgagaacgatgtggagttcacggagcggttagttgctgagcagtctgtccactgcctcccagcaacgtgctttgagtacccgaatttcatccgagtggtcatcacagtccccgaggtgatgatgctggaggcgtgcagccggatccaggagttctgtgagcagcactaccattgtgctgaaggcagccaggaggagtgtgataaataggcctgcatccattctcctgaggatgtgtcccatctagggaaggctggactaggccttgcggctcctcagggactcaggtggccctactgggagaggggcctcaaatgcaccatgtcaagggttcaagattgttcctgcttttccccaagtacaaccacacccacactcagatcctcctcattcacatcgcagattctcccttgctctgcgctgctagagtgactcactaattcattaatctgcctccctctcgtaagatttccttctttttttcttgaaagtaccaggtgaacaaagtttaccagaaagcagttgagacaagaaaataagagctcaggatgagggaaaagaaaaagattgagagaatttgtgcccccaaccatttcctcagactctaagaaagaacacgctctctccaggcaggtctgaagctcaactctcttattgcctcacttcaggtatacctcactttacacaatagaattataactggaaagaagttggggacacatgtatttggtgattacattttaaacacattaggaaaagttgctatttgaactttttattgatttttggggggagtaaagaattattttgtgatgcaaataaatatcctttaattgatcgacttgccaaatttagatttgtgtgcatcaggctttcttttttttctttttttagagaagttcaatataagcttttcttttctttgtttctttctttctttattttgagatggagtcttgctctgtcgcccatgctggagtgcagtggcgcgatctcggctcactgcaacctccacctcctgggttcaagcgattctcttgcctcaacctcccaagcagttgggactacaggcgtgagccaccatgcccggctaatttttgtatttttagtagagacagggtttcaccatgttagccaggctggtctcaaactcctgacctcaggcaatctgcccgcctgggtctcctaaagtactgggattacaggcgtgagccacctcgcccagcggcatcaggctttcttaaagtgagagcacgcctgtactagagcaagcaggaatcagagaccttccagaaatactactgtgtaagggccagaaatatcttcacttgtcattgttatataatcattattacttttgctgtaatgttaatattgatttattaatatatattatcttttcatacattttctaagaaacatttatattgataagatcttttattttgccaagggcataaattattgtttttctttttttttttttaataaatttcaccaagtatggctcttctgtgatgtgtttttttctccgtttgggaatttctaatcccaggcactcctcagtctcattgttccattacctatgaggtttcatttacttctttgtaaatgtactgactttgggagttacttaagaaccacagttcctaaaacatttattggggagctcaacttctggcttcctacttaccaagaggcagtaagttataacctctggcctttgtcttatacatttccaactttctggatccctaacctctggtcccaagttactacgcttgcctatatccactaaccactcactaggtcacaaagttgatggctctggcttgacccagtgaatgagaagtgtcctagatgt

SEQ ID NO: 372130 - DNA, 2146 bp, Homo sapiens
cctgatcttttctcctcaaacaaaatgtcttctcatttgataagattcaaactgatgtgtctcatggatcctatttaaaatttgcttctcccccccatcataatcccatccatactgggaagaaaagttgtaaacaaacgttctaggtgagaggaaattgatcctgtcccacaagtcattttaagatgaatgaactcagttgctgacttagcatcccagtcatgggagctgaatgaactgatggccctgatgaaatggtaccacttcttgtggatcagggtcctgaccattttagggtggtccagtaccagactcaattgctctgaaagtaacagactcttctttttgcagtgctttgagtacccgaatttcatccgagtggtcatcacagtccccgaggtgatgatgctggaggcgtgcagccggatccaggagttctgtgagcagcactaccattgtgctgaaggcagccaggaggagtgtgataaataggcctgcatccattctcctgaggatgtgtcccatctagggaaggctggactaggccttgcggctcctcagggactcaggtggccctactgggagaggggcctcaaatgcaccatgtcaagggttcaagattgttcctgcttttccccaagtacaaccacacccacactcagatcctcctcattcacatcgcagattctcccttgctctgcgctgctagagtgactcactaattcattaatctgcctccctctcgtaagatttccttctttttttcttgaaagtaccaggtgaacaaagtttaccagaaagcagttgagacaagaaaataagagctcaggatgagggaaaagaaaaagattgagagaatttgtgcccccaaccatttcctcagactctaagaaagaacacgctctctccaggcaggtctgaagctcaactctcttattgcctcacttcaggtatacctcactttacacaatagaattataactggaaagaagttggggacacatgtatttggtgattacattttaaacacattaggaaaagttgctatttgaactttttattgatttttggggggagtaaagaattattttgtgatgcaaataaatatcctttaattgatcgacttgccaaatttagatttgtgtgcatcaggctttcttttttttctttttttagagaagttcaatataagcttttcttttctttgtttctttctttctttattttgagatggagtcttgctctgtcgcccatgctggagtgcagtggcgcgatctcggctcactgcaacctccacctcctgggttcaagcgattctcttgcctcaacctcccaagcagttgggactacaggcgtgagccaccatgcccggctaatttttgtatttttagtagagacagggtttcaccatgttagccaggctggtctcaaactcctgacctcaggcaatctgcccgcctgggtctcctaaagtactgggattacaggcgtgagccacctcgcccagcggcatcaggctttcttaaagtgagagcacgcctgtactagagcaagcaggaatcagagaccttccagaaatactactgtgtaagggccagaaatatcttcacttgtcattgttatataatcattattacttttgctgtaatgttaatattgatttattaatatatattatcttttcatacattttctaagaaacatttatattgataagatcttttattttgccaagggcataaattattgtttttctttttttttttttaataaatttcaccaagtatggctcttctgtgatgtgtttttttctccgtttgggaatttctaatcccaggcactcctcagtctcattgttccattacctatgaggtttcatttacttctttgtaaatgtactgactttgggagttacttaagaaccacagttcctaaaacatttattggggagctcaacttctggcttcctacttaccaagaggcagtaagttataacctctggcctttgtcttatacatttccaactttctggatccctaacctctggtcccaagttactacgcttgcctatatccactaaccactcactaggtcacaaagttgatggctctggcttgacccagtgaatgagaagtgtcctagatgt

SEQ ID NO: 372131 - DNA, 2413 bp, Homo sapiens
ccgtctgggagacagagtgagaccccatccgaaaagaaaaaaaaaaaagatttaatttttcagtacagagaatcattttatatatgtagatacagggaagatttaaaacacaaataagaggcttttcataccattgtaattctcaactgggagtgatactggttccctaagggtatctgggaatgtatgggaattttgtttgttttcagaatgactaggggctgccattttgtgggtcagggatgttaaatatcctgcaaggggtgggctagtctcatgccataaagagttgcctggccctaatgccagtagtgtctcttttgagacatactagcattctatttccagcttttatttatcagcatcataatcccatccatactgggaagaaaagttgtaaacaaacgttctaggtgagaggaaattgatcctgtcccacaagtcattttaagatgaatgaactcagttgctgacttagcatcccagtcatgggagctgaatgaactgatggccctgatgaaatggtaccacttcttgtggatcagggtcctgaccattttagggtggtccagtaccagactcaattgctctgaaagtaacagactcttctttttgcagtgctttgagtacccgaatttcatccgagtggtcatcacagtccccgaggtgatgatgctggaggcgtgcagccggatccaggagttctgtgagcagcactaccattgtgctgaaggcagccaggaggagtgtgataaataggcctgcatccattctcctgaggatgtgtcccatctagggaaggctggactaggccttgcggctcctcagggactcaggtggccctactgggagaggggcctcaaatgcaccatgtcaagggttcaagattgttcctgcttttccccaagtacaaccacacccacactcagatcctcctcattcacatcgcagattctcccttgctctgcgctgctagagtgactcactaattcattaatctgcctccctctcgtaagatttccttctttttttcttgaaagtaccaggtgaacaaagtttaccagaaagcagttgagacaagaaaataagagctcaggatgagggaaaagaaaaagattgagagaatttgtgcccccaaccatttcctcagactctaagaaagaacacgctctctccaggcaggtctgaagctcaactctcttattgcctcacttcaggtatacctcactttacacaatagaattataactggaaagaagttggggacacatgtatttggtgattacattttaaacacattaggaaaagttgctatttgaactttttattgatttttggggggagtaaagaattattttgtgatgcaaataaatatcctttaattgatcgacttgccaaatttagatttgtgtgcatcaggctttcttttttttctttttttagagaagttcaatataagcttttcttttctttgtttctttctttctttattttgagatggagtcttgctctgtcgcccatgctggagtgcagtggcgcgatctcggctcactgcaacctccacctcctgggttcaagcgattctcttgcctcaacctcccaagcagttgggactacaggcgtgagccaccatgcccggctaatttttgtatttttagtagagacagggtttcaccatgttagccaggctggtctcaaactcctgacctcaggcaatctgcccgcctgggtctcctaaagtactgggattacaggcgtgagccacctcgcccagcggcatcaggctttcttaaagtgagagcacgcctgtactagagcaagcaggaatcagagaccttccagaaatactactgtgtaagggccagaaatatcttcacttgtcattgttatataatcattattacttttgctgtaatgttaatattgatttattaatatatattatcttttcatacattttctaagaaacatttatattgataagatcttttattttgccaagggcataaattattgtttttctttttttttttttaataaatttcaccaagtatggctcttctgtgatgtgtttttttctccgtttgggaatttctaatcccaggcactcctcagtctcattgttccattacctatgaggtttcatttacttctttgtaaatgtactgactttgggagttacttaagaaccacagttcctaaaacatttattggggagctcaacttctggcttcctacttaccaagaggcagtaagttataacctctggcctttgtcttatacatttccaactttctggatccctaacctctggtcccaagttactacgcttgcctatatccactaaccactcactaggtcacaaagttgatggctctggcttgacccagtgaatgagaagtgtcctagatgt

SEQ ID NO: 372132 - DNA, 1775 bp, Homo sapiens
  misc_feature (731)..(731): n is a, c, g, or t
  misc_feature (1705)..(1705): n is a, c, g, or t
cattgcccctgtaacctgtcaaagaagagctaagggagctttcggggttggcttcttggaggctgctttctcctttacttggaaggcttcgctagtgatggacccatacatgattcagatgagcagcaaaggcaacctcccctcaattctggacgtgcatgtcaacgttggtgggagaagctctgtgccgggaaaaatgaaaggcagaaaggccaggtggtctgtgaggccctcagacatggccaagaaaactttcaaccccatccgagccattgtggacaacatgaaggtgaaaccaaatccaaacaaaaccatgatttccctgtccattggtgagttggggacactactgaggggctgtcattgtcctcctctactctcatgttcacaggctggttggagaagatggcagttgggggtgagtctgagtactgaacatgggagaataacctcttggctccttttgtgttttcctcccataaaaaggggaccctactgtgtttggaaacctgcctacagaccctgaagttacccaggcaatgaaagatgccctggactcgggcaaatataatggctatgccccatccatcggcttcctatccagtcgggaggagattgcttcttattaccactgtcctgaggcacccctagaagctaaggacgtcattctgacaagtggctgcagccaagctattgacctttgtttagctgtgttggccaacccagggcanaacatcctggttccaagacctggtttctctctctacaagactctggctgagtctatgggaattgaggtcaaactctacaatttgttgccagagaaatcttgggaaattgacctgaaacaactggaatatctaattgatgaaaagacagcttgtctcattgtcaataatccatcaaacccctgtgggtcagtgttcagcaaacgtcatcttcagaagattctggcagtggctgcacggcagtgtgtccccatcttagctgatgagatctatggagacatggtgttttcggattgcaaatatgaaccactggccaccctcagcaccgatgtccccatcctgtcctgtggagggctggccaagcgctggctggttcctggctggaggttgggctggatcctcattcatgaccgaagagacatttttggcaatgagatccgagatgggctggtgaagctgagtcagcgcattttgggaccctgtaccattgtccagggagctctgctcaagtccaatgctgatctctgttatggggcgttggctgccatccctggactccggccagtccgcccttctggggctatgtacctcatggttggaattgagatggaacatttcccagaatttgagaacgatgtggagttcacggagcggttagttgctgagcagtctgtccactgcctcccagcaacgtgctttgagtacccgaatttcatccgagtggtcatcacagtccccgaggtgatgatgctggaggcgtgcagccggatccaggagttctgtgagcagcactaccattgtgctgaaggcagccaggaggagtgtgataaataggcctgcatccattctcctgaggatgtgtcccatctagggaaggctggactaggccttgcggctcctcagggactcaggtggccctactggtaataagggccccctctgccaccattcgtcaagggattctaaggattgggtcnctggcttttataccccaagcgactctcatcacttctcctacgatctccagattctctccgttttccctcc

SEQ ID NO: 372133 - DNA, 736 bp, Homo sapiens
atcaatactgtgccataggagtggtaggcctggcctaaaagaagaaaaagaagaaatacttgtctcttcatcactcccaggagaaaaagaaatagtacttgcctcttcatcactcccatcacgttgaagatagggtctgaaatatctagttacttaaatggtgaattcaggctctgcactctggaagagtatgttaagaatttacagttcttaaataggaagacaaaacacacaaacatgaaatgcaaatcacactttgcttgtgctttttgtctttctctttaagaattgtaacttcttaatattacgggatagggaaattacatgatattatgtgactattacatgataaagcaattcacattaaaactgatttcagcatgttttattttcagtggctgcacggcagtgtgtccccatcttagctgatgagatctatggagacatggtgagtcttgatcaggatatatcactacagtaatctcaaattattttatgggaactttagaagtggaataatcagaaacaactcctaatcgtttcattacagcaaatcagcatccctgcactttttacaaatatatagacccacaactccttagccagttttctgaaacccaaagaactttggaaatccaaagattcctggaattcatttggttacaaaacctgatttgacctgatatttgtagatttttatttttcccacttgtggatctatatatttgttaagagt

SEQ ID NO: 372134 - DNA, 876 bp, Homo sapiens
cattgcccctgtaacctgtcaaagaagagctaagggagctttcggggttggcttcttggaggctgctttctcctttacttggaaggcttcgctagtgatggacccatacatgattcagatgagcagcaaaggcaacctcccctcaattctggacgtgcatgtcaacgttggtgggagaagctctgtgccgggaaaaatgaaaggcagaaaggccaggtggtctgtgaggccctcagacatggccaagaaaactttcaaccccatccgagccattgtggacaacatgaaggtgaaaccaaatccaaacaaaaccatgatttccctgtccattggtgagttggggacactactgaggggctgtcattgtcctcctctactctcatgttcacaggctggttggagaagatggcagttgggggtgagtctgagtactgaacatgggagaataacctcttggctccttttgtgttttcctcccataaaaaggggaccctactgtgtttggaaacctgcctacagaccctgaagttacccaggcaatgaaagatgccctggactcgggcaaatataatggctatgccccatccatcggtaagctcctcctgagactccatacctggtgactgccaaatctttagtgctcttataacaggactaaatgtctagcaatcctcttcactttcctgatgcacaattcctaaggagaggctaagattacatggtcctttggatttgggaaccgggtctcgggatgcttaaatacaaggcatcaaggtccaacttctttcctggctttctttgacatatgggcacttcccctctagggtcccaaacatacttatttgtcaagtaaagctcctatcctatcattactaa

SEQ ID NO: 372135 - DNA, 3117 bp, Homo sapiens
  misc_feature (577)..(577): n is a, c, g, or t
cattgcccctgtaacctgtcaaagaagagctaagggagctttcggggttggcttcttggaggctgctttctcctttacttggaaggcttcgctagtgatggacccatacatgattcagatgagcagcaaaggcaacctcccctcaattctggacgtgcatgtcaacgttggtgggagaagctctgtgccgggaaaaatgaaaggcagaaaggccaggtggtctgtgaggccctcagacatggccaagaaaactttcaaccccatccgagccattgtggacaacatgaaggtgaaaccaaatccaaacaaaaccatgatttccctgtccattggggaccctactgtgtttggaaacctgcctacagaccctgaagttacccaggcaatgaaagatgccctggactcgggcaaatataatggctatgccccatccatcggcttcctatccagtcgggaggagattgcttcttattaccactgtcctgaggcacccctagaagctaaggacgtcattctgacaagtggctgcagccaagctattgacctttgtttagctgtgttggccaacccagggcanaacatcctggttccaagacctggtttctctctctacaagactctggctgagtctatgggaattgaggtcaaactctacaatttgttgccagagaaatcttgggaaattgacctgaaacaactggaatatctaattgatgaaaagacagcttgtctcattgtcaataatccatcaaacccctgtgggtcagtgttcagcaaacgtcatcttcagaagattctggcagtggctgcacggcagtgtgtccccatcttagctgatgagatctatggagacatggtgttttcggattgcaaatatgaaccactggccaccctcagcaccgatgtccccatcctgtcctgtggagggctggccaagcgctggctggttcctggctggaggttgggctggatcctcattcatgaccgaagagacatttttggcaatgagatccgagatgggctggtgaagctgagtcagcgcattttgggaccctgtaccattgtccagggagctctgctcaagcatcctatgtcgcaccccgggagagttttaccacaacactctgagcttcctcaagtccaatgctgatctctgttatggggcgttggctgccatccctggactccggccagtccgcccttctggggctatgtacctcatggttggaattgagatggaacatttcccagaatttgagaacgatgtggagttcacggagcggttagttgctgagcagtctgtccactgcctcccagcaacgtgctttgagtacccgaatttcatccgagtggtcatcacagtccccgaggtgatgatgctggaggcgtgcagccggatccaggagttctgtgagcagcactaccattgtgctgaaggcagccaggaggagtgtgataaataggcctgcatccattctcctgaggatgtgtcccatctagggaaggctggactaggccttgcggctcctcagggactcaggtggccctactgggagaggggcctcaaatgcaccatgtcaagggttcaagattgttcctgcttttccccaagtacaaccacacccacactcagatcctcctcattcacatcgcagattctcccttgctctgcgctgctagagtgactcactaattcattaatctgcctccctctcgtaagatttccttctttttttcttgaaagtaccaggtgaacaaagtttaccagaaagcagttgagacaagaaaataagagctcaggatgagggaaaagaaaaagattgagagaatttgtgcccccaaccatttcctcagactctaagaaagaacacgctctctccaggcaggtctgaagctcaactctcttattgcctcacttcaggtatacctcactttacacaatagaattataactggaaagaagttggggacacatgtatttggtgattacattttaaacacattaggaaaagttgctatttgaactttttattgatttttggggggagtaaagaattattttgtgatgcaaataaatatcctttaattgatcgacttgccaaatttagatttgtgtgcatcaggctttcttttttttctttttttagagaagttcaatataagcttttcttttctttgtttctttctttctttattttgagatggagtcttgctctgtcgcccatgctggagtgcagtggcgcgatctcggctcactgcaacctccacctcctgggttcaagcgattctcttgcctcaacctcccaagcagttgggactacaggcgtgagccaccatgcccggctaatttttgtatttttagtagagacagggtttcaccatgttagccaggctggtctcaaactcctgacctcaggcaatctgcccgcctgggtctcctaaagtactgggattacaggcgtgagccacctcgcccagcggcatcaggctttcttaaagtgagagcacgcctgtactagagcaagcaggaatcagagaccttccagaaatactactgtgtaagggccagaaatatcttcacttgtcattgttatataatcattattacttttgctgtaatgttaatattgatttattaatatatattatcttttcatacattttctaagaaacatttatattgataagatcttttattttgccaagggcataaattattgtttttctttttttttttttaataaatttcaccaagtatggctcttctgtgatgtgtttttttctccgtttgggaatttctaatcccaggcactcctcagtctcattgttccattacctatgaggtttcatttacttctttgtaaatgtactgactttgggagttacttaagaaccacagttcctaaaacatttattggggagctcaacttctggcttcctacttaccaagaggcagtaagttataacctctggcctttgtcttatacatttccaactttctggatccctaacctctggtcccaagttactacgcttgcctatatccactaaccactcactaggtcacaaagttgatggctctggcttgacccagtgaatgagaagtgtcctagatgt

SEQ ID NO: 372136 - DNA, 3216 bp, Homo sapiens
  misc_feature (731)..(731): n is a, c, g, or t
cattgcccctgtaacctgtcaaagaagagctaagggagctttcggggttggcttcttggaggctgctttctcctttacttggaaggcttcgctagtgatggacccatacatgattcagatgagcagcaaaggcaacctcccctcaattctggacgtgcatgtcaacgttggtgggagaagctctgtgccgggaaaaatgaaaggcagaaaggccaggtggtctgtgaggccctcagacatggccaagaaaactttcaaccccatccgagccattgtggacaacatgaaggtgaaaccaaatccaaacaaaaccatgatttccctgtccattggtgagttggggacactactgaggggctgtcattgtcctcctctactctcatgttcacaggctggttggagaagatggcagttgggggtgagtctgagtactgaacatgggagaataacctcttggctccttttgtgttttcctcccataaaaaggggaccctactgtgtttggaaacctgcctacagaccctgaagttacccaggcaatgaaagatgccctggactcgggcaaatataatggctatgccccatccatcggcttcctatccagtcgggaggagattgcttcttattaccactgtcctgaggcacccctagaagctaaggacgtcattctgacaagtggctgcagccaagctattgacctttgtttagctgtgttggccaacccagggcanaacatcctggttccaagacctggtttctctctctacaagactctggctgagtctatgggaattgaggtcaaactctacaatttgttgccagagaaatcttgggaaattgacctgaaacaactggaatatctaattgatgaaaagacagcttgtctcattgtcaataatccatcaaacccctgtgggtcagtgttcagcaaacgtcatcttcagaagattctggcagtggctgcacggcagtgtgtccccatcttagctgatgagatctatggagacatggtgttttcggattgcaaatatgaaccactggccaccctcagcaccgatgtccccatcctgtcctgtggagggctggccaagcgctggctggttcctggctggaggttgggctggatcctcattcatgaccgaagagacatttttggcaatgagatccgagatgggctggtgaagctgagtcagcgcattttgggaccctgtaccattgtccagggagctctgctcaagtccaatgctgatctctgttatggggcgttggctgccatccctggactccggccagtccgcccttctggggctatgtacctcatggttggaattgagatggaacatttcccagaatttgagaacgatgtggagttcacggagcggttagttgctgagcagtctgtccactgcctcccagcaacgtgctttgagtacccgaatttcatccgagtggtcatcacagtccccgaggtgatgatgctggaggcgtgcagccggatccaggagttctgtgagcagcactaccattgtgctgaaggcagccaggaggagtgtgataaataggcctgcatccattctcctgaggatgtgtcccatctagggaaggctggactaggccttgcggctcctcagggactcaggtggccctactgggagaggggcctcaaatgcaccatgtcaagggttcaagattgttcctgcttttccccaagtacaaccacacccacactcagatcctcctcattcacatcgcagattctcccttgctctgcgctgctagagtgactcactaattcattaatctgcctccctctcgtaagatttccttctttttttcttgaaagtaccaggtgaacaaagtttaccagaaagcagttgagacaagaaaataagagctcaggatgagggaaaagaaaaagattgagagaatttgtgcccccaaccatttcctcagactctaagaaagaacacgctctctccaggcaggtctgaagctcaactctcttattgcctcacttcaggtatacctcactttacacaatagaattataactggaaagaagttggggacacatgtatttggtgattacattttaaacacattaggaaaagttgctatttgaactttttattgatttttggggggagtaaagaattattttgtgatgcaaataaatatcctttaattgatcgacttgccaaatttagatttgtgtgcatcaggctttcttttttttctttttttagagaagttcaatataagcttttcttttctttgtttctttctttctttattttgagatggagtcttgctctgtcgcccatgctggagtgcagtggcgcgatctcggctcactgcaacctccacctcctgggttcaagcgattctcttgcctcaacctcccaagcagttgggactacaggcgtgagccaccatgcccggctaatttttgtatttttagtagagacagggtttcaccatgttagccaggctggtctcaaactcctgacctcaggcaatctgcccgcctgggtctcctaaagtactgggattacaggcgtgagccacctcgcccagcggcatcaggctttcttaaagtgagagcacgcctgtactagagcaagcaggaatcagagaccttccagaaatactactgtgtaagggccagaaatatcttcacttgtcattgttatataatcattattacttttgctgtaatgttaatattgatttattaatatatattatcttttcatacattttctaagaaacatttatattgataagatcttttattttgccaagggcataaattattgtttttctttttttttttttaataaatttcaccaagtatggctcttctgtgatgtgtttttttctccgtttgggaatttctaatcccaggcactcctcagtctcattgttccattacctatgaggtttcatttacttctttgtaaatgtactgactttgggagttacttaagaaccacagttcctaaaacatttattggggagctcaacttctggcttcctacttaccaagaggcagtaagttataacctctggcctttgtcttatacatttccaactttctggatccctaacctctggtcccaagttactacgcttgcctatatccactaaccactcactaggtcacaaagttgatggctctggcttgacccagtgaatgagaagtgtcctagatgt

SEQ ID NO: 372137 - DNA, 3162 bp, Homo sapiens
  misc_feature (731)..(731): n is a, c, g, or t
cattgcccctgtaacctgtcaaagaagagctaagggagctttcggggttggcttcttggaggctgctttctcctttacttggaaggcttcgctagtgatggacccatacatgattcagatgagcagcaaaggcaacctcccctcaattctggacgtgcatgtcaacgttggtgggagaagctctgtgccgggaaaaatgaaaggcagaaaggccaggtggtctgtgaggccctcagacatggccaagaaaactttcaaccccatccgagccattgtggacaacatgaaggtgaaaccaaatccaaacaaaaccatgatttccctgtccattggtgagttggggacactactgaggggctgtcattgtcctcctctactctcatgttcacaggctggttggagaagatggcagttgggggtgagtctgagtactgaacatgggagaataacctcttggctccttttgtgttttcctcccataaaaaggggaccctactgtgtttggaaacctgcctacagaccctgaagttacccaggcaatgaaagatgccctggactcgggcaaatataatggctatgccccatccatcggcttcctatccagtcgggaggagattgcttcttattaccactgtcctgaggcacccctagaagctaaggacgtcattctgacaagtggctgcagccaagctattgacctttgtttagctgtgttggccaacccagggcanaacatcctggttccaagacctggtttctctctctacaagactctggctgagtctatgggaattgaggtcaaactctacaatttgttgccagagaaatcttgggaaattgacctgaaacaactggaatatctaattgatgaaaagacagcttgtctcattgtcaataatccatcaaacccctgtgggtcagtgttcagcaaacgtcatcttcagaagattctggcagtggctgcacggcagtgtgtccccatcttagctgatgagatctatggagacatggtgttttcggattgcaaatatgaaccactggccaccctcagcaccgatgtccccatcctgtcctgtggagggctggccaagcgctggctggttcctggctggaggttgggctggatcctcattcatgaccgaagagacatttttggcaatgagatccgagatgggctggtgaagctgagtcagcgcattttgggaccctgtaccattgtccagggagctctgctcaagtccaatgctgatctctgttatggggcgttggctgccatccctggactccggccagtccgcccttctggggctatgtacctcatggttggaattgagatggaacatttcccagaatttgagaacgatgtggagttcacggagcggttagttgctgagcagtctgtccactgcctcccagcaacgtgctttgagtacccgaatttcatccgagtggtcatcacagtccccgaggtgatgatgctggaggcgtgcagccggatccaggagttctgtgagcagcactaccattgtgctgaaggcagccaggaggagtgtgataaataggcctgcatccattctcctgaggatgtgtcccatctagggaaggctggactaggccttgcggctcctcagggactcaggtggccctactgggagaggggcctcaaatgcaccatgtcaagggttcaagattgttcctgcttttccccaagtacaaccacacccacactcagatcctcctcattcacatcgcagattctcccttgctctgcgctgctagagtgactcactaattcattaatctgcctccctctcgtaagatttccttctttttttcttgaaagtaccaggtgaacaaagtttaccagaaagcagttgagacaagaaaataagagctcaggatgagggaaaagacacgctctctccaggcaggtctgaagctcaactctcttattgcctcacttcaggtatacctcactttacacaatagaattataactggaaagaagttggggacacatgtatttggtgattacattttaaacacattaggaaaagttgctatttgaactttttattgatttttggggggagtaaagaattattttgtgatgcaaataaatatcctttaattgatcgacttgccaaatttagatttgtgtgcatcaggctttcttttttttctttttttagagaagttcaatataagcttttcttttctttgtttctttctttctttattttgagatggagtcttgctctgtcgcccatgctggagtgcagtggcgcgatctcggctcactgcaacctccacctcctgggttcaagcgattctcttgcctcaacctcccaagcagttgggactacaggcgtgagccaccatgcccggctaatttttgtatttttagtagagacagggtttcaccatgttagccaggctggtctcaaactcctgacctcaggcaatctgcccgcctgggtctcctaaagtactgggattacaggcgtgagccacctcgcccagcggcatcaggctttcttaaagtgagagcacgcctgtactagagcaagcaggaatcagagaccttccagaaatactactgtgtaagggccagaaatatcttcacttgtcattgttatataatcattattacttttgctgtaatgttaatattgatttattaatatatattatcttttcatacattttctaagaaacatttatattgataagatcttttattttgccaagggcataaattattgtttttctttttttttttttaataaatttcaccaagtatggctcttctgtgatgtgtttttttctccgtttgggaatttctaatcccaggcactcctcagtctcattgttccattacctatgaggtttcatttacttctttgtaaatgtactgactttgggagttacttaagaaccacagttcctaaaacatttattggggagctcaacttctggcttcctacttaccaagaggcagtaagttataacctctggcctttgtcttatacatttccaactttctggatccctaacctctggtcccaagttactacgcttgcctatatccactaaccactcactaggtcacaaagttgatggctctggcttgacccagtgaatgagaagtgtcctagatgt

SEQ ID NO: 372138 - DNA, 1486 bp, Homo sapiens
  misc_feature (731)..(731): n is a, c, g, or t
  misc_feature (1465)..(1465): n is a, c, g, or t
  misc_feature (1472)..(1472): n is a, c, g, or t
cattgcccctgtaacctgtcaaagaagagctaagggagctttcggggttggcttcttggaggctgctttctcctttacttggaaggcttcgctagtgatggacccatacatgattcagatgagcagcaaaggcaacctcccctcaattctggacgtgcatgtcaacgttggtgggagaagctctgtgccgggaaaaatgaaaggcagaaaggccaggtggtctgtgaggccctcagacatggccaagaaaactttcaaccccatccgagccattgtggacaacatgaaggtgaaaccaaatccaaacaaaaccatgatttccctgtccattggtgagttggggacactactgaggggctgtcattgtcctcctctactctcatgttcacaggctggttggagaagatggcagttgggggtgagtctgagtactgaacatgggagaataacctcttggctccttttgtgttttcctcccataaaaaggggaccctactgtgtttggaaacctgcctacagaccctgaagttacccaggcaatgaaagatgccctggactcgggcaaatataatggctatgccccatccatcggcttcctatccagtcgggaggagattgcttcttattaccactgtcctgaggcacccctagaagctaaggacgtcattctgacaagtggctgcagccaagctattgacctttgtttagctgtgttggccaacccagggcanaacatcctggttccaagacctggtttctctctctacaagactctggctgagtctatgggaattgaggtcaaactctacaatttgttgccagagaaatcttgggaaattgacctgaaacaactggaatatctaattgatgaaaagacagcttgtctcattgtcaataatccatcaaacccctgtgggtcagtgttcagcaaacgtcatcttcagaagattctggcagtggctgcacggcagtgtgtccccatcttagctgatgagatctatggagacatggtgttttcggattgcaaatatgaaccactggccaccctcagcaccgatgtccccatcctgtcctgtggagggctggccaagcgctggctggttcctggctggaggttgggctggatcctcattcatgaccgaagagacatttttggcaatgagatccgagatgggctggtgaagctgagtcagcgcattttgggaccctgtaccattgtccagggagctctgctcaagcatcctatgtcgcaccccgggagagttttaccacaacactctgagcttcctcaagtccaatgctgatctctgttatggggcgttggctgccatccctggactccggccagtccgcccttctggggctatgtacctcatggttggaattgagatggaacatttcccagaatttgagaacgatgtggagttcacggagcggcacatcggttgggtgatccaaagagtcngctcatncaagagtcatcagg

SEQ ID NO: 372139 - DNA, 2427 bp, Homo sapiens
  misc_feature (338)..(338): n is a, c, g, or t
cggatggacatggacacaccccattgtctcacgtgcccccagcagagcactgctgagtctgagggggccaccatctgtacctgtgagagcggccattacagagctcccggggagggcccccaggtggcatgcacaggtcccccctcggccccccgaaacctgagcttctctgcctcagggactcagctctccctgcgttgggaacccccagcagatacggggggacgccaggatgtcagatacagtgtgaggtgttcccagtgtcagggcacagcacaggacggggggccctgccagccctgtggggtgggcgtgcacttctcgccgggggcccgggngctcaccacacctgcagtgcatgtcaatggccttgaaccttatgccaactacacctttaatgtggaagcccaaaatggagtgtcagggctgggcagctctggccatgccagcacctcagtcagcatcagcatggggcatgcagagtcactgtcaggcctgtctctgagactggtgaagaaagaaccgaggcaactagagctgacctgggcggggtcccggccccgaagccctggggcgaacctgacctatgagctgcacgtgctgaaccaggatgaagaacggtaccagatggttctagaacccagggtcttgctgacagagctgcagcctgacaccacatacatcgtcagagtccgaatgctgaccccactgggtcctggccctttctcccctgatcatgagtttcggaccagcccaccagtgtccaggggcctgactggaggagagattgtagccgtcatctttgggctgctgcttggtgcagccttgctgcttgggattctcgttttccggtccaggagagcccagcggcagaggcagcagaggcagcgtgaccgcgccaccgatgtggatcgagaggacaagctgtggctgaagccttatgtggacctccaggcatacgaggaccctgcacagggagccttggactttacccgggagcttgatccagcgtggctgatggtggacactgtcataggagaaggagagtttggggaagtgtatcgagggaccctgaggctccccagccaggactgcaagactgtggccattaagaccttaaaagacacatccccaggtggccagtggtggaacttccttcgagaggcaactatcatgggccagtttagccacccgcatattctgcatctggaaggcgtcgtcacaaagcgaaagccgatcatgatcatcacagaatttatggagaatggagccctggatgccttcctgagggagcgggaggaccagctggtccctgggcagctagtggccatgctgcagggcatagcatctggcatgaactacctcagtaatcacaattatgtccaccgggacctggctgccagaaacatcttggtgaatcaaaacctgtgctgcaaggtgtctgactttggcctgactcgcctcctggatgactttgatggcacatacgaaacccagggaggaaagatccctatccgttggacagcccctgaagccattgcccatcggatcttcaccacagccagcgatgtgtggagctttgggattgtgatgtgggaggtgctgagctttggggacaagccttatggggagatgagcaatcaggaggttatgaagagcattgaggatgggtaccggttgccccctcctgtggactgccctgcccctctgtatgagctcatgaagaactgctgggcatatgaccgtgcccgccggccacacttccagaagcttcaggcacatctggagcaactgcttgccaacccccactccctgcggaccattgccaactttgaccccagggtgactcttcgcctgcccagcctgagtggctcagatgggatcccgtatcgaaccgtctctgagtggctcgagtccatacgcatgaaacgctacatcctgcacttccactcggctgggctggacaccatggagtgtgtgctggagctgaccgctgaggacctgacgcagatgggaatcacactgcccgggcaccagaagcgcattctttgcagtattcagggattcaaggactgatccctcctctcaccccatgcccaatcagggtgcaaggagcaaggacggggccaaggtcgctcatggtcactccctgcgccccttcccacaacctgccagactaggctatcggtgctgcttctgcccactttcaggagaaccctgctctgcaccccagaaaacctctttgttttaaaagggaggtgggggtagaagtaaaaggatgatcatgggagggagctgaggggttaatatatatacatacatacacatatatatatttttgtaaataaacaggaactgattttctgcctccatcccacccatgagggctgcaggcactacaaaagagctgactactgagaattctgg

SEQ ID NO: 372140 - DNA, 2128 bp, Homo sapiens
  misc_feature (338)..(338): n is a, c, g, or t
cggatggacatggacacaccccattgtctcacgtgcccccagcagagcactgctgagtctgagggggccaccatctgtacctgtgagagcggccattacagagctcccggggagggcccccaggtggcatgcacaggtcccccctcggccccccgaaacctgagcttctctgcctcagggactcagctctccctgcgttgggaacccccagcagatacggggggacgccaggatgtcagatacagtgtgaggtgttcccagtgtcagggcacagcacaggacggggggccctgccagccctgtggggtgggcgtgcacttctcgccgggggcccgggngctcaccacacctgcagtgcatgtcaatggccttgaaccttatgccaactacacctttaatgtggaagcccaaaatggagtgtcagggctgggcagctctggccatgccagcacctcagtcagcatcagcatggggcatgcagagtcactgtcaggcctgtctctgagactggtgaagaaagaaccgaggcaactagagctgacctgggcggggtcccggccccgaagccctggggcgaacctgacctatgagctgcacgtgctgaaccaggatgaagaacggtaccagatggttctagaacccagggtcttgctgacagagctgcagcctgacaccacatacatcgtcagagtccgaatgctgaccccactgggtcctggccctttctcccctgatcatgagtttcggaccagcccaccagtgtccaggggcctgactggaggagagattgtagccgtcatctttgggctgctgcttggtgcagccttgctgcttgggattctcgttttccggtccaggagagcccagcggcagaggcagcagaggcagcgtgaccgcgccaccgatgtggatcgagaggacaagctgtggctgaagccttatgtggacctccaggcatacgaggaccctgcacagggagccttggactttacccgggagcttgatccagcgtggctgatggtggacactgtcataggagaaggagagtttggggaagtgtatcgagggaccctgaggctccccagccaggactgcaagactgtggccattaagaccttaaaagacacatccccaggtggccagtggtggaacttccttcgagaggcaactatcatgggccagtttagccacccgcatattctgcatctggaaggcgtcgtcacaaagcgaaagccgatcatgatcatcacagaatttatggagaatggagccctggatgccttcctgagggagcgggaggaccagctggtccctgggcagctagtggccatgctgcagggcatagcatctggcatgaactacctcagtaatcacaattatgtccaccgggacctggctgccagaaacatcttggtgaatcaaaacctgtgctgcaaggtgtctgactttggcctgactcgcctcctggatgactttgatggcacatacgaaacccagggaggaaagatccctatccgttggacagcccctgaagccattgcccatcggatcttcaccacagccagcgatgtgtggagctttgggattgtgatgtgggaggtgctgagctttggggacaagccttatggggagatgagcaatcaggaggttatgaagagcattgaggatgggtaccggttgccccctcctgtggactgccctgcccctctgtatgagctcatgaagaactgctgggcatatgaccgtgcccgccggccacacttccagaagcttcaggcacatctggagcaactgcttgccaacccccactccctgcggaccattgccaactttgaccccagggtgactcttcgcctgcccagcctgagtggctcagatgggatcccgtatcgaaccgtctctgagtggctcgagtccatacgcatgaaacgctacatcacaatcccaaagctccacacatcgctggctgtggtgaagatccgatgggcaatggcttcaggggctgtccaacggatagggatctttcctccctgggtttcgtatgtgccatcaaagtcatccaggaggcgagtcaggccaaagtcagacaccttgcagcacaggttttgactcaccaagatgtttctgg

SEQ ID NO: 372141 - DNA, 200 bp, Homo sapiens
agtcagcatcagcatggggcatgcaggtgagaggctgagaggggctgggacagggacctggtggagacagaagggcttaagaccacagaacaaactgatgggcaggaagccatagaaaagttactaaggttatttcctttttccttacatatccaaccttatccctctggacccccagagtcactgtcaggcctgtctct

SEQ ID NO: 372142 - DNA, 317 bp, Homo sapiens
gtcccgctccacagggttcattcaccctgcagttgccgagcgcctattgtgagccaagaactgtgcaaacactgggagacagtggtgaataggtcacggcattgcactccagctccagactctgaccttccccaggaaggacagcccacgccctgtcccaggaagggcactccacgcttctgattctccagaaaagaaaagggccggaggactggaggggttgctgcctgtcccctggaggagccctgcagtgcatcgggccacagcctgttttctttctacccaggagagtttggggaagtgtatcgagggaccct

SEQ ID NO: 372143 - DNA, 393 bp, Homo sapiens
tgcttgccaacccccactccctgcggaccattgccaactttgaccccaggtaaccatgcaggggaaggactagggaacccagaggcagcgctaggagagtggaaatgggcattcagccaatcttctttgagcgctgggcctggggagctctggaccaagtccagtgtatgaggcaagacgtgcccttggggagagtccaagaggtcagctttagattatgcatatttgcagaaaatcagttatggctgggccccagttccctcacttcacctgggcttgggggtggggggcccatcttttctcttctcaggcagcctcacctaagacactcccggagccatccttgccaatcccactgtgttgtactgtggcccattcttgggatgcatcccc

SEQ ID NO: 372144 - DNA, 426 bp, Homo sapiens
ccgccccggaccttgtggagtgaggacagcggagcttggagcatagacagggagaagaaaggcctagttgctaaatggagactttctcccacctcagcccaaacaggagtcaccttgggaaacagggaggtgtggagaagtgtgtggtccgctgctggcccttctcctgacccccatactcctgagccctgatgttggtactccccaacctcatgttctgcccatagaggacaagctgtggctgaagccttatgtggacctccaggcatacgaggaccctgcacagggagccttggactttacccgggagcttgatccagcgtggctgatggtggacactgtcataggagaaggtgagtcctgctgtgcaccgcagcaggccccccgccatgtggggcagcacagagccaccagcaggccccttcc

SEQ ID NO: 372145 - DNA, 771 bp, Homo sapiens
gaaaggcctagttgctaaatggagactttctcccacctcagcccaaacaggagtcaccttgggaaacagggaggtgtggagaagtgtgtggtccgctgctggcccttctcctgacccccatactcctgagccctgatgttggtactccccaacctcatgttctgcccatagaggacaagctgtggctgaagccttatgtggacctccaggcatacgaggaccctgcacagggagccttggactttacccgggagcttgatccagcgtggctgatggtggacactgtcataggagaaggagagtttggggaagtgtatcgagggaccctgaggctccccagccaggactgcaagactgtggccattaagaccttaaaagacacatccccaggtggccagtggtggaacttccttcgagaggcaactatcatgggccagtttagccacccgcatattctgcatctggaaggcgtcgtcacaaagcgaaagccgatcatgatcatcacagaatttatggagaatggagccctggatgccttcctgagggagcgggaggaccagctggtccctgggcagctagtggccatgctgcagggcatagcatctggcatgaactacctcagtaatcacaattatgtccaccgggacctggctgccagaaacatcttggtgaatcaaaacctgtgctgcaaggtgtctgactttggcctgactcgcctcctggatgactttgatggcacatacgaaacccaggttagaggccggtacaaac

SEQ ID NO: 372146 - DNA, 442 bp, Homo sapiens
ggatagggctcggcgtgggcaggtcatttgatcaatgtggtggctggaacattcaatatgacttctccattcacatgtctggagtcacagctgggaagctaaaatttctgtgggctggctaagcatctctctgtccacatgatattgccaataaggtagacagatctcctgacaatggcggctcagggctccagcaacatcccacaagaacaagccccagcacacaagtgctttatcaaacctctgcctgcatcacactttctaatgtactgctagccaaagcaaggacacatgtgcaagccagctgtcatggaaaagttctgtctacatagaacatgaatcctgggagctaccaagtaatagtctaccaaggatttttcaagtttatccactttttatagagagagaaggaaacaggaattgttgcttttccaaatttgtt

SEQ ID NO: 372147 - DNA, 1023 bp, Homo sapiens
  misc_feature (24)..(24): n is a, c, g, or t
  misc_feature (31)..(31): n is a, c, g, or t
aagcagtggtatcaaccagagtgnccattanggcggagccctcaggaacgagatggcggttctctggaggctgagtgccgtttgcggtgccctaggaggccgagctctgttgcttcgaactccagtggtcagacctgctcatatctcagcatttcttcaggaccgacctatcccagaatggtgtggagtgcagcacatacacttgtcaccgagccaccattctggctccaaggctgcatctctccactggactagcgagagggttgtcagtgttttgctcctgggtctgcttccggctgcttatttgaatccttgctctgcgatggactattccctggctgcagccctcactcttcatggtcactggggccttggacaagttgttactgactatgttcatggggatgccttgcagaaagctgccaaggcagggcttttggcactttcagctttaacctttgctgggctttgctatttcaactatcacgatgtgggcatctgcaaagctgttgccatgctgtggaagctctgacctttttgacttcatactttgaagaattgatgtatgcctctttgcctctgctttgtcatgccattaagctcacaataaggaagaaataacagataagtccattggtggacagccttcttctcttaatcacaagattattttcagaatttaatctttgaggaaaaggtttgagaggaattatatctaagttgtgagactgagttctatattctggtgagttaatggggttgcctcccagcttcttataagactcacagtataactaaacatgatatatcagcttttgcctttcaatttatcaatctcttaaagagaatccaactttattacgattagtatatgatcaaacttccatatttgccttgggaataatggacaaagggaaatactgaatctaatagatgagaaacattgtggaactagcagcggagagatggagaatgcgttaagagagaaacaaaagagggtaataaagggagtaaaggaaggag

SEQ ID NO: 372148 - DNA, 2390 bp, Homo sapiens
acagtccaggcagttctgtgcgtgttcactgtttagtagtactcaaaactgccagtgtgagaggatttggaaatcactggatctgctcaatacaaaaatgttttttcgagtctttctccattttatcaggagtcattctgccactgcagtggatttccttcctgtgatggtgcaccggctcccagttttcaaaaggtacatgggaaatactcctcagaaaaaagccgtctttgggcagtgtcggggtctgccatgtgttgcaccgctgctgaccacagtggaagaggctccacggggcatctctgctcgagtctggggacattttcctaagtggctcaatggctctctacttcgaattggacctgggaaattcgagtttgggaaggataagtacaatcattggtttgatgggatggcgctgcttcaccagttcagaatggcaaagggcacagtgacatacaggagcaagtttctacagagtgatacatataaggccaacagtgctaaaaaccgaattgtgatctcagaatttggcacactggctctcccggatccatgcaagaatgtttttgaacgtttcatgtccaggtttgagctgcctggtaaagctgcagccatgactgacaatactaatgtcaactatgtgcggtacaagggtgattactacctctgcactgagaccaactttatgaataaagtggacattgaaactctggaaaaaacagaaaaggtagattggagcaaatttattgctgtgaatggagcaactgcacatcctcattatgacccggatggaacagcatacaatatggggaactcctttgggccatatggtttctcctataaggttattcgggttcctccagagaaggtggaccttggggagacaatccatggagtccaggtgatatgttctattgcttctacagagaaagggaaaccttcttactaccatagctttggaatgacaaggaactatataattttcattgaacaacctctaaagatgaacctgtggaaaattgccacttctaaaattcggggaaaggccttttcagatgggataagctgggaaccccagtgtaatacgcggtttcatgtggtggaaaaacgcactggacagctccttccagggagatactacagcaaaccttttgttacatttcatcaaatcaatgcctttgaggaccagggctgtgttataattgatttgtgctgtcaagataatggaagaaccctagaagtttaccagttacagaatctcaggaaggctggggaagggcttgatcaggtccataattcagcagccaaatctttccctcgaaggtttgttttgcctttaaatgtcagtttgaatgcccctgagggagacaacctgagtccattgtcctatacttcagccagtgctgtgaaacaggctgatggaacgatctggtgctctcatgaaaatctacatcaggaggacctagaaaaggaaggaggcattgaatttcctcagatctactatgatcgattcagtggcaaaaagtatcatttcttttatggctgtggctttcggcatttagtgggggattctctgatcaaggttgatgtggtgaataagacactgaaggtttggagagaagatggcttttatccctcagaacctgtttttgttccagcaccaggaaccaatgaagaagatggtggggttattctttctgtggtgatcactcccaaccagaatgaaagcaattttctcctagttttggatgccaagaactttgaagagctgggccgagcagaggtacctgtgcagatgccttatgggttccatggtaccttcatacccatctgatgggacaaccacaaggtctggaaactaggtttaaaataagtgtgcacttggacataaagactggagaaataaacactgaggactccaaaaggggggcaaggaggaagaggggcaggggttaaaaagctacctattgaatactatgttccctatttgggtgatgggttcgttagaagtccaaacctcagcagcacacaatatactcatgtaacaagcctgcacatgtaccccagaatctaaaataaaaataaaaagaaaaacaaagaatgtactctatacaaaagacagagcataaagggcaccgtacctcccaaaccaatgtcccaaatagacatttagtttaaaaatttctgttaaaaacagaattcactatttccttgccactgccaagtcacgccatggcagaggctcgagtgcatacaagcttcggttttacccttaatacaccatcatgaccaatggaggcattgctgctggaggtgtcatggccattaacactactttataagaggtgcggaagactgccctcactcatcatggcctagcatgtgca

SEQ ID NO: 372149 - DNA, 2889 bp, Homo sapiens
gcctctttcctgaaggttgctgggagcttctgaagctttgtgtcctgtgtggctcagatgagatagcaattccgcagagtcctggaagttaaagaaggctgagttaggattgtttcctcatggtcagggaaacagccttcacatttgtatattttatgcaatatttaaggcaggattcagggacttggtattctttgggatttgcaataagaagaatattcaatatttaggcttttctaaattgaaaaatcactgccacacgttctaatgtaattgtttggtttctctatttgcattttgcggggactgccttaaaactcatttatgttttatagccttctattatagttaccattgttacatgattttatgtatagaaattggctgatctagagctttcagaaatcatactaatatgcactataaatttaaaattacttaatgtagtaatttaatgtttgcagtatgcaagggaatgtattacgtactggaaggagagaggagacaaacaccagaccctgtactcaaggagtactggtagtatcatttatcatacaagacagataagataaggtccatatgagagctataaacagatgctgtgagttcagactaaggagaatcagttcttgctgtaggtaaggggaatgctgtgtttataaagcaaatgacatggcaactggatcttgaaggatgagttagttttcaaaaggtacatgggaaatactcctcagaaaaaagccgtctttgggcagtgtcggggtctgccatgtgttgcaccgctgctgaccacagtggaagaggctccacggggcatctctgctcgagtctggggacattttcctaagtggctcaatggctctctacttcgaattggacctgggaaattcgagtttgggaaggataagtacaatcattggtttgatgggatggcgctgcttcaccagttcagaatggcaaagggcacagtgacatacaggagcaagtttctacagagtgatacatataaggccaacagtgctaaaaaccgaattgtgatctcagaatttggcacactggctctcccggatccatgcaagaatgtttttgaacgtttcatgtccaggtttgagctgcctggtaaagctgcagccatgactgacaatactaatgtcaactatgtgcggtacaagggtgattactacctctgcactgagaccaactttatgaataaagtggacattgaaactctggaaaaaacagaaaaggtagattggagcaaatttattgctgtgaatggagcaactgcacatcctcattatgacccggatggaacagcatacaatatggggaactcctttgggccatatggtttctcctataaggttattcgggttcctccagagaaggtggaccttggggagacaatccatggagtccaggtgatatgttctattgcttctacagagaaagggaaaccttcttactaccatagctttggaatgacaaggaactatataattttcattgaacaacctctaaagatgaacctgtggaaaattgccacttctaaaattcggggaaaggccttttcagatgggataagctgggaaccccagtgtaatacgcggtttcatgtggtggaaaaacgcactggacagctccttccagggagatactacagcaaaccttttgttacatttcatcaaatcaatgcctttgaggaccagggctgtgttataattgatttgtgctgtcaagataatggaagaaccctagaagtttaccagttacagaatctcaggaaggctggggaagggcttgatcaggtccataattcagcagccaaatctttccctcgaaggtttgttttgcctttaaatgtcagtttgaatgcccctgagggagacaacctgagtccattgtcctatacttcagccagtgctgtgaaacaggctgatggaacgatctggtgctctcatgaaaatctacatcaggaggacctagaaaaggaaggaggcattgaatttcctcagatctactatgatcgattcagtggcaaaaagtatcatttcttttatggctgtggctttcggcatttagtgggggattctctgatcaaggttgatgtggtttggagagaagatggcttttatccctcagaacctgtttttgttccagcaccaggaaccaatgaagaagatggtggggttattctttctgtggtgatcactcccaaccagaatgaaagcaattttctcctagttttggatgccaagaactttgaagagctgggccgagcagaggtacctgtgcagatgccttatgggttccatggtaccttcatacccatctgatgggacaaccacaaggtctggaaactaggtttaaaataagtgtgcacttggacataaagactggagaaataaacactgaggactccaaaaggggggcaaggaggaagaggggcaggggttaaaaagctacctattgaatactatgttccctatttgggtgatgggttcgttagaagtccaaacctcagcagcacacaatatactcatgtaacaagcctgcacatgtaccccagaatctaaaataaaaataaaaagaaaaacaaagaatgtactctatacaaaagacagagcataaagggcaccgtacctcccaaaccaatgtcccaaatagacatttagtttaaaaatttctgttaaaaacagaattcactatttccttgccactgccaagtcacgccatggcagaggctcgagtgcatacaagcttcggttttacccttaatacaccatcatgaccaatggaggcattgctgctggaggtgtcatggccattaacactactttataagaggtgcggaagactgccctcactcatcatggcctagcatgtgca

SEQ ID NO: 372150 - DNA, 893 bp, Homo sapiens
tttgaaatctcttttagatctggtgctctcatgaaaatctacatcaggaggacctagaaaaggaaggaggcattgaatttcctcagatctactatgatcgattcagtggcaaaaagtttggagagaagatggcttttatccctcagaacctgtttttgttccagcaccaggaaccaatgaagaagatggtggggttattctttctgtggtgatcactcccaaccagaatgaaagcaattttctcctagttttggatgccaagaactttgaagagctgggccgagcagaggtacctgtgcagatgccttatgggttccatggtaccttcatacccatctgatgggacaaccacaaggtctggaaactaggtttaaaataagtgtgcacttggacataaagactggagaaataaacactgaggactccaaaaggggggcaaggaggaagaggggcaggggttaaaaagctacctattgaatactatgttccctatttgggtgatgggttcgttagaagtccaaacctcagcagcacacaatatactcatgtaacaagcctgcacatgtaccccagaatctaaaataaaaataaaaagaaaaacaaagaatgtactctatacaaaagacagagcataaagggcaccgtacctcccaaaccaatgtcccaaatagacatttagtttaaaaatttctgttaaaaacagaattcactatttccttgccactgccaagtcacgccatggcagaggctcgagtgcatacaagcttcggttttacccttaatacaccatcatgaccaatggaggcattgctgctggaggtgtcatggccattaacactactttataagaggtgcggaagactgccctcactcatcatggcctagcatgtgca

SEQ ID NO: 372151 - DNA, 1523 bp, Homo sapiens
  misc_feature (1423)..(1423): n is a, c, g, or t
gcgacgggtgtgcaccgcctctcgacttccggttcacccagcatttcctcttccctgttttctttcgtcgtcgtgggtgggaatgtcgcctaagtggttccgggttggtggatgaccttgagccctcaggaacgagatggcggttctctggaggctgagtgccgtttgcggtgccctaggaggccgagctctgttgcttcgaactccagtggtcagacctgctcatatctcagcatttcttcaggaccgacctatcccagaatggtgtggagtgcagcacatacacttgtcaccgagccaccattctggctccaaggctgcatctctccactggactagcgagagggttgtcagtgttttgctcctgggtctgcttccggctgcttatttgaatccttgctctgcgatggactattccctggctgcagccctcactcttcatggtcactggggccttggacaagttgttactgactatgttcatggggatgccttgcagaaagctgccaaggcagggcttttggcactttcagctttaacctttgctgggctttgctatttcaactatcacgatgtgggcatctgcaaagctgttgccatgctgtggaagctctgacctttttgacttcatactttgaagaattgatgtatgcctctttgcctctgctttgtcatgccattaagctcacaataaggaagaaataacagataagtccattggtggacagccttcttctcttaatcacaagattattttcagaatttaatctttgaggaaaaggtttgagaggaattatatctaagttgtgagactgagttctatattctggtgagttaatggggttgcctcccagcttcttataagactcacagtataactaaacatgatatatcagcttttgcctttcaatttatcaatctcttaaagagaatccaactttattacgattagtatatgatcaaacttccatatttgccttgggaataatggacaaagggaaatactcttaattcatgaataaaaactttgcagaaaattagacagtgtttaattttcgaaaacttccctctctagacagtagataccacctactgatggttacatatactagggaaattttaaaattaggaaatgctgatagctcatattataaatttctaaatcctaggaagaaacgcttggagtgcttctgaatatacagaagttccatttaagggcaagtttccctgtagatgtatcaaaatactaccaactgtaaattgagatttaattcccaaatgtattctacttgttctaaaacaatctgtccacaaatataaaactataagtaataaattgttattttcgcacaatgggaatctctaatgtgaaaatgtattctatgaaaataatttttttaaataaaaggtgtttcttcccccnaagaaagttatccctccaactttcccccatggaggcggtccgcgggtgttatccccggagagagggagatcaaaaaaccttccgggggagaggaaaacaa

SEQ ID NO: 372152 - DNA, 1107 bp, Homo sapiens
gcgacgggtgtgcaccgcctctcgacttccggttcacccagcatttcctcttccctgttttctttcgtcgtcgtgggtgggaatgtcgcctaagtggttccgggttggtggatgaccttgagccctcaggaacgagatggcggttctctggaggctgagtgccgtttgcggtgccctaggaggccgagctctgttgcttcgaactccagtggtcagacctgctcatatctcagcatttcttcaggaccgacctatcccagaatggtgtggagtgcagcacatacacttgtcaccgagccaccattctggctccaaggctgcatctctccactggactagcgagagggttgtcagtgttttgctcctgggtctgcttccggctgcttatttgaatccttgctctgcgatggactattccctggctgcagccctcactcttcatggtcactggggccttggacaagttgttactgactatgttcatggggatgccttgcagaaagctgccaaggcagggcttttggcactttcagctttaacctttgctgggctttgctatttcaactatcacgatgtgggcatctgcaaagctgttgccatgctgtggaagctctgacctttttgacttcatactttgaagaattgatgtatgcctctttgcctctgctttgtcatgccattaagctcacaataaggaagaaataacagataagtccattggtggacagccttcttctcttaatcacaagattattttcagaatttaatctttgaggaaaaggtttgagaggaattatatctaagttgtgagactgagttctatattctggtgagttaatggggttgcctcccagcttcttataagactcacagtataactaaacatgatatatcagcttttgcctttcaatttatcaatctcttaaagagaatccaactttattacgattagtatatgatcaaacttccatatttgccttgggaataatggacaaagggaaatactgaatctaatagatgagaaacattgtggaactagcagcggagagatggagaatgcgttaagagagaaacaaaagagggtaataaagggagtaaaggaaggag

SEQ ID NO: 372153 - DNA, 1439 bp, Homo sapiens
  misc_feature (24)..(24): n is a, c, g, or t
  misc_feature (31)..(31): n is a, c, g, or t
  misc_feature (1339)..(1339): n is a, c, g, or t
aagcagtggtatcaaccagagtgnccattanggcggagccctcaggaacgagatggcggttctctggaggctgagtgccgtttgcggtgccctaggaggccgagctctgttgcttcgaactccagtggtcagacctgctcatatctcagcatttcttcaggaccgacctatcccagaatggtgtggagtgcagcacatacacttgtcaccgagccaccattctggctccaaggctgcatctctccactggactagcgagagggttgtcagtgttttgctcctgggtctgcttccggctgcttatttgaatccttgctctgcgatggactattccctggctgcagccctcactcttcatggtcactggggccttggacaagttgttactgactatgttcatggggatgccttgcagaaagctgccaaggcagggcttttggcactttcagctttaacctttgctgggctttgctatttcaactatcacgatgtgggcatctgcaaagctgttgccatgctgtggaagctctgacctttttgacttcatactttgaagaattgatgtatgcctctttgcctctgctttgtcatgccattaagctcacaataaggaagaaataacagataagtccattggtggacagccttcttctcttaatcacaagattattttcagaatttaatctttgaggaaaaggtttgagaggaattatatctaagttgtgagactgagttctatattctggtgagttaatggggttgcctcccagcttcttataagactcacagtataactaaacatgatatatcagcttttgcctttcaatttatcaatctcttaaagagaatccaactttattacgattagtatatgatcaaacttccatatttgccttgggaataatggacaaagggaaatactcttaattcatgaataaaaactttgcagaaaattagacagtgtttaattttcgaaaacttccctctctagacagtagataccacctactgatggttacatatactagggaaattttaaaattaggaaatgctgatagctcatattataaatttctaaatcctaggaagaaacgcttggagtgcttctgaatatacagaagttccatttaagggcaagtttccctgtagatgtatcaaaatactaccaactgtaaattgagatttaattcccaaatgtattctacttgttctaaaacaatctgtccacaaatataaaactataagtaataaattgttattttcgcacaatgggaatctctaatgtgaaaatgtattctatgaaaataatttttttaaataaaaggtgtttcttcccccnaagaaagttatccctccaactttcccccatggaggcggtccgcgggtgttatccccggagagagggagatcaaaaaaccttccgggggagaggaaaacaa

SEQ ID NO: 372154 - DNA, 1390 bp, Homo sapiens
  misc_feature (10)..(10): n is a, c, g, or t
  misc_feature (29)..(29): n is a, c, g, or t
  misc_feature (46)..(46): n is a, c, g, or t
  misc_feature (1290)..(1290): n is a, c, g, or t
caagaattcngcacgaatggaggcttgantgccgttgggtgcctangaggccgagctctgttgcttcgaactccagtggtcagacctgctcatatctcagcatttcttcaggaccgacctatcccagaatggtgtggagtgcagcacatacacttgtcaccgagccaccattctggctccaaggctgcatctctccactggactagcgagagggttgtcagtgttttgctcctgggtctgcttccggctgcttatttgaatccttgctctgcgatggactattccctggctgcagccctcactcttcatggtcactggggccttggacaagttgttactgactatgttcatggggatgccttgcagaaagctgccaaggcagggcttttggcactttcagctttaacctttgctgggctttgctatttcaactatcacgatgtgggcatctgcaaagctgttgccatgctgtggaagctctgacctttttgacttcatactttgaagaattgatgtatgcctctttgcctctgctttgtcatgccattaagctcacaataaggaagaaataacagataagtccattggtggacagccttcttctcttaatcacaagattattttcagaatttaatctttgaggaaaaggtttgagaggaattatatctaagttgtgagactgagttctatattctggtgagttaatggggttgcctcccagcttcttataagactcacagtataactaaacatgatatatcagcttttgcctttcaatttatcaatctcttaaagagaatccaactttattacgattagtatatgatcaaacttccatatttgccttgggaataatggacaaagggaaatactcttaattcatgaataaaaactttgcagaaaattagacagtgtttaattttcgaaaacttccctctctagacagtagataccacctactgatggttacatatactagggaaattttaaaattaggaaatgctgatagctcatattataaatttctaaatcctaggaagaaacgcttggagtgcttctgaatatacagaagttccatttaagggcaagtttccctgtagatgtatcaaaatactaccaactgtaaattgagatttaattcccaaatgtattctacttgttctaaaacaatctgtccacaaatataaaactataagtaataaattgttattttcgcacaatgggaatctctaatgtgaaaatgtattctatgaaaataatttttttaaataaaaggtgtttcttcccccnaagaaagttatccctccaactttcccccatggaggcggtccgcgggtgttatccccggagagagggagatcaaaaaaccttccgggggagaggaaaacaa

SEQ ID NO: 372155 - DNA, 1322 bp, Homo sapiens
  misc_feature (24)..(24): n is a, c, g, or t
  misc_feature (31)..(31): n is a, c, g, or t
  misc_feature (1222)..(1222): n is a, c, g, or t
aagcagtggtatcaaccagagtgnccattanggcggagccctcaggaacgagatggcggttctctggaggctgagtgccgtttgcggtgccctaggaggccgagctggctccaaggctgcatctctccactggactagcgagagggttgtcagtgttttgctcctgggtctgcttccggctgcttatttgaatccttgctctgcgatggactattccctggctgcagccctcactcttcatggtcactggggccttggacaagttgttactgactatgttcatggggatgccttgcagaaagctgccaaggcagggcttttggcactttcagctttaacctttgctgggctttgctatttcaactatcacgatgtgggcatctgcaaagctgttgccatgctgtggaagctctgacctttttgacttcatactttgaagaattgatgtatgcctctttgcctctgctttgtcatgccattaagctcacaataaggaagaaataacagataagtccattggtggacagccttcttctcttaatcacaagattattttcagaatttaatctttgaggaaaaggtttgagaggaattatatctaagttgtgagactgagttctatattctggtgagttaatggggttgcctcccagcttcttataagactcacagtataactaaacatgatatatcagcttttgcctttcaatttatcaatctcttaaagagaatccaactttattacgattagtatatgatcaaacttccatatttgccttgggaataatggacaaagggaaatactcttaattcatgaataaaaactttgcagaaaattagacagtgtttaattttcgaaaacttccctctctagacagtagataccacctactgatggttacatatactagggaaattttaaaattaggaaatgctgatagctcatattataaatttctaaatcctaggaagaaacgcttggagtgcttctgaatatacagaagttccatttaagggcaagtttccctgtagatgtatcaaaatactaccaactgtaaattgagatttaattcccaaatgtattctacttgttctaaaacaatctgtccacaaatataaaactataagtaataaattgttattttcgcacaatgggaatctctaatgtgaaaatgtattctatgaaaataatttttttaaataaaaggtgtttcttcccccnaagaaagttatccctccaactttcccccatggaggcggtccgcgggtgttatccccggagagagggagatcaaaaaaccttccgggggagaggaaaacaa

SEQ ID NO: 372156 - DNA, 1499 bp, Homo sapiens
  misc_feature (1399)..(1399): n is a, c, g, or t
ggaccttgaaccctccaaggaaggagagggcggccctctgctagctgaggctgtcgtcatgacggtgccctatagaggcctgcactcgtctgtttgattcgagctccaatggtcagacctagctcatatctcgagcgagttttacctcttggcaggatctccgtagaccattaaataccctcacgaagaatgggtagttgggcatggttgcatgcaatcatcatcggctttgtactacacagaggcgcagccacttacgtggacgtccagaaggacttgaactggctccaaggctgcatctctccactggactagcgagagggttgtcagtgttttgctcctgggtctgcttccggctgcttatttgaatccttgctctgcgatggactattccctggctgcagccctcactcttcatggtcactggggccttggacaagttgttactgactatgttcatggggatgccttgcagaaagctgccaaggcagggcttttggcactttcagctttaacctttgctgggctttgctatttcaactatcacgatgtgggcatctgcaaagctgttgccatgctgtggaagctctgacctttttgacttcatactttgaagaattgatgtatgcctctttgcctctgctttgtcatgccattaagctcacaataaggaagaaataacagataagtccattggtggacagccttcttctcttaatcacaagattattttcagaatttaatctttgaggaaaaggtttgagaggaattatatctaagttgtgagactgagttctatattctggtgagttaatggggttgcctcccagcttcttataagactcacagtataactaaacatgatatatcagcttttgcctttcaatttatcaatctcttaaagagaatccaactttattacgattagtatatgatcaaacttccatatttgccttgggaataatggacaaagggaaatactcttaattcatgaataaaaactttgcagaaaattagacagtgtttaattttcgaaaacttccctctctagacagtagataccacctactgatggttacatatactagggaaattttaaaattaggaaatgctgatagctcatattataaatttctaaatcctaggaagaaacgcttggagtgcttctgaatatacagaagttccatttaagggcaagtttccctgtagatgtatcaaaatactaccaactgtaaattgagatttaattcccaaatgtattctacttgttctaaaacaatctgtccacaaatataaaactataagtaataaattgttattttcgcacaatgggaatctctaatgtgaaaatgtattctatgaaaataatttttttaaataaaaggtgtttcttcccccnaagaaagttatccctccaactttcccccatggaggcggtccgcgggtgttatccccggagagagggagatcaaaaaaccttccgggggagaggaaaacaa

SEQ ID NO: 372157 - DNA, 1480 bp, Homo sapiens
  misc_feature (1380)..(1380): n is a, c, g, or t
gccctctggaatcattcctagagcgtccattagggcgcggcaggcccgagtatggtagagtgcatcctgtgagtccatgaagctgcttgtccttgacggatgatcctgggtagagtgcagtacgtgtgttggctttcgtaacctccaataaggatcacgacctgcgtgatatctcaaccgttttcgttccaagatccgaaactatcctcctaatggtcgatgacatgtgcatctatatacaggtagtccacgagacctcattctggctccaaggctgcatctctccactggactagcgagagggttgtcagtgttttgctcctgggtctgcttccggctgcttatttgaatccttgctctgcgatggactattccctggctgcagccctcactcttcatggtcactggggccttggacaagttgttactgactatgttcatggggatgccttgcagaaagctgccaaggcagggcttttggcactttcagctttaacctttgctgggctttgctatttcaactatcacgatgtgggcatctgcaaagctgttgccatgctgtggaagctctgacctttttgacttcatactttgaagaattgatgtatgcctctttgcctctgctttgtcatgccattaagctcacaataaggaagaaataacagataagtccattggtggacagccttcttctcttaatcacaagattattttcagaatttaatctttgaggaaaaggtttgagaggaattatatctaagttgtgagactgagttctatattctggtgagttaatggggttgcctcccagcttcttataagactcacagtataactaaacatgatatatcagcttttgcctttcaatttatcaatctcttaaagagaatccaactttattacgattagtatatgatcaaacttccatatttgccttgggaataatggacaaagggaaatactcttaattcatgaataaaaactttgcagaaaattagacagtgtttaattttcgaaaacttccctctctagacagtagataccacctactgatggttacatatactagggaaattttaaaattaggaaatgctgatagctcatattataaatttctaaatcctaggaagaaacgcttggagtgcttctgaatatacagaagttccatttaagggcaagtttccctgtagatgtatcaaaatactaccaactgtaaattgagatttaattcccaaatgtattctacttgttctaaaacaatctgtccacaaatataaaactataagtaataaattgttattttcgcacaatgggaatctctaatgtgaaaatgtattctatgaaaataatttttttaaataaaaggtgtttcttcccccnaagaaagttatccctccaactttcccccatggaggcggtccgcgggtgttatccccggagagagggagatcaaaaaaccttccgggggagaggaaaacaa

SEQ ID NO: 372158 - DNA, 1577 bp, Homo sapiens
  misc_feature (1477)..(1477): n is a, c, g, or t
gcgacgggtgtgcaccgcctctcgacttccggttcacccagcatttcctcttccctgttttctttcgtcgtcgtgggtgggaatgtcgcctaagtggttccgggttggtggatgaccttgagccctcaggaacgagatggcggttctctggaggctgagtgccgtttgcggtgccctaggaggccgagctctgttgcttcgaactccagtggtcagacctgctcatatctcagcatttcttcaggaccgacctatcccagaatggtgtggagtgcagcacatacacttgtcaccgagccaccattctggctccaaggctgcatctctccactggactagcgagagggttgtcagtgttttgctcctgggtctgcttccggctgcttatttgaatccttgctctgcgatggactattccctggctgcagccctcactcttcatggtcactgacctttccaaataaaagattccagttgcatatgaaatattagatcacaagtacagggccttggacaagttgttactgactatgttcatggggatgccttgcagaaagctgccaaggcagggcttttggcactttcagctttaacctttgctgggctttgctatttcaactatcacgatgtgggcatctgcaaagctgttgccatgctgtggaagctctgacctttttgacttcatactttgaagaattgatgtatgcctctttgcctctgctttgtcatgccattaagctcacaataaggaagaaataacagataagtccattggtggacagccttcttctcttaatcacaagattattttcagaatttaatctttgaggaaaaggtttgagaggaattatatctaagttgtgagactgagttctatattctggtgagttaatggggttgcctcccagcttcttataagactcacagtataactaaacatgatatatcagcttttgcctttcaatttatcaatctcttaaagagaatccaactttattacgattagtatatgatcaaacttccatatttgccttgggaataatggacaaagggaaatactcttaattcatgaataaaaactttgcagaaaattagacagtgtttaattttcgaaaacttccctctctagacagtagataccacctactgatggttacatatactagggaaattttaaaattaggaaatgctgatagctcatattataaatttctaaatcctaggaagaaacgcttggagtgcttctgaatatacagaagttccatttaagggcaagtttccctgtagatgtatcaaaatactaccaactgtaaattgagatttaattcccaaatgtattctacttgttctaaaacaatctgtccacaaatataaaactataagtaataaattgttattttcgcacaatgggaatctctaatgtgaaaatgtattctatgaaaataatttttttaaataaaaggtgtttcttcccccnaagaaagttatccctccaactttcccccatggaggcggtccgcgggtgttatccccggagagagggagatcaaaaaaccttccgggggagaggaaaacaa

SEQ ID NO: 372159 - DNA, 1378 bp, Homo sapiens
  misc_feature (1278)..(1278): n is a, c, g, or t
gcgacgggtgtgcaccgcctctcgacttccggttcacccagcatttcctcttccctgttttctttcgtcgtcgtgggtgggaatgtcgcctaagtggttccgggttggtggatgaccttgagccctcaggaacgagatggcggttctctggaggctgagtgccgtttgcggtgccctaggaggccgagctctgttgcttcgaactccagtggtcagacctgctcatatctcagcatttcttcaggaccgacctatcccagaatggtgtggagtgcagcacatacacttgtcaccgagccaccattgggccttggacaagttgttactgactatgttcatggggatgccttgcagaaagctgccaaggcagggcttttggcactttcagctttaacctttgctgggctttgctatttcaactatcacgatgtgggcatctgcaaagctgttgccatgctgtggaagctctgacctttttgacttcatactttgaagaattgatgtatgcctctttgcctctgctttgtcatgccattaagctcacaataaggaagaaataacagataagtccattggtggacagccttcttctcttaatcacaagattattttcagaatttaatctttgaggaaaaggtttgagaggaattatatctaagttgtgagactgagttctatattctggtgagttaatggggttgcctcccagcttcttataagactcacagtataactaaacatgatatatcagcttttgcctttcaatttatcaatctcttaaagagaatccaactttattacgattagtatatgatcaaacttccatatttgccttgggaataatggacaaagggaaatactcttaattcatgaataaaaactttgcagaaaattagacagtgtttaattttcgaaaacttccctctctagacagtagataccacctactgatggttacatatactagggaaattttaaaattaggaaatgctgatagctcatattataaatttctaaatcctaggaagaaacgcttggagtgcttctgaatatacagaagttccatttaagggcaagtttccctgtagatgtatcaaaatactaccaactgtaaattgagatttaattcccaaatgtattctacttgttctaaaacaatctgtccacaaatataaaactataagtaataaattgttattttcgcacaatgggaatctctaatgtgaaaatgtattctatgaaaataatttttttaaataaaaggtgtttcttcccccnaagaaagttatccctccaactttcccccatggaggcggtccgcgggtgttatccccggagagagggagatcaaaaaaccttccgggggagaggaaaacaa

SEQ ID NO: 372160 - DNA, 1294 bp, Homo sapiens
  misc_feature (1194)..(1194): n is a, c, g, or t
ctttgtctctaaagaaaagtcactagaaatagacttactgacatacacacgcaaaaggctatacagaatcccctaaagaagcaaacagtgacagtggagtggcaaatggagacattgcatttgaacttgacagattgtttttttgcagccaagttatctgtatagtcttctaatttcactgtggttttttattgatgttatgattttttctttttctttaggggccttggacaagttgttactgactatgttcatggggatgccttgcagaaagctgccaaggcagggcttttggcactttcagctttaacctttgctgggctttgctatttcaactatcacgatgtgggcatctgcaaagctgttgccatgctgtggaagctctgacctttttgacttcatactttgaagaattgatgtatgcctctttgcctctgctttgtcatgccattaagctcacaataaggaagaaataacagataagtccattggtggacagccttcttctcttaatcacaagattattttcagaatttaatctttgaggaaaaggtttgagaggaattatatctaagttgtgagactgagttctatattctggtgagttaatggggttgcctcccagcttcttataagactcacagtataactaaacatgatatatcagcttttgcctttcaatttatcaatctcttaaagagaatccaactttattacgattagtatatgatcaaacttccatatttgccttgggaataatggacaaagggaaatactcttaattcatgaataaaaactttgcagaaaattagacagtgtttaattttcgaaaacttccctctctagacagtagataccacctactgatggttacatatactagggaaattttaaaattaggaaatgctgatagctcatattataaatttctaaatcctaggaagaaacgcttggagtgcttctgaatatacagaagttccatttaagggcaagtttccctgtagatgtatcaaaatactaccaactgtaaattgagatttaattcccaaatgtattctacttgttctaaaacaatctgtccacaaatataaaactataagtaataaattgttattttcgcacaatgggaatctctaatgtgaaaatgtattctatgaaaataatttttttaaataaaaggtgtttcttcccccnaagaaagttatccctccaactttcccccatggaggcggtccgcgggtgttatccccggagagagggagatcaaaaaaccttccgggggagaggaaaacaa

SEQ ID NO: 372161 - DNA, 768 bp, Homo sapiens
gcgacgggtgtgcaccgcctctcgacttccggttcacccagcatttcctcttccctgttttctttcgtcgtcgtgggtgggaatgtcgcctaagtggttccgggttggtggatgaccttgagccctcaggaacgagatggcggttctctggaggctgagtgccgtttgcggtgccctaggaggccgagctctgttgcttcgaactccagtggtcagacctgctcatatctcagcatttcttcaggaccgacctatcccagaatggtgtggagtgcagcacatacacttgtcaccgagccaccattctggctccaaggctgcatctctccactggactagcgagagggttgtcagtgttttgctcctgggtctgcttccggctgcttatttgaatccttgctctgcgatggactattccctggctgcagccctcactcttcatggtcactggaagatcaaaaataatgagtaatgtgtcatctaagagagaacactggaatccaacagagaacttacagaaaacaccagtagcaaggaaggagaaggaagcgaggaagtctgctcagctggggtcatctgggaacctatagaggctcccttaatgcggagaaaggagatgggcttgcaccatgctgtgtcggccattacccaactcctgggcttaagtgatccacctgcctcagcctcccaaagtgctgggattacaagcctgagccaccgcgcccagctgttaatcgtgacttaatacatgtgcatcttcccctgaaa

SEQ ID NO: 372162 - DNA, 1154 bp, Homo sapiens
gcgacgggtgtgcaccgcctctcgacttccggttcacccagcatttcctcttccctgttttctttcgtcgtcgtgggtgggaatgtcgcctaagtggttccgggttggtggatgaccttgagccctcaggaacgagatggcggttctctggaggctgagtgccgtttgcggtgccctaggaggccgagctctgttgcttcgaactccagtggtcagacctgctcatatctcagcatttcttcaggaccgacctatcccagaatggtgtggagtgcagcacatacacttgtcaccgagccaccattctggctccaaggctgcatctctccactggactagcgagagggttgtcagtgttttgctcctgggtctgcttccggctgcttatttgaatccttgctctgcgatggactattccctggctgcagccctcactcttcatggtcactgtctccagtgccagatagtccacagctgtcctctcttggaaaatcagattcatctttctctgaaatttccggactattttataaagatgaagccttggagaaagatttaaatgttttcaaaaggtacatgggaaatactcctcagaaaaaagccgtctttgggcagtgtcggggtctgccatgtgttgcaccgctgctgaccacagtggaagaggctccacggggcatctctgctcgagtctggggacattttcctaagtggctcaatggctctctacttcgaattggacctgggaaattcgagtttgggaaggataagtacaatcattggtttgatgggatggcgctgcttcaccagttcagaatggcaaagggcacagtgacatacaggagcaagtttctacagagtgatacatataaggccaacagtgctaaaaaccgaattgtgatctcagaatttggcacactggctctcccggatccatgcaagaatgtttttgaacgtttcatgtccaggtttgagctgcctggtaaagctgcaggtgatagtgacgattatttaaactattacgatatataaccatctatacaaacataaatcttgaaaatagatttttttgtactgtgagaggatgttgaaactgctttctccctttgagtgtgtgcttagcgtcgtctacagtaagctgtggtacttaaataact

SEQ ID NO: 372163 - DNA, 524 bp, Homo sapiens
  misc_feature (496)..(496): n is a, c, g, or t
  misc_feature (515)..(515): n is a, c, g, or t
gcgacgggtgtgcaccgcctctcgacttccggttcacccagcatttcctcttccctgttttctttcgtcgtcgtgggtgggaatgtcgcctaagtggttccgggttggtggatgaccttgagccctcaggaacgagatggcggttctctggaggctgagtgccgtttgcggtgccctaggaggccgagctctgttgcttcgaactccagtggtcagacctgctcatatctcagcatttcttcaggaccgacctatcccagaatggtgtggagtgcagcacatacacttgtcaccgagccaccattctggctccaaggctgcatctctccactggactagcgagagggttgtcagtgttttgctcctgggtctgcttccggctgcttatttgaatccttgctctgcgatggactattccctggctgcagccctcactcttcatggtcactgtgggggcttggacaattgttatgaccagttcaggggatgcctgccngccaaggcaggctttgcanttcgctttc

SEQ ID NO: 372164 - DNA, 1069 bp, Homo sapiens
gcgacgggtgtgcaccgcctctcgacttccggttcacccagcatttcctcttccctgttttctttcgtcgtcgtgggtgggaatgtcgcctaagtggttccgggttggtggatgaccttgagccctcaggaacgagatggcggttctctggaggctgagtgccgtttgcggtgccctaggaggccgagctctgttgcttcgaactccagtggtcagacctgctcatatctcagcatttcttcaggaccgacctatcccagaatggtgtggagtgcagcacatacacttgtcaccgagccaccattctggctccaaggctgcatctctccactggactagcgagagggttgtcagtgttttgctcctgggtctgcttccggctgcttatttgaatccttgctctgcgatggactattccctggctgcagccctcactcttcatggtcactgtctccagtgccagatagtccacagctgtcctctcttggaaaatcagattcatctttctctgaaatttccggactattttataaagatgaagccttggagaaagatttaaatgttttcaaaaggtacatgggaaatactcctcagaaaaaagccgtctttgggcagtgtcggggtctgccatgtgttgcaccgctgctgaccacagtggaagaggctccacggggcatctctgctcgagtctggggacattttcctaagtggctcaatggctctctacttcgaattggacctgggaaattcgagtttgggaaggataagtacaatcattggtttgatgggatggcgctgcttcaccagttcagaatggcaaagggcacagtgacatacaggagcaagtttctacagagtgatacatataaggccaacagtgctaaaaaccgaattgtgatctcagaatttggcacactggctctcccggatccatgcaagaatgtttttgaagtcgacgttgccgcccacgtcgggggggaaggccgcccacatgttcttgatctcctcctgggagaagcggtcacactgcgtggtcagcagctcctccaggaacttcttcttgatggtg

SEQ ID NO: 372165 - DNA, 2336 bp, Homo sapiens
acagtccaggcagttctgtgcgtgttcactgtttagtagtactcaaaactgccagtgtgagaggatttggaaatcactggatctgctcaatacaaaaatgttttttcgagtctttctccattttatcaggagtcattctgccactgcagtggatttccttcctgtgatggtgcaccggctcccagttttcaaaaggtacatgggaaatactcctcagaacacagtggaagaggctccacggggcatctctgctcgagtctggggacattttcctaagtggctcaatggctctctacttcgaattggacctgggaaattcgagtttgggaaggataagtacaatcattggtttgatgggatggcgctgcttcaccagttcagaatggcaaagggcacagtgacatacaggagcaagtttctacagagtgatacatataaggccaacagtgctaaaaaccgaattgtgatctcagaatttggcacactggctctcccggatccatgcaagaatgtttttgaacgtttcatgtccaggtttgagctgcctggtaaagctgcagccatgactgacaatactaatgtcaactatgtgcggtacaagggtgattactacctctgcactgagaccaactttatgaataaagtggacattgaaactctggaaaaaacagaaaaggtagattggagcaaatttattgctgtgaatggagcaactgcacatcctcattatgacccggatggaacagcatacaatatggggaactcctttgggccatatggtttctcctataaggttattcgggttcctccagagaaggtggaccttggggagacaatccatggagtccaggtgatatgttctattgcttctacagagaaagggaaaccttcttactaccatagctttggaatgacaaggaactatataattttcattgaacaacctctaaagatgaacctgtggaaaattgccacttctaaaattcggggaaaggccttttcagatgggataagctgggaaccccagtgtaatacgcggtttcatgtggtggaaaaacgcactggacagctccttccagggagatactacagcaaaccttttgttacatttcatcaaatcaatgcctttgaggaccagggctgtgttataattgatttgtgctgtcaagataatggaagaaccctagaagtttaccagttacagaatctcaggaaggctggggaagggcttgatcaggtccataattcagcagccaaatctttccctcgaaggtttgttttgcctttaaatgtcagtttgaatgcccctgagggagacaacctgagtccattgtcctatacttcagccagtgctgtgaaacaggctgatggaacgatctggtgctctcatgaaaatctacatcaggaggacctagaaaaggaaggaggcattgaatttcctcagatctactatgatcgattcagtggcaaaaagtatcatttcttttatggctgtggctttcggcatttagtgggggattctctgatcaaggttgatgtggtgaataagacactgaaggtttggagagaagatggcttttatccctcagaacctgtttttgttccagcaccaggaaccaatgaagaagatggtggggttattctttctgtggtgatcactcccaaccagaatgaaagcaattttctcctagttttggatgccaagaactttgaagagctgggccgagcagaggtacctgtgcagatgccttatgggttccatggtaccttcatacccatctgatgggacaaccacaaggtctggaaactaggtttaaaataagtgtgcacttggacataaagactggagaaataaacactgaggactccaaaaggggggcaaggaggaagaggggcaggggttaaaaagctacctattgaatactatgttccctatttgggtgatgggttcgttagaagtccaaacctcagcagcacacaatatactcatgtaacaagcctgcacatgtaccccagaatctaaaataaaaataaaaagaaaaacaaagaatgtactctatacaaaagacagagcataaagggcaccgtacctcccaaaccaatgtcccaaatagacatttagtttaaaaatttctgttaaaaacagaattcactatttccttgccactgccaagtcacgccatggcagaggctcgagtgcatacaagcttcggttttacccttaatacaccatcatgaccaatggaggcattgctgctggaggtgtcatggccattaacactactttataagaggtgcggaagactgccctcactcatcatggcctagcatgtgca

SEQ ID NO: 372166 - DNA, 1666 bp, Homo sapiens
agataaaaagcaagctgagaacatgcaacccaagctattctaagcagttcccttttttataaaggaacaggaaatacgtatagtaaagctgggagacagtaaacatgtatttctggctggcatttgtttagggcatcagtaacgtgtccaggcattcagacaagtccccataactggcacatttcagacaactctagtttgccaaataacatttttattgtttgctggaaccttttaggaatgacaaggaactatataattttcattgaacaacctctaaagatgaacctgtggaaaattgccacttctaaaattcggggaaaggccttttcagatgggataagctgggaaccccagtgtaatacgcggtttcatgtggtggaaaaacgcactggacagctccttccagggagatactacagcaaaccttttgttacatttcatcaaatcaatgcctttgaggaccagggctgtgttataattgatttgtgctgtcaagataatggaagaaccctagaagtttaccagttacagaatctcaggaaggctggggaagggcttgatcaggtccataattcagcagccaaatctttccctcgaaggtttgttttgcctttaaatgtcagtttgaatgcccctgagggagacaacctgagtccattgtcctatacttcagccagtgctgtgaaacaggctgatggaacgatctggtgctctcatgaaaatctacatcaggaggacctagaaaaggaaggaggcattgaatttcctcagatctactatgatcgattcagtggcaaaaagtatcatttcttttatggctgtggctttcggcatttagtgggggattctctgatcaaggttgatgtggtgaataagacactgaaggtttggagagaagatggcttttatccctcagaacctgtttttgttccagcaccaggaaccaatgaagaagatggtggggttattctttctgtggtgatcactcccaaccagaatgaaagcaattttctcctagttttggatgccaagaactttgaagagctgggccgagcagaggtacctgtgcagatgccttatgggttccatggtaccttcatacccatctgatgggacaaccacaaggtctggaaactaggtttaaaataagtgtgcacttggacataaagactggagaaataaacactgaggactccaaaaggggggcaaggaggaagaggggcaggggttaaaaagctacctattgaatactatgttccctatttgggtgatgggttcgttagaagtccaaacctcagcagcacacaatatactcatgtaacaagcctgcacatgtaccccagaatctaaaataaaaataaaaagaaaaacaaagaatgtactctatacaaaagacagagcataaagggcaccgtacctcccaaaccaatgtcccaaatagacatttagtttaaaaatttctgttaaaaacagaattcactatttccttgccactgccaagtcacgccatggcagaggctcgagtgcatacaagcttcggttttacccttaatacaccatcatgaccaatggaggcattgctgctggaggtgtcatggccattaacactactttataagaggtgcggaagactgccctcactcatcatggcctagcatgtgca

SEQ ID NO: 372167 - DNA, 1240 bp, Homo sapiens
  misc_feature (1140)..(1140): n is a, c, g, or t
ctttgtctctaaagaaaagtcactagaaatagacttactgacatacacacgcaaaaggctatacagaatcccctaaagaagcaaacagtgacagtggagtggcaaatggagacattgcatttgaacttgacagattgtttttttgcagccaagttatctgtatagtcttctaatttcactgtggttttttattgatgttatgattttttctttttctttaggggccttggacaagttgttactgactatgttcatggggatgccttgcagaaagctgccaaggcagggcttttggcactttcagctttaacctttgctgggctttgctatttcaactatcacgatgtgggcatctgcaaagctgttgccatgctgtggaagctctgacctttttgacttcatactttgaagaattgatgtatgcctctttgcctctgctttgtcatgccattaagctcacaataaggaagaaataacagataagtccattggtggacagccttcttctcttaatcacaagattattttcagaatttaatctttgaggtgagttaatggggttgcctcccagcttcttataagactcacagtataactaaacatgatatatcagcttttgcctttcaatttatcaatctcttaaagagaatccaactttattacgattagtatatgatcaaacttccatatttgccttgggaataatggacaaagggaaatactcttaattcatgaataaaaactttgcagaaaattagacagtgtttaattttcgaaaacttccctctctagacagtagataccacctactgatggttacatatactagggaaattttaaaattaggaaatgctgatagctcatattataaatttctaaatcctaggaagaaacgcttggagtgcttctgaatatacagaagttccatttaagggcaagtttccctgtagatgtatcaaaatactaccaactgtaaattgagatttaattcccaaatgtattctacttgttctaaaacaatctgtccacaaatataaaactataagtaataaattgttattttcgcacaatgggaatctctaatgtgaaaatgtattctatgaaaataatttttttaaataaaaggtgtttcttcccccnaagaaagttatccctccaactttcccccatggaggcggtccgcgggtgttatccccggagagagggagatcaaaaaaccttccgggggagaggaaaacaa

SEQ ID NO: 372168 - DNA, 300 bp, Homo sapiens
cccaccttggcctcccaaagtgctgggattataggtgtgaaccaccgtgcccagcctaaaggggttttaattatctggttttgtaggactggttaggagaatgagttgttgttgttgatgttgttttttaaccacacagacctttccaaataaaagattccagttgcatatgaaatattagatcacaagtacagtaagtaatatttctctaacatgtcatccctcttgaaggagctgtctataatgtgctccacttcctcaacactgagtctcttttagcctgtattaattggggtctta

SEQ ID NO: 372169 - DNA, 964 bp, Homo sapiens
  misc_feature (956)..(956): n is a, c, g, or t
gcgacgggtgtgcaccgcctctcgacttccggttcacccagcatttcctcttccctgttttctttcgtcgtcgtgggtgggaatgtcgcctaagtggttccgggttggtggatgaccttgagccctcaggaacgagatggcggttctctggaggctgagtgccgtttgcggtgccctaggaggccgagctctgttgcttcgaactccagtggtcagacctgctcatatctcagcatttcttcaggaccgacctatcccagaatggtgtggagtgcagcacatacacttgtcaccgagccaccattctggctccaaggctgcatctctccactggactagcgagagggttgtcagtgttttgctcctgggtctgcttccggctgcttatttgaatccttgctctgcgatggactattccctggctgcagccctcactcttcatggtcactggggccttggacaagttgttactgactatgttcatggggatgccttgcagaaagctgccaaggcagggcttttggcactttcagctttaacctttgctgggctttgctatttcaactatcacgatgtgggcatctgcaaagctgttgccatgctgtggaagctctgacctttttgacttcatactttgaagaattgatgtatgcctctttgcctctgctttgtcatgccattaagctcacaataaggaagaaataacagataagtccattggtggacagccttcttctcttaatcacaagattattttcagaatttaatctttgaggaaacgttgcgaggatatattctaagtggaacgggtcaaatcggggtaggggggcccagttttagaccgtataaggattcgtgctcaattaactaagaacacttagagtttgtaaccatgcggagggggaccctgaatgaaaggtgacccgaaacggttggaaagagctaatagggaaggnagcaactg

SEQ ID NO: 372170 - DNA, 2907 bp, Homo sapiens
gcctctttcctgaaggttgctgggagcttctgaagctttgtgtcctgtgtggctcagatgagatagcaattccgcagagtcctggaagttaaagaaggctgagttaggattgtttcctcatggtcagggaaacagccttcacatttgtatattttatgcaatatttaaggcaggattcagggacttggtattctttgggatttgcaataagaagaatattcaatatttaggcttttctaaattgaaaaatcactgccacacgttctaatgtaattgtttggtttctctatttgcattttgcggggactgccttaaaactcatttatgttttatagccttctattatagttaccattgttacatgattttatgtatagaaattggctgatctagagctttcagaaatcatactaatatgcactataaatttaaaattacttaatgtagtaatttaatgtttgcagtatgcaagggaatgtattacgtactggaaggagagaggagacaaacaccagaccctgtactcaaggagtactggtagtatcatttatcatacaagacagataagataaggtccatatgagagctataaacagatgctgtgagttcagactaaggagaatcagttcttgctgtaggtaaggggaatgctgtgtttataaagcaaatgacatggcaactggatcttgaaggatgagttagttttcaaaaggtacatgggaaatactcctcagaaaaaagccgtctttgggcagtgtcggggtctgccatgtgttgcaccgctgctgaccacagtggaagaggctccacggggcatctctgctcgagtctggggacattttcctaagtggctcaatggctctctacttcgaattggacctgggaaattcgagtttgggaaggataagtacaatcattggtttgatgggatggcgctgcttcaccagttcagaatggcaaagggcacagtgacatacaggagcaagtttctacagagtgatacatataaggccaacagtgctaaaaaccgaattgtgatctcagaatttggcacactggctctcccggatccatgcaagaatgtttttgaacgtttcatgtccaggtttgagctgcctggtaaagctgcagccatgactgacaatactaatgtcaactatgtgcggtacaagggtgattactacctctgcactgagaccaactttatgaataaagtggacattgaaactctggaaaaaacagaaaaggtagattggagcaaatttattgctgtgaatggagcaactgcacatcctcattatgacccggatggaacagcatacaatatggggaactcctttgggccatatggtttctcctataaggttattcgggttcctccagagaaggtggaccttggggagacaatccatggagtccaggtgatatgttctattgcttctacagagaaagggaaaccttcttactaccatagctttggaatgacaaggaactatataattttcattgaacaacctctaaagatgaacctgtggaaaattgccacttctaaaattcggggaaaggccttttcagatgggataagctgggaaccccagtgtaatacgcggtttcatgtggtggaaaaacgcactggacagctccttccagggagatactacagcaaaccttttgttacatttcatcaaatcaatgcctttgaggaccagggctgtgttataattgatttgtgctgtcaagataatggaagaaccctagaagtttaccagttacagaatctcaggaaggctggggaagggcttgatcaggtccataattcagcagccaaatctttccctcgaaggtttgttttgcctttaaatgtcagtttgaatgcccctgagggagacaacctgagtccattgtcctatacttcagccagtgctgtgaaacaggctgatggaacgatctggtgctctcatgaaaatctacatcaggaggacctagaaaaggaaggaggcattgaatttcctcagatctactatgatcgattcagtggcaaaaagtatcatttcttttatggctgtggctttcggcatttagtgggggattctctgatcaaggttgatgtggtgaataagacactgaaggtttggagagaagatggcttttatccctcagaacctgtttttgttccagcaccaggaaccaatgaagaagatggtggggttattctttctgtggtgatcactcccaaccagaatgaaagcaattttctcctagttttggatgccaagaactttgaagagctgggccgagcagaggtacctgtgcagatgccttatgggttccatggtaccttcatacccatctgatgggacaaccacaaggtctggaaactaggtttaaaataagtgtgcacttggacataaagactggagaaataaacactgaggactccaaaaggggggcaaggaggaagaggggcaggggttaaaaagctacctattgaatactatgttccctatttgggtgatgggttcgttagaagtccaaacctcagcagcacacaatatactcatgtaacaagcctgcacatgtaccccagaatctaaaataaaaataaaaagaaaaacaaagaatgtactctatacaaaagacagagcataaagggcaccgtacctcccaaaccaatgtcccaaatagacatttagtttaaaaatttctgttaaaaacagaattcactatttccttgccactgccaagtcacgccatggcagaggctcgagtgcatacaagcttcggttttacccttaatacaccatcatgaccaatggaggcattgctgctggaggtgtcatggccattaacactactttataagaggtgcggaagactgccctcactcatcatggcctagcatgtgca

SEQ ID NO: 372171 - DNA, 777 bp, Homo sapiens
acagtccaggcagttctgtgcgtgttcactgtttagtagtactcaaaactgccagtgtgagaggatttggaaatcactggatctgctcaatacaaaaatgttttttcgagtctttctccattttatcaggagtcattctgccactgcagtggatttccttcctgtgatggtgcaccggctcccagttttcaaaaggtacatgggaaatactcctcagaaaaaagccgtctttgggcagtgtcggggtctgccatgtgttgcaccgctgctgaccacagtggaagaggctccacggggcatctctgctcgagtctggggacattttcctaagtggctcaatggctctctacttcgaattggacctgggaaattcgagtttgggaaggataagtacaatcattggtttgatgggatggcgctgcttcaccagttcagaatggcaaagggcacagtgacatacaggagcaagtttctacagagtgatacatataaggccaacagtgctaaaaaccgaattgtgatctcagaatttggcacactggctctcccggatccatgcaagaatgtttttgaacgtttcatgtccaggtttgagctgcctggtaaagctgcaggtgatagtgacgattatttaaactattacgatatataaccatctatacaaacataaatcttgaaaatagatttttttgtactgtgagaggatgttgaaactgctttctccctttgagtgtgtgcttagcgtcgtctacagtaagctgtggtacttaaataact

SEQ ID NO: 372172 - DNA, 1197 bp, Homo sapiens
gcgacgggtgtgcaccgcctctcgacttccggttcacccagcatttcctcttccctgttttctttcgtcgtcgtgggtgggaatgtcgcctaagtggttccgggttggtggatgaccttgagccctcaggaacgagatggcggttctctggaggctgagtgccgtttgcggtgccctaggaggccgagctctgttgcttcgaactccagtggtcagacctgctcatatctcagcatttcttcaggaccgacctatcccagaatggtgtggagtgcagcacatacacttgtcaccgagccaccattctggctccaaggctgcatctctccactggactagcgagagggttgtcagtgttttgctcctgggtctgcttccggctgcttatttgaatccttgctctgcgatggactattccctggctgcagccctcactcttcatggtcactggggccttggacaagttgttactgactatgttcatggggatgccttgcagaaagctgccaaggcagggcttttggcactttcagctttaacctttgctgggctttgctatttcaactatcacgatgtgggcatctgcaaagctgttgccatgctgtggaagctctgacctttttgacttcatactttgaagaattgatgtatgcctctttgcctctgctttgtcatgccattaagctcacaataaggaagaaataacagataagtccattggtggacagccttcttctcttaatcacaagattattttcagaatttaatctttgaggaaaaggtttgagaggaattatatctaagttgtgagactgagttctatattctggtgagttaatggggttgcctcccagcttcttataagactcacagtataactaaacatgatatatcagcttttgcctttcaatttatcaatctcttaaagagaatccaactttattacgattagtatatgatcaaacttccatatttgccttgggaataatggacaaagggaaatacttacaacttgcgaatagacggttatttcgaaaatccttttaaagtgttcacctatgtgggtcttttcgggaacttacatggaagggggccttaattaaaccgcgaaacgggggtggaaaaacctaggggcgattaaaaacggggttccatctttccgcaaaaatagggcgggatattttataaacgcccggt

SEQ ID NO: 372173 - DNA, 1013 bp, Homo sapiens
  misc_feature (911)..(911): n is a, c, g, or t
  misc_feature (923)..(923): n is a, c, g, or t
  misc_feature (951)..(951): n is a, c, g, or t
gcgacgggtgtgcaccgcctctcgacttccggttcacccagcatttcctcttccctgttttctttcgtcgtcgtgggtgggaatgtcgcctaagtggttccgggttggtggatgaccttgagccctcaggaacgagatggcggttctctggaggctgagtgccgtttgcggtgccctaggaggccgagctctgttgcttcgaactccagtggtcagacctgctcatatctcagcatttcttcaggaccgacctatcccagaatggtgtggagtgcagcacatacacttgtcaccgagccaccattctggctccaaggctgcatctctccactggactagcgagagggttgtcagtgttttgctcctgggtctgcttccggctgcttatttgaatccttgctctgcgatggactattccctggctgcagccctcactcttcatggtcactggggccttggacaagttgttactgactatgttcatggggatgccttgcagaaagctgccaaggcagggcttttggcactttcagctttaacctttgctgggctttgctatttcaactatcacgatgtgggcatctgcaaagctgttgccatgctgtggaagctctgacctttttgacttcatactttgaagaattgatgtatgcctctttgcctctgctttgtcatgccattaagctcacaataaggaagaaataacagataagtccattggtggacagccttcttctcttaatcacaagattattttcagaatttaatctttgaggaaaaggtttgagaggaattatatctaagttgtgagactgagttctatattctgggagtaaggggtgctccaagtttatagaatccaggttaataaatgttttagtttgcttcaatttaatttagagaacactttngatgtttgtcancacttgggggaagggaagagatttttgnaactggaaaaggtgtgaacgctaagaacggggtatgagaaggggttaaaaaggggagggggg

SEQ ID NO: 372174 - DNA, 1420 bp, Homo sapiens
  misc_feature (24)..(24): n is a, c, g, or t
  misc_feature (31)..(31): n is a, c, g, or t
  misc_feature (1320)..(1320): n is a, c, g, or t
aagcagtggtatcaaccagagtgnccattanggcggagccctcaggaacgagatggcggttctctggaggctgagtgccgtttgcggtgccctaggaggccgagctctgttgcttcgaactccagtggtcagacctgctcatatctcagcatttcagaatggtgtggagtgcagcacatacacttgtcaccgagccaccattctggctccaaggctgcatctctccactggactagcgagagggttgtcagtgttttgctcctgggtctgcttccggctgcttatttgaatccttgctctgcgatggactattccctggctgcagccctcactcttcatggtcactggggccttggacaagttgttactgactatgttcatggggatgccttgcagaaagctgccaaggcagggcttttggcactttcagctttaacctttgctgggctttgctatttcaactatcacgatgtgggcatctgcaaagctgttgccatgctgtggaagctctgacctttttgacttcatactttgaagaattgatgtatgcctctttgcctctgctttgtcatgccattaagctcacaataaggaagaaataacagataagtccattggtggacagccttcttctcttaatcacaagattattttcagaatttaatctttgaggaaaaggtttgagaggaattatatctaagttgtgagactgagttctatattctggtgagttaatggggttgcctcccagcttcttataagactcacagtataactaaacatgatatatcagcttttgcctttcaatttatcaatctcttaaagagaatccaactttattacgattagtatatgatcaaacttccatatttgccttgggaataatggacaaagggaaatactcttaattcatgaataaaaactttgcagaaaattagacagtgtttaattttcgaaaacttccctctctagacagtagataccacctactgatggttacatatactagggaaattttaaaattaggaaatgctgatagctcatattataaatttctaaatcctaggaagaaacgcttggagtgcttctgaatatacagaagttccatttaagggcaagtttccctgtagatgtatcaaaatactaccaactgtaaattgagatttaattcccaaatgtattctacttgttctaaaacaatctgtccacaaatataaaactataagtaataaattgttattttcgcacaatgggaatctctaatgtgaaaatgtattctatgaaaataatttttttaaataaaaggtgtttcttcccccnaagaaagttatccctccaactttcccccatggaggcggtccgcgggtgttatccccggagagagggagatcaaaaaaccttccgggggagaggaaaacaa

SEQ ID NO: 372175 - DNA, 1583 bp, Homo sapiens
  misc_feature (1483)..(1483): n is a, c, g, or t
caactatactggacctacttggggctggggtttcgacgacgacgcggagtagtgagcaggaagggcgatactcttagcatcaatcaatatagcgagtccgaattgccggatcgctacgcggactgggctgcggacgccggacagtggtaagtgctgtggcatacggtgtcgagagatcagtgcatgaatagctggttgggttctcaaatcccagttagatacagcacctggtgcatatctgcagcgttctctaacacgaagatccgagactggtacgctcactagaatggtgttgtgacgtgacatgctatacaacaactgtgttcaccacggacgcacgactccagtttcttggaatactcaagctggctccaaggctgcatctctccactggactagcgagagggttgtcagtgttttgctcctgggtctgcttccggctgcttatttgaatccttgctctgcgatggactattccctggctgcagccctcactcttcatggtcactggggccttggacaagttgttactgactatgttcatggggatgccttgcagaaagctgccaaggcagggcttttggcactttcagctttaacctttgctgggctttgctatttcaactatcacgatgtgggcatctgcaaagctgttgccatgctgtggaagctctgacctttttgacttcatactttgaagaattgatgtatgcctctttgcctctgctttgtcatgccattaagctcacaataaggaagaaataacagataagtccattggtggacagccttcttctcttaatcacaagattattttcagaatttaatctttgaggaaaaggtttgagaggaattatatctaagttgtgagactgagttctatattctggtgagttaatggggttgcctcccagcttcttataagactcacagtataactaaacatgatatatcagcttttgcctttcaatttatcaatctcttaaagagaatccaactttattacgattagtatatgatcaaacttccatatttgccttgggaataatggacaaagggaaatactcttaattcatgaataaaaactttgcagaaaattagacagtgtttaattttcgaaaacttccctctctagacagtagataccacctactgatggttacatatactagggaaattttaaaattaggaaatgctgatagctcatattataaatttctaaatcctaggaagaaacgcttggagtgcttctgaatatacagaagttccatttaagggcaagtttccctgtagatgtatcaaaatactaccaactgtaaattgagatttaattcccaaatgtattctacttgttctaaaacaatctgtccacaaatataaaactataagtaataaattgttattttcgcacaatgggaatctctaatgtgaaaatgtattctatgaaaataatttttttaaataaaaggtgtttcttcccccnaagaaagttatccctccaactttcccccatggaggcggtccgcgggtgttatccccggagagagggagatcaaaaaaccttccgggggagaggaaaacaa

SEQ ID NO: 372176 - DNA, 1637 bp, Homo sapiens
  misc_feature (1537)..(1537): n is a, c, g, or t
gcgacgggtgtgcaccgcctctcgacttccggttcacccagcatttcctcttccctgttttctttcgtcgtcgtgggtgggaatgtcgcctaagtggttccgggttggtggatgaccttgagccctcaggaacgagatggcggttctctggaggctgagtgccgtttgcggtgccctaggaggccgagctctgttgcttcgaactccagtggtcagacctgctcatatctcagcatttcttcaggaccgacctatcccagaatggtgtggagtgcagcacatacacttgtcaccgagccaccattctggctccaaggctgcatctctccactggactagcgagagggttgtcagtgttttgctcctgggtctgcttccggctgcttatttgaatccttgctctgcgatggactattccctggctgcagccctcactcttcatggtcactgatgcatagaagtctcctctgccagatccttctcctcttgtctgacctcgagatgacaaaatctccagggctgagtcatggccttcttaatttctccatctgtacccttttttaggggccttggacaagttgttactgactatgttcatggggatgccttgcagaaagctgccaaggcagggcttttggcactttcagctttaacctttgctgggctttgctatttcaactatcacgatgtgggcatctgcaaagctgttgccatgctgtggaagctctgacctttttgacttcatactttgaagaattgatgtatgcctctttgcctctgctttgtcatgccattaagctcacaataaggaagaaataacagataagtccattggtggacagccttcttctcttaatcacaagattattttcagaatttaatctttgaggaaaaggtttgagaggaattatatctaagttgtgagactgagttctatattctggtgagttaatggggttgcctcccagcttcttataagactcacagtataactaaacatgatatatcagcttttgcctttcaatttatcaatctcttaaagagaatccaactttattacgattagtatatgatcaaacttccatatttgccttgggaataatggacaaagggaaatactcttaattcatgaataaaaactttgcagaaaattagacagtgtttaattttcgaaaacttccctctctagacagtagataccacctactgatggttacatatactagggaaattttaaaattaggaaatgctgatagctcatattataaatttctaaatcctaggaagaaacgcttggagtgcttctgaatatacagaagttccatttaagggcaagtttccctgtagatgtatcaaaatactaccaactgtaaattgagatttaattcccaaatgtattctacttgttctaaaacaatctgtccacaaatataaaactataagtaataaattgttattttcgcacaatgggaatctctaatgtgaaaatgtattctatgaaaataatttttttaaataaaaggtgtttcttcccccnaagaaagttatccctccaactttcccccatggaggcggtccgcgggtgttatccccggagagagggagatcaaaaaaccttccgggggagaggaaaacaa

SEQ ID NO: 372177 - DNA, 2749 bp, Homo sapiens
gcgacgggtgtgcaccgcctctcgacttccggttcacccagcatttcctcttccctgttttctttcgtcgtcgtgggtgggaatgtcgcctaagtggttccgggttggtggatgaccttgagccctcaggaacgagatggcggttctctggaggctgagtgccgtttgcggtgccctaggaggccgagctctgttgcttcgaactccagtggtcagacctgctcatatctcagcatttcttcaggaccgacctatcccagaatggtgtggagtgcagcacatacacttgtcaccgagccaccattctggctccaaggctgcatctctccactggactagcgagagggttgtcagtgttttgctcctgggtctgcttccggctgcttatttgaatccttgctctgcgatggactattccctggctgcagccctcactcttcatggtcactgtctccagtgccagatagtccacagctgtcctctcttggaaaatcagattcatctttctctgaaatttccggactattttataaagatgaagccttggagaaagatttaaatgttttcaaaaggtacatgggaaatactcctcagaaaaaagccgtctttgggcagtgtcggggtctgccatgtgttgcaccgctgctgaccacagtggaagaggctccacggggcatctctgctcgagtctggggacattttcctaagtggctcaatggctctctacttcgaattggacctgggaaattcgagtttgggaaggataagtacaatcattggtttgatgggatggcgctgcttcaccagttcagaatggcaaagggcacagtgacatacaggagcaagtttctacagagtgatacatataaggccaacagtgctaaaaaccgaattgtgatctcagaatttggcacactggctctcccggatccatgcaagaatgtttttgaacgtttcatgtccaggtttgagctgcctggtaaagctgcagccatgactgacaatactaatgtcaactatgtgcggtacaagggtgattactacctctgcactgagaccaactttatgaataaagtggacattgaaactctggaaaaaacagaaaaggtagattggagcaaatttattgctgtgaatggagcaactgcacatcctcattatgacccggatggaacagcatacaatatggggaactcctttgggccatatggtttctcctataaggttattcgggttcctccagagaaggtggaccttggggagacaatccatggagtccaggtgatatgttctattgcttctacagagaaagggaaaccttcttactaccatagctttggaatgacaaggaactatataattttcattgaacaacctctaaagatgaacctgtggaaaattgccacttctaaaattcggggaaaggccttttcagatgggataagctgggaaccccagtgtaatacgcggtttcatgtggtggaaaaacgcactggacagctccttccagggagatactacagcaaaccttttgttacatttcatcaaatcaatgcctttgaggaccagggctgtgttataattgatttgtgctgtcaagataatggaagaaccctagaagtttaccagttacagaatctcaggaaggctggggaagggcttgatcaggtccataattcagcagccaaatctttccctcgaaggtttgttttgcctttaaatgtcagtttgaatgcccctgagggagacaacctgagtccattgtcctatacttcagccagtgctgtgaaacaggctgatggaacgatctggtgctctcatgaaaatctacatcaggaggacctagaaaaggaaggaggcattgaatttcctcagatctactatgatcgattcagtggcaaaaagtatcatttcttttatggctgtggctttcggcatttagtgggggattctctgatcaaggttgatgtggtttggagagaagatggcttttatccctcagaacctgtttttgttccagcaccaggaaccaatgaagaagatggtggggttattctttctgtggtgatcactcccaaccagaatgaaagcaattttctcctagttttggatgccaagaactttgaagagctgggccgagcagaggtacctgtgcagatgccttatgggttccatggtaccttcatacccatctgatgggacaaccacaaggtctggaaactaggtttaaaataagtgtgcacttggacataaagactggagaaataaacactgaggactccaaaaggggggcaaggaggaagaggggcaggggttaaaaagctacctattgaatactatgttccctatttgggtgatgggttcgttagaagtccaaacctcagcagcacacaatatactcatgtaacaagcctgcacatgtaccccagaatctaaaataaaaataaaaagaaaaacaaagaatgtactctatacaaaagacagagcataaagggcaccgtacctcccaaaccaatgtcccaaatagacatttagtttaaaaatttctgttaaaaacagaattcactatttccttgccactgccaagtcacgccatggcagaggctcgagtgcatacaagcttcggttttacccttaatacaccatcatgaccaatggaggcattgctgctggaggtgtcatggccattaacactactttataagaggtgcggaagactgccctcactcatcatggcctagcatgtgca

SEQ ID NO: 372178 - DNA, 2386 bp, Homo sapiens
gcgacgggtgtgcaccgcctctcgacttccggttcacccagcatttcctcttccctgttttctttcgtcgtcgtgggtgggaatgtcgcctaagtggttccgggttggtggatgaccttgagccctcaggaacgagatggcggttctctggaggctgagtgccgtttgcggtgccctaggaggccgagctctgttgcttcgaactccagtggtcagacctgctcatatctcagcatttcttcaggaccgacctatcccagaatggtgtggagtgcagcacatacacttgtcaccgagccaccattctggctccaaggctgcatctctccactggactagcgagagggttgtcagtgttttgctcctgggtctgcttccggctgcttatttgaatccttgctctgcgatggactattccctggctgcagccctcactcttcatggtcactgtctccagtgccagatagtccacagctgtcctctcttggaaaatcagattcatctttctctgaaatttccggactattttataaagatgaagccttggagaaagatttaaatgttttcaaaaggtacatgggaaatactcctcagaaaaaagccgtctttgggcagtgtcggggtctgccatgtgttgcaccgctgctgaccacagtggaagaggctccacggggcatctctgctcgagtctggggacattttcctaagtggctcaatggctctctacttcgaattggacctgggaaattcgagtttgggaaggataagtacaatcattggtttgatgggatggcgctgcttcaccagttcagaatggcaaagggcacagtgacatacaggagcaagtttctacagagtgatacatataaggccaacagtgctaaaaaccgaattgtgatctcagaatttggcacactggctctcccggatccatgcaagaatgtttttgaacgtttcatgtccaggtttgagctgcctggtaaagctgcagccatgactgacaatactaatgtcaactatgtgcggtacaagggtgattactacctctgcactgagaccaactttatgaataaagtggacattgaaactctggaaaaaacagaaaaggtagattggagcaaatttattgctgtgaatggagcaactgcacatcctcattatgacccggatggaacagcatacaatatggggaactcctttgggccatatggtttctcctataaggttattcgggttcctccagagaaggtggaccttggggagacaatccatggagtccaggtgatatgttctattgcttctacagagaaagggaaaccttcttactaccatagctttggaatgacaaggaactatataattttcattgaacaacctctaaagatgaacctgtggaaaattgccacttctaaaattcggggaaaggccttttcagatgggataagctgggaaccccagtgtaatacgcggtttcatgtggtggaaaaacgcactggacagctccttccagggagatactacagcaaaccttttgttacatttcatcaaatcaatgcctttgaggaccagggctgtgttataattgatttgtgctgtcaagataatggaagaaccctagaagtttaccagttacagaatctcaggaaggctggggaagggcttgatcaggtccataattcagcagccaaatctttccctcgaaggtttgttttgcctttaaatgtcagtttgaatgcccctgagggagacaacctgagtccattgtcctatacttcagccagtgctgtgaaacaggctgatggaacgatctggtgctctcatgaaaatctacatcaggaggacctagaaaaggaaggaggcattgaatttcctcagatctactatgatcgattcagtggcaaaaagtatcatttcttttatggctgtggctttcggcatttagtgggggattctctgatcaaggttgatgtggtgaataagacactgaaggtttggagagaagatggcttttatccctcagaacctgtttttgttccagcaccaggaaccaatgaagaagatggtggggttattctttctgtggtgatcactcccaaccagaatgaaagcaattttctcctagttttggatgccaagaactttgaagagctgggccgagcagaggtacctgtgcagatgccttatgggttccatggtaccttcatacccatctgatgggacaaccacaaggaaacttttccaagcctgttattaatcagtgacttgtcctgcttttcatcatatacagtgatgatttttctcatatagagtggagctgtcctctccagtacctggaacaatgccagccacatagtagatgcccaataaatatttagtgaaagagtga

SEQ ID NO: 372179 - DNA, 725 bp, Homo sapiens
gcgacgggtgtgcaccgcctctcgacttccggttcacccagcatttcctcttccctgttttctttcgtcgtcgtgggtgggaatgtcgcctaagtggttccgggttggtggatgaccttgagccctcaggaacgagatggcggttctctggaggctgagtgccgtttgcggtgccctaggaggccgagctctgttgcttcgaactccagtggtcagacctgctcatatctcagcatttcttcaggaccgacctatcccagaatggtgtggagtgcagcacatacacttgtcaccgagccaccattctggctccaaggctgcatctctccactggactagcgagagggttgtcagtgttttgctcctgggtctgcttccggctgcttatttgaatccttgctctgcgatggactattccctggctgcagccctcactcttcatggtcactgggcaagtatagcaattccaaatatagttgtctgctcagtttgtttgctgtgagcttgtcttatgtattatatatgagggagaagttgattgaaatgccctaaatttgttgaaaactttaaaatatatatattcgatttccgtatctaatagcattttgaatgtagcctgtcaaactgaatttctgatctcccctaatctgttcctcctgcactcttgccccatctgaattaatggcatttccagttttctctttgttcaagtctaaacctggtaa

SEQ ID NO: 372180 - DNA, 2185 bp, Homo sapiens
acagtccaggcagttctgtgcgtgttcactgtttagtagtactcaaaactgccagtgtgagaggatttggaaatcactggatctgctcaatacaaaaatgttttttcgagtctttctccattttatcaggagtcattctgccactgcagtggatttccttcctgtgatggtgcaccggctcccaggtacaatcattggtttgatgggatggcgctgcttcaccagttcagaatggcaaagggcacagtgacatacaggagcaagtttctacagagtgatacatataaggccaacagtgctaaaaaccgaattgtgatctcagaatttggcacactggctctcccggatccatgcaagaatgtttttgaacgtttcatgtccaggtttgagctgcctggtaaagctgcagccatgactgacaatactaatgtcaactatgtgcggtacaagggtgattactacctctgcactgagaccaactttatgaataaagtggacattgaaactctggaaaaaacagaaaaggtagattggagcaaatttattgctgtgaatggagcaactgcacatcctcattatgacccggatggaacagcatacaatatggggaactcctttgggccatatggtttctcctataaggttattcgggttcctccagagaaggtggaccttggggagacaatccatggagtccaggtgatatgttctattgcttctacagagaaagggaaaccttcttactaccatagctttggaatgacaaggaactatataattttcattgaacaacctctaaagatgaacctgtggaaaattgccacttctaaaattcggggaaaggccttttcagatgggataagctgggaaccccagtgtaatacgcggtttcatgtggtggaaaaacgcactggacagctccttccagggagatactacagcaaaccttttgttacatttcatcaaatcaatgcctttgaggaccagggctgtgttataattgatttgtgctgtcaagataatggaagaaccctagaagtttaccagttacagaatctcaggaaggctggggaagggcttgatcaggtccataattcagcagccaaatctttccctcgaaggtttgttttgcctttaaatgtcagtttgaatgcccctgagggagacaacctgagtccattgtcctatacttcagccagtgctgtgaaacaggctgatggaacgatctggtgctctcatgaaaatctacatcaggaggacctagaaaaggaaggaggcattgaatttcctcagatctactatgatcgattcagtggcaaaaagtatcatttcttttatggctgtggctttcggcatttagtgggggattctctgatcaaggttgatgtggtgaataagacactgaaggtttggagagaagatggcttttatccctcagaacctgtttttgttccagcaccaggaaccaatgaagaagatggtggggttattctttctgtggtgatcactcccaaccagaatgaaagcaattttctcctagttttggatgccaagaactttgaagagctgggccgagcagaggtacctgtgcagatgccttatgggttccatggtaccttcatacccatctgatgggacaaccacaaggtctggaaactaggtttaaaataagtgtgcacttggacataaagactggagaaataaacactgaggactccaaaaggggggcaaggaggaagaggggcaggggttaaaaagctacctattgaatactatgttccctatttgggtgatgggttcgttagaagtccaaacctcagcagcacacaatatactcatgtaacaagcctgcacatgtaccccagaatctaaaataaaaataaaaagaaaaacaaagaatgtactctatacaaaagacagagcataaagggcaccgtacctcccaaaccaatgtcccaaatagacatttagtttaaaaatttctgttaaaaacagaattcactatttccttgccactgccaagtcacgccatggcagaggctcgagtgcatacaagcttcggttttacccttaatacaccatcatgaccaatggaggcattgctgctggaggtgtcatggccattaacactactttataagaggtgcggaagactgccctcactcatcatggcctagcatgtgca

SEQ ID NO: 372181 - DNA, 2171 bp, Homo sapiens
acagtccaggcagttctgtgcgtgttcactgtttagtagtactcaaaactgccagtgtgagaggatttggaaatcactggatctgctcaatacaaaaatgttttttcgagtctttctccattttatcaggagtcattctgccactgcagtggatttccttcctgtgatggtgcaccggctcccagttttcaaaaggtacatgggaaatactcctcagaaaaaagccgtctttgggcagtgtcggggtctgccatgtgttgcaccgctgctgaccacagtggaagaggctccacggggcatctctgctcgagtctggggacattttcctaagtggctcaatggctctctacttcgaattggacctgggaaattcgagtttgggaaggataagtacaatcattggtttgatgggatggcgctgcttcaccagttcagaatggcaaagggcacagtgacatacaggagcaagtttctacagagtgatacatataaggccaacagtgctaaaaaccgaattgtgatctcagaatttggcacactggctctcccggatccatgcaagaatgtttttgaacgtttcatgtccaggtttgagctgcctggtaaagctgcaggtttctcctataaggttattcgggttcctccagagaaggtggaccttggggagacaatccatggagtccaggtgatatgttctattgcttctacagagaaagggaaaccttcttactaccatagctttggaatgacaaggaactatataattttcattgaacaacctctaaagatgaacctgtggaaaattgccacttctaaaattcggggaaaggccttttcagatgggataagctgggaaccccagtgtaatacgcggtttcatgtggtggaaaaacgcactggacagctccttccagggagatactacagcaaaccttttgttacatttcatcaaatcaatgcctttgaggaccagggctgtgttataattgatttgtgctgtcaagataatggaagaaccctagaagtttaccagttacagaatctcaggaaggctggggaagggcttgatcaggtccataattcagcagccaaatctttccctcgaaggtttgttttgcctttaaatgtcagtttgaatgcccctgagggagacaacctgagtccattgtcctatacttcagccagtgctgtgaaacaggctgatggaacgatctggtgctctcatgaaaatctacatcaggaggacctagaaaaggaaggaggcattgaatttcctcagatctactatgatcgattcagtggcaaaaagtatcatttcttttatggctgtggctttcggcatttagtgggggattctctgatcaaggttgatgtggtgaataagacactgaaggtttggagagaagatggcttttatccctcagaacctgtttttgttccagcaccaggaaccaatgaagaagatggtggggttattctttctgtggtgatcactcccaaccagaatgaaagcaattttctcctagttttggatgccaagaactttgaagagctgggccgagcagaggtacctgtgcagatgccttatgggttccatggtaccttcatacccatctgatgggacaaccacaaggtctggaaactaggtttaaaataagtgtgcacttggacataaagactggagaaataaacactgaggactccaaaaggggggcaaggaggaagaggggcaggggttaaaaagctacctattgaatactatgttccctatttgggtgatgggttcgttagaagtccaaacctcagcagcacacaatatactcatgtaacaagcctgcacatgtaccccagaatctaaaataaaaataaaaagaaaaacaaagaatgtactctatacaaaagacagagcataaagggcaccgtacctcccaaaccaatgtcccaaatagacatttagtttaaaaatttctgttaaaaacagaattcactatttccttgccactgccaagtcacgccatggcagaggctcgagtgcatacaagcttcggttttacccttaatacaccatcatgaccaatggaggcattgctgctggaggtgtcatggccattaacactactttataagaggtgcggaagactgccctcactcatcatggcctagcatgtgca

SEQ ID NO: 372182 - DNA, 334 bp, Homo sapiens
tatgtccacataaaaacttgaacaggggctgggcatggtggctcacacctgtaatctcagcactttgggaggccaaggcaggtggatctccggaggtcaggagttcaaaaccagcctggccaacatggtaaaatgctgtctctactaaaaatacaaaaattagcctgatgtggtcatgtgcgcctgtaatcccagctactcgggaggctgaggcaggagaattgcttgaaaccagtagggatcccaggaggtagagcttgcagtgagctgagattgcgccacggcactgcagcctagcctgggtgacagagtgaggcttcctctcaaaaacaaa

SEQ ID NO: 372183 - DNA, 280 bp, Homo sapiens
  misc_feature (62)..(62): n is a, c, g, or t
taaatacaacatccaagcttgggctacgtagcaagaccccatctctttaaaaaaaaaaaaanttttatttaaaaaaaaattttttttaagacagtctcgctgggttgcccaggctgaagtgcagtggcgcggtcttgactcactgcaacctccgccttctgggttgaagtgattcttctgcctcagcgtcccaaagtgctgggattacaggcctagtcatagccacttaataatagcaggactttgggcaaatttcagtaaatgggtatttgaactaaaa

SEQ ID NO: 372184 - DNA, 467 bp, Homo sapiens
cacttcattaaatttcattttcttttctcttcccaccagggctattagctccagattgtgaaatcatacaggaagtgggaaaactctatccactggagatagtatttggaatgaatggaagaatatgggttaaggcaaaaaccatccagcagactttaattttggcaaacattttagaagcttgtgaacacatgacgtcagatcaaagaaaacagatcttctccagattggcagaaagttgatataggtggacttttttacaggtcagttgaggcaaaaaactatgggttttttcaggtgaacctcccccatttaaatactcagaagataaggtgtgaatgtatgtattattagagtccgaaagtatttttataagttactggttttcacccacgcttttgtgggagagaaaatcattgcaaaatcattttttttgttcggtacaataaagtttactaaaaaacaaa

SEQ ID NO: 372185 - DNA, 1101 bp, Homo sapiens
gagggagaaaggaaacatttaggctaggtcgaggctggtgtgcccgcgatggccgaacctgcgtctgtcgcggctgaatctctcgcgggcagcagggcgcgcgctgcacgcacagtactaggtcaggtggtgctcccgggtgaggagctgctcctgccggaacaggaggacgcggaaggccctgggggtgcagtggagcgaccgttgagcctgaatgctagagcgtgctcgcgggtgcgcgttgtatgcggtccgggccttcggcgctgtggggaccgcctgctggtcaccaagtgcggccgcctccgtcacaaggagcccggcagtggcagcggcggcggtgtttactgggtggactctcagcagaagcggtatgttccagtaaaaggagaccatgtgattggcatagtgacagctaaatctggagatatattcaaagttgatgttggagggagtgagccagcttctttgtcttacttgtcatttgaaggtgcaactaaaagaaacagaccaaatgtgcaggttggagatctcatctatggccagtttgtggttgctaataaagacatggaaccagagatggtctgtattgacagctgtggacgagccaatggaatgggtgtcattggacaggatggtctgctttttaaagtgactctgggcttaattagaaagctattagctccagattgtgaaatcatacaggaagtgggaaaactctatccactggagatagtatttggaatgaatggaagaatatgggttaaggcaaaaaccatccagcagactttaattttggcaaacattttagaagcttgtgaacacatgacgtcagatcaaagaaaacagatcttctccagattggcagaaagttgatataggtggacttttttacaggtcagttgaggcaaaaaactatgggttttttcaggtgaacctcccccatttaaatactcagaagataaggtgtgaatgtatgtattattagagtccgaaagtatttttataagttactggttttcacccacgcttttgtgggagagaaaatcattgcaaaatcattttttttgttcggtacaataaagtttactaaaaaacaaa

SEQ ID NO: 372186 - DNA, 1236 bp, Homo sapiens
gagggagaaaggaaacatttaggctaggtcgaggctggtgtgcccgcgatggccgaacctgcgtctgtcgcggctgaatctctcgcgggcagcagggcgcgcgctgcacgcacagtactaggtcaggtggtgctcccgggtgaggagctgctcctgccggaacaggaggacgcggaaggccctgggggtgcagtggagcgaccgttgagcctgaatgctagagcgtgctcgcgggtgcgcgttgtatgcggtccgggccttcggcgctgtggggaccgcctgctggtcaccaagtgcggccgcctccgtcacaaggagcccggcagtggcagcggcggcggtgtttactgggtggactctcagcagaagcggtatgttccagtaaaaggagaccatgtgattggcatagtgacagctaaatctggagatatattcaaagttgatgttggagggagtgagccagcttctttgtcttacttgtcatttgaaggtgcaactaaaagaaacagaccaaatgtgcaggttggagatctcatctatggccagtttgtggttgctaataaagacatggaaccagagatggtctgtattgacagctgtggacgagccaatggaatgggtgtcattggacaggatggtctgctttttaaagtgactctgggcttaattagaaagctattagctccagattgtgaaatcatacaggaagtgggaaaactctatccactggagatagtatttggaatgaatggaagaatatgggttaaggcaaaaaccatccagcagactttaattttggcaaacattttagaagcttgtgaacacatgacgtcagatcaaagaaaacagatcttctccagattggcagaaagttgatataggtggacttttttacagggtctggctgtgttacccaggctggagtgcagtggtacaatcatagctcactacagcctcaaattcctgggctcaagtgatcctcctacctcagcctcctgagtagctgggactacaggtacaggccaccatacctggctaatttttaattttttagaggcagggtcttcctatattgcctaggctagtcttgaactcctggcctcaagtgatcctcttgcctcggcctcccaagatgctgggattatatgcaggagccactgtgcccagcctaatagtagggaattcttggttaacattttcagaggactagagttagaagtttcaggtaggaacctc

SEQ ID NO: 372187 - DNA, 928 bp, Homo sapiens
cggaaacggtgtttggtggagcccgcgatggccgaacctgcgtctgtcgcggctgaatctctcgcgggcagcagggcgcgcgctgcacgcacagtactaggtcaggtggtgctcccgggtgaggagctgctcctgccggaacaggaggacgcggaaggccctgggggtgcagtggagcgaccgttgagcctgaatgctagagcgtgctcgcgggtgcgcgttgtatgcggtccgggccttcggcgctgtggggaccgcctgctggtcaccaagtgcggccgcctccgtcacaaggagcccggcagtggcagcggcggcggtgtttactgggtggactctcagcagaagcggtatgttccagtaaaaggagaccatgtgattggcatagtgacagctaaatctggagatatattcaaagttgatgttggagggagtgagccagcttctttgtcttacttgtcatttgaaggtgcaactaaaagaaacagaccaaatgtgcaggctattagctccagattgtgaaatcatacaggaagtgggaaaactctatccactggagatagtatttggaatgaatggaagaatatgggttaaggcaaaaaccatccagcagactttaattttggcaaacattttagaagcttgtgaacacatgacgtcagatcaaagaaaacagatcttctccagattggcagaaagttgatataggtggacttttttacaggtcagttgaggcaaaaaactatgggttttttcaggtgaacctcccccatttaaatactcagaagataaggtgtgaatgtatgtattattagagtccgaaagtatttttataagttactggttttcacccacgcttttgtgggagagaaaatcattgcaaaatcattttttttgttcggtacaataaagtttactaaaaaacaaa

SEQ ID NO: 372188 - DNA, 2353 bp, Homo sapiens
ggttttggttaatatactaaatagcatagaagagttttctatgcttagctcctaggaaatgattttagcaaaataagacttggccagatttggattcagaaatcctcatagtgttatttatataatgataaaactcaaaaatatcctgtaacatgaaatatgtgactaaagttgtgaaatgtatcatgctgtttgaagtagacaaaagtatattacaaagtggcatataagctataataactataaaataattttgtgattataacagtaagccaggttcaccagaggaaatgtggaatacctaagtataaagcagcaaagaaatgtcacctgtagtcccattattcagcgggtgagtatataacaacgaaatactttttcatttaccaagtattgtgttttgcatggattaactcctttattctaactgcagaagacacttatcctcataattgaaactgaggcacagaatttaacttggcctacattctctatattcatcaaattgaaattatagttattatagcttatatgccactttgtaatatacttttgtctacttcaaacagcatgatacatttcacaactttagtcacatatttcatgttacaggatatttttgagttttatcattatataaataacactatgaggatttctgaatccaaatctggccaagtcttattttgctaaaatcatttcctaggagctaagcatagaaaactcttctatgctatttagtatattaaccaaaacctttagaggtaaagagactgccaggtgatccacatcagtgattcttggtttctagacctctgagaatatgtgagatacagatcccctgaagcctatccatagaaagtcctttttggatcaaagagattatagaactctatttgttgataaagaccaaggagcttcgtgtgtttctaatgttttctaaggactggatggtttttagttcaatagcttttaggggtacaagtggttttggattacacggatgaattgtatagtggtgaagtctgagattttggtgtaccaatcacctgagtactatatattgtacccagtatgtagtttatccttcccccttccctgttccgggtctccagtatctgttataccactctgtgtgcttacctgtagcttagctcccacttaaagtgggaacatttggtatttggttttccattcctgagttacttcactaagaataatagcttccaatactatccaagttgctgcaaaagacattttttatggctaatattccatgggatatatataccacactttatccattcattggttgatgggtacttaggttggtcccatatcttttattatgaactgtctagccagtttttaaatagaaaagtactgattaggtgaacagttccttaggaattaaattgtgaaggggaggggacacagcagagaagtaatctgttggttcttttgagatattgaatacatgtcccaaatttgctagctgcttaactagcaagttaacccaaactgtcagagtaactgaagcaaatatgtccaactgggacataaggaacatgagatttgtgtaataagtaggttatctaacgtgttcatgtgtctaacactttctagctattttcaagacagacttatcaatactgtgtttgctttccaatttaatctgttacaaatacatatgaagaatctagttggtacaggctcagggaggatagaaagataggtacacagatttgtcctgttaggatcctaccattaggaaggattaggaagagaagccctccatgcccatactctgcaagggagaacaaggtaagagccacaggagggaacaaaatgctatggggactcagtagggataggtcagaacaggctggatcctgcaaagcttattactgagctgggcaacaacgagcatgatcagacaaggctggagaaagtcatacaattttatgatgccagtttagtgaatattaaactcttgatgtaaccatttaaacaatttcaagaggtctctcacaaatagatgtacaaaagttgaattagcacgtccaaagccatgtggttttgaggctaattccttgttacataattttttttttttttcccctcgagacaagagtctggctctgtcgcccaggctggatcttggctcactacaacctccgccgcccgggttcaggcgattctcctgcctcagcctcctgagtagctgagactactgggcatggtagcgcccacctgtggtcccagctacttgggaagctgaggtagggggatcaattgagcctggagtaagctgattgtgccactgccctccagcctgggcagcagagcaagg

SEQ ID NO: 372189 - DNA, 543 bp, Homo sapiens
cggaaacggtgtttggtggagcccgcgatggccgaacctgcgtctgtcgcggctgaatctctcgcgggcagcagggcgcgcgctgcacgcacagtactaggtcaggtggtgctcccgggtgaggagctgctcctgccggaacaggaggacgcggaaggccctgggggtgcagtggagcgaccgttgagcctgaatgctagagcgtgctcgcgggtgcgcgttgtatgcggtccgggccttcggcgctgtggggaccgcctgctggtcaccaagtgcggccgcctccgtcacaaggagcccggcagtggcagcggcggcggtgtttactgggtggactctcagcagaagcggtatgttccagtaaaaggagaccatgtgattggcatagtgacagctaaatctggagatatattcaaagttgatgttggagggagtgagccagcttctttgtcttacttgtcatttgaaggtgcaactaaaagaaacagaccaaatgtgcaggtaattacgggagcctttggtttcaaagaaacaaacatccat

SEQ ID NO: 372190 - DNA, 850 bp, Homo sapiens
  misc_feature (103)..(103): n is a, c, g, or t
cggcacatttattgtaaacgcttcacaaaaggcaaaatgggttacgggccccccccagagttttttatttttatatgatgaattgaaaagtggaaataagaanagagataaataataaattaaaataaaaatataatattttttttttaatgtgtttgctttccaatttaatctgttacaaatacatatgaagaatctagttggtacaggctcagggaggatagaaagataggtacacagatttgtcctgttaggatcctaccattaggaaggattaggaagagaagccctccatgcccatactctgcaagggagaacaaggtaagagccacaggagggaacaaaatgctatggggactcagtagggataggtcagaacaggctggatcctgcaaagcttattactgagctgggcaacaacgagcatgatcagacaaggctggagaaagtcatacaattttatgatgccagtttagtgaatattaaactcttgatgtaaccatttaaacaatttcaagaggtctctcacaaatagatgtacaaaagttgaattagcacgtccaaagccatgtggttttgaggctaattccttgttacataattttttttttttttcccctcgagacaagagtctggctctgtcgcccaggctggatcttggctcactacaacctccgccgcccgggttcaggcgattctcctgcctcagcctcctgagtagctgagactactgggcatggtagcgcccacctgtggtcccagctacttgggaagctgaggtagggggatcaattgagcctggagtaagctgattgtgccactgccctccagcctgggcagcagagcaagg

SEQ ID NO: 372191 - DNA, 696 bp, Homo sapiens
tgctcgctgtattggtggtgctccttgtattggtggtgctcaatgtattggtggtgctcagggaggatagaaagataggtacacagatttgtcctgttaggatcctaccattaggaaggattaggaagagaagccctccatgcccatactctgcaagggagaacaaggtaagagccacaggagggaacaaaatgctatggggactcagtagggataggtcagaacaggctggatcctgcaaagcttattactgagctgggcaacaacgagcatgatcagacaaggctggagaaagtcatacaattttatgatgccagtttagtgaatattaaactcttgatgtaaccatttaaacaatttcaagaggtctctcacaaatagatgtacaaaagttgaattagcacgtccaaagccatgtggttttgaggctaattccttgttacataattttttttttttttcccctcgagacaagagtctggctctgtcgcccaggctggatcttggctcactacaacctccgccgcccgggttcaggcgattctcctgcctcagcctcctgagtagctgagactactgggcatggtagcgcccacctgtggtcccagctacttgggaagctgaggtagggggatcaattgagcctggagtaagctgattgtgccactgccctccagcctgggcagcagagcaagg

SEQ ID NO: 372192 - DNA, 678 bp, Homo sapiens
gttcatgtgtctaacactttctagctattttcaagacagacttatcaatactgtgtttgctttccaatttaatctgttacaaatacatatgaagaatctagttggtacaggctcagggaggatagaaagataggtacacagatttgtcctgttaggatcctaccattaggaaggattaggaagagaagccctccatgcccatactctgcaagggagaacaaggtaagagccacaggagggaacaaaatgctatggggactcagtagggataggtcagaacaggctggatcctgcaaagcttattactgagctgggcaacaacgagcatgatcagacaaggctggagaaagtcatacaattttatgatgccagtttagtgaatattaaactcttgatgtaaccatttaaacaatttcaagaggtctctcacaaatagatgtacaaaagttgaattagcacgtccaaagccatgtggttttgaggctaattccttgttacataattttttttttttttcccctcgagacaagagtctggctctgtcgcccaggctggatcttggctcactacaacctccgccgcccgggttcaggcgattctcctgcctcagcctcctgagtagctgagactacaggcacgcaccaccatgcccagctaatttttgtatttttagtagag

SEQ ID NO: 372193 - DNA, 350 bp, Homo sapiens
cgggcgcccgccctccgaggggccgcgcttacccgtcgggcgagtactcgaggttgaagacggcgccgtgggtgcgggtgctgaggtacaccgagtccgcggggtggatggaaccgtagaggctagtcatggtgcgaaaattgtcccgcgccgggtccacgaacagcccgcggcccaggctgcgctctttcagccacccgaacagcctagcgccagggccgcccaggcccgcgccgaggccgtgtcggccccggctcttggccctgcagtctggcccgggccgccggcacggaggggagggaggtgacggctctcccggggcggaggcagttgaggactccggagctcca

SEQ ID NO: 372194 - DNA, 1080 bp, Homo sapiens
cggaaacggtgtttggtggagcccgcgatggccgaacctgcgtctgtcgcggctgaatctctcgcgggcagcagggcgcgcgctgcacgcacagtactaggtcaggtggtgctcccgggtgaggagctgctcctgccggaacaggaggacgcggaaggccctgggggtgcagtggagcgaccgttgagcctgaatgctagagcgtgctcgcgggtgcgcgttgtatgcggtccgggccttcggcgctgtggggaccgcctgctggtcaccaagtgcggccgcctccgtcacaaggagcccggcagtggcagcggcggcggtgtttactgggtggactctcagcagaagcggtatgttccagtaaaaggagaccatgtgattggcatagtgacagctaaatctggagatatattcaaagttgatgttggagggagtgagccagcttctttgtcttacttgtcatttgaaggtgcaactaaaagaaacagaccaaatgtgcaggttggagatctcatctatggccagtttgtggttgctaataaagacatggaaccagagatggtctgtattgacagctgtggacgagccaatggaatgggtgtcattggacaggatggtctgctttttaaagtgactctgggcttaattagaaagctattagctccagattgtgaaatcatacaggaagtgggaaaactctatccactggagatagtatttggaatgaatggaagaatatgggttaaggcaaaaaccatccagcagactttaattttggcaaacattttagaagcttgtgaacacatgacgtcagatcaaagaaaacagatcttctccagattggcagaaagttgatataggtggacttttttacaggtcagttgaggcaaaaaactatgggttttttcaggtgaacctcccccatttaaatactcagaagataaggtgtgaatgtatgtattattagagtccgaaagtatttttataagttactggttttcacccacgcttttgtgggagagaaaatcattgcaaaatcattttttttgttcggtacaataaagtttactaaaaaacaaa

SEQ ID NO: 372195 - DNA, 3287 bp, Homo sapiens
gagggagaaaggaaacatttaggctaggtcgaggctggtgtgcccgcgatggccgaacctgcgtctgtcgcggctgaatctctcgcgggcagcagggcgcgcgctgcacgcacagtactaggtcaggtggtgctcccgggtgaggagctgctcctgccggaacaggaggacgcggaaggccctgggggtgcagtggagcgaccgttgagcctgaatgctagagcgtgctcgcgggtgcgcgttgtatgcggtccgggccttcggcgctgtggggaccgcctgctggtcaccaagtgcggccgcctccgtcacaaggagcccggcagtggcagcggcggcggtgtttactgggtggactctcagcagaagcggtatgttccagtaaaaggagaccatgtgattggcatagtgacagctaaatctggagatatattcaaagttgatgttggagggagtgagccagcttctttgtcttacttgtcatttgaaggtgcaactaaaagaaacagaccaaatgtgcaggttggagatctcatctatggccagtttgtggttgctaataaagacatggaaccagagatggtctgtattgacagctgtggacgagccaatggaatgggtgtcattggacaggatggtctgctttttaaagtgactctgggcttaattagaaagctattagctccagattgtgaaatcatacaggaagtgggaaaactctatccactggagatagtatttggaatgaatggaagaatatgggttaaggcaaaaaccatccagcagactttaattttggcaaacattttagaagcttgtgaacacatgacgtcagatcaaagaaaacagatcttctccagattggcagaaagttgatataggtggacttttttacaggtcagttgaggcaaaaaactatgggttttttcaggtgaacctcccccatttaaatactcagaagataaggtgtgaatgtatgtattattagagtccgaaagtatttttataagttactggttttcacccacgcttttgtgggagagaaaatcattgcaaaatcattttttttgttcggtacaataaagtttactaaaaaacaaaaacagtattagggtttatttggagttaactcccttagtaattgctacagcttccataattaactggaggtcagcagtaaaataattttgtgattataacagtaagccaggttcaccagaggaaatgtggaatacctaagtataaagcagcaaagaaatgtcacctgtagtcccattattcagcgggtgagtatataacaacgaaatactttttcatttaccaagtattgtgttttgcatggattaactcctttattctaactgcagaagacacttatcctcataattgaaactgaggcacagaatttaacttggcctacattctctatattcatcaaattgaaattatagttattatagcttatatgccactttgtaatatacttttgtctacttcaaacagcatgatacatttcacaactttagtcacatatttcatgttacaggatatttttgagttttatcattatataaataacactatgaggatttctgaatccaaatctggccaagtcttattttgctaaaatcatttcctaggagctaagcatagaaaactcttctatgctatttagtatattaaccaaaacctttagaggtaaagagactgccaggtgatccacatcagtgattcttggtttctagacctctgagaatatgtgagatacagatcccctgaagcctatccatagaaagtcctttttggatcaaagagattatagaactctatttgttgataaagaccaaggagcttcgtgtgtttctaatgttttctaaggactggatggtttttagttcaatagcttttaggggtacaagtggttttggattacacggatgaattgtatagtggtgaagtctgagattttggtgtaccaatcacctgagtactatatattgtacccagtatgtagtttatccttcccccttccctgttccgggtctccagtatctgttataccactctgtgtgcttacctgtagcttagctcccacttaaagtgggaacatttggtatttggttttccattcctgagttacttcactaagaataatagcttccaatactatccaagttgctgcaaaagacattttttatggctaatattccatgggatatatataccacactttatccattcattggttgatgggtacttaggttggtcccatatcttttattatgaactgtctagccagtttttaaatagaaaagtactgattaggtgaacagttccttaggaattaaattgtgaaggggaggggacacagcagagaagtaatctgttggttcttttgagatattgaatacatgtcccaaatttgctagctgcttaactagcaagttaacccaaactgtcagagtaactgaagcaaatatgtccaactgggacataaggaacatgagatttgtgtaataagtaggttatctaacgtgttcatgtgtctaacactttctagctattttcaagacagacttatcaatactgtgtttgctttccaatttaatctgttacaaatacatatgaagaatctagttggtacaggctcagggaggatagaaagataggtacacagatttgtcctgttaggatcctaccattaggaaggattaggaagagaagccctccatgcccatactctgcaagggagaacaaggtaagagccacaggagggaacaaaatgctatggggactcagtagggataggtcagaacaggctggatcctgcaaagcttattactgagctgggcaacaacgagcatgatcagacaaggctggagaaagtcatacaattttatgatgccagtttagtgaatattaaactcttgatgtaaccatttaaacaatttcaagaggtctctcacaaatagatgtacaaaagttgaattagcacgtccaaagccatgtggttttgaggctaattccttgttacataattttttttttttttcccctcgagacaagagtctggctctgtcgcccaggctggatcttggctcactacaacctccgccgcccgggttcaggcgattctcctgcctcagcctcctgagtagctgagactactgggcatggtagcgcccacctgtggtcccagctacttgggaagctgaggtagggggatcaattgagcctggagtaagctgattgtgccactgccctccagcctgggcagcagagcaagg

SEQ ID NO: 372196 - DNA, 1684 bp, Homo sapiens
gagggagaaaggaaacatttaggctaggtcgaggctggtgtgcccgcgatggccgaacctgcgtctgtcgcggctgaatctctcgcgggcagcagggcgcgcgctgcacgcacagtactaggtcaggtggtgctcccgggtgaggagctgctcctgccggaacaggaggacgcggaaggccctgggggtgcagtggagcgaccgttgagcctgaatgctagagcgtgctcgcgggtgcgcgttgtatgcggtccgggccttcggcgctgtggggaccgcctgctggtcaccaagtgcggccgcctccgtcacaaggagcccggcagtggcagcggcggcggtgtttactgggtggactctcagcagaagcggtatgttccagtaaaaggagaccatgtgattggcatagtgacagctaaatctggagatatattcaaagttgatgttggagggagtgagccagcttctttgtcttacttgtcatttgaaggtgcaactaaaagaaacagaccaaatgtgcaggttggagatctcatctatggccagtttgtggttgctaataaagacatggaaccagagatggtctgtattgacagctgtggacgagccaatggaatgggtgtcattggacaggatggtctgctttttaaagtgactctgggcttaattagaaagctattagctccagattgtgaaatcatacaggaagtgggaaaactctatccactggagatagtatttggaatgaatggaagaatatgggttaaggcaaaaaccatccagcagactttaattttggcaaacattttagaagcttgtgaacacatgacgtcagatcaaagaaaacagatcttctccagattggcagaaagttgatataggtggacttttttacaggtcagttgaggcaaaaaactatgggttttttcaggtgaacctcccccatttaaatactcagaagataaggtgtgaatgtatgtattattagagtccgaaagtatttttataagttactggttttcacccacgcttttgtgggagagaaaatcattgcaaaatcattttttttgttcggtacaataaagtttactaaaaaacaaaaacagtattagggtttatttggagttaactcccttagtaattgctacagcttccataattaactggaggtcagcagtaaaataattttgtgattataacagtaagccaggttcaccagaggaaatgtggaatacctaagtataaagcagcaaagaaatgtcacctgtagtcccattattcagcgggtgagtatataacaacgaaatactttttcatttaccaagtattgtgttttgcatggattaactcctttattctaactgcagaagacacttatcctcataattgaaagctgaggcgggcggttcaaatgagcccatgagattgcggctgcagtgagccatgatcgcaccactgcactccagcctgggcaacagagtgagaccatgtctcaaaaaaattaaattaaaaactagctaggtgtggtggcacgcaccatcatgcccatgtaattttgtattttagtagagacgagtttcacatggttagccaggtgaggtgagtaagatgcttgagtccaggagtcaagacagctggaaacttgtggagacctgttttacaaaattaaatacgtggtggtggc

SEQ ID NO: 372197 - DNA, 3114 bp, Homo sapiens
cggaaacggtgtttggtggagcccgcgatggccgaacctgcgtctgtcgcggctgaatctctcgcgggcagcagggcgcgcgctgcacgcacagtactaggtcaggtggtgctcccgggtgaggagctgctcctgccggaacaggaggacgcggaaggccctgggggtgcagtggagcgaccgttgagcctgaatgctagagcgtgctcgcgggtgcgcgttgtatgcggtccgggccttcggcgctgtggggaccgcctgctggtcaccaagtgcggccgcctccgtcacaaggagcccggcagtggcagcggcggcggtgtttactgggtggactctcagcagaagcggtatgttccagtaaaaggagaccatgtgattggcatagtgacagctaaatctggagatatattcaaagttgatgttggagggagtgagccagcttctttgtcttacttgtcatttgaaggtgcaactaaaagaaacagaccaaatgtgcaggctattagctccagattgtgaaatcatacaggaagtgggaaaactctatccactggagatagtatttggaatgaatggaagaatatgggttaaggcaaaaaccatccagcagactttaattttggcaaacattttagaagcttgtgaacacatgacgtcagatcaaagaaaacagatcttctccagattggcagaaagttgatataggtggacttttttacaggtcagttgaggcaaaaaactatgggttttttcaggtgaacctcccccatttaaatactcagaagataaggtgtgaatgtatgtattattagagtccgaaagtatttttataagttactggttttcacccacgcttttgtgggagagaaaatcattgcaaaatcattttttttgttcggtacaataaagtttactaaaaaacaaaaacagtattagggtttatttggagttaactcccttagtaattgctacagcttccataattaactggaggtcagcagtaaaataattttgtgattataacagtaagccaggttcaccagaggaaatgtggaatacctaagtataaagcagcaaagaaatgtcacctgtagtcccattattcagcgggtgagtatataacaacgaaatactttttcatttaccaagtattgtgttttgcatggattaactcctttattctaactgcagaagacacttatcctcataattgaaactgaggcacagaatttaacttggcctacattctctatattcatcaaattgaaattatagttattatagcttatatgccactttgtaatatacttttgtctacttcaaacagcatgatacatttcacaactttagtcacatatttcatgttacaggatatttttgagttttatcattatataaataacactatgaggatttctgaatccaaatctggccaagtcttattttgctaaaatcatttcctaggagctaagcatagaaaactcttctatgctatttagtatattaaccaaaacctttagaggtaaagagactgccaggtgatccacatcagtgattcttggtttctagacctctgagaatatgtgagatacagatcccctgaagcctatccatagaaagtcctttttggatcaaagagattatagaactctatttgttgataaagaccaaggagcttcgtgtgtttctaatgttttctaaggactggatggtttttagttcaatagcttttaggggtacaagtggttttggattacacggatgaattgtatagtggtgaagtctgagattttggtgtaccaatcacctgagtactatatattgtacccagtatgtagtttatccttcccccttccctgttccgggtctccagtatctgttataccactctgtgtgcttacctgtagcttagctcccacttaaagtgggaacatttggtatttggttttccattcctgagttacttcactaagaataatagcttccaatactatccaagttgctgcaaaagacattttttatggctaatattccatgggatatatataccacactttatccattcattggttgatgggtacttaggttggtcccatatcttttattatgaactgtctagccagtttttaaatagaaaagtactgattaggtgaacagttccttaggaattaaattgtgaaggggaggggacacagcagagaagtaatctgttggttcttttgagatattgaatacatgtcccaaatttgctagctgcttaactagcaagttaacccaaactgtcagagtaactgaagcaaatatgtccaactgggacataaggaacatgagatttgtgtaataagtaggttatctaacgtgttcatgtgtctaacactttctagctattttcaagacagacttatcaatactgtgtttgctttccaatttaatctgttacaaatacatatgaagaatctagttggtacaggctcagggaggatagaaagataggtacacagatttgtcctgttaggatcctaccattaggaaggattaggaagagaagccctccatgcccatactctgcaagggagaacaaggtaagagccacaggagggaacaaaatgctatggggactcagtagggataggtcagaacaggctggatcctgcaaagcttattactgagctgggcaacaacgagcatgatcagacaaggctggagaaagtcatacaattttatgatgccagtttagtgaatattaaactcttgatgtaaccatttaaacaatttcaagaggtctctcacaaatagatgtacaaaagttgaattagcacgtccaaagccatgtggttttgaggctaattccttgttacataattttttttttttttcccctcgagacaagagtctggctctgtcgcccaggctggatcttggctcactacaacctccgccgcccgggttcaggcgattctcctgcctcagcctcctgagtagctgagactactgggcatggtagcgcccacctgtggtcccagctacttgggaagctgaggtagggggatcaattgagcctggagtaagctgattgtgccactgccctccagcctgggcagcagagcaagg

SEQ ID NO: 372198 - DNA, 3000 bp, Homo sapiens
cgggcgcccgccctccgaggggccgcgcttacccgtcgggcgagtactcgaggttgaagacggcgccgtgggtgcgggtgctgagtatgttccagtaaaaggagaccatgtgattggcatagtgacagctaaatctggagatatattcaaagttgatgttggagggagtgagccagcttctttgtcttacttgtcatttgaaggtgcaactaaaagaaacagaccaaatgtgcaggttggagatctcatctatggccagtttgtggttgctaataaagacatggaaccagagatggtctgtattgacagctgtggacgagccaatggaatgggtgtcattggacaggatggtctgctttttaaagtgactctgggcttaattagaaagctattagctccagattgtgaaatcatacaggaagtgggaaaactctatccactggagatagtatttggaatgaatggaagaatatgggttaaggcaaaaaccatccagcagactttaattttggcaaacattttagaagcttgtgaacacatgacgtcagatcaaagaaaacagatcttctccagattggcagaaagttgatataggtggacttttttacaggtcagttgaggcaaaaaactatgggttttttcaggtgaacctcccccatttaaatactcagaagataaggtgtgaatgtatgtattattagagtccgaaagtatttttataagttactggttttcacccacgcttttgtgggagagaaaatcattgcaaaatcattttttttgttcggtacaataaagtttactaaaaaacaaaaacagtattagggtttatttggagttaactcccttagtaattgctacagcttccataattaactggaggtcagcagtaaaataattttgtgattataacagtaagccaggttcaccagaggaaatgtggaatacctaagtataaagcagcaaagaaatgtcacctgtagtcccattattcagcgggtgagtatataacaacgaaatactttttcatttaccaagtattgtgttttgcatggattaactcctttattctaactgcagaagacacttatcctcataattgaaactgaggcacagaatttaacttggcctacattctctatattcatcaaattgaaattatagttattatagcttatatgccactttgtaatatacttttgtctacttcaaacagcatgatacatttcacaactttagtcacatatttcatgttacaggatatttttgagttttatcattatataaataacactatgaggatttctgaatccaaatctggccaagtcttattttgctaaaatcatttcctaggagctaagcatagaaaactcttctatgctatttagtatattaaccaaaacctttagaggtaaagagactgccaggtgatccacatcagtgattcttggtttctagacctctgagaatatgtgagatacagatcccctgaagcctatccatagaaagtcctttttggatcaaagagattatagaactctatttgttgataaagaccaaggagcttcgtgtgtttctaatgttttctaaggactggatggtttttagttcaatagcttttaggggtacaagtggttttggattacacggatgaattgtatagtggtgaagtctgagattttggtgtaccaatcacctgagtactatatattgtacccagtatgtagtttatccttcccccttccctgttccgggtctccagtatctgttataccactctgtgtgcttacctgtagcttagctcccacttaaagtgggaacatttggtatttggttttccattcctgagttacttcactaagaataatagcttccaatactatccaagttgctgcaaaagacattttttatggctaatattccatgggatatatataccacactttatccattcattggttgatgggtacttaggttggtcccatatcttttattatgaactgtctagccagtttttaaatagaaaagtactgattaggtgaacagttccttaggaattaaattgtgaaggggaggggacacagcagagaagtaatctgttggttcttttgagatattgaatacatgtcccaaatttgctagctgcttaactagcaagttaacccaaactgtcagagtaactgaagcaaatatgtccaactgggacataaggaacatgagatttgtgtaataagtaggttatctaacgtgttcatgtgtctaacactttctagctattttcaagacagacttatcaatactgtgtttgctttccaatttaatctgttacaaatacatatgaagaatctagttggtacaggctcagggaggatagaaagataggtacacagatttgtcctgttaggatcctaccattaggaaggattaggaagagaagccctccatgcccatactctgcaagggagaacaaggtaagagccacaggagggaacaaaatgctatggggactcagtagggataggtcagaacaggctggatcctgcaaagcttattactgagctgggcaacaacgagcatgatcagacaaggctggagaaagtcatacaattttatgatgccagtttagtgaatattaaactcttgatgtaaccatttaaacaatttcaagaggtctctcacaaatagatgtacaaaagttgaattagcacgtccaaagccatgtggttttgaggctaattccttgttacataattttttttttttttcccctcgagacaagagtctggctctgtcgcccaggctggatcttggctcactacaacctccgccgcccgggttcaggcgattctcctgcctcagcctcctgagtagctgagactactgggcatggtagcgcccacctgtggtcccagctacttgggaagctgaggtagggggatcaattgagcctggagtaagctgattgtgccactgccctccagcctgggcagcagagcaagg

SEQ ID NO: 372199 - DNA, 835 bp, Homo sapiens
cggaaacggtgtttggtggagcccgcgatggccgaacctgcgtctgtcgcggctgaatctctcgcgggcagcagggcgcgcgctgcacgcacagtactaggtcaggtggtgctcccgggtgaggagctgctcctgccggaacaggaggacgcggaaggccctgggggtgcagtggagcgaccgttgagcctgaatgctagagcgtgctcgcgggtgcgcgttgtatgcggtccgggccttcggcgctgtggggaccgcctgctggtcaccaagtgcggccgcctccgtcacaaggagcccggcagtggcagcggcggcggtgtttactgggtggactctcagcagaagcggtatgttccagtaaaaggagaccatgtgattggcatagtgacagctaaatctggagatatattcaaagttgatgttggagggagtgagccagcttctttgtcttacttgtcatttgaaggtgcaactaaaagaaacagaccaaatgtgcaggttggagatctcatctatggccagtttgtggttgctaataaagacatggaaccagagatggtctgtattgacagctgtggacgagccaatggaatgggtgtcattggacaggatggtctgctttttaaagtgactctgggcttaattagaaagtaagtcctgatgtctgctggcttgactgctttttataattatacattcttggaaagttggttaatcttcaggattcagattctttgtaacgtttgaatttctcctcagagttagaaatcagtatccattttaacacatttggaaactcatgaatttaatcctatcttcttggaaacatatc

SEQ ID NO: 372200 - DNA, 2968 bp, Homo sapiens
gctttttcttccctgatcagaagcttccgtgagggagccacacagaactcaccgagtccctcctggcagaggcggccgtcctctgttgcttccagggacgtggccctcttcccgacctcggtcgcctgagcgcgcagggattggggatccgtagggcactaggacccggcggggcggagggggcagcccatgtgctgcgattcgctccctcccaccccactgctcccgctccattgtctgggaattgcagccgcggggcgggcggcggcggcggcggcggcggccgggacccagcgggccaggtggggacggcgcggagcgggtgcgggagatgccgtgcgggactggggccacctgagccgcccgcctcgtccccgccttctgtgggaaggatgtgcgcgcggatggccggtcgcacaacagcggcccctcgggggccctacggcccctggctctgcctcctggtggccctcgccctggacgtcgtgagagtggactgtggccaggctcccctggaccctgtctactgcatgtgacagccgcccgcccagcccagcccacactctggactgccaagctagaccgcttcaagggctccaggcaccacaccaccctcatcacctgccaccgtgctgggctcacagagccagattccagcagtccccttgaactgtctgagttcctatgggtggactttgtggtggagaatagcactggtgggggcgtagcggtcactcgccccgtcacgtggcagctggagtacccaggccaggcccctgaagcagagaaggacaaaatggtgtgggaaatcctggtgtctgagcgggacatcagagcccttatcccactggccaaggctgaggagctggtgaatacagcaccactgactggagtgccccagcatgtccccgtgcgccttgtcactgtggacggcgggggggccttggtggaggtgacagagcatgtcggctgcgagtctgccaacacacaggtcctgcaggtgtctgaggcctgtgatgccgtgttcgtggctggcaaggagagccggggcgcccggggggtgcgagtggacttctggtggcgccggctccgcgcctcgctgcggctgaccgtgtgggcccccctgctaccgctgcgtatcgagctcaccgacaccaccctcgagcaggtccgcggctggagggtacctggccctgctgaagggcctgcggaacccgctgcagaggcgtcggatgaggccgagcggcgcgcccgtggctgccacctgcagtaccagcgggccggtgtgcgcttcctcgcccccttcgcggcccacccgctggacggcggccgccgcctcacgcacctgcttggccccgactggctgctagacgtgtcccacctcgtggcgccacacgcccgcgtgctggactcgcgtgtagcctctctggagggtggccgtgtcgtggtgggccgggagcccggtgtcacctccattgaggtgcgttccccactgtctgactccatcctgggggagcaggcgctggctgtgacggacgacaaggtctcagtgctggagctgagggtgcagccagtgatgggcatctcgctgaccttgagccggggcactgcccaccccggggaggtcacagctacgtgctgggcacagtcagcccttcccgccccaaagcaggaggtggccctctccctatggctgtccttctctgatcacactgtggccccagctgagctctacgaccgccgtgacctgggactgtccgtctcagccgaggagcctggtgccatcctgccagctgaggagcagggtgcccagctcggggtggtggtgagtggggcaggcgccgaggggctgccgctgcatgtggctctgcacccgcccgagccctgccgccggggccgccaccgtgtgcctctggcctctggcaccgcctggctggggctgccccctgcctccactccagcccctgctctcccatccagccctgcttggagcccaccagccacagaagccaccatgggtggtaaacggcaggtggcaggcagtgtcgggggcaacacaggtgtgaggggcaagtttgagcgggcagaggaggaggccaggaaggaggagaccgaagccagggaggaggaggaggaagaggaggaggagatggtccctgcccctcagcatgtcactgagctagagctgggcatgtacgccctgctgggagtcttctgcgtggccatcttcatcttcttggtcaatggtgtggtcttcgtcctgcgctatcagcgcaaagaacctcccgacagtgccactgaccccacctccccccagccccacaactgggtctggctgggcactgaccaggaggaactgagccgccagctggaccggcagtcccctggcccgcccaagggggaggggagctgcccctgtgagagtgggggaggaggggaggcccctaccctggcccctggccctcctgggggcaccaccagctcctcaagcaccctggcccgaaaggaggctggggggcggcggaagcgagtagagtttgtgacatttgcgccagcccctccagcccagtcacctgaggagcctgtaggggcccctgctgtgcagtccatccttgtggcaggcgaggaggacatccgctgggtgtgtgaggacatggggctgaaggaccctgaggagcttcgcaactacatggagaggatccggggcagctcctgaccctccacagccacctggtcagccaccagctggggcaacgagggtggaggtcccactgagcctctcgcctgcccccgccactcgtctggtgcttgttgatccaagtcccctgcctggtcccccacaaggactcccatccaggccccctctgccctgccccttgtcatggaccatggtcgtgaggaagggctcatgccccttatttatgggaaccatttcattctaacagaataaaccgagaaggaaaccaga

SEQ ID NO: 372201 - DNA, 3719 bp, Homo sapiens
gctttttcttccctgatcagaagcttccgtgagggagccacacagaactcaccgagtccctcctggcagaggcggccgtcctctgttgcttccagggacgtggccctcttcccgacctcggtcgcctgagcgcgcagggattggggatccgtagggcactaggacccggcggggcggagggggcagcccatgtgctgcgattcgctccctcccaccccactgctcccgctccattgtctgggaattgcagccgcggggcgggcggcggcggcggcggcggcggccgggacccagcgggccaggtggggacggcgcggagcgggtgcgggagatgccgtgcgggactggggccacctgagccgcccgcctcgtccccgccttctgtgggaaggatgtgcgcgcggatggccggtcgcacaacagcggcccctcgggggccctacggcccctggctctgcctcctggtggccctcgccctggacgtcgtgagagtggactgtggccaggctcccctggaccctgtctacctgccggcagccctggagctcctagacgcccctgaacacttccgtgtgcagcaggtgggccactacccacctgccaactcctctctgagctcccgatctgagacctttctgctcctacagccctggcccagggcccagccacttctccgggcctcctacccaccttttgccactcagcaggtggtcccccctcgagtcactgagccccaccaacggccagtcccatgggacgtgcgggccgtttcagtggaagcggctgtgactccagcagagccctacgcccgggttctcttccacctcaaagggcaggattggccaccagggtctggcagcctgccctgtgcccggctccatgccacacaccctgcaggcactgctcaccaagcctgccgcttccagccatccctgggcgcctgcgtggtggagctggagcttccctcgcactggttctcacaggcctccaccacacgggccgagctggcctacacgcttgagcctgcagctgagggccctgggggctgtggctccggcgaggagaacgaccctggggagcaggccctcccagtggggggtgtggagctgcgcccagcagaccccccgcagtaccaggaggtacctctggacgaggctgtgactctgcgggtgcctgacatgccagtgcggcccggccagctctttagtgctaccctcctgcttcggcacaacttcacagccagcctcctgaccctgcggatcaaggtgaagaaggggctgcatgtgacagccgcccgcccagcccagcccacactctggactgccaagctagaccgcttcaagggctccaggcaccacaccaccctcatcacctgccaccgtgctgggctcacagagccagattccagcagtccccttgaactgtctgagttcctatgggtggactttgtggtggagaatagcactggtgggggcgtagcggtcactcgccccgtcacgtggcagctggagtacccaggccaggcccctgaagcagagaaggacaaaatggtgtgggaaatcctggtgtctgagcgggacatcagagcccttatcccactggccaaggctgaggagctggtgaatacagcaccactgactggagtgccccagcatgtccccgtgcgccttgtcactgtggacggcgggggggccttggtggaggtgacagagcatgtcggctgcgagtctgccaacacacaggtcctgcaggtgtctgaggcctgtgatgccgtgttcgtggctggcaaggagagccggggcgcccggggggtgcgagtggacttctggtggcgccggctccgcgcctcgctgcggctgaccgtgtgggcccccctgctaccgctgcgtatcgagctcaccgacaccaccctcgagcaggtccgcggctggagggtacctggccctgctgaagggcctgcggaacccgctgcagaggcgtcggatgaggccgagcggcgcgcccgtggctgccacctgcagtaccagcgggccggtgtgcgcttcctcgcccccttcgcggcccacccgctggacggcggccgccgcctcacgcacctgcttggccccgactggctgctagacgtgtcccacctcgtggcgccacacgcccgcgtgctggactcgcgtgtagcctctctggagggtggccgtgtcgtggtgggccgggagcccggtgtcacctccattgaggtgcgttccccactgtctgactccatcctgggggagcaggcgctggctgtgacggacgacaaggtctcagtgctggagctgagggtgcagccagtgatgggcatctcgctgaccttgagccggggcactgcccaccccggggaggtcacagctacgtgctgggcacagtcagcccttcccgccccaaagcaggaggtggccctctccctatggctgtccttctctgatcacactgtggccccagctgagctctacgaccgccgtgacctgggactgtccgtctcagccgaggagcctggtgccatcctgccagctgaggagcagggtgcccagctcggggtggtggtgagtggggcaggcgccgaggggctgccgctgcatgtggctctgcacccgcccgagccctgccgccggggccgccaccgtgtgcctctggcctctggcaccgcctggctggggctgccccctgcctccactccagcccctgctctcccatccagccctgcttggagcccaccagccacagaagccaccatgggtggtaaacggcaggtggcaggcagtgtcgggggcaacacaggtgtgaggggcaagtttgagcgggcagaggaggaggccaggaaggaggagaccgaagccagggaggaggaggaggaagaggaggaggagatggtccctgcccctcagcatgtcactgagctagagctgggcatgtacgccctgctgggagtcttctgcgtggccatcttcatcttcttggtcaatggtgtggtcttcgtcctgcgctatcagcgcaaagaacctcccgacagtgccactgaccccacctccccccagccccacaactgggtctggctgggcactgaccaggaggaactgagccgccagctggaccggcagtcccctggcccgcccaagggggaggggagctgcccctgtgagagtgggggaggaggggaggcccctaccctggcccctggccctcctgggggcaccaccagctcctcaagcaccctggcccgaaaggaggctggggggcggcggaagcgagtagagtttgtgacatttgcgccagcccctccagcccagtcacctgaggagcctgtaggggcccctgctgtgcagtccatccttgtggcaggcgaggaggacatccgctgggtgtgtgaggacatggggctgaaggaccctgaggagcttcgcaactacatggagaggatccggggcagctcctgaccctccacagccacctggtcagccaccagctggggcaacgagggtggaggtcccactgagcctctcgcctgcccccgccactcgtctggtgcttgttgatccaagtcccctgcctggtcccccacaaggactcccatccaggccccctctgccctgccccttgtcatggaccatggtcgtgaggaagggctcatgccccttatttatgggaaccatttcattctaacagaataaaccgagaaggaaaccaga

SEQ ID NO: 372202 - DNA, 5271 bp, Homo sapiens
gctttttcttccctgatcagaagcttccgtgagggagccacacagaactcaccgagtccctcctggcagaggcggccgtcctctgttgcttccagggacgtggccctcttcccgacctcggtcgcctgagcgcgcagggattggggatccgtagggcactaggacccggcggggcggagggggcagcccatgtgctgcgattcgctccctcccaccccactgctcccgctccattgtctgggaattgcagccgcggggcgggcggcggcggcggcggcggcggccgggacccagcgggccaggtggggacggcgcggagcgggtgcgggagatgccgtgcgggactggggccacctgagccgcccgcctcgtccccgccttctgtgggaaggatgtgcgcgcggatggccggtcgcacaacagcggcccctcgggggccctacggcccctggctctgcctcctggtggccctcgccctggacgtcgtgagagtggactgtggccaggctcccctggaccctgtctacctgccggcagccctggagctcctagacgcccctgaacacttccgtgtgcagcaggtgggccactacccacctgccaactcctctctgagctcccgatctgagacctttctgctcctacagccctggcccagggcccagccacttctccgggcctcctacccaccttttgccactcagcaggtggtcccccctcgagtcactgagccccaccaacggccagtcccatgggacgtgcgggccgtttcagtggaagcggctgtgactccagcagagccctacgcccgggttctcttccacctcaaagggcaggattggccaccagggtctggcagcctgccctgtgcccggctccatgccacacaccctgcaggcactgctcaccaagcctgccgcttccagccatccctgggcgcctgcgtggtggagctggagcttccctcgcactggttctcacaggcctccaccacacgggccgagctggcctacacgcttgagcctgcagctgagggccctgggggctgtggctccggcgaggagaacgaccctggggagcaggccctcccagtggggggtgtggagctgcgcccagcagaccccccgcagtaccaggaggtacctctggacgaggctgtgactctgcgggtgcctgacatgccagtgcggcccggccagctctttagtgctaccctcctgcttcggcacaacttcacagccagcctcctgaccctgcggatcaaggtgaagaaggggctgcatgtgacagccgcccgcccagcccagcccacactctggactgccaagctagaccgcttcaagggctccaggcaccacaccaccctcatcacctgccaccgtgctgggctcacagagccagattccagcagtccccttgaactgtctgagttcctatgggtggactttgtggtggagaatagcactggtgggggcgtagcggtcactcgccccgtcacgtggcagctggagtacccaggccaggcccctgaagcagagaaggacaaaatggtgtgggaaatcctggtgtctgagcgggacatcagagcccttatcccactggccaaggctgaggagctggtgaatacagcaccactgactggagtgccccagcatgtccccgtgcgccttgtcactgtggacggcgggggggccttggtggaggtgacagagcatgtcggctgcgagtctgccaacacacaggtcctgcaggtgtctgaggcctgtgatgccgtgttcgtggctggcaaggagagccggggcgcccggggggtgcgagtggacttctggtggcgccggctccgcgcctcgctgcggctgaccgtgtgggcccccctgctaccgctgcgtatcgagctcaccgacaccaccctcgagcaggtccgcggctggagggtacctggccctgctgaagggcctgcggaacccgctgcagaggcgtcggatgaggccgagcggcgcgcccgtggctgccacctgcagtaccagcgggccggtgtgcgcttcctcgcccccttcgcggcccacccgctggacggcggccgccgcctcacgcacctgcttggccccgactggctgctagacgtgtcccacctcgtggcgccacacgcccgcgtgctggactcgcgtgtagcctctctggagggtggccgtgtcgtggtgggccgggagcccggtgtcacctccattgaggtgcgttccccactgtctgactccatcctgggggagcaggcgctggctgtgacggacgacaaggtctcagtgctggagctgagggtgcagccagtgatgggcatctcgctgaccttgagccggggcactgcccaccccggggaggtcacagctacgtgctgggcacagtcagcccttcccgccccaaagcaggaggtggccctctccctatggctgtccttctctgatcacactgtggccccagctgagctctacgaccgccgtgacctgggactgtccgtctcagccgaggagcctggtgccatcctgccagctgaggagcagggtgcccagctcggggtggtggtgagtggggcaggcgccgaggggctgccgctgcatgtggctctgcacccgcccgagccctgccgccggggccgccaccgtgtgcctctggcctctggcaccgcctggctggggctgccccctgcctccactccagcccctgctctcccatccagccctgcttggagcccaccagccacagaagccaccatgggtggtaaacggcaggtggcaggcagtgtcgggggcaacacaggtgtgaggggcaagtttgagcgggcagaggaggaggccaggaaggaggagaccgaagccagggaggaggaggaggaagaggaggaggagatggtccctgcccctcagcatgtcactgagctagagctgggcatgtacgccctgctgggagtcttctgcgtggccatcttcatcttcttggtcaatggtgtggtcttcgtcctgcgctatcagcgcaaagaacctcccgacagtgccactgaccccacctccccccagccccacaactgggtctggctgggcactgaccaggaggaactgagccgccagctggaccggcagtcccctggcccgcccaagggggaggggagctgcccctgtgagagtgggggaggaggggaggcccctaccctggcccctggccctcctgggggcaccaccagctcctcaagcaccctggcccgaaaggaggctggggggcggcggaagcgagtagagtttgtgacatttgcgccagcccctccagcccagtcacctgaggagcctgtaggggcccctgctgtgcagtccatccttgtggcaggcgaggaggacatccgctgggtgtgtgaggacatggggctgaaggaccctgaggagcttcgcaactacatggagaggatccggggcagctcctgaccctccacagccacctggtcagccaccagctggggcaacgagggtggaggtcccactgagcctctcgcctgcccccgccactcgtctggtgcttgttgatccaagtcccctgcctggtcccccacaaggactcccatccaggccccctctgccctgccccttgtcatggaccatggtcgtgaggaagggctcatgccccttatttatgggaaccatttcattctaacagaataaaccgagaaggaaaccagaaaaaaaaaaaaaaaaaaaaaaaaaaaaaaaaaaaaaaaaaaaaaaaaaaaaaaaaaaaaaacaaacggggcggccgacaccaaaagaatcccctcctcggcgggcgccccacatccaaccgccaccaccctggctacttctcgtagagcagcaggcggcacccaagaacgatgagacgcactgattatctatgatcgacacacagagacgcgccgacgagtaataacacagacctaagcagcagagggacagagacacacagtctgcgaccagacgcgggagcgggagcacactctcagcgtggaaggcgagcaacacacacatgcaaccgcgggggggggggcgcgcaacagcccaatacgatagggggagaccaccgaccccccgaccacagcaacgacagaatagcaatacaaacacagcacacactcacacgagcgcgggacaccaacaaacacagcaacagcagactaacgcagcagtctattaaagaggagggtgggcaacaacaccacaaacacaccgctctcactagtatcatacgtactagtcaccagcctgcgggcacgtgcgtgaagcgacagacaaaggaccatagtgagtccagtcctactaattatcagcgagtagataggtcatatagtgcatcactagtgtagacaacatctaatatagaatattattaacacgcccggcgacgatcaacgcatacagtagagttcaaaagacaaatacattaaccaaagcacaacaaacccacaatactgcagcgacacatacacacaagtactagcgaacacaactatcacagagaacacacacaaaaacaacagaacgcgcgagccacaccgacgcacagacgaaccaatcgacagaccacgagcacacccggcacggacgccgcaggcgcgcacgcagtgaagacacaagaacaacccagcagccgaaaagaaccacacaaccgacacacagcagcgaaagagcacaaatcaacaccgcacaagagcagacaacacagagccatacagcagggagccaccccgacgccgcaacacaaagaccgtatcaaaagagcacgcacacatccaagcacgaacacggcaagcacccgcacaagcacaggcgagacgcgaagcagagacgccgaaggcagcgcgcagccacagacgcaacagaagacggacaggcagctaaggccagcagaacgcggcacgagacgacagagaaacagatgagcacaacacagagagaacacgacgagacgcgacagcgcaagccaaacgcaacaacgcagccaaagcagagccacccgactcagcccgtcaggcacatacccaagaagccacagacaagggagcacgagaccacaagcacagcaagcgagaaggatacgcgagacgcacgacgcagccgagaacagcagagcaccagacgacggcacacgagacagctagaaagcgcacacagccagccgcgcgagaaaacagatcagagaaagaaagcaaagcacaagaacgacccgaaacagccagcacacgacacgagcacgacg

SEQ ID NO: 372203 - DNA, 3936 bp, Homo sapiens
gctttttcttccctgatcagaagcttccgtgagggagccacacagaactcaccgagtccctcctggcagaggcggccgtcctctgttgcttccagggacgtggccctcttcccgacctcggtcgcctgagcgcgcagggattggggatccgtagggcactaggacccggcggggcggagggggcagcccatgtgctgcgattcgctccctcccaccccactgctcccgctccattgtctgggaattgcagccgcggggcgggcggcggcggcggcggcggcggccgggacccagcgggccaggtggggacggcgcggagcgggtgcgggagatgccgtgcgggactggggccacctgagccgcccgcctcgtccccgccttctgtgggaaggatgtgcgcgcggatggccggtcgcacaacagcggcccctcgggggccctacggcccctggctctgcctcctggtggccctcgccctggacgtcgtgagagtggactgtggccaggctcccctggaccctgtctacctgccggcagccctggagctcctagacgcccctgaacacttccgtgtgcagcaggtgggccactacccacctgccaactcctctctgagctcccgatctgagacctttctgctcctacagccctggcccagggcccagccacttctccgggcctcctacccaccttttgccactcagcaggtggtcccccctcgagtcactgagccccaccaacggccagtcccatgggacgtgcgggccgtttcagtggaagcggctgtgactccagcagagccctacgcccgggttctcttccacctcaaagggcaggattggccaccagggtctggcagcctgccctgtgcccggctccatgccacacaccctgcaggcactgctcaccaagcctgccgcttccagccatccctgggcgcctgcgtggtggagctggagcttccctcgcactggttctcacaggcctccaccacacgggccgagctggcctacacgcttgagcctgcagctgagggccctgggggctgtggctccggcgaggagaacgaccctggggagcaggccctcccagtggggggtgtggagctgcgcccagcagaccccccgcagtaccaggaggtacctctggacgaggctgtgactctgcgggtgcctgacatgccagtgcggcccggccagctctttagtgctaccctcctgcttcggcacaacttcacagccagcctcctgaccctgcggatcaaggtgaagaaggggctgcatgtgacagccgcccgcccagcccagcccacactctggactgccaagctagaccgcttcaagggctccaggcaccacaccaccctcatcacctgccaccgtgctgggctcacagagccagattccagcagtccccttgaactgtctgagttcctatgggtggactttgtggtggagaatagcactggtgggggcgtagcggtcactcgccccgtcacgtggcagctggagtacccaggccaggcccctgaagcagagaaggacaaaatggtgtgggaaatcctggtgtctgagcgggacatcagagcccttatcccactggccaaggctgaggagctggtgaatacagcaccactgactggagtgccccagcatgtccccgtgcgccttgtcactgtggacggcgggggggccttggtggaggtgacagagcatgtcggctgcgagtctgccaacacacaggtcctgcaggtgtctgaggcctgtgatgccgtgttcgtggctggcaaggagagccggggcgcccggggggtgcgagtggacttctggtggcgccggctccgcgcctcgctgcggctgaccgtgtgggcccccctgctaccgctgcgtatcgagctcaccgacaccaccctcgagcaggtccgcggctggagggtacctggccctgctgaagggcctgcggaacccgctgcagaggcgtcggatgaggccgagcggcgcgcccgtggctgccacctgcagtaccagcgggccggtgtgcgcttcctcgcccccttcgcggcccacccgctggacggcggccgccgcctcacgcacctgcttggccccgactggctgctagacgtgtcccacctcgtggcgccacacgcccgcgtgctggactcgcgtgtagcctctctggagggtggccgtgtcgtggtgggccgggagcccggtgtcacctccattgaggtgcgttccccactgtctgactccatcctgggggagcaggcgctggctgtgacggacgacaaggtctcagtgctggagctgagggtgcagccagtgatgggcatctcgctgaccttgagccggggcactgcccaccccggggaggtcacagctacgtgctgggcacagtcagcccttcccgccccaaagcaggaggtggccctctccctatggctgtccttctctgatcacactgtggccccagctgagctctacgaccgccgtgacctgggactgtccgtctcagccgaggagcctggtgccatcctgccagctgaggagcagggtgcccagctcggggtggtggtgagtggggcaggcgccgaggggctgccgctgcatgtggctctgcacccgcccgagccctgccgccggggccgccaccgtgtgcctctggcctctggcaccgcctggctggggctgccccctgcctccactccagcccctgctctcccatccagccctgcttggagcccaccagccacagaagccaccatgggtggtaaacggcaggtggcaggcagtgtcgggggcaacacaggtgtgaggggcaagtttgagcgggcagaggaggaggccaggaaggaggagaccgaagccagggaggaggaggaggaagaggaggaggagatggtccctgcccctcagcatgtcactgagctagagctgggcatgtacgccctgctgggagtcttctgcgtggccatcttcatcttcttggtcaatggtgtggtcttcgtcctgcgctatcagcgcaaagaacctcccgacagtgccactgaccccacctccccccagccccacaactgggtctggctgggcactgaccaggaggaactgagccgccagctggaccggcagtcccctggcccgcccaagggggaggggagctgcccctgtgagagtgggggaggaggggaggcccctaccctggcccctggccctcctgggggcaccaccagctcctcaagcaccctggcccgaaaggaggctggggggcggcggaagcgagtagagtttgtgacatttgcgccagcccctccagcccagtcacctgaggagcctgtaggggcccctgctgtgcagtccatccttgtggcaggcgaggaggacatccgctgggtgtgtgaggacatggggctgaaggaccctgaggagcttcgcaactacatggagaggatccggggcagctcctgaccctccacagccacctggtcagccaccagctggggcaacgagggtggaggtcccactgagcctctcgcctgcccccgccactcgtctggtgcttgttgatccaagtcccctgcctggtcccccacaaggactcccatccaggccccctctgccctgccccttgtcatggaccatggtcgtgaggaagggctcatgccccttatttatgggaaccatttcattctaacagaataaaccgagaaggaaaccagagctgggactgctgccgtctgtccggtagagtgaagcaagggggctggaatagggcctgttcagcccctgtccctgctgaaacggctgtgggaggctgggccctgggacgccctctcatagcgtccagcgatccagacaaataggagagccgtgacggcctgaatgccagccagcaggaagaagtagaggtcaatccggcaattgtgatgctcccagg

SEQ ID NO: 372204 - DNA, 3651 bp, Homo sapiens
gctttttcttccctgatcagaagcttccgtgagggagccacacagaactcaccgagtccctcctggcagaggcggccgtcctctgttgcttccagggacgtggccctcttcccgacctcggtcgcctgagcgcgcagggattggggatccgtagggcactaggacccggcggggcggagggggcagcccatgtgctgcgattcgctccctcccaccccactgctcccgctccattgtctgggaattgcagccgcggggcgggcggcggcggcggcggcggcggccgggacccagcgggccaggtggggacggcgcggagcgggtgcgggagatgccgtgcgggactggggccacctgagccgcccgcctcgtccccgccttctgtgggaaggatgtgcgcgcggatggccggtcgcacaacagcggcccctcgggggccctacggcccctggctctgcctcctggtggccctcgccctggacgtcgtgagagtggactgtggccaggctcccctggaccctgtctacctgccggcagccctggagctcctagacgcccctgaacacttccgtgtgcagcaggtgggccactacccacctgccaactcctctctgagctcccgatctgagacctttctgctcctacagccctggcccagggcccagccacttctccgggcctcctacccaccttttgccactcagcaggtggtcccccctcgagtcactgagccccaccaacggccagtcccatgggacgtgcgggccgtttcagtggaagcggctgtgactccagcagagccctacgcccgggttctcttccacctcaaagggcaggattggccaccagggtctggcagcctgccctgtgcccggctccatgccacacaccctgcaggcactgctcaccaagcctgccgcttccagccatccctgggcgcctgcgtggtggagctggagcttccctcgcactggttctcacaggcctccaccacacgggccgagctggcctacacgcttgagcctgcagctgagggccctgggggctgtggctccggcgaggagaacgaccctggggagcaggccctcccagtggggggtgtggagctgcgcccagcagaccccccgcagtaccaggaggtacctctggacgaggctgtgactctgcgggtgcctgacatgccagtgcggcccggccagctctttagtgctaccctcctgcttcggcacaacttcacagccagcctcctgaccctgcggatcaaggtgaagaaggggctgcatgtgacagccgcccgcccagcccagcccacactctggactgccaagctagaccgcttcaagggctccaggcaccacaccaccctcatcacctgccaccgtgctgggctcacagagccagattccagcagtccccttgaactgtctgagttcctatgggtggactttgtggtggagaatagcactggtgggggcgtagcggtcactcgccccgtcacgtggcagctggagtacccaggccaggcccctgaagcagagaaggacaaaatggtgtgggaaatcctggtgtctgagcgggacatcagagcccttatcccactggccaaggctgaggagctggtgaatacagcaccactgactggagtgccccagcatgtccccgtgcgccttgtcactgtggacggcgggggggccttggtggaggtgacagagcatgtcggctgcgagtctgccaacacacaggtcctgcaggtgtctgaggcctgtgatgccgtgttcgtggctggcaaggagagccggggcgcccggggggtgcgagtggacttctggtggcgccggctccgcgcctcgctgcggctgaccgtgtgggcccccctgctaccgctgcgtatcgagctcaccgacaccaccctcgagcaggtccgcggctggagggtacctggccctgctgaagggcctgcggaacccgctgcagaggcgtcggatgaggccgagcggcgcgcccgtggctgccacctgcagtaccagcgggccggtgtgcgcttcctcgcccccttcgcggcccacccgctggacggcggccgccgcctcacgcacctgcttggccccgactggctgctagacgtgtcccacctcgtggcgccacacgcccgcgtgctggactcgcgtgtagcctctctggagggtggccgtgtcgtggtgggccgggagcccggtgtcacctccattgaggtgcgttccccactgtctgactccatcctgggggagcaggcgctggctgtgacggacgacaaggtctcagtgctggagctgagggtgcagccagtgatgggcatctcgctgaccttgagccggggcactgcccaccccggggaggtcacagctacgtgctgggcacagtcagcccttcccgccccaaagcaggaggtggccctctccctatggctgtccttctctgatcacactgtggccccagctgagctctacgaccgccgtgacctgggactgtccgtctcagccgaggagcctggtgccatcctgccagctgaggagcagggtgcccagctcggggtggtggtgagtggggcaggcgccgaggggctgccgctgcatgtggctctgcacccgcccgagccctgccgccggggccgccaccgtgtgcctctggcctctggcaccgcctggctggggctgccccctgcctccactccagcccctgctctcccatccagccctgcttggagcccaccagccacagaagccaccatgggtggtaaacggcaggtggcaggcagtgtcgggggcaacacaggtgtgaggggcaagtttgagcgggcagaggaggaggccaggaaggaggagaccgaagccagggaggaggaggaggaagaggaggaggagatggtccctgcccctcagcatgtcactgagctagagctgggcatgtacgccctgctgggagtcttctgcgtggccatcttcatcttcttggtcaatggtgtggtcttcgtcctgcgctatcagcgcaaagaacctcccgacagtgccactgaccccacctccccccagccccacaactgggtctggctgggcactgaccaggaggaactgagccgccagctggaccggcagtcccctggcccgcccaagggggaggggagctgcccctgtgagagtgggggaggaggggaggcccctaccctggcccctggccctcctgggggcaccaccagctcctcaagcaccctggcccgaaaggaggctggggggcggcggaagcgagtagagtttgtgacatttgcgccagcccctccagcccagtcacctgaggagcctgtaggggcccctgctgtgcagtccatccttgtggcaggcgaggaggacatccgctgggtgtgtgaggacatggggctgaaggaccctgaggagcttcgcaactacatggagaggatccggggcagctcctgaccctccacagccacctggtcagccaccagctggggcaacgagggtggaggtcccactgagcctctcgcctgcccccgccactcgtctggtgcttgtcatggaccatggtcgtgaggaagggctcatgccccttatttatgggaaccatttcattctaacagaataaaccgagaaggaaaccaga

SEQ ID NO: 372205 - DNA, 5621 bp, Homo sapiens
gtggtgagaggggaagggacatttacagcccttttctccctcccttgcccacaactactgtgccccagcatggcacccgggtcagcccctgccagctctggagctgtcatcatctctccctcttatgcctcttcagtggactgtggccaggctcccctggaccctgtctacctgccggcagccctggagctcctagacgcccctgaacacttccgtgtgcagcaggtgggccactacccacctgccaactcctctctgagctcccgatctgagacctttctgctcctacagccctggcccagggcccagccacttctccgggcctcctacccaccttttgccactcagcaggtggtcccccctcgagtcactgagccccaccaacggccagtcccatgggacgtgcgggccgtttcagtggaagcggctgtgactccagcagagccctacgcccgggttctcttccacctcaaagggcaggattggccaccagggtctggcagcctgccctgtgcccggctccatgccacacaccctgcaggcactgctcaccaagcctgccgcttccagccatccctgggcgcctgcgtggtggagctggagcttccctcgcactggttctcacaggcctccaccacacgggccgagctggcctacacgcttgagcctgcagctgagggccctgggggctgtggctccggcgaggagaacgaccctggggagcaggccctcccagtggggggtgtggagctgcgcccagcagaccccccgcagtaccaggaggtacctctggacgaggctgtgactctgcgggtgcctgacatgccagtgcggcccggccagctctttagtgctaccctcctgcttcggcacaacttcacagccagcctcctgaccctgcggatcaaggtgaagaaggggctgcatgtgacagccgcccgcccagcccagcccacactctggactgccaagctagaccgcttcaagggctccaggcaccacaccaccctcatcacctgccaccgtgctgggctcacagagccagattccagcagtccccttgaactgtctgagttcctatgggtggactttgtggtggagaatagcactggtgggggcgtagcggtcactcgccccgtcacgtggcagctggagtacccaggccaggcccctgaagcagagaaggacaaaatggtgtgggaaatcctggtgtctgagcgggacatcagagcccttatcccactggccaaggtaaggagacctccatctctgcctgggaaggctggaggccaagtcccaggagccccatgagctgaggggcctggggctgagcccctcctccacccccaggctgaggagctggtgaatacagcaccactgactggagtgccccagcatgtccccgtgcgccttgtcactgtggacggcgggggggccttggtggaggtgacagagcatgtcggctgcgagtctgccaacacacaggtcctgcaggtgagtggcaggtgcccagctcatgtgagtctgcatttgtgtgggcacagttacgcacacacacctttcctccttcctcatgtgggtccccaagagaacagcttcttcttgagacgagaaacctcatgggaggaaccacagcttcaacttcttttgttccagccacctctctcccgagtcaagtaaccctaacagccccccgaccttagacactttcacgctcattattgcactggcaagtgcgctggcctgagagagtcgagagcacatactctgggatcagaaagttttagtttgaaacacatctttgttgtcaaccagctttgtgatcatgggctggtctcttaacctctctgagcctcgttacctaaactttaaaatgagaacatatcttcgggttgttgtaagaattaaaagcactttaagacagtatttagcagatagcaggggctgaaacaatggcagttattgctgttataatatgatgtaataattatacaatggtaaaaattattattattattattaccggtgattgtgaagtgaaataaaagggagggtggtagagcaacttcctctatcttgaagttctaagaggggaagcatggagtctgcatgtatgcaaatcccagccacctgaagggggaaggtgcctttccccacttgtggtcctttgctcaaatgtgtgtggttcctgctggagggccttggtgggagatctgctttgtcccacctctgcctacctggctgtagctggttgccaggtggctccaagagcaatgtcaaaggccagcatgaataaggagccaaagttttgggttcacacccctgctctgccaggaggaagactggtatgcaatggccagttcccctgactgagccccagggaacctcaaggaatggcccctacagtaaaatcttaaacaaagaacaggggcttaaccaacaatcctgctgcaacatgcattccagtgacacacagagctgaactcagtgggagcccgtcctacggcctgaggtcagggctgctctcttctggcccatgccttttttttttttttaatctatttattttgaaacagagtctcactctgtccccaggctggagtgcaatggtacagtccggctcactgcagtctcagctacccaggctcaagggatcctcccacctcagcctccccagtagctaggactacaggcatgtgccaccacacccggctgatttattgtattttttgtagagagggagttttgccatgttgcccaggctggtctcaaactcctggactcaagcgatccacccacctcggcctctcagagtgctgggactacaggcatgagccacccacccggcccagcctcacacctgtctttagtggcttagcccgcccacctgccctctgcccttccataggtgtctgaggcctgtgatgccgtgttcgtggctggcaaggagagccggggcgcccggggggtgcgagtggacttctggtggcgccggctccgcgcctcgctgcggctgaccgtgtgggcccccctgctaccgctgcgtatcgagctcaccgacaccaccctcgagcaggtccgcggctggagggtacctggccctgctgaagggggtgagtggaggcctgaggaagctggcaggccttggcgagtcacactgggacggagagggcgcaggggacacagccatgggcccaagtcggggtcagaaaaactgccctgttgcttgcagttccttctgcccacctccaccctgggccgcccagccaatgatcgctttctgtgaaattgctgacttccgcatccctctcctccttccctgcctcacttctcccgtagcaccctccacttcctaatctacgtcagtactggttaatgttgcctgtccatcctttccacgctcctcccccgagaatgtcagccccttgaagctgcggtctgtctatgctggtcgtaccctcagagcctaagatgacacagagctcaggaaatgaacaccctcggagggggctccccaaaacccagggagaggtggcccacgcctctggaatctagcttccaggcccttcagagagtgagcgcccccagggtccccgtaagagagcgtctcccctgcggtccacttgggagcaagagcggtgatcgaggcacagcgccagtcgggagtgggctggggcggctcgcctgcaggtggaagggcctgaccccaagaggggcggatgtctgcgtttgagaaacaggagctgctggtgattaggagccgccggggacgagctgcgggtctccagcagctgggccctgggcaggctggggccgctcagcgctgacggccagtcccggcctccccgccctgcaggcctgcggaacccgctgcagaggcgtcggatgaggccgagcggcgcgcccgtggctgccacctgcagtaccagcgggccggtgtgcgcttcctcgcccccttcgcggcccacccgctggacggcggccgccgcctcacgcacctgcttggccccgactggctgctagacgtgtcccacctcgtggcgccacacgcccgcgtgctggactcgcgtgtagcctctctggagggtggccgtgtcgtggtgggccgggagcccggtgtcacctccattgaggtgcgttccccactgtctgactccatcctgggggagcaggcgctggctgtgacggacgacaaggtctcagtgctggagctgagggtgcagccagtgatgggcatctcgctgaccttgagccggggcactgcccaccccggggaggtcacagctacgtgctgggcacagtcagcccttcccgccccaaagcaggaggtggccctctccctatggctgtccttctctgatcacactgtggccccagctgagctctacgaccgccgtgacctgggactgtccgtctcagccgaggagcctggtgccatcctgccagctgaggagcagggtgcccagctcggggtggtggtgagtggggcaggcgccgaggggctgccgctgcatgtggctctgcacccgcccgagccctgccgccggggccgccaccgtgtgcctctggcctctggcaccgcctggctggggctgccccctgcctccactccagcccctgctctcccatccagccctgcttggagcccaccagccacagaagccaccatgggtggtaaacggcaggtggcaggcagtgtcgggggcaacacaggtgtgaggggcaagtttgagcgggcagaggaggaggccaggaaggaggagaccgaagccagggaggaggaggaggaagaggaggaggagatggtccctgcccctcagcatgtcactgagctagagctgggcatgtacgccctgctgggagtcttctgcgtggccatcttcatcttcttggtcaatggtgtggtcttcgtcctgcgctatcagcgcaaagaacctcccgacagtgccactgaccccacctccccccagccccacaactgggtctggctgggcactgaccaggaggaactgagccgccagctggaccggcagtcccctggcccgcccaagggggaggggagctgcccctgtgagagtgggggaggaggggaggcccctaccctggcccctggccctcctgggggcaccaccagctcctcaagcaccctggcccgaaaggaggctggggggcggcggaagcgagtagagtttgtgacatttgcgccagcccctccagcccagtcacctgaggagcctgtaggggcccctgctgtgcagtccatccttgtggcaggcgaggaggacatccgctgggtgtgtgaggacatggggctgaaggaccctgaggagcttcgcaactacatggagaggatccggggcagctcctgaccctccacagccacctggtcagccaccagctggggcaacgagggtggaggtcccactgagcctctcgcctgcccccgccactcgtctggtgcttgttgatccaagtcccctgcctggtcccccacaaggactcccatccaggccccctctgccctgccccttgtcatggaccatggtcgtgaggaagggctcatgccccttatttatgggaaccatttcattctaacagaataaaccgagaaggaaaccaga

SEQ ID NO: 372206 - DNA, 2444 bp, Homo sapiens
gctggacgggtgactatgagggctctagccttctgtgcaacctgaggtggcactgaagagggtccccacctccaccctgggccgcccagccaatgatcgctttctgtgaaattgctgacttccgcatccctctcctccttccctgcctcacttctcccgtagcaccctccacttcctaatctacgtcagtactggttaatgttgcctgtccatcctttccacgctcctcccccgagaatgtcagccccttgaagctgcggtctgtctatgctggtcgtaccctcagagcctaagatgacacagagctcaggaaatgaacaccctcggagggggctccccaaaacccagggagaggtggcccacgcctctggaatctagcttccaggcccttcagagagtgagcgcccccagggtccccgtaagagagcgtctcccctgcggtccacttgggagcaagagcggtgatcgaggcacagcgccagtcgggagtgggctggggcggctcgcctgcaggtggaagggcctgaccccaagaggggcggatgtctgcgtttgagaaacaggagctgctggtgattaggagccgccggggacgagctgcgggtctccagcagctgggccctgggcaggctggggccgctcagcgctgacggccagtcccggcctccccgccctgcaggcctgcggaacccgctgcagaggcgtcggatgaggccgagcggcgcgcccgtggctgccacctgcagtaccagcgggccggtgtgcgcttcctcgcccccttcgcggcccacccgctggacggcggccgccgcctcacgcacctgcttggccccgactggctgctagacgtgtcccacctcgtggcgccacacgcccgcgtgctggactcgcgtgtagcctctctggagggtggccgtgtcgtggtgggccgggagcccggtgtcacctccattgaggtgcgttccccactgtctgactccatcctgggggagcaggcgctggctgtgacggacgacaaggtctcagtgctggagctgagggtgcagccagtgatgggcatctcgctgaccttgagccggggcactgcccaccccggggaggtcacagctacgtgctgggcacagtcagcccttcccgccccaaagcaggaggtggccctctccctatggctgtccttctctgatcacactgtggccccagctgagctctacgaccgccgtgacctgggactgtccgtctcagccgaggagcctggtgccatcctgccagctgaggagcagggtgcccagctcggggtggtggtgagtggggcaggcgccgaggggctgccgctgcatgtggctctgcacccgcccgagccctgccgccggggccgccaccgtgtgcctctggcctctggcaccgcctggctggggctgccccctgcctccactccagcccctgctctcccatccagccctgcttggagcccaccagccacagaagccaccatgggtggtaaacggcaggtggcaggcagtgtcgggggcaacacaggtgtgaggggcaagtttgagcgggcagaggaggaggccaggaaggaggagaccgaagccagggaggaggaggaggaagaggaggaggagatggtccctgcccctcagcatgtcactgagctagagctgggcatgtacgccctgctgggagtcttctgcgtggccatcttcatcttcttggtcaatggtgtggtcttcgtcctgcgctatcagcgcaaagaacctcccgacagtgccactgaccccacctccccccagccccacaactgggtctggctgggcactgaccaggaggaactgagccgccagctggaccggcagtcccctggcccgcccaagggggaggggagctgcccctgtgagagtgggggaggaggggaggcccctaccctggcccctggccctcctgggggcaccaccagctcctcaagcaccctggcccgaaaggaggctggggggcggcggaagcgagtagagtttgtgacatttgcgccagcccctccagcccagtcacctgaggagcctgtaggggcccctgctgtgcagtccatccttgtggcaggcgaggaggacatccgctgggtgtgtgaggacatggggctgaaggaccctgaggagcttcgcaactacatggagaggatccggggcagctcctgaccctccacagccacctggtcagccaccagctggggcaacgagggtggaggtcccactgagcctctcgcctgcccccgccactcgtctggtgcttgttgatccaagtcccctgcctggtcccccacaaggactcccatccaggccccctctgccctgccccttgtcatggaccatggtcgtgaggaagggctcatgccccttatttatgggaaccatttcattctaacagaataaaccgagaaggaaaccaga

SEQ ID NO: 372207 - DNA, 4139 bp, Homo sapiens
gctttttcttccctgatcagaagcttccgtgagggagccacacagaactcaccgagtccctcctggcagaggcggccgtcctctgttgcttccagggacgtggccctcttcccgacctcggtcgcctgagcgcgcagggattggggatccgtagggcactaggacccggcggggcggagggggcagcccatgtgctgcgattcgctccctcccaccccactgctcccgctccattgtctgggaattgcagccgcggggcgggcggcggcggcggcggcggcggccgggacccagcgggccaggtggggacggcgcggagcgggtgcgggagatgccgtgcgggactggggccacctgagccgcccgcctcgtccccgccttctgtgggaaggatgtgcgcgcggatggccggtcgcacaacagcggcccctcgggggccctacggcccctggctctgcctcctggtggccctcgccctggacgtcgtgagagtggactgtggccaggctcccctggaccctgtctacctgccggcagccctggagctcctagacgcccctgaacacttccgtgtgcagcaggtgggccactacccacctgccaactcctctctgagctcccgatctgagacctttctgctcctacagccctggcccagggcccagccacttctccgggcctcctacccaccttttgccactcagcaggtggtcccccctcgagtcactgagccccaccaacggccagtcccatgggacgtgcgggccgtttcagtggaagcggctgtgactccagcagagccctacgcccgggttctcttccacctcaaagggcaggattggccaccagggtctggcagcctgccctgtgcccggctccatgccacacaccctgcaggcactgctcaccaagcctgccgcttccagccatccctgggcgcctgcgtggtggagctggagcttccctcgcactggttctcacaggcctccaccacacgggccgagctggcctacacgcttgagcctgcagctgagggccctgggggctgtggctccggcgaggagaacgaccctggggagcaggccctcccagtggggggtgtggagctgcgcccagcagaccccccgcagtaccaggaggtacctctggacgaggctgtgactctgcgggtgcctgacatgccagtgcggcccggccagctctttagtgctaccctcctgcttcggcacaacttcacagccagcctcctgaccctgcggatcaaggtgaagaaggggctgcatgtgacagccgcccgcccagcccagcccacactctggactgccaagctagaccgcttcaagggctccaggcaccacaccaccctcatcacctgccaccgtgctgggctcacagagccagattccagcagtccccttgaactgtctgagttcctatgggtggactttgtggtggagaatagcactggtgggggcgtagcggtcactcgccccgtcacgtggcagctggagtacccaggccaggcccctgaagcagagaaggacaaaatggtgtgggaaatcctggtgtctgagcgggacatcagagcccttatcccactggccaaggctgaggagctggtgaatacagcaccactgactggagtgccccagcatgtccccgtgcgccttgtcactgtggacggcgggggggccttggtggaggtgacagagcatgtcggctgcgagtctgccaacacacaggtcctgcaggtgtctgaggcctgtgatgccgtgttcgtggctggcaaggagagccggggcgcccggggggtgcgagtggacttctggtggcgccggctccgcgcctcgctgcggctgaccgtgtgggcccccctgctaccgctgcgtatcgagctcaccgacaccaccctcgagcaggtccgcggctggagggtacctggccctgctgaagggcctgcggaacccgctgcagaggcgtcggatgaggccgagcggcgcgcccgtggctgccacctgcagtaccagcgggccggtgtgcgcttcctcgcccccttcgcggcccacccgctggacggcggccgccgcctcacgcacctgcttggccccgactggctgctagacgtgtcccacctcgtggcgccacacgcccgcgtgctggactcgcgtgtagcctctctggagggtggccgtgtcgtggtgggccgggagcccggtgtcacctccattgaggtgcgttccccactgtctgactccatcctgggggagcaggcgctggctgtgacggacgacaaggtctcagtgctggagctgagggtgcagccagtgatgggcatctcgctgaccttgagccggggcactgcccaccccggggaggtcacagctacgtgctgggcacagtcagcccttcccgccccaaagcaggtgacagttggggggtcagggggatgaggtcaacatctccagatgggggctcatggtagaggggaatgggaggaagggaccctggtacctcgaccccttagggttttcagagtgaggactgactctgtgaggtagtgagctctctgcagctggaggtgatcaagcagtggctggagtatggcagtgggaggttggttagatggctctaactgaggaccctcccaataactcagaccctagggctgagtggcagacaggtgattgacacgcgtcccctctctccctgtgttttgtctatctgcctgtgtctctgttttctctctggtctctcctccatgtggcctatctctgtgggagtggtttctctgtgcatgcgtgcgtgccctcgcatgtctctgcctgtgtctgtgtgccccacaggaggtggccctctccctatggctgtccttctctgatcacactgtggccccagctgagctctacgaccgccgtgacctgggactgtccgtctcagccgaggagcctggtgccatcctgccagctgaggagcagggtgcccagctcggggtggtggtgagtggggcaggcgccgaggggctgccgctgcatgtggctctgcacccgcccgagccctgccgccggggccgccaccgtgtgcctctggcctctggcaccgcctggctggggctgccccctgcctccactccagcccctgctctcccatccagccctgcttggagcccaccagccacagaagccaccatgggtggtaaacggcaggtggcaggcagtgtcgggggcaacacaggtgtgaggggcaagtttgagcgggcagaggaggaggccaggaaggaggagaccgaagccagggaggaggaggaggaagaggaggaggagatggtccctgcccctcagcatgtcactgagctagagctgggcatgtacgccctgctgggagtcttctgcgtggccatcttcatcttcttggtcaatggtgtggtcttcgtcctgcgctatcagcgcaaagaacctcccgacagtgccactgaccccacctccccccagccccacaactgggtctggctgggcactgaccaggaggaactgagccgccagctggaccggcagtcccctggcccgcccaagggggaggggagctgcccctgtgagagtgggggaggaggggaggcccctaccctggcccctggccctcctgggggcaccaccagctcctcaagcaccctggcccgaaaggaggctggggggcggcggaagcgagtagagtttgtgacatttgcgccagcccctccagcccagtcacctgaggagcctgtaggggcccctgctgtgcagtccatccttgtggcaggcgaggaggacatccgctgggtgtgtgaggacatggggctgaaggaccctgaggagcttcgcaactacatggagaggatccggggcagctcctgaccctccacagccacctggtcagccaccagctggggcaacgagggtggaggtcccactgagcctctcgcctgcccccgccactcgtctggtgcttgttgatccaagtcccctgcctggtcccccacaaggactcccatccaggccccctctgccctgccccttgtcatggaccatggtcgtgaggaagggctcatgccccttatttatgggaaccatttcattctaacagaataaaccgagaaggaaaccaga

SEQ ID NO: 372208 - DNA, 4292 bp, Homo sapiens
gctttttcttccctgatcagaagcttccgtgagggagccacacagaactcaccgagtccctcctggcagaggcggccgtcctctgttgcttccagggacgtggccctcttcccgacctcggtcgcctgagcgcgcagggattggggatccgtagggcactaggacccggcggggcggagggggcagcccatgtgctgcgattcgctccctcccaccccactgctcccgctccattgtctgggaattgcagccgcggggcgggcggcggcggcggcggcggcggccgggacccagcgggccaggtggggacggcgcggagcgggtgcgggagatgccgtgcgggactggggccacctgagccgcccgcctcgtccccgccttctgtgggaaggatgtgcgcgcggatggccggtcgcacaacagcggcccctcgggggccctacggcccctggctctgcctcctggtggccctcgccctggacgtcgtgagagtggactgtggccaggctcccctggaccctgtctacctgccggcagccctggagctcctagacgcccctgaacacttccgtgtgcagcaggtgggccactacccacctgccaactcctctctgagctcccgatctgagacctttctgctcctacagccctggcccagggcccagccacttctccgggcctcctacccaccttttgccactcagcaggtggtcccccctcgagtcactgagccccaccaacggccagtcccatgggacgtgcgggccgtttcagtggaagcggctgtgactccagcagagccctacgcccgggttctcttccacctcaaagggcaggattggccaccagggtctggcagcctgccctgtgcccggctccatgccacacaccctgcaggcactgctcaccaagcctgccgcttccagccatccctgggcgcctgcgtggtggagctggagcttccctcgcactggttctcacaggcctccaccacacgggccgagctggcctacacgcttgagcctgcagctgagggccctgggggctgtggctccggcgaggagaacgaccctggggagcaggccctcccagtggggggtgtggagctgcgcccagcagaccccccgcagtaccaggaggtacctctggacgaggctgtgactctgcgggtgcctgacatgccagtgcggcccggccagctctttagtgctaccctcctgcttcggcacaacttcacagccagcctcctgaccctgcggatcaaggtgaagaaggggctgcatgtgacagccgcccgcccagcccagcccacactctggactgccaagctagaccgcttcaagggctccaggcaccacaccaccctcatcacctgccaccgtgctgggctcacagagccagattccagcagtccccttgaactgtctgagttcctatgggtggactttgtggtggagaatagcactggtgggggcgtagcggtcactcgccccgtcacgtggcagctggagtacccaggccaggcccctgaagcagagaaggacaaaatggtgtgggaaatcctggtgtctgagcgggacatcagagcccttatcccactggccaaggctgaggagctggtgaatacagcaccactgactggagtgccccagcatgtccccgtgcgccttgtcactgtggacggcgggggggccttggtggaggtgacagagcatgtcggctgcgagtctgccaacacacaggtcctgcaggtgtctgaggcctgtgatgccgtgttcgtgggggtgagtggaggcctgaggaagctggcaggccttggcgagtcacactgggacggagagggcgcaggggacacagccatgggcccaagtcggggtcagaaaaactgccctgttgcttgcagttccttctgcccacctccaccctgggccgcccagccaatgatcgctttctgtgaaattgctgacttccgcatccctctcctccttccctgcctcacttctcccgtagcaccctccacttcctaatctacgtcagtactggttaatgttgcctgtccatcctttccacgctcctcccccgagaatgtcagccccttgaagctgcggtctgtctatgctggtcgtaccctcagagcctaagatgacacagagctcaggaaatgaacaccctcggagggggctccccaaaacccagggagaggtggcccacgcctctggaatctagcttccaggcccttcagagagtgagcgcccccagggtccccgtaagagagcgtctcccctgcggtccacttgggagcaagagcggtgatcgaggcacagcgccagtcgggagtgggctggggcggctcgcctgcaggtggaagggcctgaccccaagaggggcggatgtctgcgtttgagaaacaggagctgctggtgattaggagccgccggggacgagctgcgggtctccagcagctgggccctgggcaggctggggccgctcagcgctgacggccagtcccggcctccccgccctgcaggcctgcggaacccgctgcagaggcgtcggatgaggccgagcggcgcgcccgtggctgccacctgcagtaccagcgggccggtgtgcgcttcctcgcccccttcgcggcccacccgctggacggcggccgccgcctcacgcacctgcttggccccgactggctgctagacgtgtcccacctcgtggcgccacacgcccgcgtgctggactcgcgtgtagcctctctggagggtggccgtgtcgtggtgggccgggagcccggtgtcacctccattgaggtgcgttccccactgtctgactccatcctgggggagcaggcgctggctgtgacggacgacaaggtctcagtgctggagctgagggtgcagccagtgatgggcatctcgctgaccttgagccggggcactgcccaccccggggaggtcacagctacgtgctgggcacagtcagcccttcccgccccaaagcaggaggtggccctctccctatggctgtccttctctgatcacactgtggccccagctgagctctacgaccgccgtgacctgggactgtccgtctcagccgaggagcctggtgccatcctgccagctgaggagcagggtgcccagctcggggtggtggtgagtggggcaggcgccgaggggctgccgctgcatgtggctctgcacccgcccgagccctgccgccggggccgccaccgtgtgcctctggcctctggcaccgcctggctggggctgccccctgcctccactccagcccctgctctcccatccagccctgcttggagcccaccagccacagaagccaccatgggtggtaaacggcaggtggcaggcagtgtcgggggcaacacaggtgtgaggggcaagtttgagcgggcagaggaggaggccaggaaggaggagaccgaagccagggaggaggaggaggaagaggaggaggagatggtccctgcccctcagcatgtcactgagctagagctgggcatgtacgccctgctgggagtcttctgcgtggccatcttcatcttcttggtcaatggtgtggtcttcgtcctgcgctatcagcgcaaagaacctcccgacagtgccactgaccccacctccccccagccccacaactgggtctggctgggcactgaccaggaggaactgagccgccagctggaccggcagtcccctggcccgcccaagggggaggggagctgcccctgtgagagtgggggaggaggggaggcccctaccctggcccctggccctcctgggggcaccaccagctcctcaagcaccctggcccgaaaggaggctggggggcggcggaagcgagtagagtttgtgacatttgcgccagcccctccagcccagtcacctgaggagcctgtaggggcccctgctgtgcagtccatccttgtggcaggcgaggaggacatccgctgggtgtgtgaggacatggggctgaaggaccctgaggagcttcgcaactacatggagaggatccggggcagctcctgaccctccacagccacctggtcagccaccagctggggcaacgagggtggaggtcccactgagcctctcgcctgcccccgccactcgtctggtgcttgttgatccaagtcccctgcctggtcccccacaaggactcccatccaggccccctctgccctgccccttgtcatggaccatggtcgtgaggaagggctcatgccccttatttatgggaaccatttcattctaacagaataaaccgagaaggaaaccaga

SEQ ID NO: 372209 - DNA, 2152 bp, Homo sapiens
tctcttccacctcaaagggcaggattggccaccagggtctggcagcctgccctgtgccgggctccatgccacacaccctggacgtcgtgagagtggactgtggccaggctcccctggaccctgtctacctgccggcagccctggagctcctagacgcccctgaacacttccgtgtgcagcaggtgggccactacccacctgccaactcctctctgagctcccgatctgagacctttctgctcctacagccctggcccagggcccagccactttccgcgcctcgctgcggctgaccgtgtgggcccccctgctaccgctgcgtatcgagctcaccgacaccaccctcgagcaggtccgcggctggagggtacctggccctgctgaagggcctgcggaacccgctgcagaggcgtcggatgaggccgagcggcgcgcccgtggctgccacctgcagtaccagcgggccggtgtgcgcttcctcgcccccttcgcggcccacccgctggacggcggccgccgcctcacgcacctgcttggccccgactggctgctagacgtgtcccacctcgtggcgccacacgcccgcgtgctggactcgcgtgtagcctctctggagggtggccgtgtcgtggtgggccgggagcccggtgtcacctccattgaggtgcgttccccactgtctgactccatcctgggggagcaggcgctggctgtgacggacgacaaggtctcagtgctggagctgagggtgcagccagtgatgggcatctcgctgaccttgagccggggcactgcccaccccggggaggtcacagctacgtgctgggcacagtcagcccttcccgccccaaagcaggaggtggccctctccctatggctgtccttctctgatcacactgtggccccagctgagctctacgaccgccgtgacctgggactgtccgtctcagccgaggagcctggtgccatcctgccagctgaggagcagggtgcccagctcggggtggtggtgagtggggcaggcgccgaggggctgccgctgcatgtggctctgcacccgcccgagccctgccgccggggccgccaccgtgtgcctctggcctctggcaccgcctggctggggctgccccctgcctccactccagcccctgctctcccatccagccctgcttggagcccaccagccacagaagccaccatgggtggtaaacggcaggtggcaggcagtgtcgggggcaacacaggtgtgaggggcaagtttgagcgggcagaggaggaggccaggaaggaggagaccgaagccagggaggaggaggaggaagaggaggaggagatggtccctgcccctcagcatgtcactgagctagagctgggcatgtacgccctgctgggagtcttctgcgtggccatcttcatcttcttggtcaatggtgtggtcttcgtcctgcgctatcagcgcaaagaacctcccgacagtgccactgaccccacctccccccagccccacaactgggtctggctgggcactgaccaggaggaactgagccgccagctggaccggcagtcccctggcccgcccaagggggaggggagctgcccctgtgagagtgggggaggaggggaggcccctaccctggcccctggccctcctgggggcaccaccagctcctcaagcaccctggcccgaaaggaggctggggggcggcggaagcgagtagagtttgtgacatttgcgccagcccctccagcccagtcacctgaggagcctgtaggggcccctgctgtgcagtccatccttgtggcaggcgaggaggacatccgctgggtgtgtgaggacatggggctgaaggaccctgaggagcttcgcaactacatggagaggatccggggcagctcctgaccctccacagccacctggtcagccaccagctggggcaacgagggtggaggtcccactgagcctctcgcctgcccccgccactcgtctggtgcttgttgatccaagtcccctgcctggtcccccacaaggactcccatccaggccccctctgccctgccccttgtcatggaccatggtcgtgaggaagggctcatgccccttatttatgggaaccatttcattctaacagaataaaccgagaaggaaaccaga

SEQ ID NO: 372210 - DNA, 843 bp, Homo sapiens
agagtggcgcgcagccccgggacgcgtaagagccgctgccggctcctttttctctctcccactagggctgcccttccgacgctaaaaaagcagtggagctagggtgaaagccgccctcacgctcacttccggcaggcgcgcctcccgacagtgtcgtgcggggggcgtggcccggcattgctgacaggcggccccgggggcggtggccaaggcggcgaccggagcgcgatggcgggggcggcgggactcacggcagaagtgagctggaaggtcttggagcgaagagctcggaccaagcgctcaggctcagtttatgaacctcttaaaagcattaatcttccaagacctgataatgaaactctctgggataagttggaccattattacagaattgtcaagtcaacattgctgctgtatcaaagtccaactaccggtctctttcccactaaaacatgcggtggtgaccagaaggccaagatccaggacagcctatactgcgctgctggggcctgggctttggctcttgcatacaggcgaattgatgatgacaagggaaggacccatgagctggagcactcagctataaaatgcatgagaggaattctctactgctatatgcgtcaggccgataaggtccagcagtttaagcaggatccacgcccaacaacatgtcttcactctgttttcaatgtgcatacaggagatgagttgctttcctatgaggaatatggtcatcttcagataaatgcagtgtcactttatctcctttaccttgtggaaatgatttcctcaggactccagattatctacaacactgatgagatggagtcttgctctgtcacg

SEQ ID NO: 372211 - DNA, 758 bp, Homo sapiens
aacagtgtctgcttttctacccccacttttctatgtcacatttgatttggggaaaataaattatacaaaataccatattatcccatcctataaattactcccggaaaacaagtcatgtgtttagaagctgtgccattaagactgatttcttttgcatactttgtgttacaacacttgtcactattgcagttgttggtttacatgcctgacttcctcaaagaggtcctgagagtagagaatgtgtcttactcttgccttctcttagcctagtttggtatttgacaggaccagagaatagaagtgatagatacaatgataactactattgattgtgtttcttttgtttataggcactgtacatgccacttctacccacattatatctgattttaacatttttttctgagacaaatattatatccattttacaggtagacaacgtgagtctcagagaggtttagtaatctctccaaggtcccacagttgtcaagtgacagaaccaatatgaaggcgttaactgaagaatgaaaggaaggagggaatgtcaagcatttggaagcagtgatttttgtaatggtgtgaaggagttaacaggagaaatagcttgttcttgaacagcctggctgaatatcacatcataggaacacagttgcaccggtgccttaggatgctgagagttctgtgaaagtgatctgtaatcccagcactttgggaggctgaggcaggtggatcacttgagcccaggagttctagaccag

SEQ ID NO: 372212 - DNA, 4783 bp, Homo sapiens
  misc_feature (4607)..(4607): n is a, c, g, or t
  misc_feature (4613)..(4613): n is a, c, g, or t
agagtggcgcgcagccccgggacgcgtaagagccgctgccggctcctttttctctctcccactagggctgcccttccgacgctaaaaaagcagtggagctagggtgaaagccgccctcacgctcacttccggcaggcgcgcctcccgacagtgtcgtgcggggggcgtggcccggcattgctgacaggcggccccgggggcggtggccaaggcggcgaccggagcgcgatggcgggggcggcgggactcacggcagaagtgagctggaaggtcttggagcgaagagctcggaccaagcgctcaggctcagtttatgaacctcttaaaagcattaatcttccaagacctgataatgaaactctctgggataagttggaccattattacagaattgtcaagtcaacattgctgctgtatcaaagtccaactaccggtctctttcccactaaaacatgcggtggtgaccagaaggccaagatccaggacagcctatactgcgctgctggggcctgggctttggctcttgcatacaggcgaattgatgatgacaagggaaggacccatgagctggagcactcagctataaaatgcatgagaggaattctctactgctatatgcgtcaggccgataaggtccagcagtttaagcaggatccacgcccaacaacatgtcttcactctgttttcaatgtgcatacaggagatgagttgctttcctatgaggaatatggtcatcttcagataaatgcagtgtcactttatctcctttaccttgtggaaatgatttcctcaggactccagattatctacaacactgatgaggtctcttttattcaaaaccttgtattttgtgtggaaagagtttaccgtgtgcctgactttggtgtctgggaaagaggaagcaaatataataatggcagcacagagctacattcgagctcggttggtttagcaaaagcagctctagaagcaattaatggattcaacctttttggcaaccagggctgttcgtggtcagttatatttgtggatctcgatgctcacaatcgcaacaggcaaactttgtgctcgctgttacccagagaatcaagatcacataatacagatgctgccctgctcccctgcatcagttatcctgcatttgccctggatgatgaagttctttttagccagacacttgataaagtggttagaaaattaaaaggaaaatatggatttaaacgtttcttgagagatgggtatagaacatcattggaagatcccaacagatgctactacaagccagctgaaattaagctatttgatggcattgaatgtgaatttcccatatttttcctttatatgatgattgatggagtttttagaggcaatcctaagcaagtacaggaatatcaggatcttttgactccagtacttcatcataccacagaaggatatcctgttgtaccaaagtactattatgtgccagctgactttgtagaatatgaaaaaaataaccctggtagtcaaaaacgatttcctagcaactgtggccgtgatggaaaactgtttctttggggacaagcactttatatcatcgcaaaactcctggctgatgaacttattagtcctaaagacattgatcctgtccagcgctatgtcccactaaaggatcaacgtaacgtgagcatgaggttttccaatcagggcccactggaaaatgacttggtagttcatgtggcacttatagcagaaagccaaagacttcaagtttttctgaacacatatggtattcaaactcaaactcctcaacaagtagaacccattcagatatggcctcagcaggagcttgtgaaagcttatttgcagctgggtatcaatgaaaagttaggactctctggaaggccagacaggcccattggctgcctcgggacatcaaagatttatcgcattctaggaaagactgtggtttgttacccgattattttcgacctaagtgatttctacatgtctcaggatgttttcctgctgatagatgacataaagaatgcgctgcagttcattaaacaatattggaaaatgcatggacgtccacttttccttgttctcatccgggaagacaatataagaggtagccggttcaaccccatattagatatgctggcagcccttaaaaaaggaataattggaggagtcaaagttcatgtggatcgtctacagacactaatatctggagctgtggtagaacaacttgatttcctacgaatcagtgacacagaagagcttccagaatttaagagttttgaggaactagaacctcccaaacattcaaaagtcaaacggcaaagcagcacccctagtgctcctgaactgggacagcagccggatgtcaacattagtgaatggaaggacaaacccacccacgaaattcttcaaaaactgaatgattgcagttgtctggctagccaagccatcctgctgggtatactgctcaaaagagaaggccccaacttcatcacaaaggaaggtaccgtttctgatcacattgagagagtctatagaagagctggcagccaaaaactttggtcggttgtacgccgtgcagcaagtcttttaagtaaagtagtggacagcctggccccatccattactaatgttttagtgcagggcaaacaggtaactctgggtgcctttgggcatgaagaagaagttatctctaatcctttgtctccaagagtgattcaaaacatcatctattataagtgtaacacccatgatgagagggaagcggtcattcagcaagaactggtcatccatattggctggatcatctccaataaccctgagttattcagtggcatgctgaaaatacgaatcgggtggatcatccatgccatggagtatgaacttcagatccgtggcggagacaagccagccttggacttgtatcagctgtcacctagtgaagttaaacagcttctgctggatattctgcagcctcaacagaatggaagatgttggctgaacaggcgtcagatcgatgggtctttgaatagaactcccaccgggttctatgaccgagtgtggcagattctggagcgcacgcccaatgggatcattgttgctgggaagcatttgcctcagcaaccaaccctgtcagatatgaccatgtatgagatgaatttctctctccttgttgaagacacgttgggaaatattgaccagccacagtacagacagatcgttgtagagttacttatggttgtatccattgtactggaaagaaaccccgagctagaatttcaagacaaagtagatctagacagactggtcaaagaagcatttaatgaatttcaaaaagatcagagtcggctaaaggaaattgaaaaacaagatgacatgacttccttttacaacactcctcccctgggaaaaagaggaacatgcagctatttgacaaaggcggtgatgaatctgctgctggaaggagaagtcaagccaaacaatgatgacccgtgtctgattagctagtggggaaggtgtaggaagctctgttgagacacatgttctgaagtgtgttgtgtttcatgttcaagcttaatcaaggcagccattaatatacgaactgagcatgctggggaggtgaatgccacatccttggcggggttatggacctcttgcatgtcatagccaatctaacggtaatggtaaatgcttttaatcaagcaggaaaaagttctcatgattatgccaactataatagtaatcctcactgagtgataaaaatagtttatgaattgaaaatttgccgctgcatgttgtatgatcaaatagttcatcaaaatgaatctttgctctttggactgaattcttaccatactgccattaaaataaatttgccaactagtaatgcatactggaaatcaaaagatactgaaagaatggtgaacttctcttagtggtattgtcatgctaaaagatgttaatatacatcataaaagcaaagtcagccagctgatattttggttctcaaaaactgcattattaataatattttagtatacagagctattctacagtttttacattgtaaacatgactgtggttttgtatttgctaaatataggggttggactaaaatataataaatctgtaccttatcaaacattttctttgagctcctgctaaaaataggacatgtctatgattgttcaaaaatatgttaaatttaggctcagcacagtagctcacacctgaaatcttagcacttcgggaggctgaggcaggtggatcacttgaggttaggagttcaagaccagcccagccaacatggtgaaaaccctgtctctactaaaaatacaaaaattagccaggcatgatggtgcatgcctttaaacccagctactgaggaggctgaggcatgagaattgcttgaaccaggagacggaggttgcagtgagctgaaatcctgccactgcacaccagcctgggtgacagagcgagactccatctcaaaaaaaaaaaaaaaaaagaaaaagaaaaaaatatgttaaatttaaggactgttaacctacgttctactagtaaaaacaacattaagggtcattaaattttatttctgaattaanaaaaanaaaaaaaaaaaaaaaaaaaaaaaaaaaaaaaaaaaaaaaaaaacccggggttttttttttttttttccctgccaaacctttaagggtttttgggcggggaacctaaaggggggaaccggaaaatccttggggggtttgccaccacccaggggcccgttttccacaataat

SEQ ID NO: 372213 - DNA, 5769 bp, Homo sapiens
agagtggcgcgcagccccgggacgcgtaagagccgctgccggctcctttttctctctcccactagggctgcccttccgacgctaaaaaagcagtggagctagggtgaaagccgccctcacgctcacttccggcaggcgcgcctcccgacagtgtcgtgcggggggcgtggcccggcattgctgacaggcggccccgggggcggtggccaaggcggcgaccggagcgcgatggcgggggcggcgggactcacggcagaagtgagctggaaggtcttggagcgaagagctcggaccaagcgctcagcttagcctgcgacgcttatgattagagccaacaatttgaaatggcctgctcacctgatgcagtcgtctctccgtcttccgctttcttaaggtctggctcagtttatgaacctcttaaaagcattaatcttccaagacctgataatgaaactctctgggataagttggaccattattacagaattgtcaagtcaacattgctgctgtatcaaagtccaactaccggtctctttcccactaaaacatgcggtggtgaccagaaggccaagatccaggacagcctatactgcgctgctggggcctgggctttggctcttgcatacaggcgaattgatgatgacaagggaaggacccatgagctggagcactcagctataaaatgcatgagaggaattctctactgctatatgcgtcaggccgataaggtccagcagtttaagcaggatccacgcccaacaacatgtcttcactctgttttcaatgtgcatacaggagatgagttgctttcctatgaggaatatggtcatcttcagataaatgcagtgtcactttatctcctttaccttgtggaaatgatttcctcaggactccagattatctacaacactgatgaggtctcttttattcaaaaccttgtattttgtgtggaaagagtttaccgtgtgcctgactttggtgtctgggaaagaggaagcaaatataataatggcagcacagagctacattcgagctcggttggtttagcaaaagcagctctagaagcaattaatggattcaacctttttggcaaccagggctgttcgtggtcagttatatttgtggatctcgatgctcacaatcgcaacaggcaaactttgtgctcgctgttacccagagaatcaagatcacataatacagatgctgccctgctcccctgcatcagttatcctgcatttgccctggatgatgaagttctttttagccagacacttgataaagtggttagaaaattaaaaggaaaatatggatttaaacgtttcttgagagatgggtatagaacatcattggaagatcccaacagatgctactacaagccagctgaaattaagctatttgatggcattgaatgtgaatttcccatatttttcctttatatgatgattgatggagtttttagaggcaatcctaagcaagtacaggaatatcaggatcttttgactccagtacttcatcataccacagaaggatatcctgttgtaccaaagtactattatgtgccagctgactttgtagaatatgaaaaaaataaccctggtagtcaaaaacgatttcctagcaactgtggccgtgatggaaaactgtttctttggggacaagcactttatatcatcgcaaaactcctggctgatgaacttattagtcctaaagacattgatcctgtccagcgctatgtcccactaaaggatcaacgtaacgtgagcatgaggttttccaatcagggcccactggaaaatgacttggtagttcatgtggcacttatagcagaaagccaaagacttcaagtttttctgaacacatatggtattcaaactcaaactcctcaacaagtagaacccattcagatatggcctcagcaggagcttgtgaaagcttatttgcagctgggtatcaatgaaaagttaggactctctggaaggccagacaggcccattggctgcctcgggacatcaaagatttatcgcattctaggaaagactgtggtttgttacccgattattttcgacctaagtgatttctacatgtctcaggatgttttcctgctgatagatgacataaagaatgcgctgcagttcattaaacaatattggaaaatgcatggacgtccacttttccttgttctcatccgggaagacaatataagaggtagccggttcaaccccatattagatatgctggcagcccttaaaaaaggaataattggaggagtcaaagttcatgtggatcgtctacagacactaatatctggagctgtggtagaacaacttgatttcctacgaatcagtgacacagaagagcttccagaatttaagagttttgaggaactagaacctcccaaacattcaaaagtcaaacggcaaagcagcacccctagtgctcctgaactgggacagcagccggatgtcaacattagtgaatggaaggacaaacccacccacgaaattcttcaaaaactgaatgattgcagttgtctggctagccaagccatcctgctgggtatactgctcaaaagagaaggccccaacttcatcacaaaggaaggtaccgtttctgatcacattgagagagtctatagaagagctggcagccaaaaactttggtcggttgtacgccgtgcagcaagtcttttaagtaaagtagtggacagcctggccccatccattactaatgttttagtgcagggcaaacaggtaactctgggtgcctttgggcatgaagaagaagttatctctaatcctttgtctccaagagtgattcaaaacatcatctattataagtgtaacacccatgatgagagggaagcggtcattcagcaagaactggtcatccatattggctggatcatctccaataaccctgagttattcagtggcatgctgaaaatacgaatcgggtggatcatccatgccatggagtatgaacttcagatccgtggcggagacaagccagccttggacttgtatcagctgtcacctagtgaagttaaacagcttctgctggatattctgcagcctcaacagaatggaagatgttggctgaacaggcgtcagatcgatgggtctttgaatagaactcccaccgggttctatgaccgagtgtggcagattctggagcgcacgcccaatgggatcattgttgctgggaagcatttgcctcagcaaccaaccctgtcagatatgaccatgtatgagatgaatttctctctccttgttgaagacacgttgggaaatattgaccagccacagtacagacagatcgttgtagagttacttatggttgtatccattgtactggaaagaaaccccgagctagaatttcaagacaaagtagatctagacagactggtcaaagaagcatttaatgaatttcaaaaagatcagagtcggctaaaggaaattgaaaaacaagatgacatgacttccttttacaacactcctcccctgggaaaaagaggaacatgcagctatttgacaaaggcggtgatgaatctgctgctggaaggagaagtcaagccaaacaatgatgacccgtgtctgattagctagtggggaaggtgtaggaagctctgttgagacacatgttctgaagtgtgttgtgtttcatgttcaagcttaatcaaggcagccattaatatacgaactgagcatgctggggaggtgaatgccacatccttggcggggttatggacctcttgcatgtcatagccaatctaacggtaatggtaaatgcttttaatcaagcaggaaaaagttctcatgattatgccaactataatagtaatcctcactgagtgataaaaatagtttatgaattgaaaatttgccgctgcatgttgtatgatcaaatagttcatcaaaatgaatctttgctctttggactgaattcttaccatactgccattaaaataaatttgccaactagtaatgcatactggaaatcaaaagatactgaaagaatggtgaacttctcttagtggtattgtcatgctaaaagatgttaatatacatcataaaagcaaagtcagccagctgatattttggttctcaaaaactgcattattaataatattttagtatacagagctattctacagtttttacattgtaaacatgactgtggttttgtatttgctaaatataggggttggactaaaatataataaatctgtaccttatcaaacattttctttgagctcctgctaaaaataggacatgtctatgattgttcaaaaatatgttaaatttaggctcagcacagtagctcacacctgaaatcttagcacttcgggaggctgaggcaggtggatcacttgaggttaggagttcaagaccagcccagccaacatggtgaaaaccctgtctctactaaaaatacaaaaattagccaggcatgatggtgcatgcctttaaacccagctactgaggaggctgaggcatgagaattgcttgaaccaggagacggaggttgcagtgagctgaaatcctgccactgcacaccagcctgggtgacagagcgagactccatctcaaaaaaaaaaaaaaaaaagaaaaagaaaaaaatatgttaaatttaaggactgttaacctacgttctactagtaaaaacaacattaagggtcattaaattttatttctgaattaatgaacatatctggacattttttgttcctaggttcacaagattgagcttcaaactcccgagtgttttcatttaattgatttagaggtagaatggaagagaatctgtggtacctaccattatacacatttagttgcccagtttacttaaactttaatgaaagtagaaagtagattaaacatttaaattttatttctttcctaaatagaaaaaaaaaaggcccatgagtttgagcccttgccccaaagagagttgtttttctgatcaatcttactggagtttcacctgagaagatagatttgtcacataaaaaatgcagcttatttgtagtgttttgaaaggatgtaagaaaggatgagtggcttcagtattgagtcaatcgatatcaaatgaatggatgtgtgagcacatggaaaaatctgctgtcagtcacatttctcataacattgaggtacagtgccgagatcttgcataagaaattgtatggatattagttggcaaaattgaaatgaatgagacacagttgggccctaaagaactaaggagggggattgacaaagaatagaattaaactacttgactcaatatgttaagagagtttatgaaaagatagtcgtgaagggtgaagctaatttgtaaaactaatgcctgaaaaaaacataagcatgaagtccatggagagggaattgagagctgacacttcataactggagaaactggaaattaaagaaagggaaacaaaagacttaaaatttttgtttgccgaaatttttacgaaagtaaactgtgttgtagttttaagaatttttttaaaaaatctgattagctgagcaaagttaccagaaaactgctatcctagttgaaatcaaacattacttgcaaatgtgttttctgagtgttagcttcctgcttaaatgttacatatgcaaaattctgaagttttcctgtgctactcctgaaagcattcagaatctgtgacacgtattgacttcatgctttgagattcaaaatttattgttctgaaagttatatttagaatcagtaaatcttgatattcacctttaaaaaagc

SEQ ID NO: 372214 - DNA, 4611 bp, Homo sapiens
  misc_feature (4526)..(4526): n is a, c, g, or t
  misc_feature (4568)..(4568): n is a, c, g, or t
agagtggcgcgcagccccgggacgcgtaagagccgctgccggctcctttttctctctcccactagggctgcccttccgacgctaaaaaagcagtggagctagggtgaaagccgccctcacgctcacttccggcaggcgcgcctcccgacagtgtcgtgcggggggcgtggcccggcattgctgacaggcggccccgggggcggtggccaaggcggcgaccggagcgcgatggcgggggcggcgggactcacggcagaagtgagctggaaggtcttggagcgaagagctcggaccaagcgctcagcttagcctgcgacgcttatgattagagccaacaatttgaaatggcctgctcacctgatgcagtcgtctctccgtcttccgctttcttaaggtctggctcagtttatgaacctcttaaaagcattaatcttccaagacctgataatgaaactctctgggataagttggaccattattacagaattgtcaagtcaacattgctgctgtatcaaagtccaactaccggtctctttcccactaaaacatgcggtggtgaccagaaggccaagatccaggacagcctatactgcgctgctggggcctgggctttggctcttgcatacaggcgaattgatgatgacaagggaaggacccatgagctggagcactcagctataaaatgcatgagaggaattctctactgctatatgcgtcaggccgataaggtccagcagtttaagcaggatccacgcccaacaacatgtcttcactctgttttcaatgtgcatacaggagatgagttgctttcctatgaggaatatggtcatcttcagataaatgcagtgtcactttatctcctttaccttgtggaaatgatttcctcaggactccagattatctacaacactgatgaggtctcttttattcaaaaccttgtattttgtgtggaaagagtttaccgtgtgcctgactttggtgtctgggaaagaggaagcaaatataataatggcagcacagagctacattcgagctcggttggtttagcaaaagcagctctagaagcaattaatggattcaacctttttggcaaccagggctgttcgtggtcagttatatttgtggatctcgatgctcacaatcgcaacaggcaaactttgtgctcgctgttacccagagaatcaagatcacataatacagatgctgccctgctcccctgcatcagttatcctgcatttgccctggatgatgaagttctttttagccagacacttgataaagtggttagaaaattaaaaggaaaatatggatttaaacgtttcttgagagatgggtatagaacatcattggaagatcccaacagatgctactacaagccagctgaaattaagctatttgatggcattgaatgtgaatttcccatatttttcctttatatgatgattgatggagtttttagaggcaatcctaagcaagtacaggaatatcaggatcttttgactccagtacttcatcataccacagaaggatatcctgttgtaccaaagtactattatgtgccagctgactttgtagaatatgaaaaaaataaccctggtagtcaaaaacgatttcctagcaactgtggccgtgatggaaaactgtttctttggggacaagcactttatatcatcgcaaaactcctggctgatgaacttattagtcctaaagacattgatcctgtccagcgctatgtcccactaaaggatcaacgtaacgtgagcatgaggttttccaatcagggcccactggaaaatgacttggtagttcatgtggcacttatagcagaaagccaaagacttcaagtttttctgaacacatatggtattcaaactcaaactcctcaacaagtagaacccattcagatatggcctcagcaggagcttgtgaaagcttatttgcagctgggtatcaatgaaaagttaggactctctggaaggccagacaggcccattggctgcctcgggacatcaaagatttatcgcattctaggaaagactgtggtttgttacccgattattttcgacctaagtgatttctacatgtctcaggatgttttcctgctgatagatgacataaagaatgcgctgcagttcattaaacaatattggaaaatgcatggacgtccacttttccttgttctcatccgggaagacaatataagaggtagccggttcaaccccatattagatatgctggcagcccttaaaaaaggaataattggaggagtcaaagttcatgtggatcgtctacagacactaatatctggagctgtggtagaacaacttgatttcctacgaatcagtgacacagaagagcttccagaatttaagagttttgaggaactagaacctcccaaacattcaaaagtcaaacggcaaagcagcacccctagtgctcctgaactgggacagcagccggatgtcaacattagtgaatggaaggacaaacccacccacgaaattcttcaaaaactgaatgattgcagttgtctggctagccaagccatcctgctgggtatactgctcaaaagagaaggccccaacttcatcacaaaggaaggtaccgtttctgatcacattgagagagtctatagaagagctggcagccaaaaactttggtcggttgtacgccgtgcagcaagtcttttaagtaaagtagtggacagcctggccccatccattactaatgttttagtgcagggcaaacaggtaactctgggtgcctttgggcatgaagaagaagttatctctaatcctttgtctccaagagtgattcaaaacatcatctattataagtgtaacacccatgatgagagggaagcggtcattcagcaagaactggtcatccatattggctggatcatctccaataaccctgagttattcagtggcatgctgaaaatacgaatcgggtggatcatccatgccatggagtatgaacttcagatccgtggcggagacaagccagccttggacttgtatcagctgtcacctagtgaagttaaacagcttctgctggatattctgcagcctcaacagaatggaagatgttggctgaacaggcgtcagatcgatgggtctttgaatagaactcccaccgggttctatgaccgagtgtggcagattctggagcgcacgcccaatgggatcattgttgctgggaagcatttgcctcagcaaccaaccctgtcagatatgaccatgtatgagatgaatttctctctccttgttgaagacacgttgggaaatattgaccagccacagtacagacagatcgttgtagagttacttatggttgtatccattgtactggaaagaaaccccgagctagaatttcaagacaaagtagatctagacagactggtcaaagaagcatttaatgaatttcaaaaagatcagagtcggctaaaggaaattgaaaaacaagatgacatgacttccttttacaacactcctcccctgggaaaaagaggaacatgcagctatttgacaaaggcggtgatgaatctgctgctggaaggagaagtcaagccaaacaatgatgacccgtgtctgattagctagtggggaaggtgtaggaagctctgttgagacacatgttctgaagtgtgttgtgtttcatgttcaagcttaatcaaggcagccattaatatacgaactgagcatgctggggaggtgaatgccacatccttggcggggttatggacctcttgcatgtcatagccaatctaacggtaatggtaaatgcttttaatcaagcaggaaaaagttctcatgattatgccaactataatagtaatcctcactgagtgataaaaatagtttatgaattgaaaatttgccgctgcatgttgtatgatcaaatagttcatcaaaatgaatctttgctctttggactgaattcttaccatactgccattaaaataaatttgccaactagtaatgcatactggaaatcaaaagatactgaaagaatggtgaacttctcttagtggtattgtcatgctaaaagatgttaatatacatcataaaagcaaagtcagccagctgatattttggttctcaaaaactgcattattaataatattttagtatacagagctattctacagtttttacattgtaaacatgactgtggttttgtatttgctaaatataggggttggactaaaatataataaatctgtaccttatcaaacattttctttgagctcctgctaaaaataggacatgtctatgattgttcaaaaatatgttaaatttaggctcagcacagtagctcacacctgaaatcttagcacttcggcctcccaaaatgctgggattacaggtgtgagccaccacgcccaacctttaggcacatcttttgaaccaattcagtgttatttaatttcttcaagtgtcttactactttccatggattgaggatagtttaggcatttccatatttaaagtacatttaatttccattacagtttgtggaangagacaggcatggaggtagggtgcgacttttgccggttcggncaccggggaccggccgtttaccctaggggggggtttgcctgag

SEQ ID NO: 372215 - DNA, 5842 bp, Homo sapiens
agagtggcgcgcagccccgggacgcgtaagagccgctgccggctcctttttctctctcccactagggctgcccttccgacgctaaaaaagcagtggagctagggtgaaagccgccctcacgctcacttccggcaggcgcgcctcccgacagtgtcgtgcggggggcgtggcccggcattgctgacaggcggccccgggggcggtggccaaggcggcgaccggagcgcgatggcgggggcggcgggactcacggcagaagtgagctggaaggtcttggagcgaagagctcggaccaagcgctcagcttagcctgcgacgcttatgattagagccaacaatttgaaatggcctgctcacctgatgcagtcgtctctccgtcttccgctttcttaaggtctggctcagtttatgaacctcttaaaagcattaatcttccaagacctgataatgaaactctctgggataagttggaccattattacagaattgtcaagtcaacattgctgctgtatcaaagtccaactaccggtctctttcccactaaaacatgcggtggtgaccagaaggccaagatccaggacagcctatactgcgctgctggggcctgggctttggctcttgcatacaggcgaattgatgatgacaagggaaggacccatgagctggagcactcagctataaaatgcatgagaggaattctctactgctatatgcgtcaggccgataaggtccagcagtttaagcaggatccacgcccaacaacatgtcttcactctgttttcaatgtgcatacaggagatgagttgctttcctatgaggaatatggtcatcttcagataaatgcagtgtcactttatctcctttaccttgtggaaatgatttcctcaggactccagattatctacaacactgatgaggtctcttttattcaaaaccttgtattttgtgtggaaagagtttaccgtgtgcctgactttggtgtctgggaaagaggaagcaaatataataatggcagcacagagctacattcgagctcggttggtttagcaaaagcagctctagaagcaattaatggattcaacctttttggcaaccagggctgttcgtggtcagttatatttgtggatctcgatgctcacaatcgcaacaggcaaactttgtgctcgctgttacccagagaatcaagatcacataatacagatgctgccctgctcccctgcatcagttatcctgcatttgccctggatgatgaagttctttttagccagacacttgataaagtggttagaaaattaaaaggaaaatatggatttaaacgtttcttgagagatgggtatagaacatcattggaagatcccaacagatgctactacaagccagctgaaattaagctatttgatggcattgaatgtgaatttcccatatttttcctttatatgatgattgatggagtttttagaggcaatcctaagcaagtacaggaatatcaggatcttttgactccagtacttcatcataccacagaaggatatcctgttgtaccaaagtactattatgtgccagctgactttgtagaatatgaaaaaaataaccctggtagtcaaaaacgatttcctagcaactgtggccgtgatggaaaactgtttctttggggacaagcactttatatcatcgcaaaactcctggctgatgaacttattagtcctaaagacattgatcctgtccagcgctatgtcccactaaaggatcaacgtaacgtgagcatgaggttttccaatcagggcccactggaaaatgacttggtagttcatgtggcacttatagcagaaagccaaagacttcaagtttttctgaacacatatggtattcaaactcaaactcctcaacaagtagaacccattcagatatggcctcagcaggagcttgtgaaagcttatttgcagctgggtatcaatgaaaagttaggactctctggaaggccagacaggcccattggctgcctcgggacatcaaagatttatcgcattctaggaaagactgtggtttgttacccgattattttcgacctaagtgatttctacatgtctcaggatgttttcctgctgatagatgacataaagaatgcgctgcagttcattaaacaatattggaaaatgcatggacgtccacttttccttgttctcatccgggaagacaatataagaggtagccggttcaaccccatattagatatgctggcagcccttaaaaaaggaataattggaggagtcaaagttcatgtggatcgtctacagacactaatatctggagctgtggtagaacaacttgatttcctacgaatcagtgacacagaagagcttccagaatttaagagttttgaggaactagaacctcccaaacattcaaaagtcaaacggcaaagcagcacccctagtgctcctgaactgggacagcagccggatgtcaacattagtgaatggaaggacaaacccacccacgaaattcttcaaaaactgaatgattgcagttgtctggctagccaagccatcctgctgggtatactgctcaaaagagaaggccccaacttcatcacaaaggaaggtaccgtttctgatcacattgagagagtctatagaagagctggcagccaaaaactttggtcggttgtacgccgtgcagcaagtcttttaagtaaagtagtggacagcctggccccatccattactaatgttttagtgcagggcaaacaggtaactctgggtgcctttgggcatgaagaagaagttatctctaatcctttgtctccaagagtgattcaaaacatcatctattataagtgtaacacccatgatgagagggaagcggtcattcagcaagaactggtcatccatattggctggatcatctccaataaccctgagttattcagtggcatgctgaaaatacgaatcgggtggatcatccatgccatggagtatgaacttcagatccgtggcggagacaagccagccttggacttgtatcagctgtcacctagtgaagttaaacagcttctgctggatattctgcagcctcaacagaatggaagatgttggctgaacaggcgtcagatcgatgggtctttgaatagaactcccaccgggttctatgaccgagtgtggcagattctggagcgcacgcccaatgggatcattgttgctgggaagcatttgcctcagcaaccaaccctgtcagatatgaccatgtatgagatgaatttctctctccttgttgaagacacgttgggaaatattgaccagccacagtacagacagatcgttgtagagttacttatggttgtatccattgtactggaaagaaaccccgagctagaatttcaagacaaagtagatctagacagactggtcaaagaagcatttaatgaatttcaaaaagatcagagtcggctaaaggaaattgaaaaacaactgacacagattttacctgtcaactctttacaaacagaagatcgaatgccttgcctactgttttcctttgtaggatgacatgacttccttttacaacactcctcccctgggaaaaagaggaacatgcagctatttgacaaaggcggtgatgaatctgctgctggaaggagaagtcaagccaaacaatgatgacccgtgtctgattagctagtggggaaggtgtaggaagctctgttgagacacatgttctgaagtgtgttgtgtttcatgttcaagcttaatcaaggcagccattaatatacgaactgagcatgctggggaggtgaatgccacatccttggcggggttatggacctcttgcatgtcatagccaatctaacggtaatggtaaatgcttttaatcaagcaggaaaaagttctcatgattatgccaactataatagtaatcctcactgagtgataaaaatagtttatgaattgaaaatttgccgctgcatgttgtatgatcaaatagttcatcaaaatgaatctttgctctttggactgaattcttaccatactgccattaaaataaatttgccaactagtaatgcatactggaaatcaaaagatactgaaagaatggtgaacttctcttagtggtattgtcatgctaaaagatgttaatatacatcataaaagcaaagtcagccagctgatattttggttctcaaaaactgcattattaataatattttagtatacagagctattctacagtttttacattgtaaacatgactgtggttttgtatttgctaaatataggggttggactaaaatataataaatctgtaccttatcaaacattttctttgagctcctgctaaaaataggacatgtctatgattgttcaaaaatatgttaaatttaggctcagcacagtagctcacacctgaaatcttagcacttcgggaggctgaggcaggtggatcacttgaggttaggagttcaagaccagcccagccaacatggtgaaaaccctgtctctactaaaaatacaaaaattagccaggcatgatggtgcatgcctttaaacccagctactgaggaggctgaggcatgagaattgcttgaaccaggagacggaggttgcagtgagctgaaatcctgccactgcacaccagcctgggtgacagagcgagactccatctcaaaaaaaaaaaaaaaaaagaaaaagaaaaaaatatgttaaatttaaggactgttaacctacgttctactagtaaaaacaacattaagggtcattaaattttatttctgaattaatgaacatatctggacattttttgttcctaggttcacaagattgagcttcaaactcccgagtgttttcatttaattgatttagaggtagaatggaagagaatctgtggtacctaccattatacacatttagttgcccagtttacttaaactttaatgaaagtagaaagtagattaaacatttaaattttatttctttcctaaatagaaaaaaaaaaggcccatgagtttgagcccttgccccaaagagagttgtttttctgatcaatcttactggagtttcacctgagaagatagatttgtcacataaaaaatgcagcttatttgtagtgttttgaaaggatgtaagaaaggatgagtggcttcagtattgagtcaatcgatatcaaatgaatggatgtgtgagcacatggaaaaatctgctgtcagtcacatttctcataacattgaggtacagtgccgagatcttgcataagaaattgtatggatattagttggcaaaattgaaatgaatgagacacagttgggccctaaagaactaaggagggggattgacaaagaatagaattaaactacttgactcaatatgttaagagagtttatgaaaagatagtcgtgaagggtgaagctaatttgtaaaactaatgcctgaaaaaaacataagcatgaagtccatggagagggaattgagagctgacacttcataactggagaaactggaaattaaagaaagggaaacaaaagacttaaaatttttgtttgccgaaatttttacgaaagtaaactgtgttgtagttttaagaatttttttaaaaaatctgattagctgagcaaagttaccagaaaactgctatcctagttgaaatcaaacattacttgcaaatgtgttttctgagtgttagcttcctgcttaaatgttacatatgcaaaattctgaagttttcctgtgctactcctgaaagcattcagaatctgtgacacgtattgacttcatgctttgagattcaaaatttattgttctgaaagttatatttagaatcagtaaatcttgatattcacctttaaaaaagc

SEQ ID NO: 372216 - DNA, 3337 bp, Homo sapiens
acagcttggtggcagggatgaggtggagggatccctccctaattctgaatggtcctgcagtctgggaaatttcagctgttaggttcaatgtcctgggcagtgtttcctccaaatgatgatgtgaggattccactgtgtatattttaaagactacccaatcagggccccatgcattcctcatcttttagatttgtgaacatctggcctgctctcttctttgcccccaggtcggttgtacgccgtgcagcaagtcttttaagtaaagtagtggacagcctggccccatccattactaatgttttagtgcagggcaaacaggtaactctgggtgcctttgggcatgaagaagaagttatctctaatcctttgtctccaagagtgattcaaaacatcatctattataagtgtaacacccatgatgagagggaagcggtcattcagcaagaactggtcatccatattggctggatcatctccaataaccctgagttattcagtggcatgctgaaaatacgaatcgggtggatcatccatgccatggagtatgaacttcagatccgtggcggagacaagccagccttggacttgtatcagctgtcacctagtgaagttaaacagcttctgctggatattctgcagcctcaacagaatggaagatgttggctgaacaggcgtcagatcgatgggtctttgaatagaactcccaccgggttctatgaccgagtgtggcagattctggagcgcacgcccaatgggatcattgttgctgggaagcatttgcctcagcaaccaaccctgtcagatatgaccatgtatgagatgaatttctctctccttgttgaagacacgttgggaaatattgaccagccacagtacagacagatcgttgtagagttacttatggttgtatccattgtactggaaagaaaccccgagctagaatttcaagacaaagtagatctagacagactggtcaaagaagcatttaatgaatttcaaaaagatcagagtcggctaaaggaaattgaaaaacaagatgacatgacttccttttacaacactcctcccctgggaaaaagaggaacatgcagctatttgacaaaggcggtgatgaatctgctgctggaaggagaagtcaagccaaacaatgatgacccgtgtctgattagctagtggggaaggtgtaggaagctctgttgagacacatgttctgaagtgtgttgtgtttcatgttcaagcttaatcaaggcagccattaatatacgaactgagcatgctggggaggtgaatgccacatccttggcggggttatggacctcttgcatgtcatagccaatctaacggtaatggtaaatgcttttaatcaagcaggaaaaagttctcatgattatgccaactataatagtaatcctcactgagtgataaaaatagtttatgaattgaaaatttgccgctgcatgttgtatgatcaaatagttcatcaaaatgaatctttgctctttggactgaattcttaccatactgccattaaaataaatttgccaactagtaatgcatactggaaatcaaaagatactgaaagaatggtgaacttctcttagtggtattgtcatgctaaaagatgttaatatacatcataaaagcaaagtcagccagctgatattttggttctcaaaaactgcattattaataatattttagtatacagagctattctacagtttttacattgtaaacatgactgtggttttgtatttgctaaatataggggttggactaaaatataataaatctgtaccttatcaaacattttctttgagctcctgctaaaaataggacatgtctatgattgttcaaaaatatgttaaatttaggctcagcacagtagctcacacctgaaatcttagcacttcgggaggctgaggcaggtggatcacttgaggttaggagttcaagaccagcccagccaacatggtgaaaaccctgtctctactaaaaatacaaaaattagccaggcatgatggtgcatgcctttaaacccagctactgaggaggctgaggcatgagaattgcttgaaccaggagacggaggttgcagtgagctgaaatcctgccactgcacaccagcctgggtgacagagcgagactccatctcaaaaaaaaaaaaaaaaaagaaaaagaaaaaaatatgttaaatttaaggactgttaacctacgttctactagtaaaaacaacattaagggtcattaaattttatttctgaattaatgaacatatctggacattttttgttcctaggttcacaagattgagcttcaaactcccgagtgttttcatttaattgatttagaggtagaatggaagagaatctgtggtacctaccattatacacatttagttgcccagtttacttaaactttaatgaaagtagaaagtagattaaacatttaaattttatttctttcctaaatagaaaaaaaaaaggcccatgagtttgagcccttgccccaaagagagttgtttttctgatcaatcttactggagtttcacctgagaagatagatttgtcacataaaaaatgcagcttatttgtagtgttttgaaaggatgtaagaaaggatgagtggcttcagtattgagtcaatcgatatcaaatgaatggatgtgtgagcacatggaaaaatctgctgtcagtcacatttctcataacattgaggtacagtgccgagatcttgcataagaaattgtatggatattagttggcaaaattgaaatgaatgagacacagttgggccctaaagaactaaggagggggattgacaaagaatagaattaaactacttgactcaatatgttaagagagtttatgaaaagatagtcgtgaagggtgaagctaatttgtaaaactaatgcctgaaaaaaacataagcatgaagtccatggagagggaattgagagctgacacttcataactggagaaactggaaattaaagaaagggaaacaaaagacttaaaatttttgtttgccgaaatttttacgaaagtaaactgtgttgtagttttaagaatttttttaaaaaatctgattagctgagcaaagttaccagaaaactgctatcctagttgaaatcaaacattacttgcaaatgtgttttctgagtgttagcttcctgcttaaatgttacatatgcaaaattctgaagttttcctgtgctactcctgaaagcattcagaatctgtgacacgtattgacttcatgctttgagattcaaaatttattgttctgaaagttatatttagaatcagtaaatcttgatattcacctttaaaaaagc

SEQ ID NO: 372217 - DNA, 5651 bp, Homo sapiens
agagtggcgcgcagccccgggacgcgtaagagccgctgccggctcctttttctctctcccactagggctgcccttccgacgctaaaaaagcagtggagctagggtgaaagccgccctcacgctcacttccggcaggcgcgcctcccgacagtgtcgtgcggggggcgtggcccggcattgctgacaggcggccccgggggcggtggccaaggcggcgaccggagcgcgatggcgggggcggcgggactcacggcagaagtgagctggaaggtcttggagcgaagagctcggaccaagcgctcagcttagcctgcgacgcttatgattagagccaacaatttgaaatggcctgctcacctgatgcagtcgtctctccgtcttccgctttcttaaggtctggctcagtttatgaacctcttaaaagcattaatcttccaagacctgataatgaaactctctgggataagttggaccattattacagaattgtcaagtcaacattgctgctgtatcaaagtccaactaccggtctctttcccactaaaacatgcggtggtgaccagaaggccaagatccaggacagcctatactgcgctgctggggcctgggctttggctcttgcatacaggcgaattgatgatgacaagggaaggacccatgagctggagcactcagctataaaatgcatgagaggaattctctactgctatatgcgtcaggccgataaggtccagcagtttaagcaggatccacgcccaacaacatgtcttcactctgttttcaatgtgcatacaggagatgagttgctttcctatgaggaatatggtcatcttcagataaatgcagtgtcactttatctcctttaccttgtggaaatgatttcctcaggactccagattatctacaacactgatgaggtctcttttattcaaaaccttgtattttgtgtggaaagagtttaccgtgtgcctgactttggtgtctgggaaagaggaagcaaatataataatggcagcacagagctacattcgagctcggttggtttagcaaaagcagctctagaagcaattaatggattcaacctttttggcaaccagggctgttcgtggtcagttatatttgtggatctcgatgctcacaatcgcaacaggcaaactttgtgctcgctgttacccagagaatcaagatcacataatacagatgctgccctgctcccctgcatcagttatcctgcatttgccctggatgatgaagttctttttagccagacacttgataaagtggttagaaaattaaaaggaaaatatggatttaaacgtttcttgagagatgggtatagaacatcattggaagatcccaacagatgctactacaagccagctgaaattaagctatttgatggcattgaatgtgaatttcccatatttttcctttatatgatgattgatggagtttttagaggcaatcctaagcaagtacaggaatatcaggatcttttgactccagtacttcatcataccacagaaggatatcctgttgtaccaaagtactattatgtgccagctgactttgtagaatatgaaaaaaataaccctggtagtcaaaaacgatttcctagcaactgtggccgtgatggaaaactgtttctttggggacaagcactttatatcatcgcaaaactcctggctgatgaacttattagtcctaaagacattgatcctgtccagcgctatgtcccactaaaggatcaacgtaacgtgagcatgaggttttccaatcagggcccactggaaaatgacttggtagttcatgtggcacttatagcagaaagccaaagacttcaagtttttctgaacacatatggtattcaaactcaaactcctcaacaagtagaacccattcagatatggcctcagcaggagcttgtgaaagcttatttgcagctgggtatcaatgaaaagttaggactctctggaaggccagacaggcccattggctgcctcgggacatcaaagatttatcgcattctaggaaagactgtggtttgttacccgattattttcgacctaagtgatttctacatgtctcaggatgttttcctgctgatagatgacataaagaatgcgctgcagttcattaaacaatattggaaaatgcatggacgtccacttttccttgttctcatccgggaagacaatataagaggtagccggttcaaccccatattagatatgctggcagcccttaaaaaaggaataattggaggagtcaaagttcatgtggatcgtctacagacactaatatctggagctgtggtagaacaacttgatttcctacgaatcagtgacacagaagagcttccagaatttaagagttttgaggaactagaacctcccaaacattcaaaagtcaaacggcaaagcagcacccctagtgctcctgaactgggacagcagccggatgtcaacattagtgaatggaaggacaaacccacccacgaaattcttcaaaaactgaatgattgcagttgtctggctagccaagccatcctgctgggtatactgctcaaaagagaaggccccaacttcatcacaaaggaaggtaccgtttctgatcacattgagagagtctatagaagagctggcagccaaaaactttggtcggttgtacgccgtgcagcaagtcttttaagtaaagtagtggacagcctggccccatccattactaatgttttagtgcagggcaaacaggtaactctgggtgcctttgggcatgaagaagaagttatctctaatcctttgtctccaagagtgattcaaaacatcatctattataagtgtaacacccatgatgagagggaagcggtcattcagcaagaactggtcatccatattggctggatcatctccaataaccctgagttattcagtggcatgctgaaaatacgaatcgggtggatcatccatgccatggagtatgaacttcagatccgtggcggagacaagccagccttggacttgtatcagctgtcacctagtgaagttaaacagcttctgctggatattctgcagcctcaacagaatggaagatgttggctgaacaggcgtcagatcgatgggtctttgaatagaactcccaccgggttctatgaccgagtgtggcagattctggagcgcacgcccaatgggatcattgttgctgggaagcatttgcctcagcaaccaaccctgtcagatatgaccatgtatgagatgaatttctctctccttgttgaagacacgttgggaaatattgaccagccacagtacagacagatcgttgtagagttacttatggttgtatccattgtactggaaagaaaccccgagctagaatttcaagacaaagtagatctagacagactggtcaaagaagcatttaatgaatttcaaaaagatcagagtcggctaaaggaaattgaaaaacaagatgacatgacttccttttacaacactcctcccctgggaaaaagaggaacatgcagctatttgacaaaggcggtgatgaatctgctgctggaaggagaaccattaatatacgaactgagcatgctggggaggtgaatgccacatccttggcggggttatggacctcttgcatgtcatagccaatctaacggtaatggtaaatgcttttaatcaagcaggaaaaagttctcatgattatgccaactataatagtaatcctcactgagtgataaaaatagtttatgaattgaaaatttgccgctgcatgttgtatgatcaaatagttcatcaaaatgaatctttgctctttggactgaattcttaccatactgccattaaaataaatttgccaactagtaatgcatactggaaatcaaaagatactgaaagaatggtgaacttctcttagtggtattgtcatgctaaaagatgttaatatacatcataaaagcaaagtcagccagctgatattttggttctcaaaaactgcattattaataatattttagtatacagagctattctacagtttttacattgtaaacatgactgtggttttgtatttgctaaatataggggttggactaaaatataataaatctgtaccttatcaaacattttctttgagctcctgctaaaaataggacatgtctatgattgttcaaaaatatgttaaatttaggctcagcacagtagctcacacctgaaatcttagcacttcgggaggctgaggcaggtggatcacttgaggttaggagttcaagaccagcccagccaacatggtgaaaaccctgtctctactaaaaatacaaaaattagccaggcatgatggtgcatgcctttaaacccagctactgaggaggctgaggcatgagaattgcttgaaccaggagacggaggttgcagtgagctgaaatcctgccactgcacaccagcctgggtgacagagcgagactccatctcaaaaaaaaaaaaaaaaaagaaaaagaaaaaaatatgttaaatttaaggactgttaacctacgttctactagtaaaaacaacattaagggtcattaaattttatttctgaattaatgaacatatctggacattttttgttcctaggttcacaagattgagcttcaaactcccgagtgttttcatttaattgatttagaggtagaatggaagagaatctgtggtacctaccattatacacatttagttgcccagtttacttaaactttaatgaaagtagaaagtagattaaacatttaaattttatttctttcctaaatagaaaaaaaaaaggcccatgagtttgagcccttgccccaaagagagttgtttttctgatcaatcttactggagtttcacctgagaagatagatttgtcacataaaaaatgcagcttatttgtagtgttttgaaaggatgtaagaaaggatgagtggcttcagtattgagtcaatcgatatcaaatgaatggatgtgtgagcacatggaaaaatctgctgtcagtcacatttctcataacattgaggtacagtgccgagatcttgcataagaaattgtatggatattagttggcaaaattgaaatgaatgagacacagttgggccctaaagaactaaggagggggattgacaaagaatagaattaaactacttgactcaatatgttaagagagtttatgaaaagatagtcgtgaagggtgaagctaatttgtaaaactaatgcctgaaaaaaacataagcatgaagtccatggagagggaattgagagctgacacttcataactggagaaactggaaattaaagaaagggaaacaaaagacttaaaatttttgtttgccgaaatttttacgaaagtaaactgtgttgtagttttaagaatttttttaaaaaatctgattagctgagcaaagttaccagaaaactgctatcctagttgaaatcaaacattacttgcaaatgtgttttctgagtgttagcttcctgcttaaatgttacatatgcaaaattctgaagttttcctgtgctactcctgaaagcattcagaatctgtgacacgtattgacttcatgctttgagattcaaaatttattgttctgaaagttatatttagaatcagtaaatcttgatattcacctttaaaaaagc

SEQ ID NO: 372218 - DNA, 3645 bp, Homo sapiens
agagtggcgcgcagccccgggacgcgtaagagccgctgccggctcctttttctctctcccactagggctgcccttccgacgctaaaaaagcagtggagctagggtgaaagccgccctcacgctcacttccggcaggcgcgcctcccgacagtgtcgtgcggggggcgtggcccggcattgctgacaggcggccccgggggcggtggccaaggcggcgaccggagcgcgatggcgggggcggcgggactcacggcagaagtgagctggaaggtcttggagcgaagagctcggaccaagcgctcagcttagcctgcgacgcttatgattagagccaacaatttgaaatggcctgctcacctgatgcagtcgtctctccgtcttccgctttcttaaggtctggctcagtttatgaacctcttaaaagcattaatcttccaagacctgataatgaaactctctgggataagttggaccattattacagaattgtcaagtcaacattgctgctgtatcaaagtccaactaccggtctctttcccactaaaacatgcggtggtgaccagaaggccaagatccaggacagcctatactgcgctgctggggcctgggctttggctcttgcatacaggcgaattgatgatgacaagggaaggacccatgagctggagcactcagctataaaatgcatgagaggaattctctactgctatatgcgtcaggccgataaggtccagcagtttaagcaggatccacgcccaacaacatgtcttcactctgttttcaatgtgcatacaggagatgagttgctttcctatgaggaatatggtcatcttcagataaatgcagtgtcactttatctcctttaccttgtggaaatgatttcctcaggactccagattatctacaacactgatgaggtctcttttattcaaaaccttgtattttgtgtggaaagagtttaccgtgtgcctgactttggtgtctgggaaagaggaagcaaatataataatggcagcacagagctacattcgagctcggttggtttagcaaaagcagctctagaagcaattaatggattcaacctttttggcaaccagggctgttcgtggtcagttatatttgtggatctcgatgctcacaatcgcaacaggcaaactttgtgctcgctgttacccagagaatcaagatcacataatacagatgctgccctgctcccctgcatcagttatcctgcatttgccctggatgatgaagttctttttagccagacacttgataaagtggttagaaaattaaaaggaaaatatggatttaaacgtttcttgagagatgggtatagaacatcattggaagatcccaacagatgctactacaagccagctgaaattaagctatttgatggcattgaatgtgaatttcccatatttttcctttatatgatgattgatggagtttttagaggcaatcctaagcaagtacaggaatatcaggatcttttgactccagtacttcatcataccacagaaggatatcctgttgtaccaaagtactattatgtgccagctgactttgtagaatatgaaaaaaataaccctggtagtcaaaaacgatttcctagcaactgtggccgtgatggaaaactgtttctttggggacaagcactttatatcatcgcaaaactcctggctgatgaacttattagtcctaaagacattgatcctgtccagcgctatgtcccactaaaggatcaacgtaacgtgagcatgaggttttccaatcagggcccactggaaaatgacttggtagttcatgtggcacttatagcagaaagccaaagacttcaagtttttctgaacacatatggtattcaaactcaaactcctcaacaagtagaacccattcagatatggcctcagcaggagcttgtgaaagcttatttgcagctgggtatcaatgaaaagttaggactctctggaaggccagacaggcccattggctgcctcgggacatcaaagatttatcgcattctaggaaagactgtggtttgttacccgattattttcgacctaagtgatttctacatgtctcaggatgttttcctgctgatagatgacataaagaatgcgctgcagttcattaaacaatattggaaaatgcatggacgtccacttttccttgttctcatccgggaagacaatataagaggtagccggttcaaccccatattagatatgctggcagcccttaaaaaaggaataattggaggagtcaaagttcatgtggatcgtctacagacactaatatctggagctgtggtagaacaacttgatttcctacgaatcagtgacacagaagagcttccagaatttaagagttttgaggaactagaacctcccaaacattcaaaagtcaaacggcaaagcagcacccctagtgctcctgaactgggacagcagccggatgtcaacattagtgaatggaaggacaaacccacccacgaaattcttcaaaaactgaatgattgcagttgtctggctagccaagccatcctgctgggtatactgctcaaaagagaaggccccaacttcatcacaaaggaaggtaccgtttctgatcacattgagagagtctatagaagagctggcagccaaaaactttggtttgtattagtgtccttgttgttatgttttatttttgtgttgttatattcgatagcctaaagaaaatggaccaatattaaagatagttattcatcctaatttttacttttaacctccaaggttacagcactttctaagaatgtgcctatgtagcatgtctgtccccccactgcctccaccaaaattctgagaacaaagacactgtagggattgaacctgaagagtattcgctggaatggtatgctaaggtttctttcctgctgtacacctcctctgccccaacaaggtgctttaagttctgttttttaatttaggaaacctgttctgctattatagaaggccatgaaaagagaccagtgatttatctaatcataagcaaaaatagtagaaggctattgtcttgtcacttaagttgaatgaatcccagtgattgtagttgcttcacgaaaaataaccaatttgttctacagaggtagtctgttcccagagattgaaaaaaaaaaaagatgtaggaaagtttaaataaataaaattgtttaaattcacaatggagggccaattcacatggccctctgcattttgatgtaattctaacagttttactagcagaatctaacaaattttgaaagtcagagcgtatgtatagatatatatacacatgcacacatttttttaatgatacgttatccacttaaaaaaaaaagtctcaagaatgtcataagaaactcccttaacctcaatgagcctcaggtttctaatccctaaaataaggggattaaacaaaacaatcccttagaatatttcaattctatttttataataaatatgccgttcctcctcagaagaaataatgtaataatcctatagttaaatctttcaaattttcactgtaaattttcagtacagtaagacatcaagccaataagtgatagttctggtaaactttcttagccagtaagtttcaagtgtggtctgtagtcttatt

SEQ ID NO: 372219 - DNA, 3468 bp, Homo sapiens
agagtggcgcgcagccccgggacgcgtaagagccgctgccggctcctttttctctctcccactagggctgcccttccgacgctaaaaaagcagtggagctagggtgaaagccgccctcacgctcacttccggcaggcgcgcctcccgacagtgtcgtgcggggggcgtggcccggcattgctgacaggcggccccgggggcggtggccaaggcggcgaccggagcgcgatggcgggggcggcgggactcacggcagaagtgagctggaaggtcttggagcgaagagctcggaccaagcgctcagcttagcctgcgacgcttatgattagagccaacaatttgaaatggcctgctcacctgatgcagtcgtctctccgtcttccgctttcttaaggtctggctcagtttatgaacctcttaaaagcattaatcttccaagacctgataatgaaactctctgggataagttggaccattattacagaattgtcaagtcaacattgctgctgtatcaaagtccaactaccggtctctttcccactaaaacatgcggtggtgaccagaaggccaagatccaggacagcctatactgcgctgctggggcctgggctttggctcttgcatacaggcgaattgatgatgacaagggaaggacccatgagctggagcactcagctataaaatgcatgagaggaattctctactgctatatgcgtcaggccgataaggtccagcagtttaagcaggatccacgcccaacaacatgtcttcactctgttttcaatgtgcatacaggagatgagttgctttcctatgaggaatatggtcatcttcagataaatgcagtgtcactttatctcctttaccttgtggaaatgatttcctcaggactccagattatctacaacactgatgaggtctcttttattcaaaaccttgtattttgtgtggaaagagtttaccgtgtgcctgactttggtgtctgggaaagaggaagcaaatataataatggcagcacagagctacattcgagctcggttggtttagcaaaagcagctctagaagcaattaatggattcaacctttttggcaaccagggctgttcgtggtcagttatatttgtggatctcgatgctcacaatcgcaacaggcaaactttgtgctcgctgttacccagagaatcaagatcacataatacagatgctgccctgctcccctgcatcagttatcctgcatttgccctggatgatgaagttctttttagccagacacttgataaagtggttagaaaattaaaaggaaaatatggatttaaacgtttcttgagagatgggtatagaacatcattggaagatcccaacagatgctactacaagccagctgaaattaagctatttgatggcattgaatgtgaatttcccatatttttcctttatatgatgattgatggagtttttagaggcaatcctaagcaagtacaggaatatcaggatcttttgactccagtacttcatcataccacagaaggatatcctgttgtaccaaagtactattatgtgccagctgactttgtagaatatgaaaaaaataaccctggtagtcaaaaacgatttcctagcaactgtggccgtgatggaaaactgtttctttggggacaagcactttatatcatcgcaaaactcctggctgatgaacttattagtcctaaagacattgatcctgtccagcgctatgtcccactaaaggatcaacgtaacgtgagcatgaggttttccaatcagggcccactggaaaatgacttggtagttcatgtggcacttatagcagaaagccaaagacttcaagtttttctgaacacatatggtattcaaactcaaactcctcaacaagtagaacccattcagatatggcctcagcaggagcttgtgaaagcttatttgcagctgggtatcaatgaaaagttaggactctctggaaggccagacaggcccattggctgcctcgggacatcaaagatttatcgcattctaggaaagactgtggtttgttacccgattattttcgacctaagtgatttctacatgtctcaggatgttttcctgctgatagatgacataaagaatgcgctgcagttcattaaacaatattggaaaatgcatggacgtccacttttccttgttctcatccgggaagacaatataagaggtagccggttcaaccccatattagatatgctggcagcccttaaaaaaggaataattggaggagtcaaagttcatgtggatcgtctacagacactaatatctggagctgtggtagaacaacttgatttcctacgaatcagtgacacagaagagcttccagaatttaagagttttgaggaactagaacctcccaaacattcaaaagtcaaacggcaaagcagcacccctagtgctcctgaactgggacagcagccggatgtcaacattagtgaatggaaggacaaacccacccacgaaattcttcaaaaactgaatgattgcagttgtctggctagccaagccatcctgctgggtatactgctcaaaagagaaggccccaacttcatcacaaaggaaggtaccgtttctgatcacattgagagagtctatagaagagctggcagccaaaaactttggtcggttgtacgccgtgcagcaagtcttttaagtaaagtagtggacagcctggccccatccattactaatgttttagtgcagggcaaacaggtaactctgggtgcctttgggcatgaagaagaagttatctctaatcctttgtctccaagagtgattcaaaacatcatctattataagtgtaacacccatgatgagagggaagcggtcattcagcaagaactggtcatccatattggctggatcatctccaataaccctgagttattcagtggcatgctgaaaatacgaatcgggtttgcaaaggccgtgtgctctcacaagagaagttcaccttggaggagggggccctttcagccatggttgagtcccctgtaggcccagtggaatgatcccaaagcatctcatatggaaactccatctcagaatcccattgggatgatctcttgccatctaacatgatgtcacctctccgtcacctggtagacactcacgacacctgtggcaaacaccctaaaatcccttcagacctacgcccacagcactcttccaccacagtaataaaggcttgggaatgctgtttctgccctagggatatcagacaacttcagataactgtcatcctgtctgtggggcttgtgatagtgcccctctgaagagtaaaaagatacttttgtgtcttctatgtttttattagacttcatcctcaataaattatactaaggcctcaacccctttaagtgaatgggccccttgcatatttgtttattagcagcagcaaatacatactcagtatgtttctttacaaatt

SEQ ID NO: 372220 - DNA, 1922 bp, Homo sapiens
agagtggcgcgcagccccgggacgcgtaagagccgctgccggctcctttttctctctcccactagggctgcccttccgacgctaaaaaagcagtggagctagggtgaaagccgccctcacgctcacttccggcaggcgcgcctcccgacagtgtcgtgcggggggcgtggcccggcattgctgacaggcggccccgggggcggtggccaaggcggcgaccggagcgcgatggcgggggcggcgggactcacggcagaagtgagctggaaggtcttggagcgaagagctcggaccaagcgctcagcttagcctgcgacgcttatgattagagccaacaatttgaaatggcctgctcacctgatgcagtcgtctctccgtcttccgctttcttaaggtctggctcagtttatgaacctcttaaaagcattaatcttccaagacctgataatgaaactctctgggataagttggaccattattacagaattgtcaagtcaacattgctgctgtatcaaagtccaactaccggtctctttcccactaaaacatgcggtggtgaccagaaggccaagatccaggacagcctatactgcgctgctggggcctgggctttggctcttgcatacaggcgaattgatgatgacaagggaaggacccatgagctggagcactcagctataaaatgcatgagaggaattctctactgctatatgcgtcaggccgataaggtccagcagtttaagcaggatccacgcccaacaacatgtcttcactctgttttcaatgtgcatacaggagatgagttgctttcctatgaggaatatggtcatcttcagataaatgcagtgtcactttatctcctttaccttgtggaaatgatttcctcaggactccagattatctacaacactgatgaggtctcttttattcaaaaccttgtattttgtgtggaaagagtttaccgtgtgcctgactttggtgtctgggaaagaggaagcaaatataataatggcagcacagagctacattcgagctcggttggtttagcaaaagcagctctagaagcaattaatggattcaacctttttggcaaccagggctgttcgtggtcagttatatttgtggatctcgatgctcacaatcgcaacaggcaaactttgtgctcgctgttacccagagaatcaagatcacataatacagatgctgccctgctcccctgcatcagttatcctgcatttgccctggatgatgaagttctttttagccagacacttgataaagtggttagaaaattaaaaggaaaatatggatttaaacgtttcttgagagatgggtatagaacatcattggaagatcccaacagatgctactacaagccagctgaaattaagctatttgatggcattgaatgtgaatttcccatatttttcctttatatgatgattgatggagtttttagaggcaatcctaagcaagtacaggaatatcaggatcttttgactccagtacttcatcataccacagaaggatatcctgttgtaccaaagtactattatgtgccagctgactttgtagaatatgaaaaaaataaccctggtagtcaaaaacgatttcctagcaactgtggccgtgatggaaaactgtttctttggggacaagcactttatatcatcgcaaaactcctggaaactctacctctatcctgatgtaattaggttaagaaaattaaaggccacggtccagaaaactaacttccacaaatgcaacaaaaggaaaaatttctccagtaacctctgtgcaatgggaaatctttcttttaagtaccaagtcaatttcttcaactgtacaatgtattctaatttgaaggttttcaaatataatatagtaacaacaaaatataataaaattaaaactatcagaaa

SEQ ID NO: 372221 - DNA, 999 bp, Homo sapiens
  misc_feature (944)..(944): n is a, c, g, or t
agagtggcgcgcagccccgggacgcgtaagagccgctgccggctcctttttctctctcccactagggctgcccttccgacgctaaaaaagcagtggagctagggtgaaagccgccctcacgctcacttccggcaggcgcgcctcccgacagtgtcgtgcggggggcgtggcccggcattgctgacaggcggccccgggggcggtggccaaggcggcgaccggagcgcgatggcgggggcggcgggactcacggcagaagtgagctggaaggtcttggagcgaagagctcggaccaagcgctcaggctcagtttatgaacctcttaaaagcattaatcttccaagacctgataatgaaactctctgggataagttggaccattattacagaattgtcaagtcaacattgctgctgtatcaaagtccaactaccggtctctttcccactaaaacatgcggtggtgaccagaaggccaagatccaggacagcctatactgcgctgctggggcctgggctttggctcttgcatacaggcgaattgatgatgacaagggaaggacccatgagctggagcactcagctataaaatgcatgagaggaattctctactgctatatgcgtcaggccgataaggtccagcagtttaagcaggatccacgcccaacaacatgtcttcactctgttttcaatgtgcatacaggagatgagttgctttcctatgaggaatatggtcatcttcagataaatgcagtgtcactttatctcctttaccttgtggaaatgatttcctcaggactccagattatctacaacactgatgaggtctcttttattcaaaaccttgtattttgtgtggaaagagtttaccgtgtgcctgactttggtgtctgggaaagaggaagcaaatataataatggcagcacagagctacattcgagctcggntggtttagcttcgtggtcgagtatatttggtgatctcgatgctcactcgcacggg

SEQ ID NO: 372222 - DNA, 564 bp, Homo sapiens
tttagtgattccgcttttaatttatagtcgtatgactaagatgttttgaatataagcctatccgtatgccagatataaatttcaggaactcttaatgtctcttttacagaaactctacctctatcctgatgtaattaggttaagaaaattaaaggccacggtccagaaaactaacttccacaaatgcaacaaaaggaaaaatttctccagtaacctctgtgcaatgggaaatctttcttttaagtaccaagtcaatttcttcaactgtacaatgtattctaatttgaaggttttcaaatataatatagtaacaacaaaatataataaaattaaaactatcagaaaacagagtaaatggtataattcaaataatgactaaaataaaatgacattatggattttgtaatcaacctataattatatatttaaattttgctttacatacataagatcacagctgaggttaaccataatttcaaattttatcaccagccacttgtgctattttatcacatttgaaaatattcactcatattatttacctcaaacagtgatctataaatt

SEQ ID NO: 372223 - DNA, 5674 bp, Homo sapiens
agagtggcgcgcagccccgggacgcgtaagagccgctgccggctcctttttctctctcccactagggctgcccttccgacgctaaaaaagcagtggagctagggtgaaagccgccctcacgctcacttccggcaggcgcgcctcccgacagtgtcgtgcggggggcgtggcccggcattgctgacaggcggccccgggggcggtggccaaggcggcgaccggagcgcgatggcgggggcggcgggactcacggcagaagtgagctggaaggtcttggagcgaagagctcggaccaagcgctcaggctcagtttatgaacctcttaaaagcattaatcttccaagacctgataatgaaactctctgggataagttggaccattattacagaattgtcaagtcaacattgctgctgtatcaaagtccaactaccggtctctttcccactaaaacatgcggtggtgaccagaaggccaagatccaggacagcctatactgcgctgctggggcctgggctttggctcttgcatacaggcgaattgatgatgacaagggaaggacccatgagctggagcactcagctataaaatgcatgagaggaattctctactgctatatgcgtcaggccgataaggtccagcagtttaagcaggatccacgcccaacaacatgtcttcactctgttttcaatgtgcatacaggagatgagttgctttcctatgaggaatatggtcatcttcagataaatgcagtgtcactttatctcctttaccttgtggaaatgatttcctcaggactccagattatctacaacactgatgaggtctcttttattcaaaaccttgtattttgtgtggaaagagtttaccgtgtgcctgactttggtgtctgggaaagaggaagcaaatataataatggcagcacagagctacattcgagctcggttggtttagcaaaagcagctctagaagcaattaatggattcaacctttttggcaaccagggctgttcgtggtcagttatatttgtggatctcgatgctcacaatcgcaacaggcaaactttgtgctcgctgttacccagagaatcaagatcacataatacagatgctgccctgctcccctgcatcagttatcctgcatttgccctggatgatgaagttctttttagccagacacttgataaagtggttagaaaattaaaaggaaaatatggatttaaacgtttcttgagagatgggtatagaacatcattggaagatcccaacagatgctactacaagccagctgaaattaagctatttgatggcattgaatgtgaatttcccatatttttcctttatatgatgattgatggagtttttagaggcaatcctaagcaagtacaggaatatcaggatcttttgactccagtacttcatcataccacagaaggatatcctgttgtaccaaagtactattatgtgccagctgactttgtagaatatgaaaaaaataaccctggtagtcaaaaacgatttcctagcaactgtggccgtgatggaaaactgtttctttggggacaagcactttatatcatcgcaaaactcctggctgatgaacttattagtcctaaagacattgatcctgtccagcgctatgtcccactaaaggatcaacgtaacgtgagcatgaggttttccaatcagggcccactggaaaatgacttggtagttcatgtggcacttatagcagaaagccaaagacttcaagtttttctgaacacatatggtattcaaactcaaactcctcaacaagtagaacccattcagatatggcctcagcaggagcttgtgaaagcttatttgcagctgggtatcaatgaaaagttaggactctctggaaggccagacaggcccattggctgcctcgggacatcaaagatttatcgcattctaggaaagactgtggtttgttacccgattattttcgacctaagtgatttctacatgtctcaggatgttttcctgctgatagatgacataaagaatgcgctgcagttcattaaacaatattggaaaatgcatggacgtccacttttccttgttctcatccgggaagacaatataagaggtagccggttcaaccccatattagatatgctggcagcccttaaaaaaggaataattggaggagtcaaagttcatgtggatcgtctacagacactaatatctggagctgtggtagaacaacttgatttcctacgaatcagtgacacagaagagcttccagaatttaagagttttgaggaactagaacctcccaaacattcaaaagtcaaacggcaaagcagcacccctagtgctcctgaactgggacagcagccggatgtcaacattagtgaatggaaggacaaacccacccacgaaattcttcaaaaactgaatgattgcagttgtctggctagccaagccatcctgctgggtatactgctcaaaagagaaggccccaacttcatcacaaaggaaggtaccgtttctgatcacattgagagagtctatagaagagctggcagccaaaaactttggtcggttgtacgccgtgcagcaagtcttttaagtaaagtagtggacagcctggccccatccattactaatgttttagtgcagggcaaacaggtaactctgggtgcctttgggcatgaagaagaagttatctctaatcctttgtctccaagagtgattcaaaacatcatctattataagtgtaacacccatgatgagagggaagcggtcattcagcaagaactggtcatccatattggctggatcatctccaataaccctgagttattcagtggcatgctgaaaatacgaatcgggtggatcatccatgccatggagtatgaacttcagatccgtggcggagacaagccagccttggacttgtatcagctgtcacctagtgaagttaaacagcttctgctggatattctgcagcctcaacagaatggaagatgttggctgaacaggcgtcagatcgatgggtctttgaatagaactcccaccgggttctatgaccgagtgtggcagattctggagcgcacgcccaatgggatcattgttgctgggaagcatttgcctcagcaaccaaccctgtcagatatgaccatgtatgagatgaatttctctctccttgttgaagacacgttgggaaatattgaccagccacagtacagacagatcgttgtagagttacttatggttgtatccattgtactggaaagaaaccccgagctagaatttcaagacaaagtagatctagacagactggtcaaagaagcatttaatgaatttcaaaaagatcagagtcggctaaaggaaattgaaaaacaagatgacatgacttccttttacaacactcctcccctgggaaaaagaggaacatgcagctatttgacaaaggcggtgatgaatctgctgctggaaggagaagtcaagccaaacaatgatgacccgtgtctgattagctagtggggaaggtgtaggaagctctgttgagacacatgttctgaagtgtgttgtgtttcatgttcaagcttaatcaaggcagccattaatatacgaactgagcatgctggggaggtgaatgccacatccttggcggggttatggacctcttgcatgtcatagccaatctaacggtaatggtaaatgcttttaatcaagcaggaaaaagttctcatgattatgccaactataatagtaatcctcactgagtgataaaaatagtttatgaattgaaaatttgccgctgcatgttgtatgatcaaatagttcatcaaaatgaatctttgctctttggactgaattcttaccatactgccattaaaataaatttgccaactagtaatgcatactggaaatcaaaagatactgaaagaatggtgaacttctcttagtggtattgtcatgctaaaagatgttaatatacatcataaaagcaaagtcagccagctgatattttggttctcaaaaactgcattattaataatattttagtatacagagctattctacagtttttacattgtaaacatgactgtggttttgtatttgctaaatataggggttggactaaaatataataaatctgtaccttatcaaacattttctttgagctcctgctaaaaataggacatgtctatgattgttcaaaaatatgttaaatttaggctcagcacagtagctcacacctgaaatcttagcacttcgggaggctgaggcaggtggatcacttgaggttaggagttcaagaccagcccagccaacatggtgaaaaccctgtctctactaaaaatacaaaaattagccaggcatgatggtgcatgcctttaaacccagctactgaggaggctgaggcatgagaattgcttgaaccaggagacggaggttgcagtgagctgaaatcctgccactgcacaccagcctgggtgacagagcgagactccatctcaaaaaaaaaaaaaaaaaagaaaaagaaaaaaatatgttaaatttaaggactgttaacctacgttctactagtaaaaacaacattaagggtcattaaattttatttctgaattaatgaacatatctggacattttttgttcctaggttcacaagattgagcttcaaactcccgagtgttttcatttaattgatttagaggtagaatggaagagaatctgtggtacctaccattatacacatttagttgcccagtttacttaaactttaatgaaagtagaaagtagattaaacatttaaattttatttctttcctaaatagaaaaaaaaaaggcccatgagtttgagcccttgccccaaagagagttgtttttctgatcaatcttactggagtttcacctgagaagatagatttgtcacataaaaaatgcagcttatttgtagtgttttgaaaggatgtaagaaaggatgagtggcttcagtattgagtcaatcgatatcaaatgaatggatgtgtgagcacatggaaaaatctgctgtcagtcacatttctcataacattgaggtacagtgccgagatcttgcataagaaattgtatggatattagttggcaaaattgaaatgaatgagacacagttgggccctaaagaactaaggagggggattgacaaagaatagaattaaactacttgactcaatatgttaagagagtttatgaaaagatagtcgtgaagggtgaagctaatttgtaaaactaatgcctgaaaaaaacataagcatgaagtccatggagagggaattgagagctgacacttcataactggagaaactggaaattaaagaaagggaaacaaaagacttaaaatttttgtttgccgaaatttttacgaaagtaaactgtgttgtagttttaagaatttttttaaaaaatctgattagctgagcaaagttaccagaaaactgctatcctagttgaaatcaaacattacttgcaaatgtgttttctgagtgttagcttcctgcttaaatgttacatatgcaaaattctgaagttttcctgtgctactcctgaaagcattcagaatctgtgacacgtattgacttcatgctttgagattcaaaatttattgttctgaaagttatatttagaatcagtaaatcttgatattcacctttaaaaaagc

SEQ ID NO: 372224 - DNA, 4237 bp, Homo sapiens
agagtggcgcgcagccccgggacgcgtaagagccgctgccggctcctttttctctctcccactagggctgcccttccgacgctaaaaaagcagtggagctagggtgaaagccgccctcacgctcacttccggcaggcgcgcctcccgacagtgtcgtgcggggggcgtggcccggcattgctgacaggcggccccgggggcggtggccaaggcggcgaccggagcgcgatggcgggggcggcgggactcacggcagaagtgagctggaaggtcttggagcgaagagctcggaccaagcgctcagcttagcctgcgacgcttatgattagagccaacaatttgaaatggcctgctcacctgatgcagtcgtctctccgtcttccgctttcttaaggtctggctcagtttatgaacctcttaaaagcattaatcttccaagacctgataatgaaactctctgggataagttggaccattattacagaattgtcaagtcaacattgctgctgtatcaaagtccaactaccggtctctttcccactaaaacatgcggtggtgaccagaaggccaagatccaggacagcctatactgcgctgctggggcctgggctttggctcttgcatacaggcgaattgatgatgacaagggaaggacccatgagctggagcactcagctataaaatgcatgagaggaattctctactgctatatgcgtcaggccgataaggtccagcagtttaagcaggatccacgcccaacaacatgtcttcactctgttttcaatgtgcatacaggagatgagttgctttcctatgaggaatatggtcatcttcagataaatgcagtgtcactttatctcctttaccttgtggaaatgatttcctcaggactccagattatctacaacactgatgaggtctcttttattcaaaaccttgtattttgtgtggaaagagtttaccgtgtgcctgactttggtgtctgggaaagaggaagcaaatataataatggcagcacagagctacattcgagctcggttggtttagcaaaagcagctctagaagcaattaatggattcaacctttttggcaaccagggctgttcgtggtcagttatatttgtggatctcgatgctcacaatcgcaacaggcaaactttgtgctcgctgttacccagagaatcaagatcacataatacagatgctgccctgctcccctgcatcagttatcctgcatttgccctggatgatgaagttctttttagccagacacttgataaagtggttagaaaattaaaaggaaaatatggatttaaacgtttcttgagagatgggtatagaacatcattggaagatcccaacagatgctactacaagccagctgaaattaagctatttgatggcattgaatgtgaatttcccatatttttcctttatatgatgattgatggagtttttagaggcaatcctaagcaagtacaggaatatcaggatcttttgactccagtacttcatcataccacagaaggatatcctgttgtaccaaagtactattatgtgccagctgactttgtagaatatgaaaaaaataaccctggtagtcaaaaacgatttcctagcaactgtggccgtgatggaaaactgtttctttggggacaagcactttatatcatcgcaaaactcctggctgatgaacttattagtcctaaagacattgatcctgtccagcgctatgtcccactaaaggatcaacgtaacgtgagcatgaggttttccaatcagggcccactggaaaatgacttggtagttcatgtggcacttatagcagaaagccaaagacttcaagtttttctgaacacatatggtattcaaactcaaactcctcaacaagtagaacccattcagatatggcctcagcaggagcttgtgaaagcttatttgcagctgggtatcaatgaaaagttaggactctctggaaggccagacaggcccattggctgcctcgggacatcaaagatttatcgcattctaggaaagactgtggtttgttacccgattattttcgacctaagtgatttctacatgtctcaggatgttttcctgctgatagatgacataaagaatgcgctgcagttcattaaacaatattggaaaatgcatggacgtccacttttccttgttctcatccgggaagacaatataagaggtagccggttcaaccccatattagatatgctggcagcccttaaaaaaggaataattggaggagtcaaagttcatgtggatcgtctacagacactaatatctggagctgtggtagaacaacttgatttcctacgaatcagtgacacagaagagcttccagaatttaagagttttgaggaactagaacctcccaaacattcaaaagtcaaacggcaaagcagcacccctagtgctcctgaactgggacagcagccggatgtcaacattagtgaatggaaggacaaacccacccacgaaattcttcaaaaactgaatgattgcagttgtctggctagccaagccatcctgctgggtatactgctcaaaagagaaggccccaacttcatcacaaaggaaggtaccgtttctgatcacattgagagagtctatagaagagctggcagccaaaaactttggtcggttgtacgccgtgcagcaagtcttttaagtaaagtagtggacagcctggccccatccattactaatgttttagtgcagggcaaacaggtaactctgggtgcctttgggcatgaagaagaagttatctctaatcctttgtctccaagagtgattcaaaacatcatctattataagtgtaacacccatgatgagagggaagcggtcattcagcaagaactggtcatccatattggctggatcatctccaataaccctgagttattcagtggcatgctgaaaatacgaatcgggtggatcatccatgccatggagtatgaacttcagatccgtggcggagacaagccagccttggacttgtatcagctgtcacctagtgaagttaaacagcttctgctggatattctgcagcctcaacagaatggaagatgttggctgaacaggcgtcagatcgatgggtctttgaatagaactcccaccgggttctatgaccgagtgtggcagattctggagcgcacgcccaatgggatcattgttgctgggaagcatttgcctcagcaaccaaccctgtcagatatgaccatgtatgagatgaatttctctctccttgttgaagacacgttgggaaatattgaccagccacagtacagacagatcgttgtagagttacttatggttgtatccattgtactggaaagaaaccccgagctagaatttcaagacaaagtagatctagacagactggtcaaagaagcatttaatgaatttcaaaaagatcagagtcggctaaaggaaattgaaaaacaagatgacatgacttccttttacaacactcctcccctgggaaaaagaggaacatgcagctatttgacaaaggcggtgatgaatctgctgctggaaggagaagtcaagccaaacaatgatgacccgtgtctgattagctagtggggaaggtgtaggaagctctgttgagacacatgttctgaagtgtgttgtgtttcatgttcaagcttaatcaaggcagccattaatatacgaactgagcatgctggggaggtgaatgccacatccttggcggggttatggacctcttgcatgtcatagccaatctaacggtaatggtaaatgcttttaatcaagcaggaaaaagttctcatgattatgccaactataatagtaatcctcactgagtgataaaaatagtttatgaattgaaaatttgccgctgcatgttgtatgatcaaatagttcatcaaaatgaatctttgctctttggactgaattcttaccatactgccattaaaataaatttgccaactagtaatgcatactggaaatcaaaagatactgaaagaatggtgaacttctcttagtggtattgtcatgctaaaagatgttaatatacatcataaaagcaaagtcagccagctgatattttggttctcaaaaactgcattattaataatattttagtatacagagctattctacagtttttacattgtaaacatgactgtggttttgtatttgctaaatataggggttggactaaaatataataaatctgtaccttatca

SEQ ID NO: 372225 - DNA, 3684 bp, Homo sapiens
cccttgcgtcttcagcagcattctgcccagagtttttttggccatttcactctatgctgtctcctgtcccaggctgtgggcagcctgttccttcccctccacaggtgagagatctgtcaccacatattttaaccctcaccaggcaccttgcattatgcccagaaaaatgagggctacacaggaactgggtgcctcacacctgcctttgaaaggttatagtgttgctgaggcaaaaggatctgcctgagaaactataaaagaatcaaaaagtttatctctcaaataccaaattgtgtagactgcagtaaagtgaaactcttcaacctattctggtttctctggggagtttctagtactaaagtcattcagaataattttaacttaatttatattccttccctgcttttatccactcacctccactcccctaactggaaccctcacctgcccttatattttagactagactgtgaaccatcatgaattccagtgggagtcatgctttgaaagccattttaataaataccaggaacagttattctacctaattccctagcttatatagagtaatttcagcctgccagtcattctgagccttgatttttttttaatttttatcttttagtagctaggagaattttacaataaaattctgccacttgtaggtaactctgggtgcctttgggcatgaagaagaagttatctctaatcctttgtctccaagagtgattcaaaacatcatctattataagtgtaacacccatgatgagagggaagcggtcattcagcaagaactggtcatccatattggctggatcatctccaataaccctgagttattcagtggcatgctgaaaatacgaatcgggtggatcatccatgccatggagtatgaacttcagatccgtggcggagacaagccagccttggacttgtatcagctgtcacctagtgaagttaaacagcttctgctggatattctgcagcctcaacagaatggaagatgttggctgaacaggcgtcagatcgatgggtctttgaatagaactcccaccgggttctatgaccgagtgtggcagattctggagcgcacgcccaatgggatcattgttgctgggaagcatttgcctcagcaaccaaccctgtcagatatgaccatgtatgagatgaatttctctctccttgttgaagacacgttgggaaatattgaccagccacagtacagacagatcgttgtagagttacttatggttgtatccattgtactggaaagaaaccccgagctagaatttcaagacaaagtagatctagacagactggtcaaagaagcatttaatgaatttcaaaaagatcagagtcggctaaaggaaattgaaaaacaagatgacatgacttccttttacaacactcctcccctgggaaaaagaggaacatgcagctatttgacaaaggcggtgatgaatctgctgctggaaggagaagtcaagccaaacaatgatgacccgtgtctgattagctagtggggaaggtgtaggaagctctgttgagacacatgttctgaagtgtgttgtgtttcatgttcaagcttaatcaaggcagccattaatatacgaactgagcatgctggggaggtgaatgccacatccttggcggggttatggacctcttgcatgtcatagccaatctaacggtaatggtaaatgcttttaatcaagcaggaaaaagttctcatgattatgccaactataatagtaatcctcactgagtgataaaaatagtttatgaattgaaaatttgccgctgcatgttgtatgatcaaatagttcatcaaaatgaatctttgctctttggactgaattcttaccatactgccattaaaataaatttgccaactagtaatgcatactggaaatcaaaagatactgaaagaatggtgaacttctcttagtggtattgtcatgctaaaagatgttaatatacatcataaaagcaaagtcagccagctgatattttggttctcaaaaactgcattattaataatattttagtatacagagctattctacagtttttacattgtaaacatgactgtggttttgtatttgctaaatataggggttggactaaaatataataaatctgtaccttatcaaacattttctttgagctcctgctaaaaataggacatgtctatgattgttcaaaaatatgttaaatttaggctcagcacagtagctcacacctgaaatcttagcacttcgggaggctgaggcaggtggatcacttgaggttaggagttcaagaccagcccagccaacatggtgaaaaccctgtctctactaaaaatacaaaaattagccaggcatgatggtgcatgcctttaaacccagctactgaggaggctgaggcatgagaattgcttgaaccaggagacggaggttgcagtgagctgaaatcctgccactgcacaccagcctgggtgacagagcgagactccatctcaaaaaaaaaaaaaaaaaagaaaaagaaaaaaatatgttaaatttaaggactgttaacctacgttctactagtaaaaacaacattaagggtcattaaattttatttctgaattaatgaacatatctggacattttttgttcctaggttcacaagattgagcttcaaactcccgagtgttttcatttaattgatttagaggtagaatggaagagaatctgtggtacctaccattatacacatttagttgcccagtttacttaaactttaatgaaagtagaaagtagattaaacatttaaattttatttctttcctaaatagaaaaaaaaaaggcccatgagtttgagcccttgccccaaagagagttgtttttctgatcaatcttactggagtttcacctgagaagatagatttgtcacataaaaaatgcagcttatttgtagtgttttgaaaggatgtaagaaaggatgagtggcttcagtattgagtcaatcgatatcaaatgaatggatgtgtgagcacatggaaaaatctgctgtcagtcacatttctcataacattgaggtacagtgccgagatcttgcataagaaattgtatggatattagttggcaaaattgaaatgaatgagacacagttgggccctaaagaactaaggagggggattgacaaagaatagaattaaactacttgactcaatatgttaagagagtttatgaaaagatagtcgtgaagggtgaagctaatttgtaaaactaatgcctgaaaaaaacataagcatgaagtccatggagagggaattgagagctgacacttcataactggagaaactggaaattaaagaaagggaaacaaaagacttaaaatttttgtttgccgaaatttttacgaaagtaaactgtgttgtagttttaagaatttttttaaaaaatctgattagctgagcaaagttaccagaaaactgctatcctagttgaaatcaaacattacttgcaaatgtgttttctgagtgttagcttcctgcttaaatgttacatatgcaaaattctgaagttttcctgtgctactcctgaaagcattcagaatctgtgacacgtattgacttcatgctttgagattcaaaatttattgttctgaaagttatatttagaatcagtaaatcttgatattcacctttaaaaaagc

SEQ ID NO: 372226 - DNA, 5710 bp, Homo sapiens
agagtggcgcgcagccccgggacgcgtaagagccgctgccggctcctttttctctctcccactagggctgcccttccgacgctaaaaaagcagtggagctagggtgaaagccgccctcacgctcacttccggcaggcgcgcctcccgacagtgtcgtgcggggggcgtggcccggcattgctgacaggcggccccgggggcggtggccaaggcggcgaccggagcgcgatggcgggggcggcgggactcacggcagaagtgagctggaaggtcttggagcgaagagctcggaccaagcgctcagcttagcctgcgacgcttatgattagagccaacaatttgaaatggcctgctcacctgatgcagtcgtctctccgtcttccgctttcttaaggtctggctcagtttatgaacctcttaaaagcattaatcttccaagacctgataatgaaactctctgggataagttggaccattattacagaattgtcaagtcaacattgctgctgtatcaaagtccaactaccggtctctttcccactaaaacatgcggtggtgaccagaaggccaagatccaggacagcctatactgcgctgctggggcctgggctttggctcttgcatacaggcgaattgatgatgacaagggaaggacccatgagctggagcactcagctataaaatgcatgagaggaattctctactgctatatgcgtcaggccgataaggtccagcagtttaagcaggatccacgcccaacaacatgtcttcactctgttttcaatgtgcatacaggagatgagttgctttcctatgaggaatatggtcatcttcagataaatgcagtgtcactttatctcctttaccttgtggaaatgatttcctcaggactccagattatctacaacactgatgaggtctcttttattcaaaaccttgtattttgtgtggaaagagtttaccgtgtgcctgactttggtgtctgggaaagaggaagcaaatataataatggcagcacagagctacattcgagctcggttggtttagcaaaagcagctctagaagcaattaatggattcaacctttttggcaaccagggctgttcgtggtcagttatatttgtggatctcgatgctcacaatcgcaacaggcaaactttgtgctcgctgttacccagagaatcaagatcacataatacagatgctgccctgctcccctgcatcagttatcctgcatttgccctggatgatgaagttctttttagccagacacttgataaagtggttagaaaattaaaaggaaaatatggatttaaacgtttcttgagagatgggtatagaacatcattggaagatcccaacagatgctactacaagccagctgaaattaagctatttgatggcattgaatgtgaatttcccatatttttcctttatatgatgattgatggagtttttagaggcaatcctaagcaagtacaggaatatcaggatcttttgactccagtacttcatcataccacagaaggatatcctgttgtaccaaagtactattatgtgccagctgactttgtagaatatgaaaaaaataaccctggtagtcaaaaacgatttcctagcaactgtggccgtgatggaaaactgtttctttggggacaagcactttatatcatcgcaaaactcctggctgatgaacttattagtcctaaagacattgatcctgtccagcgctatgtcccactaaaggatcaacgtaacgtgagcatgaggttttccaatcagggcccactggaaaatgacttggtagttcatgtggcacttatagcagaaagccaaagacttcaagtttttctgaacacatatggtattcaaactcaaactcctcaacaagtagaacccattcagatatggcctcagcaggagcttgtgaaagcttatttgcagctgggtatcaatgaaaagttaggactctctggaaggccagacaggcccattggctgcctcgggacatcaaagatttatcgcattctaggaaagactgtggtttgttacccgattattttcgacctaagtgatttctacatgtctcaggatgttttcctgctgatagatgacataaagaatgcgctgcagttcattaaacaatattggaaaatgcatggacgtccacttttccttgttctcatccgggaagacaatataagaggtagccggttcaaccccatattagatatgctggcagcccttaaaaaaggaataattggaggagtcaaagttcatgtggatcgtctacagacactaatatctggagctgtggtagaacaacttgatttcctacgaatcagtgacacagaagagcttccagaatttaagagttttgaggaactagaacctcccaaacattcaaaagtcaaacggcaaagcagcacccctagtgctcctgaactgggacagcagccggatgtcaacattagtgaatggaaggacaaacccacccacgaaattcttcaaaaactgaatgattgcagttgtctggctagccaagccatcctgctgggtatactgctcaaaagagaaggccccaacttcatcacaaaggaaggtaccgtttctgatcacattgagagagtctatagaagagctggcagccaaaaactttggtcggttgtacgccgtgcagcaagtcttttaagtaaagtagtggacagcctggccccatccattactaatgttttagtgcagggcaaacaggtaactctgggtgcctttgggcatgaagaagaagttatctctaatcctttgtctccaagagtgattcaaaacatcatctattataagtgtaacacccatgatgagagggaagcggtcattcagcaagaactggtcatccatattggctggatcatctccaataaccctgagttattcagtggcatgctgaaaatacgaatcgggtggatcatccatgccatggagtatgaacttcagatccgtggcggagacaagccagccttggacttgtatcagctgtcacctagtgaagttaaacagcttctgctggatattctgcagcctcaacagaatggaagatgttggctgaacaggcgtcagatcgatgggtctttgaatagaactcccaccgggttctatgaccgagtgtggcagattctggagcgcacgcccaatgggatcattgttgctgggaagcatttgcctcagcaaccaaccctgtcagatatgaccatgtatgagatgaatttctctctccttgttgaagacacgttgggaaatattgaccagccacagtacagacagatcgttgtagagttacttatggttgtatccattgtactggaaagaaaccccgagctagaatttcaagacaaagtagatctagacagactggtcaaagaagcatttaatgaatttcaaaaagatcagagtcggctaaaggaaattgaaaaacaagatgacatgacttccttttacaacactcctcccctgggaagtcaagccaaacaatgatgacccgtgtctgattagctagtggggaaggtgtaggaagctctgttgagacacatgttctgaagtgtgttgtgtttcatgttcaagcttaatcaaggcagccattaatatacgaactgagcatgctggggaggtgaatgccacatccttggcggggttatggacctcttgcatgtcatagccaatctaacggtaatggtaaatgcttttaatcaagcaggaaaaagttctcatgattatgccaactataatagtaatcctcactgagtgataaaaatagtttatgaattgaaaatttgccgctgcatgttgtatgatcaaatagttcatcaaaatgaatctttgctctttggactgaattcttaccatactgccattaaaataaatttgccaactagtaatgcatactggaaatcaaaagatactgaaagaatggtgaacttctcttagtggtattgtcatgctaaaagatgttaatatacatcataaaagcaaagtcagccagctgatattttggttctcaaaaactgcattattaataatattttagtatacagagctattctacagtttttacattgtaaacatgactgtggttttgtatttgctaaatataggggttggactaaaatataataaatctgtaccttatcaaacattttctttgagctcctgctaaaaataggacatgtctatgattgttcaaaaatatgttaaatttaggctcagcacagtagctcacacctgaaatcttagcacttcgggaggctgaggcaggtggatcacttgaggttaggagttcaagaccagcccagccaacatggtgaaaaccctgtctctactaaaaatacaaaaattagccaggcatgatggtgcatgcctttaaacccagctactgaggaggctgaggcatgagaattgcttgaaccaggagacggaggttgcagtgagctgaaatcctgccactgcacaccagcctgggtgacagagcgagactccatctcaaaaaaaaaaaaaaaaaagaaaaagaaaaaaatatgttaaatttaaggactgttaacctacgttctactagtaaaaacaacattaagggtcattaaattttatttctgaattaatgaacatatctggacattttttgttcctaggttcacaagattgagcttcaaactcccgagtgttttcatttaattgatttagaggtagaatggaagagaatctgtggtacctaccattatacacatttagttgcccagtttacttaaactttaatgaaagtagaaagtagattaaacatttaaattttatttctttcctaaatagaaaaaaaaaaggcccatgagtttgagcccttgccccaaagagagttgtttttctgatcaatcttactggagtttcacctgagaagatagatttgtcacataaaaaatgcagcttatttgtagtgttttgaaaggatgtaagaaaggatgagtggcttcagtattgagtcaatcgatatcaaatgaatggatgtgtgagcacatggaaaaatctgctgtcagtcacatttctcataacattgaggtacagtgccgagatcttgcataagaaattgtatggatattagttggcaaaattgaaatgaatgagacacagttgggccctaaagaactaaggagggggattgacaaagaatagaattaaactacttgactcaatatgttaagagagtttatgaaaagatagtcgtgaagggtgaagctaatttgtaaaactaatgcctgaaaaaaacataagcatgaagtccatggagagggaattgagagctgacacttcataactggagaaactggaaattaaagaaagggaaacaaaagacttaaaatttttgtttgccgaaatttttacgaaagtaaactgtgttgtagttttaagaatttttttaaaaaatctgattagctgagcaaagttaccagaaaactgctatcctagttgaaatcaaacattacttgcaaatgtgttttctgagtgttagcttcctgcttaaatgttacatatgcaaaattctgaagttttcctgtgctactcctgaaagcattcagaatctgtgacacgtattgacttcatgctttgagattcaaaatttattgttctgaaagttatatttagaatcagtaaatcttgatattcacctttaaaaaagc

SEQ ID NO: 372227 - DNA, 2712 bp, Homo sapiens
tcaactctgagacatttgccttttgttacagatgttggctgaacaggcgtcagatcgatgggtctttgaatagaactcccaccgggttctatgaccgagtgtggcagattctggagcgcacgcccaatgggatcattgttgctgggaagcatttgcctcagcaaccaaccctgtcagatatgaccatgtatgagatgaatttctctctccttgttgaagacacgttgggaaatattgaccagccacagtacagacagatcgttgtagagttacttatggttgtatccattgtactggaaagaaaccccgagctagaatttcaagacaaagtagatctagacagactggtcaaagaagcatttaatgaatttcaaaaagatcagagtcggctaaaggaaattgaaaaacaagatgacatgacttccttttacaacactcctcccctgggaaaaagaggaacatgcagctatttgacaaaggcggtgatgaatctgctgctggaaggagaagtcaagccaaacaatgatgacccgtgtctgattagctagtggggaaggtgtaggaagctctgttgagacacatgttctgaagtgtgttgtgtttcatgttcaagcttaatcaaggcagccattaatatacgaactgagcatgctggggaggtgaatgccacatccttggcggggttatggacctcttgcatgtcatagccaatctaacggtaatggtaaatgcttttaatcaagcaggaaaaagttctcatgattatgccaactataatagtaatcctcactgagtgataaaaatagtttatgaattgaaaatttgccgctgcatgttgtatgatcaaatagttcatcaaaatgaatctttgctctttggactgaattcttaccatactgccattaaaataaatttgccaactagtaatgcatactggaaatcaaaagatactgaaagaatggtgaacttctcttagtggtattgtcatgctaaaagatgttaatatacatcataaaagcaaagtcagccagctgatattttggttctcaaaaactgcattattaataatattttagtatacagagctattctacagtttttacattgtaaacatgactgtggttttgtatttgctaaatataggggttggactaaaatataataaatctgtaccttatcaaacattttctttgagctcctgctaaaaataggacatgtctatgattgttcaaaaatatgttaaatttaggctcagcacagtagctcacacctgaaatcttagcacttcgggaggctgaggcaggtggatcacttgaggttaggagttcaagaccagcccagccaacatggtgaaaaccctgtctctactaaaaatacaaaaattagccaggcatgatggtgcatgcctttaaacccagctactgaggaggctgaggcatgagaattgcttgaaccaggagacggaggttgcagtgagctgaaatcctgccactgcacaccagcctgggtgacagagcgagactccatctcaaaaaaaaaaaaaaaaaagaaaaagaaaaaaatatgttaaatttaaggactgttaacctacgttctactagtaaaaacaacattaagggtcattaaattttatttctgaattaatgaacatatctggacattttttgttcctaggttcacaagattgagcttcaaactcccgagtgttttcatttaattgatttagaggtagaatggaagagaatctgtggtacctaccattatacacatttagttgcccagtttacttaaactttaatgaaagtagaaagtagattaaacatttaaattttatttctttcctaaatagaaaaaaaaaaggcccatgagtttgagcccttgccccaaagagagttgtttttctgatcaatcttactggagtttcacctgagaagatagatttgtcacataaaaaatgcagcttatttgtagtgttttgaaaggatgtaagaaaggatgagtggcttcagtattgagtcaatcgatatcaaatgaatggatgtgtgagcacatggaaaaatctgctgtcagtcacatttctcataacattgaggtacagtgccgagatcttgcataagaaattgtatggatattagttggcaaaattgaaatgaatgagacacagttgggccctaaagaactaaggagggggattgacaaagaatagaattaaactacttgactcaatatgttaagagagtttatgaaaagatagtcgtgaagggtgaagctaatttgtaaaactaatgcctgaaaaaaacataagcatgaagtccatggagagggaattgagagctgacacttcataactggagaaactggaaattaaagaaagggaaacaaaagacttaaaatttttgtttgccgaaatttttacgaaagtaaactgtgttgtagttttaagaatttttttaaaaaatctgattagctgagcaaagttaccagaaaactgctatcctagttgaaatcaaacattacttgcaaatgtgttttctgagtgttagcttcctgcttaaatgttacatatgcaaaattctgaagttttcctgtgctactcctgaaagcattcagaatctgtgacacgtattgacttcatgctttgagattcaaaatttattgttctgaaagttatatttagaatcagtaaatcttgatattcacctttaaaaaagc

SEQ ID NO: 372228 - DNA, 2076 bp, Homo sapiens
agagtggcgcgcagccccgggacgcgtaagagccgctgccggctcctttttctctctcccactagggctgcccttccgacgctaaaaaagcagtggagctagggtgaaagccgccctcacgctcacttccggcaggcgcgcctcccgacagtgtcgtgcggggggcgtggcccggcattgctgacaggcggccccgggggcggtggccaaggcggcgaccggagcgcgatggcgggggcggcgggactcacggcagaagtgagctggaaggtcttggagcgaagagctcggaccaagcgctcagcttagcctgcgacgcttatgattagagccaacaatttgaaatggcctgctcacctgatgcagtcgtctctccgtcttccgctttcttaaggtctggctcagtttatgaacctcttaaaagcattaatcttccaagacctgataatgaaactctctgggataagttggaccattattacagaattgtcaagtcaacattgctgctgtatcaaagtccaactaccggtctctttcccactaaaacatgcggtggtgaccagaaggccaagatccaggacagcctatactgcgctgctggggcctgggctttggctcttgcatacaggcgaattgatgatgacaagggaaggacccatgagctggagcactcagctataaaatgcatgagaggaattctctactgctatatgcgtcaggccgataaggtccagcagtttaagcaggatccacgcccaacaacatgtcttcactctgttttcaatgtgcatacaggagatgagttgctttcctatgaggaatatggtcatcttcagataaatgcagtgtcactttatctcctttaccttgtggaaatgatttcctcaggactccagattatctacaacactgatgaggtctcttttattcaaaaccttgtattttgtgtggaaagagtttaccgtgtgcctgactttggtgtctgggaaagaggaagcaaatataataatggcagcacagagctacattcgagctcggttggtttagcaaaagcagctctagaagcaattaatggattcaacctttttggcaaccagggctgttcgtggtcagttatatttgtggatctcgatgctcacaatcgcaacaggcaaactttgtgctcgctgttacccagagaatcaagatcacataatacagatgctgccctgctcccctgcatcagttatcctgcatttgccctggatgatgaagttctttttagccagacacttgataaagtggttagaaaattaaaaggaaaatatggatttaaacgtttcttgagagatgggtatagaacatcattggaagatcccaacagatgctactacaagccagctgaaattaagctatttgatggcattgaatgtgaatttcccatatttttcctttatatgatgattgatggagtttttagaggcaatcctaagcaagtacaggaatatcaggatcttttgactccagtacttcatcataccacagaaggatatcctgttgtaccaaagtactattatgtgccagctgactttgtagaatatgaaaaaaataaccctggtagtcaaaaacgatttcctagcaactgtggccgtgatggaaaactgtttctttggggacaagcactttatatcatcgcaaaactcctggctgatgaacttattagtcctaaagacattgatcctgtccagcgctatgtcccactaaaggatcaacgtaacgtgagcatgaggttttccaatcaggtagacaacgtgagtctcagagaggtttagtaatctctccaaggtcccacagttgtcaagtgacagaaccaatatgaaggcgttaactgaagaatgaaaggaaggagggaatgtcaagcatttggaagcagtgatttttgtaatggtgtgaaggagttaacaggagaaatagcttgttcttgaacagcctggctgaatatcacatcataggaacacagttgcaccggtgccttaggatgctgagagttctgtgaaagtgatctgaaaaattaaacacaaagatgccccatcagta

SEQ ID NO: 372229 - DNA, 1014 bp, Homo sapiens
taatttaggaaatgtttttctttttctctgtccagggctgttcgtggtcagttatatttgtggatctcgatgctcacaatcgcaacaggcaaactttgtgctcgctgttacccagagaatcaagatcacataatacagatgctgccctgctcccctgcatcagttatcctgcatttgccctggatgatgaagttctttttagccagacacttgataaagtggttagaaaattaaaaggaaaatatggatttaaacgtttcttgagagatgggtatagaacatcattggaagatcccaacagatgctactacaagccagctgaaattaagctatttgatggcattgaatgtgaatttcccatatttttcctttatatgatgattgatggagtttttagaggcaatcctaagcaagtacaggaatatcaggatcttttgactccagtacttcatcataccacagaaggatatcctgttgtaccaaagtactattatgtgccagctgactttgtagaatatgaaaaaaataaccctggtagtcaaaaacgatttcctagcaactgtggccgtgatggaaaactgtttctttggggacaagcactttatatcatcgcaaaactcctggctgatgaacttattagtcctaaagacattgatcctgtccagcgctatgtcccactaaaggatcaacgtaacgtgagcatgaggttttccaatcaggtagacaacgtgagtctcagagaggtttagtaatctctccaaggtcccacagttgtcaagtgacagaaccaatatgaaggcgttaactgaagaatgaaaggaaggagggaatgtcaagcatttggaagcagtgatttttgtaatggtgtgaaggagttaacaggagaaatagcttgttcttgaacagcctggctgaatatcacatcataggaacacagttgcaccggtgccttaggatgctgagagttctgtgaaagtgatctgaaaaattaaacacaaagatgccccatcagta

SEQ ID NO: 372230 - DNA, 915 bp, Homo sapiens
  misc_feature (776)..(776): n is a, c, g, or t
  misc_feature (781)..(781): n is a, c, g, or t
  misc_feature (794)..(797): n is a, c, g, or t
  misc_feature (802)..(802): n is a, c, g, or t
  misc_feature (814)..(814): n is a, c, g, or t
  misc_feature (822)..(822): n is a, c, g, or t
  misc_feature (827)..(827): n is a, c, g, or t
  misc_feature (830)..(830): n is a, c, g, or t
  misc_feature (837)..(837): n is a, c, g, or t
cggacgcgtgggtcgacccacgcgtcgcaggattactgtgtgtttaattttttaaaaactgaacactgtgattatggggttttgtaatttagcagaactcttactggtagaaaaaatagacctgaattatgtgtaactttttggaaggtttaatctgatatcaaaataatcattgaaatacaattccattgtaaagttgtacagaaagttatagagattatattgtgatgctggaacttggagtgagacacacatcatttggcatttgagttgaatggtaattcacagtaatgctgccgttgttcgggacttaaagacacttgacctgtttgggctgttgccacttaaaagttcatgaccacaaatgtccacagtgtcttcctctgaggaaactcgaatcctgaaatggaaattctttgtggcagataactggcttatgacaccttgaaaagttcaagtgctcatataacacaccacactgaaccccctttcctacagcaatatgttcactatgttaccaatttgcaacttgtgcttcaatagtggaatctactttcattgttaacactgagctaaagaaaaaaagccgtgtgttttatgaatgaccttatctgtttcctggataatacctttaagaataatgtcctgagtcaggcgtggtggtgcgtgcatctagtcccaactatttgggaggctgaggcaggaggatcgcttgagcccaggagtttaaagctgcagtgccctgtggttgcacctgtgaatactgactccagctnggcanatggggactctcnnnnaaagnaacaaacccaanaggatgtntctgnaanaggcttnctgggagacacaacaagactccaaccgggtaaaatggaaaaattttcccaccttgagagggccggatctacaaggctg

SEQ ID NO: 372231 - DNA, 501 bp, Homo sapiens
  misc_feature (455)..(455): n is a, c, g, or t
  misc_feature (465)..(465): n is a, c, g, or t
  misc_feature (468)..(468): n is a, c, g, or t
  misc_feature (495)..(495): n is a, c, g, or t
cttttttttttttggtttgttttaaatcagtgcataaaaaaaaaagaaaaaaacaaaaaaaaaaatccctcctttctagctgaacaaaaatgtgcagttaatacttggcgcttgaaaatgcagtagtgaatgtggaaccaagcctgtctgtatatctggtagctcttttcttgctttgttttttcttaccagtattctgcctaacgtttgcttctgtgatggttatattgcctagcaagcacacccgtggttgtgaaaatagtatagcaaaaaagaaaaatccccggttattgatgtactagatttgtgtatgtcttttaaacagttctagtttcaccttacacagaataatcaggaaaagtgtaaaaattcaaaagtgaaataaaaattttatcagttagttgcctgtgaaaaaaaaaaaaaacaaaaaaaaaaaaaaaaaaaaaaaaaaaaanaaaaaaaaanaanaaaaaagagaaaaacaaaaaaaaaaanaaacaa

SEQ ID NO: 372232 - DNA, 204 bp, Homo sapiens
gcagaatactggtaagaaaaaacaaagcaagcacacccgtggttgtgaaaatagtatagcaaaaaagaaaaatccccggttattgatgtactagatttgtgtatgtcttttaaacagttctagtttcaccttacacagaataatcaggaaaagtgtaaaaattcaaaagtgaaataaaaattttatcagttagttgcctgtgaa

SEQ ID NO: 372233 - DNA, 394 bp, Homo sapiens
  misc_feature (3)..(3): n is a, c, g, or t
  misc_feature (5)..(5): n is a, c, g, or t
gcntntgctgcctgctgtcgctctagaggatccccgccaattcctgcctttgccgatttggcatttgagttgaatggtaattcacagtaatgctgccgttgttcgggacttaaagacacttgacctgtttgggctgttgccacttaaaagttcatgaccacaaatgtccacagtgtcttcctctgaggaaactcgaatcctgaaatggaaattctttgtggcagataactggcttatgacaccttgaaaagttcaagtgctcatataacacaccacactgaaccccctttcctacagcaatatgttcactatgttaccaaatcggcaaagtgcaggaattggcgccaattcctgcactttgccgatttggcctaacctgacttgaaaagctatt

SEQ ID NO: 372234 - DNA, 2433 bp, Homo sapiens
attttcatctttatgttacaaccactgtgtcgaactcccagcaggcttaccaggaagcatttgaaattagtaagaaagaaatgcagcctacacacccaattcgtcttggtctggcactaaatttctcagtcttttactatgagattctaaactctcctgaaaaggcctgtagcctggcaaaaacggcatttgatgaagcaattgctgaattggatacgctgaatgaagagtcttataaagacagcactctgatcatgcagttacttagggacaatctcactctgtggacatcggaaaaccagggagacgaaggagacgctggggagggagagaactaatgtttctcgtgctttgtgatctgttcagtgtcactctgtaccctcaacatatatcccttgtgcgataaaaaaaaaaaaaaaaaaaaaaaagagaatcgtacgtcgactttcgatttttcacagcctcagcctaggaaaaatggttcatgggataaacagctggtatttgtatctaaaactcagattggtcacataaatgccacggcattccgaagttttgattttgattaacattgacaggattactgtgtgtttaattttttaaaaactgaacactgtgattatggggttttgtaatttagcagaactcttactggtagaaaaaatagacctgaattatgtgtaactttttggaaggtttaatctgatatcaaaataatcattgaaatacaattccattgtaaagttgtacagaaagttatagagattatattgtgatgctggaacttggagtgagacacacatcatttggcatttgagttgaatggtaattcacagtaatgctgccgttgttcgggacttaaagacacttgacctgtttgggctgttgccacttaaaagttcatgaccacaaatgtccacagtgtcttcctctgaggaaactcgaatcctgaaatggaaattctttgtggcagataactggcttatgacaccttgaaaagttcaagtgctcatataacacaccacactgaaccccctttcctacagcaatatgttcactatgttaccaatttgcaacttgtgcttcaatagtggaatctactttcattgttaacactgagctaaagaaaaaaagccgtgtgttttatgaatgaccttatctgtttcctggataatacctttaagaataatgtcctgagtcaggcgtggtggtgcgtgcatctagtcccaactatttgggaggctgaggcaggaggatcgcttgagcccaggagtttaaagctgcagtgccctgtggttgcacctgtgaataactgcactccagcctgggcaacatagcgagacctcatctccaaaaaagaaaacaaaaaacaaaaaaaggaatgatgttctgtagagatggcctttcacttgaggagtactcagttttcaggttcttcctagctcggggcttttaaattttgaaatctaaacattctttcccaccatcctttttgactgttgaccttggttttctcttctaagtttctgtccctctgcttccttactttttttcctttttgaattctatctttatctgtcttttgttcactttttaatgctatatatgggcaggggtgagagacattactgagcaccttggtgagcaagcctggctttaaagattggagaagagcttctggcaccagaaccctgtcttcctccagttctcaacacggtgttgctcttcagtcataccggaatctgaatcaaaaaagtatttttaaatatccatgatttctccctgtattgaggctagccctgatcatgctttttgtgcctgtcaccaggtctcccaagtgcactcatccaggtcagtgctcagatgtgtttaaggagaccctatattcagggaagttgcgtgaacactgcagtggggagaattgagaatagtcaggcctatcagtctcacagaatcacccctctacctttgatattccacttagctgtagagtccatctgtttgtccatctgctgaaatgagaaaagaaaaatttatgcactgatttaaaacaaaccaaaaaaaaagaaaaaaacaaaaaaaaaaatccctcctttctagctgaacaaaaatgtgcagttaatacttggcgcttgaaaatgcagtagtgaatgtggaaccaagcctgtctgtatatctggtagctcttttcttgctttgttttttcttaccagtattctgcctaacgtttgcttctgtgatggttatattgcctagcaagcacacccgtggttgtgaaaatagtatagcaaaaaagaaaaatccccggttattgatgtactagatttgtgtatgtcttttaaacagttctagtttcaccttacacagaataatcaggaaaagtgtaaaaattcaaaagtgaaataaaaattttatcagttagttgcctgtgaa

SEQ ID NO: 372235 - DNA, 2111 bp, Homo sapiens
tgggaaggaaaaaaataaaatttctccggccttgtgatctggtcaagggccccccggaccccccacaaaaattccctggggggttaaaaaaaaaaaaaaaaaaaaagagaatcgtacgtcgactttcgatttttcacagcctcagcctaggaaaaatggttcatgggataaacagctggtatttgtatctaaaactcagattggtcacataaatgccacggcattccgaagttttgattttgattaacattgacaggattactgtgtgtttaattttttaaaaactgaacactgtgattatggggttttgtaatttagcagaactcttactggtagaaaaaatagacctgaattatgtgtaactttttggaaggtttaatctgatatcaaaataatcattgaaatacaattccattgtaaagttgtacagaaagttatagagattatattgtgatgctggaacttggagtgagacacacatcatttggcatttgagttgaatggtaattcacagtaatgctgccgttgttcgggacttaaagacacttgacctgtttgggctgttgccacttaaaagttcatgaccacaaatgtccacagtgtcttcctctgaggaaactcgaatcctgaaatggaaattctttgtggcagataactggcttatgacaccttgaaaagttcaagtgctcatataacacaccacactgaaccccctttcctacagcaatatgttcactatgttaccaatttgcaacttgtgcttcaatagtggaatctactttcattgttaacactgagctaaagaaaaaaagccgtgtgttttatgaatgaccttatctgtttcctggataatacctttaagaataatgtcctgagtcaggcgtggtggtgcgtgcatctagtcccaactatttgggaggctgaggcaggaggatcgcttgagcccaggagtttaaagctgcagtgccctgtggttgcacctgtgaataactgcactccagcctgggcaacatagcgagacctcatctccaaaaaagaaaacaaaaaacaaaaaaaggaatgatgttctgtagagatggcctttcacttgaggagtactcagttttcaggttcttcctagctcggggcttttaaattttgaaatctaaacattctttcccaccatcctttttgactgttgaccttggttttctcttctaagtttctgtccctctgcttccttactttttttcctttttgaattctatctttatctgtcttttgttcactttttaatgctatatatgggcaggggtgagagacattactgagcaccttggtgagcaagcctggctttaaagattggagaagagcttctggcaccagaaccctgtcttcctccagttctcaacacggtgttgctcttcagtcataccggaatctgaatcaaaaaagtatttttaaatatccatgatttctccctgtattgaggctagccctgatcatgctttttgtgcctgtcaccaggtctcccaagtgcactcatccaggtcagtgctcagatgtgtttaaggagaccctatattcagggaagttgcgtgaacactgcagtggggagaattgagaatagtcaggcctatcagtctcacagaatcacccctctacctttgatattccacttagctgtagagtccatctgtttgtccatctgctgaaatgagaaaagaaaaatttatgcactgatttaaaacaaaccaaaaaaaaagaaaaaaacaaaaaaaaaaatccctcctttctagctgaacaaaaatgtgcagttaatacttggcgcttgaaaatgcagtagtgaatgtggaaccaagcctgtctgtatatctggtagctcttttcttgctttgttttttcttaccagtattctgcctaacgtttgcttctgtgatggttatattgcctagcaagcacacccgtggttgtgaaaatagtatagcaaaaaagaaaaatccccggttattgatgtactagatttgtgtatgtcttttaaacagttctagtttcaccttacacagaataatcaggaaaagtgtaaaaattcaaaagtgaaataaaaattttatcagttagttgcctgtgaa

SEQ ID NO: 372236 - DNA, 2748 bp, Homo sapiens
attttcatctttatgttacaaccactgtgtcgaactcccagcaggcttaccaggaagcatttgaaattagtaagaaagaaatgcagcctacacacccaattcgtcttggtctggcactaaatttctcagtcttttactatgagattctaaactctcctgaaaaggcctgtagcctggcaaaaacggcatttgatgaagcaattgctgaattggatacgctgaatgaagagtcttataaagacagcactctgatcatgcagttacttagggacaatctcactctgtggacatcggaaaaccagggagacgaaggagacgctggggagggagagaactaatgtttctcgtgctttgtgatctgttcagtgtcactctgtaccctcaacatatatcccttgtgcgataaaaaaaaaaaaaaaaaaaaaaaagagaatcgtacgtcgactttcgatttttcacagcctcagcctaggaaaaatggttcatgggataaacagctggtatttgtatctaaaactcagattggtcacataaatgccacggcattccgaagttttgattttgattaacattgacaggattactgtgtgtttaattttttaaaaactgaacactgtgattatggggttttgtaatttagcagaactcttactggtagaaaaaatagacctgaattatgtgtaactttttggaaggtttaatctgatatcaaaataatcattgaaatacaattccattgtaaagttgtacagaaagttatagagattatattgtgatgctggaacttggagtgagacacacatcatttggcatttgagttgaatggtaattcacagtaatgctgccgttgttcgggacttaaagacacttgacctgtttgggctgttgccacttaaaagttcatgaccacaaatgtccacagtgtcttcctctgaggaaactcgaatcctgaaatggaaattctttgtggcagataactggcttatgacaccttgaaaagttcaagtgctcatataacacaccacactgaaccccctttcctacagcaatatgttcactatgttaccaatttgcaacttgtgcttcaatagtggaatctactttcattgttaacactgagctaaagaaaaaaagccgtgtgttttatgaatgaccttatctgtttcctggataatacctttaagaataatgtcctgagtcaggcgtggtggtgcgtgcatctagtcccaactatttgggaggctgaggcaggaggatcgcttgagcccaggagtttaaagctgcagtgccctgtggttgcacctgtgaataactgcactccagcctgggcaacatagcgagacctcatctccaaaaaagaaaacaaaaaacaaaaaaaggaatgatgttctgtagagatggcctttcacttgaggagtactcagttttcaggttcttcctagctcggggcttttaaattttgaaatctaaacattctttcccaccatcctttttgactgttgaccttggttttctcttctaagtttctgtccctctgcttccttactttttttcctttttgaattctatctttatctgtcttttgttcactttttaatgctatatatgggcaggggtgagagacattactgagcaccttggtgagcaagcctggctttaaagattggagaagagcttctggcaccagaaccctgtcttcctccagttctcaacacggtgttgctcttcagtcataccggaatctgaatcaaaaaagtatttttaaatatccatgatttctccctgtattgaggctagccctgatcatgctttttgtgcctgtcaccaggtctcccaagtgcactcatccaggtcagtgctcagatgtgtttaaggagaccctatattcagggaagttgcgtgaacactgcagtggggagaattgagaatagtcaggcctatcagtctcacagaatcacccctctacctttgatattccacttagctgtagagtccatctgtttgtccatctgctgaaatgagaaaagaaaaatttatgcactgatttaaaacaaaccaaaaaaaaagaaaaaaacaaaaaaaaaaatccctcctttctagctgaacaaaaatgtgcagttaatacttggcgcttgaaaatgcagtagtgaatgtggaaccaagcctgtctgtatatctggtagctcttttcttgctttgttttttcttaccagtattctgcctaacgtttgcttctgtgatggttatattgcctagcaagcacacccgtggttgtgaaaatagtatagcaaaaaagaaaaatccccggttattgatgtactagatttgtgtatgtcttttaaacagttctagtttcaccttacacagaataatcaggaaaagtgtaaaaattcaaaagtgaaataaaaattttatcagttagttgcctgtgaaaaaaaaaaaaaaaaaactcggagactagtcctctctctctctcgggctaaggcagagacggtagtagcgggcgacagcgacgacgggcagcgatggctgggggcgggggccagccccggggacccccgggtgcaggaggacccggggccccgggccctgggcgctgggcatcccggggcaaaagcgggcgaggaacgcttgaagggaaatgggaggcgggagatgggccctgtttgagcaggaagttctgggggcgctccagtacctggaatcccaactggctgtgcctgcggtgcccactgtccccagggtccc

SEQ ID NO: 372237 - DNA, 2787 bp, Homo sapiens
  misc_feature (2435)..(2435): n is a, c, g, or t
  misc_feature (2444)..(2444): n is a, c, g, or t
attttcatctttatgttacaaccactgtgtcgaactcccagcaggcttaccaggaagcatttgaaattagtaagaaagaaatgcagcctacacacccaattcgtcttggtctggcactaaatttctcagtcttttactatgagattctaaactctcctgaaaaggcctgtagcctggcaaaaacggcatttgatgaagcaattgctgaattggatacgctgaatgaagagtcttataaagacagcactctgatcatgcagttacttagggacaatctcactctgtggacatcggaaaaccagggagacgaaggagacgctggggagggagagaactaatgtttctcgtgctttgtgatctgttcagtgtcactctgtaccctcaacatatatcccttgtgcgataaaaaaaaaaaaaaaaaaaaaaaagagaatcgtacgtcgactttcgatttttcacagcctcagcctaggaaaaatggttcatgggataaacagctggtatttgtatctaaaactcagattggtcacataaatgccacggcattccgaagttttgattttgattaacattgacaggattactgtgtgtttaattttttaaaaactgaacactgtgattatggggttttgtaatttagcagaactcttactggtagaaaaaatagacctgaattatgtgtaactttttggaaggtttaatctgatatcaaaataatcattgaaatacaattccattgtaaagttgtacagaaagttatagagattatattgtgatgctggaacttggagtgagacacacatcatttggcatttgagttgaatggtaattcacagtaatgctgccgttgttcgggacttaaagacacttgacctgtttgggctgttgccacttaaaagttcatgaccacaaatgtccacagtgtcttcctctgaggaaactcgaatcctgaaatggaaattctttgtggcagataactggcttatgacaccttgaaaagttcaagtgctcatataacacaccacactgaaccccctttcctacagcaatatgttcactatgttaccaatttgcaacttgtgcttcaatagtggaatctactttcattgttaacactgagctaaagaaaaaaagccgtgtgttttatgaatgaccttatctgtttcctggataatacctttaagaataatgtcctgagtcaggcgtggtggtgcgtgcatctagtcccaactatttgggaggctgaggcaggaggatcgcttgagcccaggagtttaaagctgcagtgccctgtggttgcacctgtgaataactgcactccagcctgggcaacatagcgagacctcatctccaaaaaagaaaacaaaaaacaaaaaaaggaatgatgttctgtagagatggcctttcacttgaggagtactcagttttcaggttcttcctagctcggggcttttaaattttgaaatctaaacattctttcccaccatcctttttgactgttgaccttggttttctcttctaagtttctgtccctctgcttccttactttttttcctttttgaattctatctttatctgtcttttgttcactttttaatgctatatatgggcaggggtgagagacattactgagcaccttggtgagcaagcctggctttaaagattggagaagagcttctggcaccagaaccctgtcttcctccagttctcaacacggtgttgctcttcagtcataccggaatctgaatcaaaaaagtatttttaaatatccatgatttctccctgtattgaggctagccctgatcatgctttttgtgcctgtcaccaggtctcccaagtgcactcatccaggtcagtgctcagatgtgtttaaggagaccctatattcagggaagttgcgtgaacactgcagtggggagaattgagaatagtcaggcctatcagtctcacagaatcacccctctacctttgatattccacttagctgtagagtccatctgtttgtccatctgctgaaatgagaaaagaaaaatttatgcactgatttaaaacaaaccaaaaaaaaagaaaaaaacaaaaaaaaaaatccctcctttctagctgaacaaaaatgtgcagttaatacttggcgcttgaaaatgcagtagtgaatgtggaaccaagcctgtctgtatatctggtagctcttttcttgctttgttttttcttaccagtattctgcctaacgtttgcttctgtgatggttatattgcctagcaagcacacccgtggttgtgaaaatagtatagcaaaaaagaaaaatccccggttattgatgtactagatttgtgtatgtcttttaaacagttctagtttcaccttacacagaataatcaggaaaagtgtaaaaattcaaaagtgaaataaaaattttatcagttagttgcctgtgaaanaaaaaaaanaaaaaaaaaaaaaaagggggggaggattagaaaatttccctgaaggggcccaaggaataagagataacacaggttatttgggtacaagggggccccaatatatggacacgagaattattaggcatggaccgggagcggtaatatttacacagcttcgtgcatcgggaacaatatgatagctggggaattttggggaagggaacctaccttatggggggtatgcaaaatacgggaacaaatacctacgaattaaaggtccaagggaactaatacaattaagggtacagggtgtaacaagtgaattgcgaatgtgaaaatggataagaatgaatgtgaatttacg

SEQ ID NO: 372238 - DNA, 2757 bp, Homo sapiens
attttcatctttatgttacaaccactgtgtcgaactcccagcaggcttaccaggaagcatttgaaattagtaagaaagaaatgcagcctacacacccaattcgtcttggtctggcactaaatttctcagtcttttactatgagattctaaactctcctgaaaaggcctgtagcctggcaaaaacggcatttgatgaagcaattgctgaattggatacgctgaatgaagagtcttataaagacagcactctgatcatgcagttacttagggacaatctcactctgtggacatcggaaaaccagggagacgaaggagacgctggggagggagagaactaatgtttctcgtgctttgtgatctgttcagtgtcactctgtaccctcaacatatatcccttgtgcgataaaaaaaaaaaaaaaaaaaaaaaagagaatcgtacgtcgactttcgatttttcacagcctcagcctaggaaaaatggttcatgggataaacagctggtatttgtatctaaaactcagattggtcacataaatgccacggcattccgaagttttgattttgattaacattgacaggattactgtgtgtttaattttttaaaaactgaacactgtgattatggggttttgtaatttagcagaactcttactggtagaaaaaatagacctgaattatgtgtaactttttggaaggtttaatctgatatcaaaataatcattgaaatacaattccattgtaaagttgtacagaaagttatagagattatattgtgatgctggaacttggagtgagacacacatcatttggcatttgagttgaatggtaattcacagtaatgctgccgttgttcgggacttaaagacacttgacctgtttgggctgttgccacttaaaagttcatgaccacaaatgtccacagtgtcttcctctgaggaaactcgaatcctgaaatggaaattctttgtggcagataactggcttatgacaccttgaaaagttcaagtgctcatataacacaccacactgaaccccctttcctacagcaatatgttcactatgttaccaatttgcaacttgtgcttcaatagtggaatctactttcattgttaacactgagctaaagaaaaaaagccgtgtgttttatgaatgaccttatctgtttcctggataatacctttaagaataatgtcctgagtcaggcgtggtggtgcgtgcatctagtcccaactatttgggaggctgaggcaggaggatcgcttgagcccaggagtttaaagctgcagtgccctgtggttgcacctgtgaataactgcactccagcctgggcaacatagcgagacctcatctccaaaaaagaaaacaaaaaacaaaaaaaggaatgatgttctgtagagatggcctttcacttgaggagtactcagttttcaggttcttcctagctcggggcttttaaattttgaaatctaaacattctttcccaccatcctttttgactgttgaccttggttttctcttctaagtttctgtccctctgcttccttactttttttcctttttgaattctatctttatctgtcttttgttcactttttaatgctatatatgggcaggggtgagagacattactgagcaccttggtgagcaagcctggctttaaagattggagaagagcttctggcaccagaaccctgtcttcctccagttctcaacacggtgttgctcttcagtcataccggaatctgaatcaaaaaagtatttttaaatatccatgatttctccctgtattgaggctagccctgatcatgctttttgtgcctgtcaccaggtctcccaagtgcactcatccaggtcagtgctcagatgtgtttaaggagaccctatattcagggaagttgcgtgaacactgcagtggggagaattgagaatagtcaggcctatcagtctcacagaatcacccctctacctttgatattccacttagctgtagagtccatctgtttgtccatctgctgaaatgagaaaagaaaaatttatgcactgatttaaaacaaaccaaaaaaaaagaaaaaaacaaaaaaaaaaatccctcctttctagctgaacaaaaatgtgcagttaatacttggcgcttgaaaatgcagtagtgaatgtggaaccaagcctgtctgtatatctggtagctcttttcttgctttgttttttcttaccagtattctgcctaacgtttgcttctgtgatggttatattgcctagcaagcacacccgtggttgtgaaaatagtatagcaaaaaagaaaaatccccggttattgatgtactagatttgtgtatgtcttttaaacagttctagtttcaccttacacagaataatcaggaaaagtgtaaaaattcaaaagtgaaataaaaattttatcagttagttgcctgtgaaaaaaaaaaaaaacaaaaaaaaaaaaaaaaaaaaaaaaagaataaaaaaaaaaaacaaagaaaaaaagaaaaaaaaactaaacaatcaaaacaaaaaggcgggggcgccatatacaactaccgacgcgacgaagcaatatcggataccacacccgtaatgaaaagggagcaccaaggggacaaaaaacagaggcggcgcccaaaaacgtctgagcagaaacaatccctgcactagaagcacccccgggggagcagcgcaacccaccagataccgccgagaaaaacagtggtggcaacccatcagcgaccagccgcaattaataca

SEQ ID NO: 372239 - DNA, 2403 bp, Homo sapiens
attttcatctttatgttacaaccactgtgtcgaactcccagcaggcttaccaggaagcatttgaaattagtaagaaagaaatgcagcctacacacccaattcgtcttggtctggcactaaatttctcagtcttttactatgagattctaaactctcctgaaaaggcctgtagcctggcaaaaacggcatttgatgaagcaattgctgaattggatacgctgaatgaagagtcttataaagacagcactctgatcatgcagttacttagggacaatctcactctgtggacatcggaaaaccagggagacgaaggagacgctggggagggagagaactaatgtttctcgtgctttgtgatctgttcagtgtcactctgtaccctcaacatatatcccttgtgcgataaaaaaaaaaaaaaaaaaaaaaaagagaatcgtacgtcgactttcgatttttcacagcctcagcctaggaaaaatggttcatgggataaacagctggtatttgtatctaaaactcagattggtcacataaatgccacggcattccgaagttttgattttgattaacattgacaggattactgtgtgtttaattttttaaaaactgaacactgtgattatggggttttgtaatttagcagaactcttactggtagaaaaaatagacctgaattatgtgtaactttttggaaggtttaatctgatatcaaaataatcattgaaatacaattccattgtaaagttgtacagaaagttatagagattatattgtgatgctggaacttggagtgagacacacatcatttggcatttgagttgaatggtaattcacagtaatgctgccgttgttcgggacttaaagacacttgacctgtttgggctgttgccacttaaaagttcatgaccacaaatgtccacagtgtcttcctctgaggaaactcgaatcctgaaatggaaattctttgtggcagataactggcttatgacaccttgaaaagttcaagtgctcatataacacaccacactgaaccccctttcctacagcaatatgttcactatgttaccaatttgcaacttgtgcttcaatagtggaatctactttcattgttaacactgagctaaagaaaaaaagccgtgtgttttatgaatgaccttatctgtttcctggataatacctttaagaataatgtcctgagtcaggcgtggtggtgcgtgcatctagtcccaactatttgggaggctgaggcaggaggatcgcttgagcccaggagtttaaagctgcagtgccctgtggttgcacctgtgaataactgcactccagcctgggcaacatagcgagacctcatctccaaaaaagaaaacaaaaaacaaaaaaaggaatgatgttctgtagagatggcctttcacttgaggagtactcagttttcaggttcttcctagctcggggcttttaaattttgaaatctaaacattctttcccaccatcctttttgactgttgaccttggttttctcttctaagtttctgtccctctgcttccttactttttttcctttttgaattctatctttatctgtcttttgttcactttttaatgctatatatgggcaggggtgagagacattactgagcaccttggtgagcaagcctggctttaaagattggagaagagcttctggcaccagaaccctgtcttcctccagttctcaacacggtgttgctcttcagtcataccggaatctgaatcaaaaaagtatttttaaatatccatgatttctccctgtattgaggctagccctgatcatgctttttgtgcctgtcaccaggtctcccaagtgcactcatccaggtcagtgctcagatgtgtttaaggagaccctatattcagggaagttgcgtgaacactgcagtggggagaattgagaatagtcaggcctatcagtctcacagaatcacccctctacctttgatattccacttagctgtagagtccatctgtttgtccatctgctgaaatgagaaaagaaaaatttatgcactgatttaaaacaaaccaaaaaaaaagaaaaaaacaaaaggagaatcgtgcgtcgactttcgatttttcacagactcagcctatgaaaaatggttcatgggataaacagcgtggatttgtatctaaaactcagattggtcacataaatgccacggcattccgaagttttgattttgattaacattgacaggattactgtgtggttaattttttaaaaaccgaacactgtgattatgggggtttgtaatttaacagaactcttactgtgagaaaaaatagacctgaattatgtgtaactttttggaagggttaatctgatatcattatattgtgatgctggaacttggagtgagacacacatca

SEQ ID NO: 372240 - DNA, 2379 bp, Homo sapiens
attttcatctttatgttacaaccactgtgtcgaactcccagcaggcttaccaggaagcatttgaaattagtaagaaagaaatgcagcctacacacccaattcgtcttggtctggcactaaatttctcagtcttttactatgagattctaaactctcctgaaaaggcctgtagcctggcaaaaacggcatttgatgaagcaattgctgaattggatacgctgaatgaagagtcttataaagacagcactctgatcatgcagttacttagggacaatctcactctgtggacatcggaaaaccagggagacgaaggagacgctggggagggagagaactaatgtttctcgtgctttgtgatctgttcagtgtcactctgtaccctcaacatatatcccttgtgcgataaaaaaaaaaaaaaaaaaaaaaaagagaatcgtacgtcgactttcgatttttcacagcctcagcctaggaaaaatggttcatgggataaacagctggtatttgtatctaaaactcagattggtcacataaatgccacggcattccgaagttttgattttgattaacattgacaggattactgtgtgtttaattttttaaaaactgaacactgtgattatggggttttgtaatttagcagaactcttactggtagaaaaaatagacctgaattatgtgtaactttttggaaggtttaatctgatatcaaaataatcattgaaatacaattccattgtaaagttgtacagaaagttatagagattatattgtgatgctggaacttggagtgagacacacatcatttggcatttgagttgaatggtaattcacagtaatgctgccgttgttcgggacttaaagacacttgacctgtttgggctgttgccacttaaaagttcatgaccacaaatgtccacagtgtcttcctctgaggaaactcgaatcctgaaatggaaattctttgtggcagataactggcttatgacaccttgtatgttcactatgttaccaatttgcaacttgtgcttcaatagtggaatctactttcattgttaacactgagctaaagaaaaaaagccgtgtgttttatgaatgaccttatctgtttcctggataatacctttaagaataatgtcctgagtcaggcgtggtggtgcgtgcatctagtcccaactatttgggaggctgaggcaggaggatcgcttgagcccaggagtttaaagctgcagtgccctgtggttgcacctgtgaataactgcactccagcctgggcaacatagcgagacctcatctccaaaaaagaaaacaaaaaacaaaaaaaggaatgatgttctgtagagatggcctttcacttgaggagtactcagttttcaggttcttcctagctcggggcttttaaattttgaaatctaaacattctttcccaccatcctttttgactgttgaccttggttttctcttctaagtttctgtccctctgcttccttactttttttcctttttgaattctatctttatctgtcttttgttcactttttaatgctatatatgggcaggggtgagagacattactgagcaccttggtgagcaagcctggctttaaagattggagaagagcttctggcaccagaaccctgtcttcctccagttctcaacacggtgttgctcttcagtcataccggaatctgaatcaaaaaagtatttttaaatatccatgatttctccctgtattgaggctagccctgatcatgctttttgtgcctgtcaccaggtctcccaagtgcactcatccaggtcagtgctcagatgtgtttaaggagaccctatattcagggaagttgcgtgaacactgcagtggggagaattgagaatagtcaggcctatcagtctcacagaatcacccctctacctttgatattccacttagctgtagagtccatctgtttgtccatctgctgaaatgagaaaagaaaaatttatgcactgatttaaaacaaaccaaaaaaaaagaaaaaaacaaaaaaaaaaatccctcctttctagctgaacaaaaatgtgcagttaatacttggcgcttgaaaatgcagtagtgaatgtggaaccaagcctgtctgtatatctggtagctcttttcttgctttgttttttcttaccagtattctgcctaacgtttgcttctgtgatggttatattgcctagcaagcacacccgtggttgtgaaaatagtatagcaaaaaagaaaaatccccggttattgatgtactagatttgtgtatgtcttttaaacagttctagtttcaccttacacagaataatcaggaaaagtgtaaaaattcaaaagtgaaataaaaattttatcagttagttgcctgtgaa

SEQ ID NO: 372241 - DNA, 2048 bp, Homo sapiens
attttcatctttatgttacaaccactgtgtcgaactcccagcaggcttaccaggaagcatttgaaattagtaagaaagaaatgcagcctacacacccaattcgtcttggtctggcactaaatttctcagtcttttactatgagattctaaactctcctgaaaaggcctgtagcctggcaaaaacggcatttgatgaagcaattgctgaattggatacgctgaatgaagagtcttataaagacagcactctgatcatgcagttacttagggacaatctcactctgtggacatcggaaaaccagggagacgaaggagacgctggggagggagagaactaatgtttctcgtgctttgtgatctgttcagtgtcactctgtaccctcaacatatatcccttgtgcgataaaaaaaaaaaaaaaaaaaaaaaagagaatcgtacgtcgactttcgatttttcacagcctcagcctaggaaaaatggttcatgggataaacagctggtatttgtatctaaaactcagattggtcacataaatgccacggcattccgaagttttgattttgattaacattgattctttgtggcagataactggcttatgacaccttgaaaagttcaagtgctcatataacacaccacactgaaccccctttcctacagcaatatgttcactatgttaccaatttgcaacttgtgcttcaatagtggaatctactttcattgttaacactgagctaaagaaaaaaagccgtgtgttttatgaatgaccttatctgtttcctggataatacctttaagaataatgtcctgagtcaggcgtggtggtgcgtgcatctagtcccaactatttgggaggctgaggcaggaggatcgcttgagcccaggagtttaaagctgcagtgccctgtggttgcacctgtgaataactgcactccagcctgggcaacatagcgagacctcatctccaaaaaagaaaacaaaaaacaaaaaaaggaatgatgttctgtagagatggcctttcacttgaggagtactcagttttcaggttcttcctagctcggggcttttaaattttgaaatctaaacattctttcccaccatcctttttgactgttgaccttggttttctcttctaagtttctgtccctctgcttccttactttttttcctttttgaattctatctttatctgtcttttgttcactttttaatgctatatatgggcaggggtgagagacattactgagcaccttggtgagcaagcctggctttaaagattggagaagagcttctggcaccagaaccctgtcttcctccagttctcaacacggtgttgctcttcagtcataccggaatctgaatcaaaaaagtatttttaaatatccatgatttctccctgtattgaggctagccctgatcatgctttttgtgcctgtcaccaggtctcccaagtgcactcatccaggtcagtgctcagatgtgtttaaggagaccctatattcagggaagttgcgtgaacactgcagtggggagaattgagaatagtcaggcctatcagtctcacagaatcacccctctacctttgatattccacttagctgtagagtccatctgtttgtccatctgctgaaatgagaaaagaaaaatttatgcactgatttaaaacaaaccaaaaaaaaagaaaaaaacaaaaaaaaaaatccctcctttctagctgaacaaaaatgtgcagttaatacttggcgcttgaaaatgcagtagtgaatgtggaaccaagcctgtctgtatatctggtagctcttttcttgctttgttttttcttaccagtattctgcctaacgtttgcttctgtgatggttatattgcctagcaagcacacccgtggttgtgaaaatagtatagcaaaaaagaaaaatccccggttattgatgtactagatttgtgtatgtcttttaaacagttctagtttcaccttacacagaataatcaggaaaagtgtaaaaattcaaaagtgaaataaaaattttatcagttagttgcctgtgaa

SEQ ID NO: 372242 - DNA, 2378 bp, Homo sapiens
attttcatctttatgttacaaccactgtgtcgaactcccagcaggcttaccaggaagcatttgaaattagtaagaaagaaatgcagcctacacacccaattcgtcttggtctggcactaaatttctcagtcttttactatgagattctaaactctcctgaaaaggcctgtagcctggcaaaaacggcatttgatgaagcaattgctgaattggatacgctgaatgaagagtcttataaagacagcactctgatcatgcagttacttagggacaatctcactctgtggacatcggaaaaccagggagacgaaggagacgctggggagggagagaactaatgtttctcgtgctttgtgatctgttcagtgtcactctgtaccctcaacatatatcccttgtgcgataaaaaaaaaaaaaaaaaaaaaaaagagaatcgtacgtcgactttcgatttttcacagcctcagcctaggaaaaatggttcatgggataaacagctggtatttgtatctaaaactcagattggtcacataaatgccacggcattccgaagttttgattttgattaacattgacaggattactgtgtgtttaattttttaaaaactgaacactgtgattatggggttttgtaatttagcagaactcttactggtagaaaaaatagacctgaattatgtgtaactttttggaaggtttaatctgatatcaaaataatcattgaaatacaattccattgtaaagttgtacagaaagttatagagattatattgtgatgctggaacttggagtgagacacacatcatttggcatttgagttgaatggtaattcacagtaatgctgccgttgttcgggacttaaagacacttgacctgtttgggctgttgccacttaaaagttcatgaccacaaatgtccacagtgtcttcctctgaggaaactcgaatcctgaaatggaaattctttgtggcagataactggcttatgacaccttgaaaagttcaagtgctcatataacacaccacactgaaccccctttcctacagcaatatgttcactatgttaccaatttgcaacttgtgcttcaatagtggaatctactttcattgttaacactgagctaaagaagaataatgtcctgagtcaggcgtggtggtgcgtgcatctagtcccaactatttgggaggctgaggcaggaggatcgcttgagcccaggagtttaaagctgcagtgccctgtggttgcacctgtgaataactgcactccagcctgggcaacatagcgagacctcatctccaaaaaagaaaacaaaaaacaaaaaaaggaatgatgttctgtagagatggcctttcacttgaggagtactcagttttcaggttcttcctagctcggggcttttaaattttgaaatctaaacattctttcccaccatcctttttgactgttgaccttggttttctcttctaagtttctgtccctctgcttccttactttttttcctttttgaattctatctttatctgtcttttgttcactttttaatgctatatatgggcaggggtgagagacattactgagcaccttggtgagcaagcctggctttaaagattggagaagagcttctggcaccagaaccctgtcttcctccagttctcaacacggtgttgctcttcagtcataccggaatctgaatcaaaaaagtatttttaaatatccatgatttctccctgtattgaggctagccctgatcatgctttttgtgcctgtcaccaggtctcccaagtgcactcatccaggtcagtgctcagatgtgtttaaggagaccctatattcagggaagttgcgtgaacactgcagtggggagaattgagaatagtcaggcctatcagtctcacagaatcacccctctacctttgatattccacttagctgtagagtccatctgtttgtccatctgctgaaatgagaaaagaaaaatttatgcactgatttaaaacaaaccaaaaaaaaagaaaaaaacaaaaaaaaaaatccctcctttctagctgaacaaaaatgtgcagttaatacttggcgcttgaaaatgcagtagtgaatgtggaaccaagcctgtctgtatatctggtagctcttttcttgctttgttttttcttaccagtattctgcctaacgtttgcttctgtgatggttatattgcctagcaagcacacccgtggttgtgaaaatagtatagcaaaaaagaaaaatccccggttattgatgtactagatttgtgtatgtcttttaaacagttctagtttcaccttacacagaataatcaggaaaagtgtaaaaattcaaaagtgaaataaaaattttatcagttagttgcctgtgaa

SEQ ID NO: 372243 - DNA, 1563 bp, Homo sapiens
ttaccaatttgctgtggaggaaagggggttcagtgtggtgtgttatatgagcacttgaacttttcaaggtgtcataagccagttatctgccacaaagaatttccatttcaggattcgagtttcctcagaggaagacactgtggacattgtggtcatgaacttttaagtggcaacagcaatatgttcactatgttaccaatttgcaacttgtgcttcaatagtggaatctactttcattgttaacactgagctaaagaaaaaaagccgtgtgttttatgaatgaccttatctgtttcctggataatacctttaagaataatgtcctgagtcaggcgtggtggtgcgtgcatctagtcccaactatttgggaggctgaggcaggaggatcgcttgagcccaggagtttaaagctgcagtgccctgtggttgcacctgtgaataactgcactccagcctgggcaacatagcgagacctcatctccaaaaaagaaaacaaaaaacaaaaaaaggaatgatgttctgtagagatggcctttcacttgaggagtactcagttttcaggttcttcctagctcggggcttttaaattttgaaatctaaacattctttcccaccatcctttttgactgttgaccttggttttctcttctaagtttctgtccctctgcttccttactttttttcctttttgaattctatctttatctgtcttttgttcactttttaatgctatatatgggcaggggtgagagacattactgagcaccttggtgagcaagcctggctttaaagattggagaagagcttctggcaccagaaccctgtcttcctccagttctcaacacggtgttgctcttcagtcataccggaatctgaatcaaaaaagtatttttaaatatccatgatttctccctgtattgaggctagccctgatcatgctttttgtgcctgtcaccaggtctcccaagtgcactcatccaggtcagtgctcagatgtgtttaaggagaccctatattcagggaagttgcgtgaacactgcagtggggagaattgagaatagtcaggcctatcagtctcacagaatcacccctctacctttgatattccacttagctgtagagtccatctgtttgtccatctgctgaaatgagaaaagaaaaatttatgcactgatttaaaacaaaccaaaaaaaaagaaaaaaacaaaaaaaaaaatccctcctttctagctgaacaaaaatgtgcagttaatacttggcgcttgaaaatgcagtagtgaatgtggaaccaagcctgtctgtatatctggtagctcttttcttgctttgttttttcttaccagtattctgcctaacgtttgcttctgtgatggttatattgcctagcaagcacacccgtggttgtgaaaatagtatagcaaaaaagaaaaatccccggttattgatgtactagatttgtgtatgtcttttaaacagttctagtttcaccttacacagaataatcaggaaaagtgtaaaaattcaaaagtgaaataaaaattttatcagttagttgcctgtgaa

SEQ ID NO: 372244 - DNA, 2379 bp, Homo sapiens
attttcatctttatgttacaaccactgtgtcgaactcccagcaggcttaccaggaagcatttgaaattagtaagaaagaaatgcagcctacacacccaattcgtcttggtctggcactaaatttctcagtcttttactatgagattctaaactctcctgaaaaggcctgtagcctggcaaaaacggcatttgatgaagcaattgctgaattggatacgctgaatgaagagtcttataaagacagcactctgatcatgcagttacttagggacaatctcactctgtggacatcggaaaaccagggagacgaaggagacgctggggagggagagaactaatgtttctcgtgctttgtgatctgttcagtgtcactctgtaccctcaacatatatcccttgtgcgataaaaaaaaaaaaaaaaaaaaaaaagagaatcgtacgtcgactttcgatttttcacagcctcagcctaggaaaaatggttcatgggataaacagctggtatttgtatctaaaactcagattggtcacataaatgccacggcattccgaagttttgattttgattaacattgacaggattactgtgtgtttaattttttaaaaactgaacactgtgattatggggttttgtaatttagcagaactcttactggtagaaaaaatagacctgaattatgtgtaactttttggaaggtttaatctgatatcaaaataatcattgaaatacaattccattgtaaagttgtacagaaagttatagagattatattgtgatgctggaacttggagtgagacacacatcatttggcatttgagttgaatggtaattcacagtaatgctgccgttgttcgggacttaaagacacttgacctgtttgggctgttgccacttaaaagttcatgaccacaaatgtccacagtgtcttcctctgaggaaactcgaatcctgaaatggaaattctttgtggcagataactggcttatgacaccttgaaaagttcaagtgctcatataacacaccacactgaaccccctttcctacagcaatatgttcactatgttaccaatttgcaacttgtgcttcaatagtggaatctactttcattgttaacactgagctaaagaaaaaaagccgtgtgttttatgaatgaccttatctgtttcctggataatacctttaagaataatgtcctgagtcaggcgtggtggtgcgtgcatctagtcccaactatttgggaggctgaggcaggaggatcgcttgagcccaggagtttaaagctgcagtgccctgtggttgcacctgtgaataactgcactccagcctgggcaacatagcgagacctcatctccaaaaaagaaaacaaaaaacaaaaaaaggaatgatgttctgtagagatggcctttcacttgaggagtactcagttttcaggttcttcctagctcggggcttttaaattttgaaatctaaacattctttcccaccatcctttttgactgttgaccttggttttctcttctaagtttctgtccctctgcttccttactttttttcctttttgaattctatctttatctgtcttttgttcactttttaatgctatatatgggcaggggtgagagacattactgagcaccttggtgagcaagcctggctttaaagattggagaagagcttctggcaccagaaccctgtcttcctccagttctcaacacggtgttgctcttcagtcataccggaatctgaatcaaatgctttttgtgcctgtcaccaggtctcccaagtgcactcatccaggtcagtgctcagatgtgtttaaggagaccctatattcagggaagttgcgtgaacactgcagtggggagaattgagaatagtcaggcctatcagtctcacagaatcacccctctacctttgatattccacttagctgtagagtccatctgtttgtccatctgctgaaatgagaaaagaaaaatttatgcactgatttaaaacaaaccaaaaaaaaagaaaaaaacaaaaaaaaaaatccctcctttctagctgaacaaaaatgtgcagttaatacttggcgcttgaaaatgcagtagtgaatgtggaaccaagcctgtctgtatatctggtagctcttttcttgctttgttttttcttaccagtattctgcctaacgtttgcttctgtgatggttatattgcctagcaagcacacccgtggttgtgaaaatagtatagcaaaaaagaaaaatccccggttattgatgtactagatttgtgtatgtcttttaaacagttctagtttcaccttacacagaataatcaggaaaagtgtaaaaattcaaaagtgaaataaaaattttatcagttagttgcctgtgaa

SEQ ID NO: 372245 - DNA, 869 bp, Homo sapiens
ttttccacagggtagggggatagacagactcagtgagagaggaactggaccccatgtcaattattgagacagattggtgagcaagcctggctttaaagattggagaagagcttctggcaccagaaccctgtcttcctccagttctcaacacggtgttgctcttcagtcataccggaatctgaatcaaaaaagtatttttaaatatccatgatttctccctgtattgaggctagccctgatcatgctttttgtgcctgtcaccaggtctcccaagtgcactcatccaggtcagtgctcagatgtgtttaaggagaccctatattcagggaagttgcgtgaacactgcagtggggagaattgagaatagtcaggcctatcagtctcacagaatcacccctctacctttgatattccacttagctgtagagtccatctgtttgtccatctgctgaaatgagaaaagaaaaatttatgcactgatttaaaacaaaccaaaaaaaaagaaaaaaacaaaaaaaaaaatccctcctttctagctgaacaaaaatgtgcagttaatacttggcgcttgaaaatgcagtagtgaatgtggaaccaagcctgtctgtatatctggtagctcttttcttgctttgttttttcttaccagtattctgcctaacgtttgcttctgtgatggttatattgcctagcaagcacacccgtggttgtgaaaatagtatagcaaaaaagaaaaatccccggttattgatgtactagatttgtgtatgtcttttaaacagttctagtttcaccttacacagaataatcaggaaaagtgtaaaaattcaaaagtgaaataaaaattttatcagttagttgcctgtgaa

SEQ ID NO: 372246 - DNA, 1463 bp, Homo sapiens
  misc_feature (1324)..(1324): n is a, c, g, or t
  misc_feature (1329)..(1329): n is a, c, g, or t
  misc_feature (1342)..(1345): n is a, c, g, or t
  misc_feature (1350)..(1350): n is a, c, g, or t
  misc_feature (1362)..(1362): n is a, c, g, or t
  misc_feature (1370)..(1370): n is a, c, g, or t
  misc_feature (1375)..(1375): n is a, c, g, or t
  misc_feature (1378)..(1378): n is a, c, g, or t
  misc_feature (1385)..(1385): n is a, c, g, or t
attttcatctttatgttacaaccactgtgtcgaactcccagcaggcttaccaggaagcatttgaaattagtaagaaagaaatgcagcctacacacccaattcgtcttggtctggcactaaatttctcagtcttttactatgagattctaaactctcctgaaaaggcctgtagcctggcaaaaacggcatttgatgaagcaattgctgaattggatacgctgaatgaagagtcttataaagacagcactctgatcatgcagttacttagggacaatctcactctgtggacatcggaaaaccagggagacgaaggagacgctggggagggagagaactaatgtttctcgtgctttgtgatctgttcagtgtcactctgtaccctcaacatatatcccttgtgcgataaaaaaaaaaaaaaaaaaaaaaaagagaatcgtacgtcgactttcgatttttcacagcctcagcctaggaaaaatggttcatgggataaacagctggtatttgtatctaaaactcagattggtcacataaatgccacggcattccgaagttttgattttgattaacattgacaggattactgtgtgtttaattttttaaaaactgaacactgtgattatggggttttgtaatttagcagaactcttactggtagaaaaaatagacctgaattatgtgtaactttttggaaggtttaatctgatatcaaaataatcattgaaatacaattccattgtaaagttgtacagaaagttatagagattatattgtgatgctggaacttggagtgagacacacatcatttggcatttgagttgaatggtaattcacagtaatgctgccgttgttcgggacttaaagacacttgacctgtttgggctgttgccacttaaaagttcatgaccacaaatgtccacagtgtcttcctctgaggaaactcgaatcctgaaatggaaattctttgtggcagataactggcttatgacaccttgaaaagttcaagtgctcatataacacaccacactgaaccccctttcctacagcaatatgttcactatgttaccaatttgcaacttgtgcttcaatagtggaatctactttcattgttaacactgagctaaagaaaaaaagccgtgtgttttatgaatgaccttatctgtttcctggataatacctttaagaataatgtcctgagtcaggcgtggtggtgcgtgcatctagtcccaactatttgggaggctgaggcaggaggatcgcttgagcccaggagtttaaagctgcagtgccctgtggttgcacctgtgaatactgactccagctnggcanatggggactctcnnnnaaagnaacaaacccaanaggatgtntctgnaanaggcttnctgggagacacaacaagactccaaccgggtaaaatggaaaaattttcccaccttgagagggccggatctacaaggctg

SEQ ID NO: 372247 - DNA, 2155 bp, Homo sapiens
attttcatctttatgttacaaccactgtgtcgaactcccagcaggcttaccaggaagcatttgaaattagtaagaaagaaatgcagcctacacacccaattcgtcttggtctggcactaaatttctcagtcttttactatgagattctaaactctcctgaaaaggcctgtagcctggcaaaaacggcatttgatgaagcaattgctgaattggatacgctgaatgaagagtcttataaagacagcactctgatcatgcagttacttagggacaatctcactctgtggacatcggaaaaccagggagacgaaggagacgctggggagggagagaactaatgtttctcgtgctttgtgatctgttcagtgtcactctgtaccctcaacatatatcccttgtgcgataaaaaaaaaaaaaaaaaaaaaaaagagaatcgtacgtcgactttcgatttttcacagcctcagcctaggaaaaatggttcatgggataaacagctggtatttgtatctaaaactcagattggtcacataaatgccacggcattccgaagttttgattttgattaacattgacaggattactgtgtgtttaattttttaaaaactgaacactgtgattatggggttttgtaatttagcagaactcttactggtagaaaaaatagacctgaattatgtgtaactttttggaaggtttaatctgatatcaaaataatcattgaaatacaattccattgtaaagttgtacagaaagttatagagattatattgtgatgctggaacttggagtgagacacacatcatttggcatttgagttgaatggtaattcacagtaatgctgccgttgttcgggacttaaagacacttgacctgtttgggctgttgccacttaaaagttcatgaccacaaatgtccacagtgtcttcctctgaggaaactcgaatcctgaaatggaaattctttgtggcagataactggcttatgacaccttgaaaagttcaagtgctcatataacacaccacactgaaccccctttcctacagcaatatgttcactatgttaccaatttgcaacttgtgcttcaatagtggaatctactttcattgttaacactgagctaaagaaaaaaagccgtgtgttttatgaatgaccttatctgtttcctggataatacctttaagaataatgtcctgagtcaggcgtggtggtgcgtgcatctaatcccagcactttgggaggcccaggtgggtggatcacctgaggtcaggagtccaggaccagcctagccaacatggtgaaactccatctctactaaaaatacaaaacaggccaggcatggtggctcacgcctgtaatcccagcactttgggaggctgaggcaggcagatcacttgaggtcaggagtttgagaccagcctggccaacatggtgaaaccctctctctactgaaaatacaaaaattagccaggtgtggtggcacacgcctgtagtcccatctacccaggaggctaaggcaggagaattgcttgaacccgggaggctgaggttgcagttagccgagatcgtgccactccactccagcctgggcaacaagagcgagacctcatctccaaaaagaaaacaaaaaacaaaaaaaggaatgatgttctgtagagatggcctttcacttgaggagtactcagttttcaggttcttcctagctcggggcttttaaattttgaaatctaaacattctttcccaccatcctttttgacttgtctaatatttcattaccaccttcccataagttaattttctgttcccacctgaccagtgtaaatccacgaaatccaattttccatttaaaatgccctgactaccagattgctccccgaaagctccaggacatatgcttccagtgaattctcccagcatccctttatgtaccattagaaaaatgttggtttttttttaaaaaaaaaaaccttttttttttaaaggaattaattctacattaaaacctggcatgagacctgaagcattctattttccccccaaaacgcgggtgtgtttttatggcatgaaatcacatgtggtcaacactttgttatgacaaacttcatgcatatgcacactcctatacctgcctctatctcaccttccgggaccctc

SEQ ID NO: 372248 - DNA, 709 bp, Homo sapiens
cggacgcgtgggtcgacccacgcgtcgaaaagtatttttaaatatccatgatttctccctgtattgaggctagccctgatcatgctttttgtgcctgtcaccaggtctcccaagtgcactcatccaggtcagtgctcagatgtgtttaaggagaccctatattcagggaagttgcgtgaacactgcagtggggagaattgagaatagtcaggcctatcagtctcacagaatcacccctctacctttgatattccacttagctgtagagtccatctgtttgtccatctgctgaaatgagaaaagaaaaatttatgcactgatttaaaacaaaccaaaaaaaaagaaaaaaacaaaaaaaaaaatccctcctttctagctgaacaaaaatgtgcagttaatacttggcgcttgaaaatgcagtagtgaatgtggaaccaagcctgtctgtatatctggtagctcttttcttgctttgttttttcttaccagtattctgcctaacgtttgcttctgtgatggttatattgcctagcaagcacacccgtggttgtgaaaatagtatagcaaaaaagaaaaatccccggttattgatgtactagatttgtgtatgtcttttaaacagttctagtttcaccttacacagaataatcaggaaaagtgtaaaaattcaaaagtgaaataaaaattttatcagttagttgcctgtgaa

SEQ ID NO: 372249 - DNA, 779 bp, Homo sapiens
  misc_feature (13)..(13): n is a, c, g, or t
  misc_feature (40)..(40): n is a, c, g, or t
  misc_feature (63)..(63): n is a, c, g, or t
atactttttgatncagattccggtatgactgaagagcaanaccatgttgagaactggaggaanacagggttctggtgccagaagctcttctccaatcaaaagtatttttaaatatccatgatttctccctgtattgaggctagccctgatcatgctttttgtgcctgtcaccaggtctcccaagtgcactcatccaggtcagtgctcagatgtgtttaaggagaccctatattcagggaagttgcgtgaacactgcagtggggagaattgagaatagtcaggcctatcagtctcacagaatcacccctctacctttgatattccacttagctgtagagtccatctgtttgtccatctgctgaaatgagaaaagaaaaatttatgcactgatttaaaacaaaccaaaaaaaaagaaaaaaacaaaaaaaaaaatccctcctttctagctgaacaaaaatgtgcagttaatacttggcgcttgaaaatgcagtagtgaatgtggaaccaagcctgtctgtatatctggtagctcttttcttgctttgttttttcttaccagtattctgcctaacgtttgcttctgtgatggttatattgcctagcaagcacacccgtggttgtgaaaatagtatagcaaaaaagaaaaatccccggttattgatgtactagatttgtgtatgtcttttaaacagttctagtttcaccttacacagaataatcaggaaaagtgtaaaaattcaaaagtgaaataaaaattttatcagttagttgcctgtgaa

SEQ ID NO: 372250 - DNA, 684 bp, Homo sapiens
gcggccgcctactactactactgctcgaattcaagcttctaacgatgtacggggacatgctttttgtgcctgtcaccaggtctcccaagtgcactcatccaggtcagtgctcagatgtgtttaaggagaccctatattcagggaagttgcgtgaacactgcagtggggagaattgagaatagtcaggcctatcagtctcacagaatcacccctctacctttgatattccacttagctgtagagtccatctgtttgtccatctgctgaaatgagaaaagaaaaatttatgcactgatttaaaacaaaccaaaaaaaaagaaaaaaacaaaaaaaaaaatccctcctttctagctgaacaaaaatgtgcagttaatacttggcgcttgaaaatgcagtagtgaatgtggaaccaagcctgtctgtatatctggtagctcttttcttgctttgttttttcttaccagtattctgcctaacgtttgcttctgtgatggttatattgcctagcaagcacacccgtggttgtgaaaatagtatagcaaaaaagaaaaatccccggttattgatgtactagatttgtgtatgtcttttaaacagttctagtttcaccttacacagaataatcaggaaaagtgtaaaaattcaaaagtgaaataaaaattttatcagttagttgcctgtgaa

SEQ ID NO: 372251 - DNA, 1716 bp, Homo sapiens
  misc_feature (1566)..(1566): n is a, c, g, or t
  misc_feature (1600)..(1600): n is a, c, g, or t
attttcatctttatgttacaaccactgtgtcgaactcccagcaggcttaccaggaagcatttgaaattagtaagaaagaaatgcagcctacacacccaattcgtcttggtctggcactaaatttctcagtcttttactatgagattctaaactctcctgaaaaggcctgtagcctggcaaaaacggcatttgatgaagcaattgctgaattggatacgctgaatgaagagtcttataaagacagcactctgatcatgcagttacttagggacaatctcactctgtggacatcggaaaaccagggagacgaaggagacgctggggagggagagaactaatgtttctcgtgctttgtgatctgttcagtgtcactctgtaccctcaacatatatcccttgtgcgataaaaaaaaaaaaaaaaaaaaaaaagagaatcgtacgtcgactttcgatttttcacagcctcagcctaggaaaaatggttcatgggataaacagctggtatttgtatctaaaactcagattggtcacataaatgccacggcattccgaagttttgattttgattaacattgacaggattactgtgtgtttaattttttaaaaactgaacactgtgattatggggttttgtaatttagcagaactcttactggtagaaaaaatagacctgaattatgtgtaactttttggaaggtttaatctgatatcaaaataatcattgaaatacaattccattgtaaagttgtacagaaagttatagagattatattgtgatgctggaacttggagtgagacacacatcatttggcatttgagttgaatggtaattcacagtaatgctgccgttgttcgggacttaaagacacttgacctgtttgggctgttgccacttaaaagttcatgcttcctctgaggaaactcgaatcctgaaatggaaattctttgtggcagataactggcttatgacaccttgaaaagttcaagtgctcatataacacaccacactgaaccccctttcctacagcaatatgttcactatgttaccaatttgcaacttgtgcttcaatagtggaatctactttcattgttaacactgagctaaagaaaaaaagccgtgtgttttatgaatgaccttatctgtttcctggataatacctttaagaataatgtcctgagtcaggcgtggtggtgcgtgcatctagtcccaactatttgggaggctgaggcaggaggatcgcttgagcccaggagtttaaagctgcagtgccctgtggttgcacctgtgaataactgcactccagcctgggcaacatagcgagacctcatctccaaaaaagaaaacaaaaaacaaaaaaaggaatgatgttctgtagagatggcctttcacttgaggagtactcagttttcaggttcttcctagctcggggcttttaaattttgaaatctaaacattctttcccaccatcctttttgactgttgacctgggttatctcttctaagtaaggttcgttaccttctcttatttctttctcgccgcgttctctttttgtttgcgcgcggcgntttgctctaggggggggtattgccgacgcacggngacacgctggctatggaggaatcgccgcgcgacgcccccccgtgcacgggggccgccccgcactcgaggcatagatctcgacccgggagggttctatcgcgcgctgcgccgccggg

SEQ ID NO: 372252 - DNA, 412 bp, Homo sapiens
cttttttttttttggtttgttttaaatcagtgcataaaaaaaaaagaaaaaaacaaaaaaaaaaatccctcctttctagctgaacaaaaatgtgcagttaatacttggcgcttgaaaatgcagtagtgaatgtggaaccaagcctgtctgtatatctggtagctcttttcttgctttgttttttcttaccagtattctgcctaacgtttgcttctgtgatggttatattgcctagcaagcacacccgtggttgtgaaaatagtatagcaaaaaagaaaaatccccggttattgatgtactagatttgtgtatgtcttttaaacagttctagtttcaccttacacagaataatcaggaaaagtgtaaaaattcaaaagtgaaataaaaattttatcagttagttgcctgtgaa

SEQ ID NO: 372253 - DNA, 1033 bp, Homo sapiens
attttcatctttatgttacaaccactgtgtcgaactcccagcaggcttaccaggaagcatttgaaattagtaagaaagaaatgcagcctacacacccaattcgtcttggtctggcactaaatttctcagtcttttactatgagattctaaactctcctgaaaaggcctgtagcctggcaaaaacggcatttgatgaagcaattgctgaattggatacgctgaatgaagagtcttataaagacagcactctgatcatgcagttacttagggacaatctcactctgtggacatcggaaaaccagggagacgaaggagacgctggggagggagagaactaatgtttctcgtgctttgtgatctgttcagtgtcactctgtaccctcaacatatatcccttgtgcgataaaaaaaaaaaaaaaaaaaaaaaagagaaaatccgtcctttggattttacaacccccaccctaggaaaaggggtccggggaaaccccgggggttttttgggctttcttaaaacccgaattgggccacattaaatgcccagggcaattcccgaagatattggaattaggaacatacccattcgaacggcaatacacgggggtgtgttcaaattttctctaaaacactgtgcacccgcgtgtgaattagcggggattggtgctaatttacagccagacaacctctttcctgtggctcgaaaaaacatcagaccctgtgaaaattatgttgtcacctttcttgggaagaggttcacctctgattcttccaccaagtcataccttcggcgagctaacggttcccagttgggaacggttgggcccagcgcgggttcatcggagcattctcctggggaatcgcgggccctgggcgttgtttagcaccaccactgttcgtttggggacttgcgggctcggactggggcaccccccgcagtattgttgccgttggtcccgaggctaaaaggacccttgagctggtaggggtggtcgcccttacagtccgtgcccaaactgtccacgggttcctctgg

SEQ ID NO: 372254 - DNA, 413 bp, Homo sapiens
tttcttaccagtattctgcctaacgtttgcttctgtgatggttatattgcctagcaagcacacccgtggttgtgaaaatagtatagcaaaaaagaaaaatccccggttattgatgtactagatttgtgtatgtcttttaaacagttctagtttcaccttacacagaataatcaggaaaagtgtaaaaattcaaaagtgaaataaaaattttatcagttagttgcctgtgaattgatgtgtcaccaccatctctgttgttaccagacctagctaactattctgatcacacttatttttaactctgttttctttaaaaataggcaaacagttttatttcattatttaggaccagaagtcaaggtgttatccaggggaagaaattaccattaattaaacagcctctttacacccgt

SEQ ID NO: 372255 - DNA, 305 bp, Homo sapiens
ccggaatctgaatcaaaaaagtatttttaaatatccatgatttctccctgtattgaggctagccctgatcatgctttttgtgcctgtcaccaggtctcccaagtgcactcatccaggtcagtgctcagatgtgtttaaggagaccctatattcagggaagttgcgtgaacactgcagtggggagaattgagaatagtcaggcctatcagtctcacagaatcacccctctacctttgatattccacttagctgtagagtccatctgtttgtccatctgctgaaatgagaaaagaaaaatttatgca

SEQ ID NO: 372256 - DNA, 838 bp, Homo sapiens
  misc_feature (447)..(447): n is a, c, g, or t
  misc_feature (456)..(456): n is a, c, g, or t
attttcatctttatgttacaaccactgtgtcgaactcccagcaggcttaccaggaagcatttgaaattagtaagaaagaaatgcagcctacacacccaattcgtcttggtctggcactaaatttctcagtcttttactatgagattctaaactctcctgaaaaggcctgtagcctggcaaaaacggcatttgatgaagcaattgctgaattggatacgctgaatgaagagtcttataaagacagcactctgatcatgcagttacttagggacaatctcactctgtggacatcggaaaaccagggagacgaaggagacgctggggagggagagaactaatgtttctcgtgctttgtgatctgttcagtgtcactctgtaccctcaacatatatcccttgtgcgataaaaaaaaaaaaaaacaaaaaaaaaaaaaaaaaaaaaaaaaanaaaaaaaanaaaaaaaaaaaaaaaaaaaaaaaggggggggccaaaacccgggggggaaaaacattttttataaaaagggggggtgctcaaatgaagggtagatgaatttatataagataagagaagcgggcgggggaatttttaacacaacaaagaatggcagagaggaggagaaaacccgagccaacgacaagccaaaatcgagaaggcaacaaacaccaacaccaggggggggaagagaccaaaataagacaacacaaccaaccaaaagaaaagtaaaaaacccacgagaggaaacaaaaaacagaaggagaggtagtaggctaacccacacgaagatggctgcgggaaaaagagcgcaccgaggaatgtaaaaatagaccccgacggg

SEQ ID NO: 372257 - DNA, 2468 bp, Homo sapiens
attttcatctttatgttacaaccactgtgtcgaactcccagcaggcttaccaggaagcatttgaaattagtaagaaagaaatgcagcctacacacccaattcgtcttggtctggcactaaatttctcagtcttttactatgagattctaaactctcctgaaaaggcctgtagcctggcaaaaacggcatttgatgaagcaattgctgaattggatacgctgaatgaagagtcttataaagacagcaactctgatcatgcaagttacttagggacaatctcactctgatcatgcagttacttagggacaatctcactctgtggacatcggaaaaccagggagacgaaggagacgctggggagggagagaactaatgtttctcgtgctttgtgatctgttcagtgtcactctgtaccctcaacatatatcccttgtgcgataaaaaaaaaaaaaaaaaaaaaaaagagaatcgtacgtcgactttcgatttttcacagcctcagcctaggaaaaatggttcatgggataaacagctggtatttgtatctaaaactcagattggtcacataaatgccacggcattccgaagttttgattttgattaacattgacaggattactgtgtgtttaattttttaaaaactgaacactgtgattatggggttttgtaatttagcagaactcttactggtagaaaaaatagacctgaattatgtgtaactttttggaaggtttaatctgatatcaaaataatcattgaaatacaattccattgtaaagttgtacagaaagttatagagattatattgtgatgctggaacttggagtgagacacacatcatttggcatttgagttgaatggtaattcacagtaatgctgccgttgttcgggacttaaagacacttgacctgtttgggctgttgccacttaaaagttcatgaccacaaatgtccacagtgtcttcctctgaggaaactcgaatcctgaaatggaaattctttgtggcagataactggcttatgacaccttgaaaagttcaagtgctcatataacacaccacactgaaccccctttcctacagcaatatgttcactatgttaccaatttgcaacttgtgcttcaatagtggaatctactttcattgttaacactgagctaaagaaaaaaagccgtgtgttttatgaatgaccttatctgtttcctggataatacctttaagaataatgtcctgagtcaggcgtggtggtgcgtgcatctagtcccaactatttgggaggctgaggcaggaggatcgcttgagcccaggagtttaaagctgcagtgccctgtggttgcacctgtgaataactgcactccagcctgggcaacatagcgagacctcatctccaaaaaagaaaacaaaaaacaaaaaaaggaatgatgttctgtagagatggcctttcacttgaggagtactcagttttcaggttcttcctagctcggggcttttaaattttgaaatctaaacattctttcccaccatcctttttgactgttgaccttggttttctcttctaagtttctgtccctctgcttccttactttttttcctttttgaattctatctttatctgtcttttgttcactttttaatgctatatatgggcaggggtgagagacattactgagcaccttggtgagcaagcctggctttaaagattggagaagagcttctggcaccagaaccctgtcttcctccagttctcaacacggtgttgctcttcagtcataccggaatctgaatcaaaaaagtatttttaaatatccatgatttctccctgtattgaggctagccctgatcatgctttttgtgcctgtcaccaggtctcccaagtgcactcatccaggtcagtgctcagatgtgtttaaggagaccctatattcagggaagttgcgtgaacactgcagtggggagaattgagaatagtcaggcctatcagtctcacagaatcacccctctacctttgatattccacttagctgtagagtccatctgtttgtccatctgctgaaatgagaaaagaaaaatttatgcactgatttaaaacaaaccaaaaaaaaagaaaaaaacaaaaaaaaaaatccctcctttctagctgaacaaaaatgtgcagttaatacttggcgcttgaaaatgcagtagtgaatgtggaaccaagcctgtctgtatatctggtagctcttttcttgctttgttttttcttaccagtattctgcctaacgtttgcttctgtgatggttatattgcctagcaagcacacccgtggttgtgaaaatagtatagcaaaaaagaaaaatccccggttattgatgtactagatttgtgtatgtcttttaaacagttctagtttcaccttacacagaataatcaggaaaagtgtaaaaattcaaaagtgaaataaaaattttatcagttagttgcctgtgaa

SEQ ID NO: 372258 - DNA, 2793 bp, Homo sapiens
  misc_feature (2793)..(2793): n is a, c, g, or t
attttcatctttatgttacaaccactgtgtcgaactcccagcaggcttaccaggaagcatttgaaattagtaagaaagaaatgcagcctacacacccaattcgtcttggtctggcactaaatttctcagtcttttactatgagattctaaactctcctgaaaaggcctgtagcctggcaaaaacggcatttgatgaagcaattgctgaattggatacgctgaatgaagagtcttataaagacagcactctgatcatgcagttacttagggacaatctcactctgtggacatcggaaaaccagggagacgaaggagacgctggggagggagagaactaatgtttctcgtgctttgtgatctgttcagtgtcactctgtaccctcaacatatatcccttgtgcgataaaaaaaaaaaaaaaaaaaaaaaagagaatcgtacgtcgactttcgatttttcacagcctcagcctaggaaaaatggttcatgggataaacagctggtatttgtatctaaaactcagattggtcacataaatgccacggcattccgaagttttgattttgattaacattgacaggattactgtgtgtttaattttttaaaaactgaacactgtgattatggggttttgtaatttagcagaactcttactggtagaaaaaatagacctgaattatgtgtaactttttggaaggtttaatctgatatcaaaataatcattgaaatacaattccattgtaaagttgtacagaaagttatagagattatattgtgatgctggaacttggagtgagacacacatcatttggcatttgagttgaatggtaattcacagtaatgctgccgttgttcgggacttaaagacacttgacctgtttgggctgttgccacttaaaagttcatgaccacaaatgtccacagtgtcttcctctgaggaaactcgaatcctgaaatggaaattctttgtggcagataactggcttatgacaccttgaaaagttcaagtgctcatataacacaccacactgaaccccctttcctacagcaatatgttcactatgttaccaatttgcaacttgtgcttcaatagtggaatctactttcattgttaacactgagctaaagaaaaaaagccgtgtgttttatgaatgaccttatctgtttcctggataatacctttaagaataatgtcctgagtcaggcgtggtggtgcgtgcatctagtcccaactatttgggaggctgaggcaggaggatcgcttgagcccaggagtttaaagctgcagtgccctgtggttgcacctgtgaataactgcactccagcctgggcaacatagcgagacctcatctccaaaaaagaaaacaaaaaacaaaaaaaggaatgatgttctgtagagatggcctttcacttgaggagtactcagttttcaggttcttcctagctcggggcttttaaattttgaaatctaaacattctttcccaccatcctttttgactgttgaccttggttttctcttctaagtttctgtccctctgcttccttactttttttcctttttgaattctatctttatctgtcttttgttcactttttaatgctatatatgggcaggggtgagagacattactgagcaccttggtgagcaagcctggctttaaagattggagaagagcttctggcaccagaaccctgtcttcctccagttctcaacacggtgttgctcttcagtcataccggaatctgaatcaaaaaagtatttttaaatatccatgatttctccctgtattgaggctagccctgatcatgctttttgtgcctgtcaccaggtctcccaagtgcactcatccaggtcagtgctcagatgtgtttaaggagaccctatattcagggaagttgcgtgaacactgcagtggggagaattgagaatagtcaggcctatcagtctcacagaatcacccctctacctttgatattccacttagctgtagagtccatctgtttgtccatctgctgaaatgagaaaagaaaaatttatgcactgatttaaaacaaaccaaaaaaaaagaaaaaaacaaaaaaaaaaatccctcctttctagctgaacaaaaatgtgcagttaatacttggcgcttgaaaatgcagtagtgaatgtggaaccaagcctgtctgtatatctggtagctcttttcttgctttgttttttcttaccagtattctgcctaacgtttgcttctgtgatggttatattgcctagcaagcacacccgtggttgtgaaaatagtatagcaaaaaagaaaaatccccggttattgatgtactagatttgtgtatgtcttttaaacagttctagtttcaccttacacagaataatcaggaaaagtgtaaaaattcaaaagtgaaataaaaattttatcagttagttgcctgtgaaaaaaaaaaaaaacaaaaaaaaaaaaaaaaaaaaaaaaacatccaattctcaaactgaagctcgcactctcgcctccagcatgaaaggtctctgcgcccttctgtgcctgctgctcatagcagccaccttcattccccaagggctcgctcagccagatgcaatcaatgccccagcaacttgctttataacttaaccaataggaagatctcattgcaaaggctctcgaagcttagaggaatcaccagcagcaagtggccaaagaacctgtaacttaaagaacaattgtggcaaggagactgggctgaccccaagcagagttgggtcaggaattcatggccaactgacaaggcaacccaatcn

SEQ ID NO: 372259 - DNA, 2522 bp, Homo sapiens
  misc_feature (2476)..(2476): n is a, c, g, or t
  misc_feature (2486)..(2486): n is a, c, g, or t
  misc_feature (2489)..(2489): n is a, c, g, or t
  misc_feature (2516)..(2516): n is a, c, g, or t
attttcatctttatgttacaaccactgtgtcgaactcccagcaggcttaccaggaagcatttgaaattagtaagaaagaaatgcagcctacacacccaattcgtcttggtctggcactaaatttctcagtcttttactatgagattctaaactctcctgaaaaggcctgtagcctggcaaaaacggcatttgatgaagcaattgctgaattggatacgctgaatgaagagtcttataaagacagcactctgatcatgcagttacttagggacaatctcactctgtggacatcggaaaaccagggagacgaaggagacgctggggagggagagaactaatgtttctcgtgctttgtgatctgttcagtgtcactctgtaccctcaacatatatcccttgtgcgataaaaaaaaaaaaaaaaaaaaaaaagagaatcgtacgtcgactttcgatttttcacagcctcagcctaggaaaaatggttcatgggataaacagctggtatttgtatctaaaactcagattggtcacataaatgccacggcattccgaagttttgattttgattaacattgacaggattactgtgtgtttaattttttaaaaactgaacactgtgattatggggttttgtaatttagcagaactcttactggtagaaaaaatagacctgaattatgtgtaactttttggaaggtttaatctgatatcaaaataatcattgaaatacaattccattgtaaagttgtacagaaagttatagagattatattgtgatgctggaacttggagtgagacacacatcatttggcatttgagttgaatggtaattcacagtaatgctgccgttgttcgggacttaaagacacttgacctgtttgggctgttgccacttaaaagttcatgaccacaaatgtccacagtgtcttcctctgaggaaactcgaatcctgaaatggaaattctttgtggcagataactggcttatgacaccttgaaaagttcaagtgctcatataacacaccacactgaaccccctttcctacagcaatatgttcactatgttaccaatttgcaacttgtgcttcaatagtggaatctactttcattgttaacactgagctaaagaaaaaaagccgtgtgttttatgaatgaccttatctgtttcctggataatacctttaagaataatgtcctgagtcaggcgtggtggtgcgtgcatctagtcccaactatttgggaggctgaggcaggaggatcgcttgagcccaggagtttaaagctgcagtgccctgtggttgcacctgtgaataactgcactccagcctgggcaacatagcgagacctcatctccaaaaaagaaaacaaaaaacaaaaaaaggaatgatgttctgtagagatggcctttcacttgaggagtactcagttttcaggttcttcctagctcggggcttttaaattttgaaatctaaacattctttcccaccatcctttttgactgttgaccttggttttctcttctaagtttctgtccctctgcttccttactttttttcctttttgaattctatctttatctgtcttttgttcactttttaatgctatatatgggcaggggtgagagacattactgagcaccttggtgagcaagcctggctttaaagattggagaagagcttctggcaccagaaccctgtcttcctccagttctcaacacggtgttgctcttcagtcataccggaatctgaatcaaaaaagtatttttaaatatccatgatttctccctgtattgaggctagccctgatcatgctttttgtgcctgtcaccaggtctcccaagtgcactcatccaggtcagtgctcagatgtgtttaaggagaccctatattcagggaagttgcgtgaacactgcagtggggagaattgagaatagtcaggcctatcagtctcacagaatcacccctctacctttgatattccacttagctgtagagtccatctgtttgtccatctgctgaaatgagaaaagaaaaatttatgcactgatttaaaacaaaccaaaaaaaaagaaaaaaacaaaaaaaaaaatccctcctttctagctgaacaaaaatgtgcagttaatacttggcgcttgaaaatgcagtagtgaatgtggaaccaagcctgtctgtatatctggtagctcttttcttgctttgttttttcttaccagtattctgcctaacgtttgcttctgtgatggttatattgcctagcaagcacacccgtggttgtgaaaatagtatagcaaaaaagaaaaatccccggttattgatgtactagatttgtgtatgtcttttaaacagttctagtttcaccttacacagaataatcaggaaaagtgtaaaaattcaaaagtgaaataaaaattttatcagttagttgcctgtgaaaaaaaaaaaaaacaaaaaaaaaaaaaaaaaaaaaaaaaaaaanaaaaaaaaanaanaaaaaagagaaaaacaaaaaaaaaaanaaacaa

SEQ ID NO: 372260 - DNA, 2141 bp, Homo sapiens
attttcatctttatgttacaaccactgtgtcgaactcccagcaggcttaccaggaagcatttgaaattagtaagaaagaaatgcagcctacacacccaattcgtcttggtctggcactaaatttctcagtcttttactatgagattctaaactctcctgaaaaggcctgtagcctggcaaaaacggcatttgatgaagcaattgctgaattggatacgctgaatgaagagtcttataaagacagcactctgatcatgcagttacttagggacaatctcactctgtggacatcggaaaaccagggagacgaaggagacgctggggagggagagaactaatgtttctcgtgctttgtgatctgttcagtgtcactctgtaccctcaacatatatcccttgtgcgataaaaaaaaaaaaaaaaaaaaaaaagagaatcgtacgtcgactttcgatttttcacagcctcagcctaggaaaaatggttcatgggataaacagctggtatttgtatctaaaactcagattggtcacataaatgccacggcattccgaagttttgattttgattaacattgacaggattactgtgtgtttaattttttaaaaactgaacactgtgattatggggttttgtaatttagcagaactcttactggtagaaaaaatagacctgaattatgtgtaactttttggaaggtttaatctgatatcaaaataatcattgaaatacaattccattgtaaagttgtacagaaagttatagagattatattgtgatgctggaacttggagtgagacacacatcatttggcatttgagttgaatggtaattcacagtaatgctgccgttgttcgggacttaaagacacttgacctgtttgggctgttgccacttaaaagttcatgaccacaaatgtccacagtgtcttcctctgaggaaactcgaatcctgaaatggaaattctttgtggcagataactggcttatgacaccttgaaaagttcaagtgctcatataacacaccacactgaaccccctttcctacagcaatatgttcactatgttaccaatttgcaacttgtgcttcaatagtggaatctactttcattgttaacactgagctaaagaaaaaaagccgtgtgttttatgaatgaccttatctgtttcctggataatacctttaagaataatgtcctgagtcaggcgtggtggtgcgtgcatctagtcccaactatttgggaggctgaggcaggaggatcgcttgagcccaggagtttaaagctgcagtgccctgtggttgcacctgtgaataactgcactccagcctgggcaacatagcgagacctcatctccaaaaaagaaaacaaaaaacaaaaaaaggaatgatgttctgtagagatggcctttcacttgaggagtactcagttttcaggttcttcctagctcggggcttttaaattttgaaatctaaacattctttcccaccatcctttttgactgttgaccttggttttctcttctaagtttctgtccctctgcttccttactttttttcctttttgaattctatctttatctgtcttttgttcactttttaatgctatatatgggcaggggtgagagacattactgagcaccttggtgagcaagcctggctttaaagattggagaagagcttctggcaccagaaccctgtcttcctccagttctcaacacggtgttgctcttcagtcataccggaatctgaatcaaaaaagtatttttaaatatccatgatttctccctgtattgaggctagccctgatcatgctttttgtgcctgtcaccaggtctcccaagtgcactcatccaggtcagtgctcagatgtgtttaaggagaccctatattcagggaagttgcgtgaacactgcagtggggagaattgagaatagtcaggcctatcagtctcacagaatcacccctctacctttgatattccacttagctgtagagtccatctgtttgtccatctgctgaaatgagaaaagaaaaatttatgcactgatttaaaacaaaccaaaaaaaaagaaaaaaacctcagggggggcccgggtccccaatcgccctataggaagtcgtttacaattaattggccgccgttt

SEQ ID NO: 372261 - DNA, 2379 bp, Homo sapiens
attttcatctttatgttacaaccactgtgtcgaactcccagcaggcttaccaggaagcatttgaaattagtaagaaagaaatgcagcctacacacccaattcgtcttggtctggcactaaatttctcagtcttttactatgagattctaaactctcctgaaaaggcctgtagcctggcaaaaacggcatttgatgaagcaattgctgaattggatacgctgaatgaagagtcttataaagacagcactctgatcatgcagttacttagggacaatctcactctgtggacatcggaaaaccagggagacgaaggagacgctggggagggagagaactaatgtttctcgtgctttgtgatctgttcagtgtcactctgtaccctcaacatatatcccttgtgcgataaaaaaaaaaaaaaaaaaaaaaaagagaatcgtacgtcgactttcgatttttcacagcctcagcctaggaaaaatggttcatgggataaacagctggtatttgtatctaaaactcagattggtcacataaatgccacggcattccgaagttttgattttgattaacattgacaggattactgtgtgtttaattttttaaaaactgaacactgtgattatggggttttgtaatttagcagaactcttactggtagaaaaaatagacctgaattatgtgtaactttttggaaggtttaatctgatatcaaaataatcattgaaatacaattccattgtaaagttgtacagaaagttatagagattatattgtgatgctggaacttggagtgagacacacatcatttggcatttgagttgaatggtaattcacagtaatgctgccgttgttcgggacttaaagacacttgacctgtttgggctgttgccacttaaaagttcatgaccacaaatgtccacagtgtcttcctctgaggaaactcgaatcctgaaatggaaattctttgtggcagataactggcttatgacaccttgaaaagttcaagtgctcatataacacaccacactgaaccccctttcctacagcaatatgttcactatgttaccaatttgcaacttgtgcttcaatagtggaatctactttcattgttaacactgagctaaagaaaaaaagccgtgtgttttatgaatgaccttatctgtttcctggataatacctttaagaataatgtcctgagtcaggcgtggtggtgcgtgcatctagtcccaactatttgggaggctgaggcaggaggatcgcttgagcccaggagtttaaagctgcagtgccctgtggttgcacctgtgaataactgcactccagcctgggcaacatagcgagacctcatctccaaaaaagaaaacaaaaaacaaacaggttcttcctagctcggggcttttaaattttgaaatctaaacattctttcccaccatcctttttgactgttgaccttggttttctcttctaagtttctgtccctctgcttccttactttttttcctttttgaattctatctttatctgtcttttgttcactttttaatgctatatatgggcaggggtgagagacattactgagcaccttggtgagcaagcctggctttaaagattggagaagagcttctggcaccagaaccctgtcttcctccagttctcaacacggtgttgctcttcagtcataccggaatctgaatcaaaaaagtatttttaaatatccatgatttctccctgtattgaggctagccctgatcatgctttttgtgcctgtcaccaggtctcccaagtgcactcatccaggtcagtgctcagatgtgtttaaggagaccctatattcagggaagttgcgtgaacactgcagtggggagaattgagaatagtcaggcctatcagtctcacagaatcacccctctacctttgatattccacttagctgtagagtccatctgtttgtccatctgctgaaatgagaaaagaaaaatttatgcactgatttaaaacaaaccaaaaaaaaagaaaaaaacaaaaaaaaaaatccctcctttctagctgaacaaaaatgtgcagttaatacttggcgcttgaaaatgcagtagtgaatgtggaaccaagcctgtctgtatatctggtagctcttttcttgctttgttttttcttaccagtattctgcctaacgtttgcttctgtgatggttatattgcctagcaagcacacccgtggttgtgaaaatagtatagcaaaaaagaaaaatccccggttattgatgtactagatttgtgtatgtcttttaaacagttctagtttcaccttacacagaataatcaggaaaagtgtaaaaattcaaaagtgaaataaaaattttatcagttagttgcctgtgaa

SEQ ID NO: 372262 - DNA, 2090 bp, Homo sapiens
attttcatctttatgttacaaccactgtgtcgaactcccagcaggcttaccaggaagcatttgaaattagtaagaaagaaatgcagcctacacacccaattcgtcttggtctggcactaaatttctcagtcttttactatgagattctaaactctcctgaaaaggcctgtagcctggcaaaaacggcatttgatgaagcaattgctgaattggatacgctgaatgaagagtcttataaagacagcactctgatcatgcagttacttagggacaatctcactctgtggacatcggaaaaccagggagacgaaggagacgctggggagggagagaactaatgtttctcgtgctttgtgatctgttcagtgtcactctgtaccctcaacatatatcccttgtgcgataaaaaaaaaaaaaaaaaaaaaaaagagaatcgtacgtcgactttcgatttttcacagcctcagcctaggaaaaatggttcatgggataaacagctggtatttgtatctaaaactcagattggtcacataaatgccacggcattccgaagttttgattttgattaacattgacaggattactgtgtgtttaattttttaaaaactgaacactgtgattatggggttttgtaatttagcagaactcttactggtagaaaaaatagacctgaattatgtgtaactttttggaaggtttaatctgatatcaaaataatcattgaaatacaattccattgtaaagttgtacagaaagttatagagattatattgtgatgctggaacttggagtgagacacacatcatttggcatttgagttgaatggtaattcacagtaatgctgccgttgttcgggacttaaagacacttgacctgtttgggctgttgccacttaaaagttcatgaccacaaatgtccacagtgtcttcctctgaggaaactcgaatcctgaaatggaaattctttgtggcagataactggcttatgacaccttgaaaagttcaagtgctcatataacacaccacactgaaccccctttcctacagcaatatgttcactatgttaccaatttgcaacttgtgcttcaatagtggaatctactttcattgttaacactgagctaaagaaaaaaagccgtgtgttttatgaatgaccttatctgtttcctggataatacctttaagaataatgtcctgagtcaggcgtggtggtgcgtgcatctagtcccaactatttgggaggctgaggcaggaggatcgcttgagcccaggagtttaaagctgcagtgccctgtggttgcacctgtgaataactgcactccagcctgggcaacatagcgagacctcatctccaaaaaagaaaacaaaaaacaaaaaaaggaatgatgttctgtagagatggcctttcacttgaggagtactcagttttcaggttcttcctagctcggggcttttaaattttgaaatctaaacattctttcccaccatcctttttgactgttgaccttggttttctcttctaagtttctgtccctctgcttccttactttttttcctttttgaattctatctttatctgtcttttgttcactttttaatgctatatatgggcaggggtgagagacattactgagcaccttggtgagcaagcctggctttaaagattggagaagagcttctggcaccagaaccctgtcttcctccagttctcaacacggtgttgctcttcagtcataccggaatctgaatcaaaaaagtatttttaaatatccatgatttctccctgtattgaggctagccctgatcatgctttttgtgcctgtcaccaggtctcccaagtgcactcatccaggtcagtgctcagatgtgtttaaggagaccctatattcagggaagttgcgtgaacactgcagtggggagaattgagaatagtcaggcctatcagtctcacagaatcacccctctacctttgatattccacttagctgtagagtccatctgtttgtccatctgctgaaatgagaaaagaaaattttgcctgtttaaacaaccaaaaaacataatattatgttataataaacccttgtcggc

SEQ ID NO: 372263 - DNA, 1734 bp, Homo sapiens
  misc_feature (1571)..(1571): n is a, c, g, or t
  misc_feature (1577)..(1577): n is a, c, g, or t
  misc_feature (1586)..(1586): n is a, c, g, or t
  misc_feature (1589)..(1589): n is a, c, g, or t
attttcatctttatgttacaaccactgtgtcgaactcccagcaggcttaccaggaagcatttgaaattagtaagaaagaaatgcagcctacacacccaattcgtcttggtctggcactaaatttctcagtcttttactatgagattctaaactctcctgaaaaggcctgtagcctggcaaaaacggcatttgatgaagcaattgctgaattggatacgctgaatgaagagtcttataaagacagcactctgatcatgcagttacttagggacaatctcactctgtggacatcggaaaaccagggagacgaaggagacgctggggagggagagaactaatgtttctcgtgctttgtgatctgttcagtgtcactctgtaccctcaacatatatcccttgtgcgataaaaaaaaaaaaaaaaaaaaaaaagagaatcgtacgtcgactttcgatttttcacagcctcagcctaggaaaaatggttcatgggataaacagctggtatttgtatctaaaactcagattggtcacataaatgccacggcattccgaagttttgattttgattaacattgacaggattactgtgtgtttaattttttaaaaactgaacactgtgattatggggttttgtaatttagcagaactcttactggtagaaaaaatagacctgaattatgtgtaactttttggaaggtttaatctgatatcaaaataatcattgaaatacaattccattgtaaagttgtacagaaagttatagagattatattgtgatgctggaacttggagtgagacacacatcatttggcatttgagttgaatggtaattcacagtaatgctgccgttgttcgggacttaaagacacttgacctgtttgggctgttgccacttaaaagttcatgaccacaaatgtccacagtgtcttcctctgaggaaactcgaatcctgaaatggaaattctttgtggcagataactggcttatgacaccttgaaaagttcaagtgctcatataacacaccacactgaaccccctttcctacagcaatatgttcactatgttaccaatttgcaacttgtgcttcaatagtggaatctactttcattgttaacactgagctaaagaaaaaaagccgtgtgttttatgaatgaccttatctgtttcctggataatacctttaagaataatgtcctgagtcaggcgtggtggtgcgtgcatctagtcccaactatttgggaggctgaggcaggaggatcgcttgagcccaggagtttaaagctgcagtgccctgtggttgcacctgtgaataactgcactccagcctgggcaacatagcgagacctcatctccaaaaaagaaaacaaaaaacaaaaaaaggaatgatgttctgtagagatggcctttcacttgaggagtactcagttttcaggttcttcctagctcggggcttttaaattttgaaatctaaacattctttcccaccatcctttttgactgttgaccttggttttctcttctaagtttctgtccctctgcttcttactttttccttttgaatctatcttatcngcttgnccccttacngcnatatggggggggggagaacttctgaggccttgggggcacccggttaaaatggaaaggtctggcaacccgttctcgctccaaaggggggttagcaccgcgggcaaattatttaggccctggggcgcatgggacgccaccaacaagg

SEQ ID NO: 372264 - DNA, 3453 bp, Homo sapiens
  misc_feature (234)..(234): n is a, c, g, or t
ggaaaagcacttctgctctaccggcattaagaggcattccgtcttggaattccggcattaagaggcattccgtcttcatagcccgtgagacgccagtgtcacctttagcccaaccagtgccctgagggtggcattttcctaccttcctgtaacgacccccgggattgcccagggctacagcctctctcccgtgagcctccagaccgcgccctggccccgccccccaccccgatnggcccggccgggtctgggggcggggcgtttgcggcctttccagggccggggaaccccaggaggaagctgctgagccatgggcgcctacgcgcgggcttcgggggtctgcgctcgcggctgcctggactcagcaggcccctggaccatgtcccgcgccctgcggccaccgctcccgcctctctgctttttccttttgttgctggcggctgccggtgctcgggccgggggatacgagacatgccccacagtgcagccgaacatgctgaacgtgcacctgctgcctcacacacatgatgacgtgggctggctcaaaaccgtggaccagtacttttatggaatcaagaatgacatccagcacgccggtgtgcagtacatcctggactcggtcatctctgccttgctggcagatcccacccgtcgcttcatttacgtggagattgccttcttctcccgttggtggcaccagcagacaaatgccacacaggaagtcgtgcgagaccttgtgcgccaggggcgcctggagttcgccaatggtggctgggtgatgaacgatgaggcagccacccactacggtgccatcgtggaccagatgacacttgggctgcgctttctggaggacacatttggcaatgatgggcgaccccgtgtggcctggcacattgaccccttcggccactctcgggagcaggcctcgctgtttgcgcagatgggcttcgacggcttcttctttgggcgccttgattatcaagataagtgggtacggatgcagaagctggagatggagcaggtgtggcgggccagcaccagcctgaagcccccgaccgcggacctcttcactggtgtgcttcccaatggttacaacccgccaaggaatctgtgctgggatgtgctgtgtgtcgatcagccgctggtggaggaccctcgcagccccgagtacaacgccaaggagctggtcgattacttcctaaatgtggccactgcccagggccggtattaccgcaccaaccacactgtgatgaccatgggctcggacttccaatatgagaatgccaacatgtggttcaagaaccttgacaagctcatccggctggtaaatgcgcagcaggcaaaaggaagcagtgtccatgttctctactccacccccgcttgttacctctgggagctgaacaaggccaacctcacctggtcagtgaaacatgacgacttcttcccttacgcggatggcccccaccagttctggaccggttacttttccagtcggccggccctcaaacgctacgagcgcctcagctacaacttcctgcaggtgtgcaaccagctggaggcgctggtgggcctggcggccaacgtgggaccctatggctccggagacagtgcacccctcaatgaggcgatggctgtgctccagcatcacgacgccgtcagcggcacctcccgccagcacgtggccaacgactacgcgcgccagcttgcggcaggctgggggccttgcgaggttcttctgagcaacgcgctggcgcggctcagaggcttcaaagatcacttcaccttttgccaacagctaaacatcagcatctgcccgctcagccagacggcggcgcgcttccaggtcatcgtttataatcccctggggcggaaggtgaattggatggtacggctgccggtcagcgaaggcgttttcgttgtgaaggaccccaatggcaggacagtgcccagcgatgtggtaatatttcccagctcagacagccaggcgcaccctccggagctgctgttctcagcctcactgcccgccctgggcttcagcacctattcagtagcccaggtgcctcgctggaagccccaggcccgcgcaccacagcccatccccagaagatcctggtcccctgctttaaccatcgaaaatgagcacatccgggcaacgtttgatcctgacacagggctgttgatggagattatgaacatgaatcagcaactcctgctgcctgttcgccagaccttcttctggtacaacgccagtataggtgacaacgaaagtgaccaggcctcaggtgcctacatcttcagacccaaccaacagaaaccgctgcctgtgagccgctgggctcagatccacctggtgaagacacccttggtgcaggaggtgcaccagaacttctcagcttggtgttcccaggtggttcgcctgtacccaggacagcggcacctggagctagagtggtcggtggggccgatacctgtgggcgacacctgggggaaggaggtcatcagccgttttgacacaccgctggagacaaagggacgcttctacacagacagcaatggccgggagatcctggagaggaggcgggattatcgacccacctggaaactgaaccagacggagcccgtggcaggaaactactatccagtcaacacccggatttacatcacggatggaaacatgcagctgactgtgctgactgaccgctcccaggggggcagcagcctgagagatggctcgctggagctcatggtgcaccgaaggctgctgaaggacgatggacgcggagtatcggagccactaatggagaacgggtcgggggcgtgggtgcgagggcgccacctggtgctgctggacacagcccaggctgcagccgccggacaccggctcctggcggagcaggaggtcctggcccctcaggtggtgctggccccgggtggcggcgccgcctacaatctcggggctcctccgcgcacgcagttctcagggctgcgcagggacctgccgccctcggtgcacctgctcacgctggccagctggggccccgaaatggtgctgctgcgcttggagcaccagtttgccgtaggagaggattccggacgtaacctgagcgcccccgttaccttgaacttgagggacctgttctccaccttcaccatcacccgcctgcaggagaccacgctggtggccaaccagctccgcgaggcagcctccaggctcaagtggacaacaaacacaggccccacaccccaccaaactccgtaccagctggacccggccaacatcacgctggaacccatggaaatccgcactttcctggcctcagttcaatggaaggaggtggatggttaggtctgctgggatgggccctccaagcccaagcctcctgctccgggggcagaccagactctgactctcctcttggggctgctgccattaaaacgctactactaagactc

SEQ ID NO: 372265 - DNA, 1893 bp, Homo sapiens
cagactttcagcccctttaattaggtgctctgagaagaggtcagaatggcaggcagggggtggggaaggcggtgcttcttgagccccacttagcaactggtcactcatcctctggcagctggatcttgctggggtcgaagcagttggattccatgatgggaaggccattggcctctcggtatttcacaagcctctcagcttcgcggcgggaccactctttcatcccatcccacgctcttggacaccctgtgcacctgtagtcaggcagataggccacaaaggtgctgccaaggaccaggatgatggagacgccaaagaagaagacaagtcgcatgttccagacgtccaaaacggggtccttgtcataaccatgggagtctgggttcttctcatacaagttttcgtcctcgggttctgggtcctcttgccacggtgtggtcggttctgggggccgctttcccgccacagcggacggggcgaccacagtcctggagaagctagattcccagcggacgcgggcggccgggagccctcgcgtcgccgctgccgccaaaagacggcgagcgctcaaaccaaacagcacatccgggcaacgtttgatcctgacacagggctgttgatggagattatgaacatgaatcagcaactcctgctgcctgttcgccagaccttcttctggtacaacgccagtataggtgacaacgaaagtgaccaggcctcaggtgcctacatcttcagacccaaccaacagaaaccgctgcctgtgagccgctgggctcagatccacctggtgaagacacccttggtgcaggaggtgcaccagaacttctcagcttggtgttcccaggtggttcgcctgtacccaggacagcggcacctggagctagagtggtcggtggggccgatacctgtgggcgacacctgggggaaggaggtcatcagccgttttgacacaccgctggagacaaagggacgcttctacacagacagcaatggccgggagatcctggagaggaggcgggattatcgacccacctggaaactgaaccagacggagcccgtggcaggaaactactatccagtcaacacccggatttacatcacggatggaaacatgcagctgactgtgctgactgaccgctcccaggggggcagcagcctgagagatggctcgctggagctcatggtgcaccgaaggctgctgaaggacgatggacgcggagtatcggagccactaatggagaacgggtcgggggcgtgggtgcgagggcgccacctggtgctgctggacacagcccaggctgcagccgccggacaccggctcctggcggagcaggaggtcctggcccctcaggtggtgctggccccgggtggcggcgccgcctacaatctcggggctcctccgcgcacgcagttctcagggctgcgcagggacctgccgccctcggtgcacctgctcacgctggccagctggggccccgaaatggtgctgctgcgcttggagcaccagtttgccgtaggagaggattccggacgtaacctgagcgcccccgttaccttgaacttgagggacctgttctccaccttcaccatcacccgcctgcaggagaccacgctggtggccaaccagctccgcgaggcagcctccaggctcaagtggacaacaaacacaggccccacaccccaccaaactccgtaccagctggacccggccaacatcacgctggaacccatggaaatccgcactttcctggcctcagttcaatggaaggaggtggatggttaggtctgctgggatgggccctccaagcccaagcctcctgctccgggggcagaccagactctgactctcctcttggggctgctgccattaaaacgctactactaagactc

SEQ ID NO: 372266 - DNA, 170 bp, Homo sapiens
accaatctatcaccctatagaagaactaatgttagtataactatgaaaactccccagtcatggaaaatctggataagtggcgggccctgcactcatgagggcttccaatgtgctgcccccctcttaatactcaccaataaattctacttcctgtccacctaaaaaaaaaa

SEQ ID NO: 372267 - DNA, 3529 bp, Homo sapiens
  misc_feature (310)..(310): n is a, c, g, or t
cttgggtcgctgtctactgctccttcatcagctttgccaactctcggagctcggaggacacgaagcaaatgatgagtagcttcatgtgagacttgcccggcattaagaggcattccgtcttggaattccggcattaagaggcattccgtcttcatagcccgtgagacgccagtgtcacctttagcccaaccagtgccctgagggtggcattttcctaccttcctgtaacgacccccgggattgcccagggctacagcctctctcccgtgagcctccagaccgcgccctggccccgccccccaccccgatnggcccggccgggtctgggggcggggcgtttgcggcctttccagggccggggaaccccaggaggaagctgctgagccatgggcgcctacgcgcgggcttcgggggtctgcgctcgcggctgcctggactcagcaggcccctggaccatgtcccgcgccctgcggccaccgctcccgcctctctgctttttccttttgttgctggcggctgccggtgctcgggccgggggatacgagacatgccccacagtgcagccgaacatgctgaacgtgcacctgctgcctcacacacatgatgacgtgggctggctcaaaaccgtggaccagtacttttatggaatcaagaatgacatccagcacgccggtgtgcagtacatcctggactcggtcatctctgccttgctggcagatcccacccgtcgcttcatttacgtggagattgccttcttctcccgttggtggcaccagcagacaaatgccacacaggaagtcgtgcgagaccttgtgcgccaggggcgcctggagttcgccaatggtggctgggtgatgaacgatgaggcagccacccactacggtgccatcgtggaccagatgacacttgggctgcgctttctggaggacacatttggcaatgatgggcgaccccgtgtggcctggcacattgaccccttcggccactctcgggagcaggcctcgctgtttgcgcagatgggcttcgacggcttcttctttgggcgccttgattatcaagataagtgggtacggatgcagaagctggagatggagcaggtgtggcgggccagcaccagcctgaagcccccgaccgcggacctcttcactggtgtgcttcccaatggttacaacccgccaaggaatctgtgctgggatgtgctgtgtgtcgatcagccgctggtggaggaccctcgcagccccgagtacaacgccaaggagctggtcgattacttcctaaatgtggccactgcccagggccggtattaccgcaccaaccacactgtgatgaccatgggctcggacttccaatatgagaatgccaacatgtggttcaagaaccttgacaagctcatccggctggtaaatgcgcagcaggcaaaaggaagcagtgtccatgttctctactccacccccgcttgttacctctgggagctgaacaaggccaacctcacctggtcagtgaaacatgacgacttcttcccttacgcggatggcccccaccagttctggaccggttacttttccagtcggccggccctcaaacgctacgagcgcctcagctacaacttcctgcaggtgtgcaaccagctggaggcgctggtgggcctggcggccaacgtgggaccctatggctccggagacagtgcacccctcaatgaggcgatggctgtgctccagcatcacgacgccgtcagcggcacctcccgccagcacgtggccaacgactacgcgcgccagcttgcggcaggctgggggccttgcgaggttcttctgagcaacgcgctggcgcggctcagaggcttcaaagatcacttcaccttttgccaacagctaaacatcagcatctgcccgctcagccagacggcggcgcgcttccaggtcatcgtttataatcccctggggcggaaggtgaattggatggtacggctgccggtcagcgaaggcgttttcgttgtgaaggaccccaatggcaggacagtgcccagcgatgtggtaatatttcccagctcagacagccaggcgcaccctccggagctgctgttctcagcctcactgcccgccctgggcttcagcacctattcagtagcccaggtgcctcgctggaagccccaggcccgcgcaccacagcccatccccagaagatcctggtcccctgctttaaccatcgaaaatgagcacatccgggcaacgtttgatcctgacacagggctgttgatggagattatgaacatgaatcagcaactcctgctgcctgttcgccagaccttcttctggtacaacgccagtataggtgacaacgaaagtgaccaggcctcaggtgcctacatcttcagacccaaccaacagaaaccgctgcctgtgagccgctgggctcagatccacctggtgaagacacccttggtgcaggaggtgcaccagaacttctcagcttggtgttcccaggtggttcgcctgtacccaggacagcggcacctggagctagagtggtcggtggggccgatacctgtgggcgacacctgggggaaggaggtcatcagccgttttgacacaccgctggagacaaagggacgcttctacacagacagcaatggccgggagatcctggagaggaggcgggattatcgacccacctggaaactgaaccagacggagcccgtggcaggaaactactatccagtcaacacccggatttacatcacggatggaaacatgcagctgactgtgctgactgaccgctcccaggggggcagcagcctgagagatggctcgctggagctcatggtgcaccgaaggctgctgaaggacgatggacgcggagtatcggagccactaatggagaacgggtcgggggcgtgggtgcgagggcgccacctggtgctgctggacacagcccaggctgcagccgccggacaccggctcctggcggagcaggaggtcctggcccctcaggtggtgctggccccgggtggcggcgccgcctacaatctcggggctcctccgcgcacgcagttctcagggctgcgcagggacctgccgccctcggtgcacctgctcacgctggccagctggggccccgaaatggtgctgctgcgcttggagcaccagtttgccgtaggagaggattccggacgtaacctgagcgcccccgttaccttgaacttgagggacctgttctccaccttcaccatcacccgcctgcaggagaccacgctggtggccaaccagctccgcgaggcagcctccaggctcaagtggacaacaaacacaggccccacaccccaccaaactccgtaccagctggacccggccaacatcacgctggaacccatggaaatccgcactttcctggcctcagttcaatggaaggaggtggatggttaggtctgctgggatgggccctccaagcccaagcctcctgctccgggggcagaccagactctgactctcctcttggggctgctgccattaaaacgctactactaagactc

SEQ ID NO: 372268 - DNA, 4293 bp, Homo sapiens
  misc_feature (310)..(310): n is a, c, g, or t
cttgggtcgctgtctactgctccttcatcagctttgccaactctcggagctcggaggacacgaagcaaatgatgagtagcttcatgtgagacttgcccggcattaagaggcattccgtcttggaattccggcattaagaggcattccgtcttcatagcccgtgagacgccagtgtcacctttagcccaaccagtgccctgagggtggcattttcctaccttcctgtaacgacccccgggattgcccagggctacagcctctctcccgtgagcctccagaccgcgccctggccccgccccccaccccgatnggcccggccgggtctgggggcggggcgtttgcggcctttccagggccggggaaccccaggaggaagctgctgagccatgggcgcctacgcgcgggcttcgggggtctgcgctcgcggctgcctggactcagcaggcccctggaccatgtcccgcgccctgcggccaccgctcccgcctctctgctttttccttttgttgctggcggctgccggtgctcgggccgggggatacgagacatgccccacagtgcagccgaacatgctgaacgtgcacctgctgcctcacacacatgatgacgtgggctggctcaaaaccgtggaccagtacttttatggaatcaagaatgacatccagcacgccggtgtgcagtacatcctggactcggtcatctctgccttgctggcagatcccacccgtcgcttcatttacgtggagattgccttcttctcccgttggtggcaccagcagacaaatgccacacaggaagtcgtgcgagaccttgtgcgccaggggcgcctggagttcgccaatggtggctgggtgatgaacgatgaggcagccacccactacggtgccatcgtggaccagatgacacttgggctgcgctttctggaggacacatttggcaatgatgggcgaccccgtgtggcctggcacattgaccccttcggccactctcgggagcaggcctcgctgtttgcgcagatgggcttcgacggcttcttctttgggcgccttgattatcaagataagtgggtacggatgcagaagctggagatggagcaggtgtggcgggccagcaccagcctgaagcccccgaccgcggacctcttcactggtgtgcttcccaatggttacaacccgccaaggaatctgtgctgggatgtgctgtgtgtcgatcagccgctggtggaggaccctcgcagccccgagtacaacgccaaggagctggtcgattacttcctaaatgtggccactgcccagggccggtattaccgcaccaaccacactgtgatgaccatgggctcggacttccaatatgagaatgccaacatgtggttcaagaaccttgacaagctcatccggctggtaaatgcgcagcaggcaaaaggaagcagtgtccatgttctctactccacccccgcttgttacctctgggagctgaacaaggccaacctcacctggtcagtgaaacatgacgacttcttcccttacgcggatggcccccaccagttctggaccggttacttttccagtcggccggccctcaaacgctacgagcgcctcagctacaacttcctgcaggtgtgcaaccagctggaggcgctggtgggcctggcggccaacgtgggaccctatggctccggagacagtgcacccctcaatgaggcgatggctgtgctccagcatcacgacgccgtcagcggcacctcccgccagcacgtggccaacgactacgcgcgccagcttgcggcaggctgggggccttgcgaggttcttctgagcaacgcgctggcgcggctcagaggcttcaaagatcacttcaccttttgccaacagctaaacatcagcatctgcccgctcagccagacggcggcgcgcttccaggtcatcgtttataatcccctggggcggaaggtgaattggatggtacggctgccggtcagcgaaggcgttttcgttgtgaaggaccccaatggcaggacagtgcccagcgatgtggtaatatttcccagctcagacagccaggcgcaccctccggagctgctgttctcagcctcactgcccgccctgggcttcagcacctattcagtagcccaggtgcctcgctggaagccccaggcccgcgcaccacagcccatccccagaagatcctggtcccctgctttaaccatcgaaaatgagcacatccgggcaacgtttgatcctgacacagggctgttgatggagattatgaacatgaatcagcaactcctgctgcctgttcgccagaccttcttctggtacaacgccagtataggtgacaacgaaagtgaccaggcctcaggtgcctacatcttcagacccaaccaacagaaaccgctgcctgtgagccgctgggctcagatccacctggtgaagacacccttggtgcaggaggtgcaccagaacttctcagcttggtgttcccaggtggttcgcctgtacccaggacagcggcacctggagctagagtggtcggtggggccgatacctgtgggcgacacctgggggaaggaggtcatcagccgttttgacacaccgctggagacaaagggacgcttctacacagacagcaatggccgggagatcctggagaggaggcgggattatcgacccacctggaaactgaaccagacggagcccgtggcaggaaactactatccagtcaacacccggatttacatcacggatggaaacatgcagctgactgtgctgactgaccgctcccaggggggcagcagcctgagagatggctcgctggagctcatggtgcaccgaaggctgctgaaggacgatggacgcggagtatcggagccactaatggagaacgggtcgggggcgtgggtgcgagggcgccacctggtgctgctggacacagcccaggctgcagccgccggacaccggctcctggcggagcaggaggtcctggcccctcaggtggtgctggccccgggtggcggcgccgcctacaatctcggggctcctccgcgcacgcagttctcagggctgcgcagggacctgccgccctcggtgcacctgctcacgctggccagctggggccccgaaatggtgctgctgcgcttggagcaccagtttgccgtaggagaggattccggacgtaacctgagcgcccccgttaccttgaacttgagggacctgttctccaccttcaccatcacccgcctgcaggagaccacgctggtggccaaccagctccgcgaggcagcctccaggctcaagtggacaacaaacacaggccccacaccccaccaaactccgtaccagctggacccggccaacatcacgctggaacccatggaaatccgcactttcctggcctcagttcaatggaaggaggtggatggttaggtctgctgggatgggccctccaagcccaagcctcctgctccgggggcagaccagactctgactctcctcttggggctgctgccattaaaacgctactactaagactcaggtcgctctgtgactgagttgtgccactgaagatcctggtgtcgccatgggccgccgccccgcccgttgttaccggtattgtaagaacaagccgtacccaaagtctcgcttctgccgaggtgtccctgatgccaagattcgcatttttgacctggggcggaaaaaggcaaaagtggatgagtttccgctttgtggccacatggtgtcagatgaatatgagcagctgtcctctgaagccctggaggctgcccgaatttgtgccaataagtacatggtaaaaagttgtggcaaagatggcttccatatccgggtgcggctccaccccttccacgtcatccgcatcaacaagatgttgtcctgtgctggggctgacaggctccaaacaggcatgcgaggtgcctttggaaagccccagggcactgtggccagggttcacattggccaagttatcatgtccatccgcaccaagctgcagaacaaggagcatgtgattgaggccctgcgcagggccaagttcaagtttcctggccgccagaagatccacatctcaaagaagtggggcttcaccaagttcaatgctgatgaatttgaagacatggtggctgaaaagcggctcatcccagatggctgtggggtcaagtacatccccagtcgtggccctctggacaagtggcgggccctgcactcatgagggcttccaatgtgctgcccccctcttaatactcaccaataaattctacttcctgtccacctaaaaaaaaaa

SEQ ID NO: 372269 - DNA, 4130 bp, Homo sapiens
  misc_feature (310)..(310): n is a, c, g, or t
cttgggtcgctgtctactgctccttcatcagctttgccaactctcggagctcggaggacacgaagcaaatgatgagtagcttcatgtgagacttgcccggcattaagaggcattccgtcttggaattccggcattaagaggcattccgtcttcatagcccgtgagacgccagtgtcacctttagcccaaccagtgccctgagggtggcattttcctaccttcctgtaacgacccccgggattgcccagggctacagcctctctcccgtgagcctccagaccgcgccctggccccgccccccaccccgatnggcccggccgggtctgggggcggggcgtttgcggcctttccagggccggggaaccccaggaggaagctgctgagccatgggcgcctacgcgcgggcttcgggggtctgcgctcgcggctgcctggactcagcaggcccctggaccatgtcccgcgccctgcggccaccgctcccgcctctctgctttttccttttgttgctggcggctgccggtgctcgggccgggggatacgagacatgccccacagtgcagccgaacatgctgaacgtgcacctgctgcctcacacacatgatgacgtgggctggctcaaaaccgtggaccagtacttttatggaatcaagaatgacatccagcacgccggtgtgcagtacatcctggactcggtcatctctgccttgctggcagatcccacccgtcgcttcatttacgtggagattgccttcttctcccgttggtggcaccagcagacaaatgccacacaggaagtcgtgcgagaccttgtgcgccaggggcgcctggagttcgccaatggtggctgggtgatgaacgatgaggcagccacccactacggtgccatcgtggaccagatgacacttgggctgcgctttctggaggacacatttggcaatgatgggcgaccccgtgtggcctggcacattgaccccttcggccactctcgggagcaggcctcgctgtttgcgcagatgggcttcgacggcttcttctttgggcgccttgattatcaagataagtgggtacggatgcagaagctggagatggagcaggtgtggcgggccagcaccagcctgaagcccccgaccgcggacctcttcactggtgtgcttcccaatggttacaacccgccaaggaatctgtgctgggatgtgctgtgtgtcgatcagccgctggtggaggaccctcgcagccccgagtacaacgccaaggagctggtcgattacttcctaaatgtggccactgcccagggccggtattaccgcaccaaccacactgtgatgaccatgggctcggacttccaatatgagaatgccaacatgtggttcaagaaccttgacaagctcatccggctggtaaatgcgcagcaggcaaaaggaagcagtgtccatgttctctactccacccccgcttgttacctctgggagctgaacaaggccaacctcacctggtcagtgaaacatgacgacttcttcccttacgcggatggcccccaccagttctggaccggttacttttccagtcggccggccctcaaacgctacgagcgcctcagctacaacttcctgcaggtgtgcaaccagctggaggcgctggtgggcctggcggccaacgtgggaccctatggctccggagacagtgcacccctcaatgaggcgatggctgtgctccagcatcacgacgccgtcagcggcacctcccgccagcacgtggccaacgactacgcgcgccagcttgcggcaggctgggggccttgcgaggttcttctgagcaacgcgctggcgcggctcagaggcttcaaagatcacttcaccttttgccaacagctaaacatcagcatctgcccgctcagccagacggcggcgcgcttccaggtcatcgtttataatcccctggggcggaaggtgaattggatggtacggctgccggtcagcgaaggcgttttcgttgtgaaggaccccaatggcaggacagtgcccagcgatgtggtaatatttcccagctcagacagccaggcgcaccctccggagctgctgttctcagcctcactgcccgccctgggcttcagcacctattcagtagcccaggtgcctcgctggaagccccaggcccgcgcaccacagcccatccccagaagatcctggtcccctgctttaaccatcgaaaatgagcacatccgggcaacgtttgatcctgacacagggctgttgatggagattatgaacatgaatcagcaactcctgctgcctgttcgccagaccttcttctggtacaacgccagtataggtgacaacgaaagtgaccaggcctcaggtgcctacatcttcagacccaaccaacagaaaccgctgcctgtgagccgctgggctcagatccacctggtgaagacacccttggtgcaggaggtgcaccagaacttctcagcttggtgttcccaggtggttcgcctgtacccaggacagcggcacctggagctagagtggtcggtggggccgatacctgtgggcgacacctgggggaaggaggtcatcagccgttttgacacaccgctggagacaaagggacgcttctacacagacagcaatggccgggagatcctggagaggaggcgggattatcgacccacctggaaactgaaccagacggagcccgtggcaggaaactactatccagtcaacacccggatttacatcacggatggaaacatgcagctgactgtgctgactgaccgctcccaggggggcagcagcctgagagatggctcgctggagctcatggtgcaccgaaggctgctgaaggacgatggacgcggagtatcggagccactaatggagaacgggtcgggggcgtgggtgcgagggcgccacctggtgctgctggacacagcccaggctgcagccgccggacaccggctcctggcggagcaggaggtcctggcccctcaggtggtgctggccccgggtggcggcgccgcctacaatctcggggctcctccgcgcacgcagttctcagggctgcgcagggacctgccgccctcggtgcacctgctcacgctggccagctggggccccgaaatggtgctgctgcgcttggagcaccagtttgccgtaggagaggattccggacgtaacctgagcgcccccgttaccttgaacttgagggacctgttctccaccttcaccatcacccgcctgcaggagaccacgctggtggccaaccagctccgcgaggcagcctccaggctcaagtggacaacaaacacaggccccacaccccaccaaactccgtaccagctggacccggccaacatcacgctggaacccatggaaatccgcactttcctggcctcagttcaatggaaggaggtggatggttaggtctgctgggatgggccctccaagcccaagcctcctgctccgggggcagaccagactctgactctcctcttggggctgctgccattaaaacgctactactaagactcaggtcgctctgtgactgagttgtgccactgaagatcctggtgtcgccatgggccgccgccccgcccgttgttaccggtattgtaagaacaagccgtacccaaagtctcgcttctgccgaggtgtccctgatgccaagattcgcatttttgacctggggcggaaaaaggcaaaagtggatgagtttccgctttgtggccacatggtgtcagatgaatatgagcagctgtcctctgaagccctggaggctgcccgaatttgtgccaataagtacatggtaaaaagttgtggcaaagatggcttccatatccgggtgcggctccaccccttccacgtcatccgcatcaacaagatgttgtcctgtgctggggctgacagatccacatctcaaagaagtggggcttcaccaagttcaatgctgatgaatttgaagacatggtggctgaaaagcggctcatcccagatggctgtggggtcaagtacatccccagtcgtggccctctggacaagtggcgggccctgcactcatgagggcttccaatgtgctgcccccctcttaatactcaccaataaattctacttcctgtccacctaaaaaaaaaa

SEQ ID NO: 372270 - DNA, 3385 bp, Homo sapiens
  misc_feature (310)..(310): n is a, c, g, or t
cttgggtcgctgtctactgctccttcatcagctttgccaactctcggagctcggaggacacgaagcaaatgatgagtagcttcatgtgagacttgcccggcattaagaggcattccgtcttggaattccggcattaagaggcattccgtcttcatagcccgtgagacgccagtgtcacctttagcccaaccagtgccctgagggtggcattttcctaccttcctgtaacgacccccgggattgcccagggctacagcctctctcccgtgagcctccagaccgcgccctggccccgccccccaccccgatnggcccggccgggtctgggggcggggcgtttgcggcctttccagggccggggaaccccaggaggaagctgctgagccatgggcgcctacgcgcgggcttcgggggtctgcgctcgcggctgcctggactcagcaggcccctggaccatgtcccgcgccctgcggccaccgctcccgcctctctgctttttccttttgttgctggcggctgccggtgctcgggccgggggatacgagacatgccccacagtgcagccgaacatgctgaacgtgcacctggtcagtgaaacatgacgacttcttcccttacgcggatggcccccaccagttctggaccggttacttttccagtcggccggccctcaaacgctacgagcgcctcagctacaacttcctgcaggtgtgcaaccagctggaggcgctggtgggcctggcggccaacgtgggaccctatggctccggagacagtgcacccctcaatgaggcgatggctgtgctccagcatcacgacgccgtcagcggcacctcccgccagcacgtggccaacgactacgcgcgccagcttgcggcaggctgggggccttgcgaggttcttctgagcaacgcgctggcgcggctcagaggcttcaaagatcacttcaccttttgccaacagctaaacatcagcatctgcccgctcagccagacggcggcgcgcttccaggtcatcgtttataatcccctggggcggaaggtgaattggatggtacggctgccggtcagcgaaggcgttttcgttgtgaaggaccccaatggcaggacagtgcccagcgatgtggtaatatttcccagctcagacagccaggcgcaccctccggagctgctgttctcagcctcactgcccgccctgggcttcagcacctattcagtagcccaggtgcctcgctggaagccccaggcccgcgcaccacagcccatccccagaagatcctggtcccctgctttaaccatcgaaaatgagcacatccgggcaacgtttgatcctgacacagggctgttgatggagattatgaacatgaatcagcaactcctgctgcctgttcgccagaccttcttctggtacaacgccagtataggtgacaacgaaagtgaccaggcctcaggtgcctacatcttcagacccaaccaacagaaaccgctgcctgtgagccgctgggctcagatccacctggtgaagacacccttggtgcaggaggtgcaccagaacttctcagcttggtgttcccaggtggttcgcctgtacccaggacagcggcacctggagctagagtggtcggtggggccgatacctgtgggcgacacctgggggaaggaggtcatcagccgttttgacacaccgctggagacaaagggacgcttctacacagacagcaatggccgggagatcctggagaggaggcgggattatcgacccacctggaaactgaaccagacggagcccgtggcaggaaactactatccagtcaacacccggatttacatcacggatggaaacatgcagctgactgtgctgactgaccgctcccaggggggcagcagcctgagagatggctcgctggagctcatggtgcaccgaaggctgctgaaggacgatggacgcggagtatcggagccactaatggagaacgggtcgggggcgtgggtgcgagggcgccacctggtgctgctggacacagcccaggctgcagccgccggacaccggctcctggcggagcaggaggtcctggcccctcaggtggtgctggccccgggtggcggcgccgcctacaatctcggggctcctccgcgcacgcagttctcagggctgcgcagggacctgccgccctcggtgcacctgctcacgctggccagctggggccccgaaatggtgctgctgcgcttggagcaccagtttgccgtaggagaggattccggacgtaacctgagcgcccccgttaccttgaacttgagggacctgttctccaccttcaccatcacccgcctgcaggagaccacgctggtggccaaccagctccgcgaggcagcctccaggctcaagtggacaacaaacacaggccccacaccccaccaaactccgtaccagctggacccggccaacatcacgctggaacccatggaaatccgcactttcctggcctcagttcaatggaaggaggtggatggttaggtctgctgggatgggccctccaagcccaagcctcctgctccgggggcagaccagactctgactctcctcttggggctgctgccattaaaacgctactactaagactcaggtcgctctgtgactgagttgtgccactgaagatcctggtgtcgccatgggccgccgccccgcccgttgttaccggtattgtaagaacaagccgtacccaaagtctcgcttctgccgaggtgtccctgatgccaagattcgcatttttgacctggggcggaaaaaggcaaaagtggatgagtttccgctttgtggccacatggtgtcagatgaatatgagcagctgtcctctgaagccctggaggctgcccgaatttgtgccaataagtacatggtaaaaagttgtggcaaagatggcttccatatccgggtgcggctccaccccttccacgtcatccgcatcaacaagatgttgtcctgtgctggggctgacaggctccaaacaggcatgcgaggtgcctttggaaagccccagggcactgtggccagggttcacattggccaagttatcatgtccatccgcaccaagctgcagaacaaggagcatgtgattgaggccctgcgcagggccaagttcaagtttcctggccgccagaagatccacatctcaaagaagtggggcttcaccaagttcaatgctgatgaatttgaagacatggtggctgaaaagcggctcatcccagatggctgtggggtcaagtacatccccagtcgtggccctctggacaagtggcgggccctgcactcatgagggcttccaatgtgctgcccccctcttaatactcaccaataaattctacttcctgtccacctaaaaaaaaaa

SEQ ID NO: 372271 - DNA, 3083 bp, Homo sapiens
gtggcgggcacctgtagtcccaggtactcatgaggctgaggctggagaatggcgtgaacccaagaggtggagcttgcagtgagctgagattgagccactgcactacagcctgggcaacaaagtaagactccgtcccaaaaaaaaaaagttgtgttttttggtaacaatctgacagtcctgcaaaacgattattcctgccctataatgtcacacttagtttttccacaaaagtttttaataataaagttggaattattgtaaaagtttagtaaaatttcaggatggtctcgatctgacctcgtgatccgcccgcctcggtctctcaaagtgctgggattacaggcgtgagccaccgcccccagccgtcctcgagttccttcttaaagcctctaagaatcctgcccgccagcaccggacctttcgcttccccttggggtctcagctgagtcccacagaacctcaccggactcattgtctatgagcagatgaggcgatggctgtgctccagcatcacgacgccgtcagcggcacctcccgccagcacgtggccaacgactacgcgcgccagcttgcggcaggctgggggccttgcgaggttcttctgagcaacgcgctggcgcggctcagaggcttcaaagatcacttcaccttttgccaacagctaaacatcagcatctgcccgctcagccagacggcggcgcgcttccaggtcatcgtttataatcccctggggcggaaggtgaattggatggtacggctgccggtcagcgaaggcgttttcgttgtgaaggaccccaatggcaggacagtgcccagcgatgtggtaatatttcccagctcagacagccaggcgcaccctccggagctgctgttctcagcctcactgcccgccctgggcttcagcacctattcagtagcccaggtgcctcgctggaagccccaggcccgcgcaccacagcccatccccagaagatcctggtcccctgctttaaccatcgaaaatgagcacatccgggcaacgtttgatcctgacacagggctgttgatggagattatgaacatgaatcagcaactcctgctgcctgttcgccagaccttcttctggtacaacgccagtataggtgacaacgaaagtgaccaggcctcaggtgcctacatcttcagacccaaccaacagaaaccgctgcctgtgagccgctgggctcagatccacctggtgaagacacccttggtgcaggaggtgcaccagaacttctcagcttggtgttcccaggtggttcgcctgtacccaggacagcggcacctggagctagagtggtcggtggggccgatacctgtgggcgacacctgggggaaggaggtcatcagccgttttgacacaccgctggagacaaagggacgcttctacacagacagcaatggccgggagatcctggagaggaggcgggattatcgacccacctggaaactgaaccagacggagcccgtggcaggaaactactatccagtcaacacccggatttacatcacggatggaaacatgcagctgactgtgctgactgaccgctcccaggggggcagcagcctgagagatggctcgctggagctcatggtgcaccgaaggctgctgaaggacgatggacgcggagtatcggagccactaatggagaacgggtcgggggcgtgggtgcgagggcgccacctggtgctgctggacacagcccaggctgcagccgccggacaccggctcctggcggagcaggaggtcctggcccctcaggtggtgctggccccgggtggcggcgccgcctacaatctcggggctcctccgcgcacgcagttctcagggctgcgcagggacctgccgccctcggtgcacctgctcacgctggccagctggggccccgaaatggtgctgctgcgcttggagcaccagtttgccgtaggagaggattccggacgtaacctgagcgcccccgttaccttgaacttgagggacctgttctccaccttcaccatcacccgcctgcaggagaccacgctggtggccaaccagctccgcgaggcagcctccaggctcaagtggacaacaaacacaggccccacaccccaccaaactccgtaccagctggacccggccaacatcacgctggaacccatggaaatccgcactttcctggcctcagttcaatggaaggaggtggatggttaggtctgctgggatgggccctccaagcccaagcctcctgctccgggggcagaccagactctgactctcctcttggggctgctgccattaaaacgctactactaagactcaggtcgctctgtgactgagttgtgccactgaagatcctggtgtcgccatgggccgccgccccgcccgttgttaccggtattgtaagaacaagccgtacccaaagtctcgcttctgccgaggtgtccctgatgccaagattcgcatttttgacctggggcggaaaaaggcaaaagtggatgagtttccgctttgtggccacatggtgtcagatgaatatgagcagctgtcctctgaagccctggaggctgcccgaatttgtgccaataagtacatggtaaaaagttgtggcaaagatggcttccatatccgggtgcggctccaccccttccacgtcatccgcatcaacaagatgttgtcctgtgctggggctgacaggctccaaacaggcatgcgaggtgcctttggaaagccccagggcactgtggccagggttcacattggccaagttatcatgtccatccgcaccaagctgcagaacaaggagcatgtgattgaggccctgcgcagggccaagttcaagtttcctggccgccagaagatccacatctcaaagaagtggggcttcaccaagttcaatgctgatgaatttgaagacatggtggctgaaaagcggctcatcccagatggctgtggggtcaagtacatccccagtcgtggccctctggacaagtggcgggccctgcactcatgagggcttccaatgtgctgcccccctcttaatactcaccaataaattctacttcctgtccacctaaaaaaaaaa

SEQ ID NO: 372272 - DNA, 3034 bp, Homo sapiens
  misc_feature (310)..(310): n is a, c, g, or t
cttgggtcgctgtctactgctccttcatcagctttgccaactctcggagctcggaggacacgaagcaaatgatgagtagcttcatgtgagacttgcccggcattaagaggcattccgtcttggaattccggcattaagaggcattccgtcttcatagcccgtgagacgccagtgtcacctttagcccaaccagtgccctgagggtggcattttcctaccttcctgtaacgacccccgggattgcccagggctacagcctctctcccgtgagcctccagaccgcgccctggccccgccccccaccccgatnggcccggccgggtctgggggcggggcgtttgcggcctttccagggccggggaaccccaggaggaagctgctgagccatgggcgcctacgcgcgggcttcgggggtctgcgctcgcggctgcctggactcagcaggcccctggaccatgtcccgcgccctgcggccaccgctcccgcctctctgctttttccttttgttgctggcggctgccggtgctcgggccgggggatacgagacatgccccacagtgcagccgaacatgctgaacgtgcacctgctgcctcacacacatgatgacgtgggctggctcaaaaccgtggaccagtacttttatggaatcaagaatgacatccagcacgccggtgtgcagtacatcctggactcggtcatctctgccttgctggcagatcccacccgtcgcttcatttacgtggagattgccttcttctcccgttggtggcaccagcagacaaatgccacacaggaagtcgtgcgagaccttgtgcgccaggggcgcctggagttcgccaatggtggctgggtgatgaacgatgaggcagccacccactacggtgccatcgtggaccagatgacacttgggctgcgctttctggaggacacatttggcaatgatgggcgaccccgtgtggcctggcacattgaccccttcggccactctcgggagcaggcctcgctgtttgcgcagatgggcttcgacggcttcttctttgggcgccttgattatcaagataagtgggtacggatgcagaagctggagatggagcaggtgtggcgggccagcaccagcctgaagcccccgaccgcggacctcttcactggtgtgcttcccaatggttacaacccgccaaggaatctgtgctgggatgtgctgtgtgtcgatcagccgctggtggaggaccctcgcagccccgagtacaacgccaaggagctggtcgattacttcctaaatgtggccactgcccagggccggtattaccgcaccaaccacactgtgatgaccatgggctcggacttccaatatgagaatgccaacatgtggttcaagaaccttgacaagctcatccggctggtaaatgcgcagcaggcaaaaggaagcagtgtccatgttctctactccacccccgcttgttacctctgggagctgaacaaggccaacctcacctggtcagtgaaacatgacgacttcttcccttacgcggatggcccccaccagttctggaccggttacttttccagtcggccggccctcaaacgctacgagcgcctcagctacaacttcctgcaggtgtgcaaccagctggaggcgctggtgggcctggcggccaacgtgggaccctatggctccggagacagtgcacccctcaatgaggcgatggctgtgctccagcatcacgacgccgtcagcggcacctcccgccagcacgtggccaacgactacgcgcgccagcttgcggcaggctgggggccttgcgaggttcttctgagcaacgcgctggcgcggctcagaggcttcaaagatcacttcaccttttgccaacagctaaacatcagcatctgcccgctcagccagacggcggcgcgcttccaggtcatcgtttataatcccctggggcggaaggtgaattggatggtacggctgccggtcagcgaaggcgttttcgttgtgaaggaccccaatggcaggacagtgcccagcgatgtggtaatatttcccagctcagacagccaggcgcaccctccggagctgctgttctcagcctcactgcccgccctgggcttcagcacctattcagtagcccaggtgcctcgctggaagccccaggcccgcgcaccacagcccatccccagaagatcctggtcccctgctttaaccatcgaaaatgagcacatccgggcaacgtttgatcctgacacagggctgttgatggagattatgaacatgaatcagcaactcctgctgcctgttcgccagaccttcttctggtacaacgccagtataggtgacaacgaaagtgaccaggcctcaggtgcctacatcttcagacccaaccaacagaaaccgctgcctgtgagccgctgggctcagatccacctggtgaagacacccttggtgcaggaggtgcaccagaacttctcagcttggtgttcccaggtggttcgcctgtacccaggacagcggcacctggagctagagtggtcggtggggccgatacctgtgggcgacacctgggggaaggaggtcatcagccgttttgacacaccgctggagacaaagggacgcttctacacagacagcaatggccgggagatcctggagaggaggcgggattatcgacccacctggaaactgaaccagacggagcccgtggcaggaaactactatccagtcaacacccggatttacatcacggatggaaacatgcagctgactgtgctgactgaccgctcccaggggggcagcagcctgagagatggctcgctggagctcatggtgcaccgaaggctgctgaaggacgatggacgcggagtatcggagccactaatggagaacgggtcgggggcgtgggtgcgagggcgccacctggtgctgctggacacagcccaggctgcagccgccggacaccggcctcctgctccgggggcagaccagactctgactctcctcttggggctgctgccattaaaacgctactactaagactc

SEQ ID NO: 372273 - DNA, 2991 bp, Homo sapiens
  misc_feature (310)..(310): n is a, c, g, or t
cttgggtcgctgtctactgctccttcatcagctttgccaactctcggagctcggaggacacgaagcaaatgatgagtagcttcatgtgagacttgcccggcattaagaggcattccgtcttggaattccggcattaagaggcattccgtcttcatagcccgtgagacgccagtgtcacctttagcccaaccagtgccctgagggtggcattttcctaccttcctgtaacgacccccgggattgcccagggctacagcctctctcccgtgagcctccagaccgcgccctggccccgccccccaccccgatnggcccggccgggtctgggggcggggcgtttgcggcctttccagggccggggaaccccaggaggaagctgctgagccatgggcgcctacgcgcgggcttcgggggtctgcgctcgcggctgcctggactcagcaggcccctggaccatgtcccgcgccctgcggccaccgctcccgcctctctgctttttccttttgttgctggcggctgccggtgctcgggccgggggatacgagacatgccccacagtgcagccgaacatgctgaacgtgcacctgctgcctcacacacatgatgacgtgggctggctcaaaaccgtggaccagtacttttatggaatcaagaatgacatccagcacgccggtgtgcagtacatcctggactcggtcatctctgccttgctggcagatcccacccgtcgcttcatttacgtggagattgccttcttctcccgttggtggcaccagcagacaaatgccacacaggaagtcgtgcgagaccttgtgcgccaggggcgcctggagttcgccaatggtggctgggtgatgaacgatgaggcagccacccactacggtgccatcgtggaccagatgacacttgggctgcgctttctggaggacacatttggcaatgatgggcgaccccgtgtggcctggcacattgaccccttcggccactctcgggagcaggcctcgctgtttgcgcagatgggcttcgacggcttcttctttgggcgccttgattatcaagataagtgggtacggatgcagaagctggagatggagcaggtgtggcgggccagcaccagcctgaagcccccgaccgcggacctcttcactggtgtgcttcccaatggttacaacccgccaaggaatctgtgctgggatgtgctgtgtgtcgatcagccgctggtggaggaccctcgcagccccgagtacaacgccaaggagctggtcgattacttcctaaatgtggccactgcccagggccggtattaccgcaccaaccacactgtgatgaccatgggctcggacttccaatatgagaatgccaacatgtggttcaagaaccttgacaagctcatccggctggtaaatgcgcagcaggcaaaaggaagcagtgtccatgttctctactccacccccgcttgttacctctgggagctgaacaaggccaacctcacctggtcagtgaaacatgacgacttcttcccttacgcggatggcccccaccagttctggaccggttacttttccagtcggccggccctcaaacgctacgagcgcctcagctacaacttcctgcaggtgtgcaaccagctggaggcgctggtgggcctggcggccaacgtgggaccctatggctccggagacagtgcacccctcaatgaggcgatggctgtgctccagcatcacgacgccgtcagcggcacctcccgccagcacgtggccaacgactacgcgcgccagcttgcggcaggctgggggccttgcgaggttcttctgagcaacgcgctggcgcggctcagaggcttcaaagatcacttcaccttttgccaacagctaaacatcagcatctgcccgctcagccagacggcggcgcgcttccaggtcatcgtttataatcccctggggcggaaggtgaattggatggtacggctgccggtcagcgaaggcgttttcgttgtgaaggaccccaatggcaggacagtgcccagcgatgtggtaatatttcccagctcagacagccaggcgcaccctccggagctgctgttctcagcctcactgcccgccctgggcttcagcacctattcagtagcccaggtgcctcgctggaagccccaggcccgcgcaccacagcccatccccagaagatcctggtcccctgctttaaccatcgaaaatgagcacatccgggcaacgtttgatcctgacacagggctgttgatggagattatgaacatgaatcagcaactcctgctgcctgttcgccagaccttcttctggtacaacgccagtataggtgacaacgaaagtgaccaggcctcaggtgcctacatcttcagacccaaccaacagaaaccgctgcctgtgagccgctgggctcagatccacctggtgaagacacccttggtgcaggaggtgcaccagaacttctcagcttggtgttcccaggtggttcgcctgtacccaggacagcggcacctggagctagagtggtcggtggggccgatacctgtgggcgacacctgggggaaggaggtcatcagccgttttgacacaccggcttggagcaccagtttgccgtaggagaggattccggacgtaacctgagcgcccccgttaccttgaacttgagggacctgttctccaccttcaccatcacccgcctgcaggagaccacgctggtggccaaccagctccgcgaggcagcctccaggctcaagtggacaacaaacacaggccccacaccccaccaaactccgtaccagctggacccggccaacatcacgctggaacccatggaaatccgcactttcctggcctcagttcaatggaaggaggtggatggttaggtctgctgggatgggccctccaagcccaagcctcctgctccgggggcagaccagactctgactctcctcttggggctgctgccattaaaacgctactactaagactc

SEQ ID NO: 372274 - DNA, 2932 bp, Homo sapiens
  misc_feature (310)..(310): n is a, c, g, or t
cttgggtcgctgtctactgctccttcatcagctttgccaactctcggagctcggaggacacgaagcaaatgatgagtagcttcatgtgagacttgcccggcattaagaggcattccgtcttggaattccggcattaagaggcattccgtcttcatagcccgtgagacgccagtgtcacctttagcccaaccagtgccctgagggtggcattttcctaccttcctgtaacgacccccgggattgcccagggctacagcctctctcccgtgagcctccagaccgcgccctggccccgccccccaccccgatnggcccggccgggtctgggggcggggcgtttgcggcctttccagggccggggaaccccaggaggaagctgctgagccatgggcgcctacgcgcgggcttcgggggtctgcgctcgcggctgcctggactcagcaggcccctggaccatgtcccgcgccctgcggccaccgctcccgcctctctgctttttccttttgttgctggcggctgccggtgctcgggccgggggatacgagacatgccccacagtgcagccgaacatgctgaacgtgcacctgctgcctcacacacatgatgacgtgggctggctcaaaaccgtggaccagtacttttatggaatcaagaatgacatccagcacgccggtgtgcagtacatcctggactcggtcatctctgccttgctggcagatcccacccgtcgcttcatttacgtggagattgccttcttctcccgttggtggcaccagcagacaaatgccacacaggaagtcgtgcgagaccttgtgcgccaggggcgcctggagttcgccaatggtggctgggtgatgaacgatgaggcagccacccactacggtgccatcgtggaccagatgacacttgggctgcgctttctggaggacacatttggcaatgatgggcgaccccgtgtggcctggcacattgaccccttcggccactctcgggagcaggcctcgctgtttgcgcagatgggcttcgacggcttcttctttgggcgccttgattatcaagataagtgggtacggatgcagaagctggagatggagcaggtgtggcgggccagcaccagcctgaagcccccgaccgcggacctcttcactggtgtgcttcccaatggttacaacccgccaaggaatctgtgctgggatgtgctgtgtgtcgatcagccgctggtggaggaccctcgcagccccgagtacaacgccaaggagctggtcgattacttcctaaatgtggccactgcccagggccggtattaccgcaccaaccacactgtgatgaccatgggctcggacttccaatatgagaatgccaacatgtggttcaagaaccttgacaagctcatccggctggtaaatgcgcagcaggcaaaaggaagcagtgtccatgttctctactccacccccgcttgttacctctgggagctgaacaaggccaacctcacctggtcagtgaaacatgacgacttcttcccttacgcggatggcccccaccagttctggaccggttacttttccagtcggccggccctcaaacgctacgagcgcctcagctacaacttcctgcaggtgtgcaaccagctggaggcgctggtgggcctggcggccaacgtgggaccctatggctccggagacagtgcacccctcaatgaggcgatggctgtgctccagcatcacgacgccgtcagcggcacctcccgccagcacgtggccaacgactacgcgcgccagcttgcggcaggctgggggccttgcgaggttcttctgagcaacgcgctggcgcggctcagaggcttcaaagatcacttcaccttttgccaacagctaaacatcagcatctgcccgctcagccagacggcggcgcgcttccaggtcatcgtttataatcccctggggcggaaggtgaattggatggtacggctgccggtcagcgaaggcgttttcgttgtgaaggaccccaatggcaggacagtgcccagcgatgtggtaatatttcccagctcagacagccaggcgcaccctccggagctgctgttctcagcctcactgcccgccctgggcttcagcacctattcagtagcccaggtgcctcgctggaagccccaggcccgcgcaccacagcccatccccagaagatcctggtcccctgctttaaccatcgaaaatgagcacatccgggcaacgtttgatcctgacacagggctgttgatggagattatgaacatgaatcagcaactcctgctgcctgttcgccagaccttcttctggtacaacgccagtataggtgacaacgaaagtgaccaggcctcaggtgcctacatcttcagacccaaccaacagaaaccgctgcctgtgagccgctgggctcagatccacctggtgaagacacccttggtgcaggaggtgcaccagaacttctcagcttggtgttcccaggtggttcgcctgtacccaggacagcggcacctggagctagagtggtcggtggggccgatacctgtgggcgacacctgggggaaggaggtcatcagccgttttgacacaccgctggagacaaagggacgcttctacacagacagcaatggccgggagatcctggagaggaggcgggattatcgacccacctggaaactgaaccagacggagcccgtggcaggaaactactatccagtcaacacccggatttacatcacgctggacccggccaacatcacgctggaacccatggaaatccgcactttcctggcctcagttcaatggaaggaggtggatggttaggtctgctgggatgggccctccaagcccaagcctcctgctccgggggcagaccagactctgactctcctcttggggctgctgccattaaaacgctactactaagactc

SEQ ID NO: 372275 - DNA, 2245 bp, Homo sapiens
  misc_feature (310)..(310): n is a, c, g, or t
cttgggtcgctgtctactgctccttcatcagctttgccaactctcggagctcggaggacacgaagcaaatgatgagtagcttcatgtgagacttgcccggcattaagaggcattccgtcttggaattccggcattaagaggcattccgtcttcatagcccgtgagacgccagtgtcacctttagcccaaccagtgccctgagggtggcattttcctaccttcctgtaacgacccccgggattgcccagggctacagcctctctcccgtgagcctccagaccgcgccctggccccgccccccaccccgatnggcccggccgggtctgggggcggggcgtttgcggcctttccagggccggggaaccccaggaggaagctgctgagccatgggcgcctacgcgcgggcttcgggggtctgcgctcgcggctgcctggactcagcaggcccctggaccatgtcccgcgccctgcggccaccgctcccgcctctctgctttttccttttgttgctggcggctgccggtgctcgggccgggggatacgagacatgccccacagtgcagccgaacatgctgaacgtgcacctgctgcctcacacacatgatgacgtgggctggctcaaaaccgtggaccagtacttttatggaatcaagaatgacatccagcacgccggtgtgcagtacatcctggactcggtcatctctgccttgctggcagatcccacccgtcgcttcatttacgtggagattgccttcttctcccgttggtggcaccagcagacaaatgccacacaggaagtcgtgcgagaccttgtgcgccaggggcgcctggagttcgccaatggtggctgggtgatgaacgatgaggcagccacccactacggtgccatcgtggaccagatgacacttgggctgcgctttctggaggacacatttggcaatgatgggcgaccccgtgtggcctggcacattgaccccttcggccactctcgggagcaggcctcgctgtttgcgcagatgggcttcgacggcttcttctttgggcgccttgattatcaagataagtgggtacggatgcagaagctggagatggagcaggtgtggcgggccagcaccagcctgaagcccccgaccgcggacctcttcactggtgtgcttcccaatggttacaacccgccaaggaatctgtgctgggatgtgctgtgtgtcgatcagccgctggtggaggaccctcgcagccccgagtacaacgccaaggagctggtcgattacttcctaaatgtggccactgcccagggccggtattaccgcaccaaccacactgtgatgaccatgggctcggacttccaatatgagaatgccaacatgtggttcaagaaccttgacaagctcatccggctggtaaatgcgcagcaggcaaaaggaagcagtgtccatgttctctactccacccccgcttgttacctctgggagctgaacaaggccaacctcacctggtcagtgaaacatgacgacttcttcccttacgcggatggcccccaccagttctggaccggttacttttccagtcggccggccctcaaacgctacgagcgcctcagctacaacttcctgcaggtgtgcaaccagctggaggcgctggtgggcctggcggccaacgtgggaccctatggctccggagacagtgcacccctcaatgaggcgatggctgtgctccagcatcacgacgccgtcagcggcacctcccgccagcacgtggccaacgactacgcgcgccagcttgcggcaggctgggggccttgcgaggttcttctgagcaacgcgctggcgcggctcagaggcttcaaagatcacttcaccttttgccaacagctaaacatcagcatctgcccgctcagccagacggcggcgcgcttccaggtcatcgtttataatcccctggggcggaaggtgaattggatggtacggctgccggtcagcgaaggcgttttcgttgtgaaggaccccaatggcaggacagtgcccagcgatgtggtaatatttcccagctcagacagccaggcgcaccctccggagctgctgttctcagcctcactgcccgccctgggcttcagcacctattcagtagcccaggtgcctcgctggaagccccaggcccgcgcaccacagcctcctgctccgggggcagaccagactctgactctcctcttggggctgctgccattaaaacgctactactaagactc

SEQ ID NO: 372276 - DNA, 1570 bp, Homo sapiens
  misc_feature (310)..(310): n is a, c, g, or t
cttgggtcgctgtctactgctccttcatcagctttgccaactctcggagctcggaggacacgaagcaaatgatgagtagcttcatgtgagacttgcccggcattaagaggcattccgtcttggaattccggcattaagaggcattccgtcttcatagcccgtgagacgccagtgtcacctttagcccaaccagtgccctgagggtggcattttcctaccttcctgtaacgacccccgggattgcccagggctacagcctctctcccgtgagcctccagaccgcgccctggccccgccccccaccccgatnggcccggccgggtctgggggcggggcgtttgcggcctttccagggccggggaaccccaggaggaagctgctgagccatgggcgcctacgcgcgggcttcgggggtctgcgctcgcggctgcctggactcagcaggcccctggaccatgtcccgcgccctgcggccaccgctcccgcctctctgctttttccttttgttgctggcggctgccggtgctcgggccgggggatacgagacatgccccacagtgcagccgaacatgctgaacgtgcacctgctgcctcacacacatgatgacgtgggctggctcaaaaccgtggaccagtacttttatggaatcaagaatgacatccagcacgccggtgtgcagtacatcctggactcggtcatctctgccttgctggcagatcccacccgtcgcttcatttacgtggagattgccttcttctcccgttggtggcaccagcagacaaatgccacacaggaagtcgtgcgagaccttgtgcgccaggggcgcctggagttcgccaatggtggctgggtgatgaacgatgaggcagccacccactacggtgccatcgtggaccagatgacacttgggctgcgctttctggaggacacatttggcaatgatgggcgaccccgtgtggcctggcacattgaccccttcggccactctcgggagcaggcctcgctgtttgcgcagatgggcttcgacggcttcttctttgggcgccttgattatcaagataagtgggtacggatgcagaagctggagatggagcaggtgtggcgggccagcaccagcctgaagcccccgaccgcggacctcttcactggtgtgcttcccaatggttacaacccgccaaggaatctgtgctgggatgtgctgtgtgtcgatcagccgctggtggaggaccctcgcagccccgagtacaacgccaaggagctggtcgattacttcctaaatgtggccactgcccagggccggtattaccgcaccaaccacactgtgatgaccatgggctcggacttccaatatgagaatgccaacatgtggttcaagaacctggacccggccaacatcacgctggaacccatggaaatccgcactttcctggcctcagttcaatggaaggaggtggatggttaggtctgctgggatgggccctccaagcccaagcctcctgctccgggggcagaccagactctgactctcctcttggggctgctgccattaaaacgctactactaagactc

SEQ ID NO: 372277 - DNA, 1706 bp, Homo sapiens
aaaaaaaaaaaaaaaaagagttggggagccagatcccaagcctgatcagctcacccccaaccccaggcgggattatcgacccacctggaaactgaaccagacggagcccgtggcaggaaactactatccagtcaacacccggatttacatcacggatggaaacatgcagctgactgtgctgactgaccgctcccaggggggcagcagcctgagagatggctcgctggagctcatggtgcaccgaaggctgctgaaggacgatggacgcggagtatcggagccactaatggagaacgggtcgggggcgtgggtgcgagggcgccacctggtgctgctggacacagcccaggctgcagccgccggacaccggctcctggcggagcaggaggtcctggcccctcaggtggtgctggccccgggtggcggcgccgcctacaatctcggggctcctccgcgcacgcagttctcagggctgcgcagggacctgccgccctcggtgcacctgctcacgctggccagctggggccccgaaatggtgctgctgcgcttggagcaccagtttgccgtaggagaggattccggacgtaacctgagcgcccccgttaccttgaacttgagggacctgttctccaccttcaccatcacccgcctgcaggagaccacgctggtggccaaccagctccgcgaggcagcctccaggctcaagtggacaacaaacacaggccccacaccccaccaaactccgtaccagctggacccggccaacatcacgctggaacccatggaaatccgcactttcctggcctcagttcaatggaaggaggtggatggttaggtctgctgggatgggccctccaagcccaagcctcctgctccgggggcagaccagactctgactctcctcttggggctgctgccattaaaacgctactactaagactcaggtcgctctgtgactgagttgtgccactgaagatcctggtgtcgccatgggccgccgccccgcccgttgttaccggtattgtaagaacaagccgtacccaaagtctcgcttctgccgaggtgtccctgatgccaagattcgcatttttgacctggggcggaaaaaggcaaaagtggatgagtttccgctttgtggccacatggtgtcagatgaatatgagcagctgtcctctgaagccctggaggctgcccgaatttgtgccaataagtacatggtaaaaagttgtggcaaagatggcttccatatccgggtgcggctccaccccttccacgtcatccgcatcaacaagatgttgtcctgtgctggggctgacaggctccaaacaggcatgcgaggtgcctttggaaagccccagggcactgtggccagggttcacattggccaagttatcatgtccatccgcaccaagctgcagaacaaggagcatgtgattgaggccctgcgcagggccaagttcaagtttcctggccgccagaagatccacatctcaaagaagtggggcttcaccaagttcaatgctgatgaatttgaagacatggtggctgaaaagcggctcatcccagatggctgtggggtcaagtacatccccagtcgtggccctctggacaagtggcgggccctgcactcatgagggcttccaatgtgctgcccccctcttaatactcaccaataaattctacttcctgtccacctaaaaaaaaaa

SEQ ID NO: 372278 - DNA, 516 bp, Homo sapiens
gcttttcctctccgtttttctccatctcctgcccaggctccctccacgctctggcgtgccatatccaggcccccctgttaggcatttacctccttccggcctggttcccatgcctacttggatcctgcctctgctggggttgccctaccagaccctcaccttcatcctcatccgttcctcccaccctttaatttcttttgacattcccacacgcccttacccagtttctggcccaaggacacccacaaacccacgactctcaccccctcctggccactctccccccaggtgcaccgaaggctgctgaaggacgatggacgcggagtatcggagccactaatggagaacgggtcgggggcgtgggtgcgagggcgccacctggtgctgctggacacagcccaggctgcagccgccggacaccggctcctggcggagcaggaggtcctggcccctcaggtggtgctggccccgggtggcggcgccgcctacaatctcggggctcctccgcgcacgcag

SEQ ID NO: 372279 - DNA, 205 bp, Homo sapiens
caaaaaaaaaaaaaaaaaaaaaagagttggggagccagatcccaagcctgatcagctcacccccaaccccaggcgggattatcgacccacctggaaactgaaccagacggagcccgtggcaggaaactactatccagtcaacacccggatttacatcacggtagctctcccccatcctgcacctccccacctcgatagaaaggga

SEQ ID NO: 372280 - DNA, 414 bp, Homo sapiens
atcaagataagtgggtacggatgcagaagctggagatggagcaggtgtggcgggccagcaccagcctgaagcccccgaccgcggacctcttcactggtagggggcttggtgagggcagggccagccatggtgccacacactcagaagggccctgggcttgatatctgctctgttgtcactgtcctggaattcctatagtctgggaacaaaggccctgcatttccttttgcattgggacacaaattctgaagcccatcctgggtgggacatggccggctttgaaaccagggaaggtctgggtgatgggccaccccttgaacttggtgtgacctgcaggtgtgcttcccaatggttacaacccgccaaggaatctgtgctgggatgtgctgtgtgtcgatcagccgctggtggagg

SEQ ID NO: 372281 - DNA, 3202 bp, Homo sapiens
  misc_feature (26)..(26): n is a, c, g, or t
  misc_feature (28)..(28): n is a, c, g, or t
  misc_feature (33)..(33): n is a, c, g, or t
aaattaggctagtagagctgggtttnantcggncgagcccaggaggaagctgctgagccatgggcgcctacgcgcgggcttcgggggtctgcgctcgcggctgcctggactcagcaggcccctggaccatgtcccgcgccctgcggccaccgctcccgcctctctgctttttccttttgttgctggcggctgccggtgctcgggccgggggatacgagacatgccccacagtgcagccgaacatgctgaacgtgcacctgctgcctcacacacatgatgacgtgggctggctcaaaaccgtggaccagtacttttatggaatcaagaatgacatccagcacgccggtgtgcagtacatcctggactcggtcatctctgccttgctggcagatcccacccgtcgcttcatttacgtggagattgccttcttctcccgttggtggcaccagcagacaaatgccacacaggaagtcgtgcgagaccttgtgcgccaggggcgcctggagttcgccaatggtggctgggtgatgaacgatgaggcagccacccactacggtgccatcgtggaccagatgacacttgggctgcgctttctggaggacacatttggcaatgatgggcgaccccgtgtggcctggcacattgaccccttcggccactctcgggagcaggcctcgctgtttgcgcagatgggcttcgacggcttcttctttgggcgccttgattatcaagataagtgggtacggatgcagaagctggagatggagcaggtgtggcgggccagcaccagcctgaagcccccgaccgcggacctcttcactggtgtgcttcccaatggttacaacccgccaaggaatctgtgctgggatgtgctgtgtgtcgatcagccgctggtggaggaccctcgcagccccgagtacaacgccaaggagctggtcgattacttcctaaatgtggccactgcccagggccggtattaccgcaccaaccacactgtgatgaccatgggctcggacttccaatatgagaatgccaacatgtggttcaagaaccttgacaagctcatccggctggtaaatgcgcagcaggcaaaaggaagcagtgtccatgttctctactccacccccgcttgttacctctgggagctgaacaaggccaacctcacctggtcagtgaaacatgacgacttcttcccttacgcggatggcccccaccagttctggaccggttacttttccagtcggccggccctcaaacgctacgagcgcctcagctacaacttcctgcaggtgtgcaaccagctggaggcgctggtgggcctggcggccaacgtgggaccctatggctccggagacagtgcacccctcaatgaggcgatggctgtgctccagcatcacgacgccgtcagcggcacctcccgccagcacgtggccaacgactacgcgcgccagcttgcggcaggctgggggccttgcgaggttcttctgagcaacgcgctggcgcggctcagaggcttcaaagatcacttcaccttttgccaacagctaaacatcagcatctgcccgctcagccagacggcggcgcgcttccaggtcatcgtttataatcccctggggcggaaggtgaattggatggtacggctgccggtcagcgaaggcgttttcgttgtgaaggaccccaatggcaggacagtgcccagcgatgtggtaatatttcccagctcagacagccaggcgcaccctccggagctgctgttctcagcctcactgcccgccctgggcttcagcacctattcagtagcccaggtgcctcgctggaagccccaggcccgcgcaccacagcccatccccagaagatcctggtcccctgctttaaccatcgaaaatgagcacatccgggcaacgtttgatcctgacacagggctgttgatggagattatgaacatgaatcagcaactcctgctgcctgttcgccagaccttcttctggtacaacgccagtataggtgacaacgaaagtgaccaggcctcaggtgcctacatcttcagacccaaccaacagaaaccgctgcctgtgagccgctgggctcagatccacctggtgaagacacccttggtgcaggaggtgcaccagaacttctcagcttggtgttcccaggtggttcgcctgtacccaggacagcggcacctggagctagagtggtcggtggggccgatacctgtgggcgacacctgggggaaggaggtcatcagccgttttgacacaccgctggagacaaagggacgcttctacacagacagcaatggccgggagatcctggagaggaggcgggattatcgacccacctggaaactgaaccagacggagcccgtggcaggaaactactatccagtcaacacccggatttacatcacggatggaaacatgcagctgactgtgctgactgaccgctcccaggggggcagcagcctgagagatggctcgctggagctcatggtgcaccgaaggctgctgaaggacgatggacgcggagtatcggagccactaatggagaacgggtcgggggcgtgggtgcgagggcgccacctggtgctgctggacacagcccaggctgcagccgccggacaccggctcctggcggagcaggaggtcctggcccctcaggtggtgctggccccgggtggcggcgccgcctacaatctcggggctcctccgcgcacgcagttctcagggctgcgcagggacctgccgccctcggtgcacctgctcacgctggccagctggggccccgaaatggtgctgctgcgcttggagcaccagtttgccgtaggagaggattccggacgtaacctgagcgcccccgttaccttgaacttgagggacctgttctccaccttcaccatcacccgcctgcaggagaccacgctggtggccaaccagctccgcgaggcagcctccaggctcaagtggacaacaaacacaggccccacaccccaccaaactccgtaccagctggacccggccaacatcacgctggaacccatggaaatccgcactttcctggcctcagttcaatggaaggaggtggatggttaggtctgctgggatgggccctccaagcccaagcctcctgctccgggggcagaccagactctgactctcctcttggggctgctgccattaaaacgctactactaagactc

SEQ ID NO: 372282 - DNA, 4901 bp, Homo sapiens
  misc_feature (310)..(310): n is a, c, g, or t
  misc_feature (2589)..(2589): n is a, c, g, or t
cttgggtcgctgtctactgctccttcatcagctttgccaactctcggagctcggaggacacgaagcaaatgatgagtagcttcatgtgagacttgcccggcattaagaggcattccgtcttggaattccggcattaagaggcattccgtcttcatagcccgtgagacgccagtgtcacctttagcccaaccagtgccctgagggtggcattttcctaccttcctgtaacgacccccgggattgcccagggctacagcctctctcccgtgagcctccagaccgcgccctggccccgccccccaccccgatnggcccggccgggtctgggggcggggcgtttgcggcctttccagggccggggaaccccaggaggaagctgctgagccatgggcgcctacgcgcgggcttcgggggtctgcgctcgcggctgcctggactcagcaggcccctggaccatgtcccgcgccctgcggccaccgctcccgcctctctgctttttccttttgttgctggcggctgccggtgctcgggccgggggatacgagacatgccccacagtgcagccgaacatgctgaacgtgcacctgctgcctcacacacatgatgacgtgggctggctcaaaaccgtggaccagtacttttatggaatcaagaatgacatccagcacgccggtgtgcagtacatcctggactcggtcatctctgccttgctggcagatcccacccgtcgcttcatttacgtggagattgccttcttctcccgttggtggcaccagcagacaaatgccacacaggaagtcgtgcgagaccttgtgcgccaggggcgcctggagttcgccaatggtggctgggtgatgaacgatgaggcagccacccactacggtgccatcgtggaccagatgacacttgggctgcgctttctggaggacacatttggcaatgatgggcgaccccgtgtggcctggcacattgaccccttcggccactctcgggagcaggcctcgctgtttgcgcagatgggcttcgacggcttcttctttgggcgccttgattatcaagataagtgggtacggatgcagaagctggagatggagcaggtgtggcgggccagcaccagcctgaagcccccgaccgcggacctcttcactggtgtgcttcccaatggttacaacccgccaaggaatctgtgctgggatgtgctgtgtgtcgatcagccgctggtggaggaccctcgcagccccgagtacaacgccaaggagctggtcgattacttcctaaatgtggccactgcccagggccggtattaccgcaccaaccacactgtgatgaccatgggctcggacttccaatatgagaatgccaacatgtggttcaagaaccttgacaagctcatccggctggtaaatgcgcaggtcagtgaaacatgacgacttcttcccttacgcggatggcccccaccagttctggaccggttacttttccagtcggccggccctcaaacgctacgagcgcctcagctacaacttcctgcaggtgtgcaaccagctggaggcgctggtgggcctggcggccaacgtgggaccctatggctccggagacagtgcacccctcaatgaggcgatggctgtgctccagcatcacgacgccgtcagcggcacctcccgccagcacgtggccaacgactacgcgcgccagcttgcggcaggctgggggccttgcgaggttcttctgagcaacgcgctggcgcggctcagaggcttcaaagatcacttcaccttttgccaacagctaaacatcagcatctgcccgctcagccagacggcggcgcgcttccaggtcatcgtttataatcccctggggcggaaggtgaattggatggtacggctgccggtcagcgaaggcgttttcgttgtgaaggaccccaatggcaggacagtgcccagcgatgtgagcccaaacaacgaatattcccccgctgggactcctcccccagtgggcatttcctcatcgcccccatggatatcgcctgcttccatgaatacctcccactcatgcatatctcttcccccctcttgtatcttctccctctgccccttaatatcagtctccccttgggaacatatgcctcctgtgagtggtcctcccttttttttttttttttgagacggagtctcgctctgtcacccaggctggagtgcagtggcgcgatcttggctcacttcaaactccgcctgctggattataggcatgagccaccgtgcctggctggtcctccattttaataccccgcttccccaggaaaatttattgctgtttatggacatctccttcattccagaaaacgtcctcccccaaacctcttcctcccccgagaacctgcctcaagggtttcttcccctacttcctccttcactcccccgactccatggtctctccaccctcccggtgggtttttttttccacctggtgaatcttctctgcaatcatttccttggaatctgactgtccccccaccacacacacctccatttcctttccccatctcaggactcttttccttccttgagttttttgtctccatgcatgtanagctttccatgggtactcttgactcagtttccctcctcctttatccgaggtggtaatatttcccagctcagacagccaggcgcaccctccggagctgctgttctcagcctcactgcccgccctgggcttcagcacctattcagtagcccaggtgcctcgctggaagccccaggcccgcgcaccacagcccatccccagaagatcctggtcccctgctttaaccatcgaaaatgagcacatccgggcaacgtttgatcctgacacagggctgttgatggagattatgaacatgaatcagcaactcctgctgcctgttcgccagaccttcttctggtacaacgccagtataggtgacaacgaaagtgaccaggcctcaggtgcctacatcttcagacccaaccaacagaaaccgctgcctgtgagccgctgggctcagatccacctggtgaagacacccttggtgcaggaggtgcaccagaacttctcagcttggtgttcccaggtggttcgcctgtacccaggacagcggcacctggagctagagtggtcggtggggccgatacctgtgggcgacacctgggggaaggaggtcatcagccgttttgacacaccgctggagacaaagggacgcttctacacagacagcaatggccgggagatcctggagaggaggcgggattatcgacccacctggaaactgaaccagacggagcccgtggcaggaaactactatccagtcaacacccggatttacatcacggatggaaacatgcagctgactgtgctgactgaccgctcccaggggggcagcagcctgagagatggctcgctggagctcatggtgcaccgaaggctgctgaaggacgatggacgcggagtatcggagccactaatggagaacgggtcgggggcgtgggtgcgagggcgccacctggtgctgctggacacagcccaggctgcagccgccggacaccggctcctggcggagcaggaggtcctggcccctcaggtggtgctggccccgggtggcggcgccgcctacaatctcggggctcctccgcgcacgcagttctcagggctgcgcagggacctgccgccctcggtgcacctgctcacgctggccagctggggccccgaaatggtgctgctgcgcttggagcaccagtttgccgtaggagaggattccggacgtaacctgagcgcccccgttaccttgaacttgagggacctgttctccaccttcaccatcacccgcctgcaggagaccacgctggtggccaaccagctccgcgaggcagcctccaggctcaagtggacaacaaacacaggccccacaccccaccaaactccgtaccagctggacccggccaacatcacgctggaacccatggaaatccgcactttcctggcctcagttcaatggaaggaggtggatggttaggtctgctgggatgggccctccaagcccaagcctcctgctccgggggcagaccagactctgactctcctcttggggctgctgccattaaaacgctactactaagactcaggtcgctctgtgactgagttgtgccactgaagatcctggtgtcgccatgggccgccgccccgcccgttgttaccggtattgtaagaacaagccgtacccaaagtctcgcttctgccgaggtgtccctgatgccaagattcgcatttttgacctggggcggaaaaaggcaaaagtggatgagtttccgctttgtggccacatggtgtcagatgaatatgagcagctgtcctctgaagccctggaggctgcccgaatttgtgccaataagtacatggtaaaaagttgtggcaaagatggcttccatatccgggtgcggctccaccccttccacgtcatccgcatcaacaagatgttgtcctgtgctggggctgacaggctccaaacaggcatgcgaggtgcctttggaaagccccagggcactgtggccagggttcacattggccaagttatcatgtccatccgcaccaagctgcagaacaaggagcatgtgattgaggccctgcgcagggccaagttcaagtttcctggccgccagaagatccacatctcaaagaagtggggcttcaccaagttcaatgctgatgaatttgaagacatggtggctgaaaagcggctcatcccagatggctgtggggtcaagtacatccccagtcgtggccctctggacaagtggcgggccctgcactcatgagggcttccaatgtgctgcccccctcttaatactcaccaataaattctacttcctgtccacctaaaaaaaaaa

SEQ ID NO: 372283 - DNA, 3885 bp, Homo sapiens
  misc_feature (310)..(310): n is a, c, g, or t
  misc_feature (3412)..(3412): n is a, c, g, or t
cttgggtcgctgtctactgctccttcatcagctttgccaactctcggagctcggaggacacgaagcaaatgatgagtagcttcatgtgagacttgcccggcattaagaggcattccgtcttggaattccggcattaagaggcattccgtcttcatagcccgtgagacgccagtgtcacctttagcccaaccagtgccctgagggtggcattttcctaccttcctgtaacgacccccgggattgcccagggctacagcctctctcccgtgagcctccagaccgcgccctggccccgccccccaccccgatnggcccggccgggtctgggggcggggcgtttgcggcctttccagggccggggaaccccaggaggaagctgctgagccatgggcgcctacgcgcgggcttcgggggtctgcgctcgcggctgcctggactcagcaggcccctggaccatgtcccgcgccctgcggccaccgctcccgcctctctgctttttccttttgttgctggcggctgccggtgctcgggccgggggatacgagacatgccccacagtgcagccgaacatgctgaacgtgcacctgctgcctcacacacatgatgacgtgggctggctcaaaaccgtggaccagtacttttatggaatcaagaatgacatccagcacgccggtgtgcagtacatcctggactcggtcatctctgccttgctggcagatcccacccgtcgcttcatttacgtggagattgccttcttctcccgttggtggcaccagcagacaaatgccacacaggaagtcgtgcgagaccttgtgcgccaggggcgcctggagttcgccaatggtggctgggtgatgaacgatgaggcagccacccactacggtgccatcgtggaccagatgacacttgggctgcgctttctggaggacacatttggcaatgatgggcgaccccgtgtggcctggcacattgaccccttcggccactctcgggagcaggcctcgctgtttgcgcagatgggcttcgacggcttcttctttgggcgccttgattatcaagataagtgggtacggatgcagaagctggagatggagcaggtgtggcgggccagcaccagcctgaagcccccgaccgcggacctcttcactggtgtgcttcccaatggttacaacccgccaaggaatctgtgctgggatgtgctgtgtgtcgatcagccgctggtggaggaccctcgcagccccgagtacaacgccaaggagctggtcgattacttcctaaatgtggccactgcccagggccggtattaccgcaccaaccacactgtgatgaccatgggctcggacttccaatatgagaatgccaacatgtggttcaagaaccttgacaagctcatccggctggtaaatgcgcagcaggcaaaaggaagcagtgtccatgttctctactccacccccgcttgttacctctgggagctgaacaaggccaacctcacctggtcagtgaaacatgacgacttcttcccttacgcggatggcccccaccagttctggaccggttacttttccagtcggccggccctcaaacgctacgagcgcctcagctacaacttcctgcaggtgtgcaaccagctggaggcgctggtgggcctggcggccaacgtgggaccctatggctccggagacagtgcacccctcaatgaggcgatggctgtgctccagcatcacgacgccgtcagcggcacctcccgccagcacgtggccaacgactacgcgcgccagcttgcggcaggctgggggccttgcgaggttcttctgagcaacgcgctggcgcggctcagaggcttcaaagatcacttcaccttttgccaacagctaaacatcagcatctgcccgctcagccagacggcggcgcgcttccaggtcatcgtttataatcccctggggcggaaggtgaattggatggtacggctgccggtcagcgaaggcgttttcgttgtgaaggaccccaatggcaggacagtgcccagcgatgtggtaatatttcccagctcagacagccaggcgcaccctccggagctgctgttctcagcctcactgcccgccctgggcttcagcacctattcagtagcccaggtgcctcgctggaagccccaggcccgcgcaccacagcccatccccagaagatcctggtcccctgctttaaccatcgaaaatgagcacatccgggcaacgtttgatcctgacacagggctgttgatggagattatgaacatgaatcagcaactcctgctgcctgttcgccagaccttcttctggtacaacgccagtataggtgacaacgaaagtgaccaggcctcaggtgcctacatcttcagacccaaccaacagaaaccgctgcctgtgagccgctgggctcagatccacctggtgaagacacccttggtgcaggaggtgcaccagaacttctcagcttggtgttcccaggtggttcgcctgtacccaggacagcggcacctggagctagagtggtcggtggggccgatacctgtgggcgacacctgggggaaggaggtcatcagccgttttgacacaccgctggagacaaagggacgcttctacacagacagcaatggccgggagatcctggagaggaggcgggattatcgacccacctggaaactgaaccagacggagcccgtggcaggaaactactatccagtcaacacccggatttacatcacggatggaaacatgcagctgactgtgctgactgaccgctcccaggggggcagcagcctgagagatggctcgctggagctcatggtgcaccgaaggctgctgaaggacgatggacgcggagtatcggagccactaatggagaacgggtcgggggcgtgggtgcgagggcgccacctggtgctgctggacacagcccaggctgcagccgccggacaccggctcctggcggagcaggaggtcctggcccctcaggtggtgctggccccgggtggcggcgccgcctacaatctcggggctcctccgcgcacgcagttctcagggctgcgcagggacctgccgccctcggtgcacctgctcacgctggccagctggggccccgaaatggtgctgctgcgcttggagcaccagtttgccgtaggagaggattccggacgtaacctgagcgcccccgttaccttgaacttgagggacctgttctccaccttcaccatcacccgcctgcaggagaccacgctggtggccaaccagctccgcgaggcagcctccaggctcaagtggacaacaaacacaggccccacaccccaccaaactccgtaccagctggacccggccaacatcacgctggaacccatggaaatccgcactttcctggcctcagttcaatggaaggagtngaaagactttgactctctttggggctgtggcattaaaacgctctactaggacccgagaaaaaaaataatcttaacgaaatgggctaatggccaattggcctataggggccttaaaataacggccgccttttacagggggcttggaaaaacgtgggtcccactaatgcttgtgaacaaccctttgccacgtgggaaatctaaagcgccctcacgggctttcaaaacgtgcgcccctaagggatgggtactcggcctaaatttgtaaaaccgaaaatttgtaacacctttttttaacaagcgcagtgaacactctctaaacaaaacacccccccgcggttgtgtgtctcttgcaaagtctctttaagaaggggtccccccggggcaactcttcagggggctcccttgacaactccccacccttttgttgcgggcgtaccttcttaggcgccgcctttctgctgtaggccgggcct

SEQ ID NO: 372284 - DNA, 2318 bp, Homo sapiens
  misc_feature (22)..(22): n is a, c, g, or t
  misc_feature (41)..(41): n is a, c, g, or t
caagcttggtaacgcatggtgnaaggaccccaatggcaggncagtgcccagcgatgtggtaatatttcccagctcagacagccaggcgcaccctccggagctgctgttctcagcctcactgcccgccctgggcttcagcacctattcagtagcccaggtgcctcgctggaagccccaggcccgcgcaccacagcccatccccagaagatcctggtcccctgctttaaccatcgaaaatgagcacatccgggcaacgtttgatcctgacacagggctgttgatggagattatgaacatgaatcagcaactcctgctgcctgttcgccagaccttcttctggtacaacgccagtataggtgacaacgaaagtgaccaggcctcaggtgcctacatcttcagacccaaccaacagaaaccgctgcctgtgagccgctgggctcagatccacctggtgaagacacccttggtgcaggaggtgcaccagaacttctcagcttggtgttcccaggtggttcgcctgtacccaggacagcggcacctggagctagagtggtcggtggggccgatacctgtgggcgacacctgggggaaggaggtcatcagccgttttgacacaccgctggagacaaagggacgcttctacacagacagcaatggccgggagatcctggagaggaggcgggattatcgacccacctggaaactgaaccagacggagcccgtggcaggaaactactatccagtcaacacccggatttacatcacggatggaaacatgcagctgactgtgctgactgaccgctcccaggggggcagcagcctgagagatggctcgctggagctcatggtgcaccgaaggctgctgaaggacgatggacgcggagtatcggagccactaatggagaacgggtcgggggcgtgggtgcgagggcgccacctggtgctgctggacacagcccaggctgcagccgccggacaccggctcctggcggagcaggaggtcctggcccctcaggtggtgctggccccgggtggcggcgccgcctacaatctcggggctcctccgcgcacgcagttctcagggctgcgcagggacctgccgccctcggtgcacctgctcacgctggccagctggggccccgaaatggtgctgctgcgcttggagcaccagtttgccgtaggagaggattccggacgtaacctgagcgcccccgttaccttgaacttgagggacctgttctccaccttcaccatcacccgcctgcaggagaccacgctggtggccaaccagctccgcgaggcagcctccaggctcaagtggacaacaaacacaggccccacaccccaccaaactccgtaccagctggacccggccaacatcacgctggaacccatggaaatccgcactttcctggcctcagttcaatggaaggaggtggatggttaggtctgctgggatgggccctccaagcccaagcctcctgctccgggggcagaccagactctgactctcctcttggggctgctgccattaaaacgctactactaagactcaggtcgctctgtgactgagttgtgccactgaagatcctggtgtcgccatgggccgccgccccgcccgttgttaccggtattgtaagaacaagccgtacccaaagtctcgcttctgccgaggtgtccctgatgccaagattcgcatttttgacctggggcggaaaaaggcaaaagtggatgagtttccgctttgtggccacatggtgtcagatgaatatgagcagctgtcctctgaagccctggaggctgcccgaatttgtgccaataagtacatggtaaaaagttgtggcaaagatggcttccatatccgggtgcggctccaccccttccacgtcatccgcatcaacaagatgttgtcctgtgctggggctgacaggctccaaacaggcatgcgaggtgcctttggaaagccccagggcactgtggccagggttcacattggccaagttatcatgtccatccgcaccaagctgcagaacaaggagcatgtgattgaggccctgcgcagggccaagttcaagtttcctggccgccagaagatccacatctcaaagaagtggggcttcaccaagttcaatgctgatgaatttgaagacatggtggctgaaaagcggctcatcccagatggctgtggggtcaagtacatccccagtcgtggccctctggacaagtggcgggccctgcactcatgagggcttccaatgtgctgcccccctcttaatactcaccaataaattctacttcctgtccacctaaaaaaaaaa

SEQ ID NO: 372285 - DNA, 2604 bp, Homo sapiens
  misc_feature (310)..(310): n is a, c, g, or t
cttgggtcgctgtctactgctccttcatcagctttgccaactctcggagctcggaggacacgaagcaaatgatgagtagcttcatgtgagacttgcccggcattaagaggcattccgtcttggaattccggcattaagaggcattccgtcttcatagcccgtgagacgccagtgtcacctttagcccaaccagtgccctgagggtggcattttcctaccttcctgtaacgacccccgggattgcccagggctacagcctctctcccgtgagcctccagaccgcgccctggccccgccccccaccccgatnggcccggccgggtctgggggcggggcgtttgcggcctttccagggccggggaaccccaggaggaagctgctgagccatgggcgcctacgcgcgggcttcgggggtctgcgctcgcggctgcctggactcagcaggcccctggaccatgtcccgcgccctgcggccaccgctcccgcctctctgctttttccttttgttgctggcggctgccggtgctcgggccgggggatacgagacatgccccacagtgcagccgaacatgctgaacgtgcacctgctgcctcacacacatgatgacgtgggctggctcaaaaccgtggaccagtacttttatggaatcaagaatgacatccagcacgccggtgtgcagtacatcctggactcggtcatctctgccttgctggcagatcccacccgtcgcttcatttacgtggagattgccttcttctcccgttggtggcaccagcagacaaatgccacacaggaagtcgtgcgagaccttgtgcgccaggggcgcctggagttcgccaatggtggctgggtgatgaacgatgaggcagccacccactacggtgccatcgtggaccagatgacacttgggctgcgctttctggaggacacatttggcaatgatgggcgaccccgtgtggcctggcacattgaccccttcggccactctcgggagcaggcctcgctgtttgcgcagatgggcttcgacggcttcttctttgggcgccttgattatcaagataagtgggtacggatgcagaagctggagatggagcaggtgtggcgggccagcaccagcctgaagcccccgaccgcggacctcttcactggtgtgcttcccaatggttacaacccgccaaggaatctgtgctgggatgtgctgtgtgtcgatcagccgctggtggaggaccctcgcagccccgagtacaacgccaaggagctggtcgattacttcctaaatgtggccactgcccagggccggtattaccgcaccaaccacactgtgatgaccatgggctcggacttccaatatgagaatgccaacatgtggttcaagaaccttgacaagctcatccggctggtaaatgcgcagcaggcaaaaggaagcagtgtccatgttctctactccacccccgcttgttacctctgggagctgaacaaggccaacctcacctggtcagtgaaacatgacgacttcttcccttacgcggatggcccccaccagttctggaccggttacttttccagtcggccggccctcaaacgctacgagcgcctcagctacaacttcctgcaggtgtgcaaccagctggaggcgctggtgggcctggcggccaacgtgggaccctatggctccggagacagtgcacccctcaatgaggcgatggctgtgctccagcatcacgacgccgtcagcggcacctcccgccagcacgtggccaacgactacgcgcgccagcttgcggcaggctgggggccttgcgaggttcttctgagcaacgcgctggcgcggctcagaggcttcaaagatcacttcaccttttgccaacagctaaacatcagcatctgcccgctcagccagacggcggcgcgcttccaggtcatcgtttataatcccctggggcggaaggtgaattggatggtacggctgccggtcagcgaaggcgttttcgttgtgaaggaccccaatggcaggacagtgcccagcgatgtggtaatatttcccagctcagacagccaggcgcaccctccggagctgctgttctcagcctcactgcccgccctgggcttcagcacctattcagtagcccaggtgcctcgctggaagccccaggcccgcgcaccacagcccatccccagaagatcctggtcccctgctttaaccatcgaaaatgagcacatccgggcaacgtttgatcctgacacagggctgttgatggagattatgaacatgaatcagcaactcctgctgcctgttcgccagaccttcttctggtacaacgccagtataggtgacaacgaaagtgaccaggcccctccaggctcaagtggacaacaaacacaggccccacaccccaccaaactccgtaccagctggacccggccaacatcacgctggaacccatggaaatccgcactttcctggcctcagttcaatggaaggaggtggatggttaggtctgctgggatgggccctccaagcccaagcctcctgctccgggggcagaccagactctgactctcctcttggggctgctgccattaaaacgctactactaagactc

SEQ ID NO: 372286 - DNA, 2818 bp, Homo sapiens
  misc_feature (310)..(310): n is a, c, g, or t
cttgggtcgctgtctactgctccttcatcagctttgccaactctcggagctcggaggacacgaagcaaatgatgagtagcttcatgtgagacttgcccggcattaagaggcattccgtcttggaattccggcattaagaggcattccgtcttcatagcccgtgagacgccagtgtcacctttagcccaaccagtgccctgagggtggcattttcctaccttcctgtaacgacccccgggattgcccagggctacagcctctctcccgtgagcctccagaccgcgccctggccccgccccccaccccgatnggcccggccgggtctgggggcggggcgtttgcggcctttccagggccggggaaccccaggaggaagctgctgagccatgggcgcctacgcgcgggcttcgggggtctgcgctcgcggctgcctggactcagcaggcccctggaccatgtcccgcgccctgcggccaccgctcccgcctctctgctttttccttttgttgctggcggctgccggtgctcgggccgggggatacgagacatgccccacagtgcagccgaacatgctgaacgtgcacctgctgcctcacacacatgatgacgtgggctggctcaaaaccgtggaccagtacttttatggaatcaagaatgacatccagcacgccggtgtgcagtacatcctggactcggtcatctctgccttgctggcagatcccacccgtcgcttcatttacgtggagattgccttcttctcccgttggtggcaccagcagacaaatgccacacaggaagtcgtgcgagaccttgtgcgccaggggcgcctggagttcgccaatggtggctgggtgatgaacgatgaggcagccacccactacggtgccatcgtggaccagatgacacttgggctgcgctttctggaggacacatttggcaatgatgggcgaccccgtgtggcctggcacattgaccccttcggccactctcgggagcaggcctcgctgtttgcgcagatgggcttcgacggcttcttctttgggcgccttgattatcaagataagtgggtacggatgcagaagctggagatggagcaggtgtggcgggccagcaccagcctgaagcccccgaccgcggacctcttcactggtgtgcttcccaatggttacaacccgccaaggaatctgtgctgggatgtgctgtgtgtcgatcagccgctggtggaggaccctcgcagccccgagtacaacgccaaggagctggtcgattacttcctaaatgtggccactgcccagggccggtattaccgcaccaaccacactgtgatgaccatgggctcggacttccaatatgagaatgccaacatgtggttcaagaaccttgacaagctcatccggctggtaaatgcgcagcaggcaaaaggaagcagtgtccatgttctctactccacccccgcttgttacctctgggagctgaacaaggccaacctcacctggtcagtgaaacatgacgacttcttcccttacgcggatggcccccaccagttctggaccggttacttttccagtcggccggccctcaaacgctacgagcgcctcagctacaacttcctgcaggtgtgcaaccagctggaggcgctggtgggcctggcggccaacgtgggaccctatggctccggagacagtgcacccctcaatgaggcgatggctgtgctccagcatcacgacgccgtcagcggcacctcccgccagcacgtggccaacgactacgcgcgccagcttgcggcaggctgggggccttgcgaggttcttctgagcaacgcgctggcgcggctcagaggcttcaaagatcacttcaccttttgccaacagctaaacatcagcatctgcccgctcagccagacggcggcgcgcttccaggtcatcgtttataatcccctggggcggaaggtgaattggatggtacggctgccggtcagcgaaggcgttttcgttgtgaaggaccccaatggcaggacagtgcccagcgatgtggtaatatttcccagctcagacagccaggcgcaccctccggagctgctgttctcagcctcactgcccgccctgggcttcagcacctattcagtagcccaggtgcctcgctggaagccccaggcccgcgcaccacagcccatccccagaagatcctggtcccctgctttaaccatcgaaaatgagcacatccgggcaacgtttgatcctgacacagggctgttgatggagattatgaacatgaatcagcaactcctgctgcctgttcgccagaccttcttctggtacaacgccagtataggtgacaacgaaagtgaccaggcctcaggtgcctacatcttcagacccaaccaacagaaaccgctgcctgtgagccgctgggctcagatccacctggtgaagacacccttggtgcaggaggtgcaccagaacttctcagcttggtgttcccaggtggttcgcctgtacccaggacagcggcacctggagctagagtggtcggtggggccgatacctgtgggcgacacctgggggaaggaggtcatcagccgttttgacacaccgctggagacaaagggacgcttctacacagacagcaatggccgggagatcctggagaggaggcgggattatcgacccacctggaaactgaaccagacgggaagcgcacgatggcgcgtccctcacactttctctatctcattccctttccattcagaatctcaagagaaagctggttctagaaagttctgtgttaccttctctggaatgttttctgactcccataa

SEQ ID NO: 372287 - DNA, 1764 bp, Homo sapiens
  misc_feature (310)..(310): n is a, c, g, or t
  misc_feature (1763)..(1763): n is a, c, g, or t
cttgggtcgctgtctactgctccttcatcagctttgccaactctcggagctcggaggacacgaagcaaatgatgagtagcttcatgtgagacttgcccggcattaagaggcattccgtcttggaattccggcattaagaggcattccgtcttcatagcccgtgagacgccagtgtcacctttagcccaaccagtgccctgagggtggcattttcctaccttcctgtaacgacccccgggattgcccagggctacagcctctctcccgtgagcctccagaccgcgccctggccccgccccccaccccgatnggcccggccgggtctgggggcggggcgtttgcggcctttccagggccggggaaccccaggaggaagctgctgagccatgggcgcctacgcgcgggcttcgggggtctgcgctcgcggctgcctggactcagcaggcccctggaccatgtcccgcgccctgcggccaccgctcccgcctctctgctttttccttttgttgctggcggctgccggtgctcgggccgggggatacgagacatgccccacagtgcagccgaacatgctgaacgtgcacctgctgcctcacacacatgatgacgtgggctggctcaaaaccgtggaccagtacttttatggaatcaagaatgacatccagcacgccggtgtgcagtacatcctggactcggtcatctctgccttgctggcagatcccacccgtcgcttcatttacgtggagattgccttcttctcccgttggtggcaccagcagacaaatgccacacaggaagtcgtgcgagaccttgtgcgccaggggcgcctggagttcgccaatggtggctgggtgatgaacgatgaggcagccacccactacggtgccatcgtggaccagatgacacttgggctgcgctttctggaggacacatttggcaatgatgggcgaccccgtgtggcctggcacattgaccccttcggccactctcgggagcaggcctcgctgtttgcgcagatgggcttcgacggcttcttctttgggcgccttgattatcaagataagtgggtacggatgcagaagctggagatggagcaggtgtggcgggccagcaccagcctgaagcccccgaccgcggacctcttcactggtgtgcttcccaatggttacaacccgccaaggaatctgtgctgggatgtgctgtgtgtcgatcagccgctggtggaggaccctcgcagccccgagtacaacgccaaggagctggtcgattacttcctaaatgtggccactgcccagactcactccagcctgagcaacagaatgaaactctatctcaaacaaaaacaaaaacaaaccccccaaaatttccaaatctggaaaaggaaaaatgaatatgaagatccatgaagccccaaaaaccccaaatagggttaaggtatagagaacgtcactgagacacattgtaataaaattctcaaaaatcagagataaaaagaatttgaaagcagcaagagaaaagcaactcatcatatacaacagaacctctattcaagtattagagattcctcagcagaaacattccaggccaggagaaagtgggatgatgtattccaagtgccaaaagagaacaaaaacgactgtcaatcaagagtactataacagcaaagctatcctttagaaataaaaataagtaaataaaaactttccctgataaacaaaaactgagggagttcctcaccacttgacctgcatgacaagaaatgnt

SEQ ID NO: 372288 - DNA, 1274 bp, Homo sapiens
tcttttaaagattgttctcatacaagatttattccccagcacacccctcccctcctcagttcacagtggagactatggagattcagggcaggatccctcaggtacaagaaacaccttccgaagattttgctctccttccttccctccctcttgccaactcccaaggcctgaagcgcacaatcagagctctgaacttgagaggtgtcaaaagtctgtttgagaagcctaaagtggggagatgccattacccctgaccaccccactatgagtgactatgagacacctaactcttccctcttctgtcaaccattttcactccctggcctctgtaccttctccatcaaccaagagcaaacatgtcagcacacccccacctgcagtacatgaaaacaggctctgtccaacatccctcacccaagtacaggggtgttgggggagtggcccctgaggatcagcaaagggttaatgcagaaggaaagaggacagaagcgtttggcttgagctctgcttggggaggcagaggctatagactggcacaggtttagaatcaagtaccatgtttaggtttctgtctcacatcacatgatttcactaggggctgcagaacagatacccctcagaggggtctctgctgattacagccacattcttactattggctcatccttaaaggaggccccaccaagttgggaagcagttgaaaataaaagctgtaaaggagctgaacaggaagtaagaataggtggtgcaagagattatggcccctgggatgaatgacatggagccatttgtaaagtgctactgtatcatcccccatgaattattgcttctccaaaggaggagcagaggaaggaacaggaacatagaaatgagtatggtattgctttgctcactgctgaggctgatggccagatggacccaggggttatcagaaaccgaagattaactacacagctccagaagactcagacctcaaaatacagaggtgctcactaatcctcccagccagctgatccccctgggccaaggtaatgtagaagaggcccatccccacatcatattcacattttttaaatttcacaagcaatactttggaccactggggttcaggccccaagaaatggtgggctagatgagagggagcaggcctgttctgcaaaaccaaaggacaagtttgctttaaaaaaaaaaaaaaatcacgctgggcacagtggctcacacctgtaatcccaacactttgggtggctgaggcgggctgatcatttgcagtcagg

SEQ ID NO: 372289 - DNA, 1032 bp, Homo sapiens
cactcatagtggggtggtcaggggtaatggcatctccccactttagtcttccctcttctgtcaaccattttcactccctggcctctgtaccttctccatcaaccaagagcaaacatgtcagcacacccccacctgcagtacatgaaaacaggctctgtccaacatccctcacccaagtacaggggtgttgggggagtggcccctgaggatcagcaaagggttaatgcagaaggaaagaggacagaagcgtttggcttgagctctgcttggggaggcagaggctatagactggcacaggtttagaatcaagtaccatgtttaggtttctgtctcacatcacatgatttcactaggggctgcagaacagatacccctcagaggggtctctgctgattacagccacattcttactattggctcatccttaaaggaggccccaccaagttgggaagcagttgaaaataaaagctgtaaaggagctgaacaggaagtaagaataggtggtgcaagagattatggcccctgggatgaatgacatggagccatttgtaaagtgctactgtatcatcccccatgaattattgcttctccaaaggaggagcagaggaaggaacaggaacatagaaatgagtatggtattgctttgctcactgctgaggctgatggccagatggacccaggggttatcagaaaccgaagattaactacacagctccagaagactcagacctcaaaatacagaggtgctcactaatcctcccagccagctgatccccctgggccaaggtaatgtagaagaggcccatccccacatcatattcacattttttaaatttcacaagcaatactttggaccactggggttcaggccccaagaaatggtgggctagatgagagggagcaggcctgttctgcaaaaccaaaggacaagtttgctttaaaaaaaaaaaaaaatcacgctgggcacagtggctcacacctgtaatcccaacactttgggtggctgaggcgggctgatcatttgcagtcagg

SEQ ID NO: 372290 - DNA, 1327 bp, Homo sapiens
tcttttaaagattgttctcatacaagatttattccccagcacacccctcccctcctcagttcacagtggagactatggagattcagggcaggatccctcaggtacaagaaacaccttccgaagattttgctctccttccttccctccctcttgccaactcccaaggcctgaagcgcacactcatgcaaacacacgaaatccccctccttccccacacctcctgtctttccacatcagagctctgaacttgagaggtgtcaaaagtctgtttgagaagcctaaagtggggagatgccattacccctgaccaccccactatgagtgactatgagacacctaactcttccctcttctgtcaaccattttcactccctggcctctgtaccttctccatcaaccaagagcaaacatgtcagcacacccccacctgcagtacatgaaaacaggctctgtccaacatccctcacccaagtacaggggtgttgggggagtggcccctgaggatcagcaaagggttaatgcagaaggaaagaggacagaagcgtttggcttgagctctgcttggggaggcagaggctatagactggcacaggtttagaatcaagtaccatgtttaggtttctgtctcacatcacatgatttcactaggggctgcagaacagatacccctcagaggggtctctgctgattacagccacattcttactattggctcatccttaaaggaggccccaccaagttgggaagcagttgaaaataaaagctgtaaaggagctgaacaggaagtaagaataggtggtgcaagagattatggcccctgggatgaatgacatggagccatttgtaaagtgctactgtatcatcccccatgaattattgcttctccaaaggaggagcagaggaaggaacaggaacatagaaatgagtatggtattgctttgctcactgctgaggctgatggccagatggacccaggggttatcagaaaccgaagattaactacacagctccagaagactcagacctcaaaatacagaggtgctcactaatcctcccagccagctgatccccctgggccaaggtaatgtagaagaggcccatccccacatcatattcacattttttaaatttcacaagcaatactttggaccactggggttcaggccccaagaaatggtgggctagatgagagggagcaggcctgttctgcaaaaccaaaggacaagtttgctttaaaaaaaaaaaaaaatcacgctgggcacagtggctcacacctgtaatcccaacactttgggtggctgaggcgggctgatcatttgcagtcagg

SEQ ID NO: 372291 - DNA, 845 bp, Homo sapiens
agcgggtgatagccgtcaaaggcagcaaatagactgaatgaaagatgagcttctgcctttatatccttctctcctgctacccaactcattgtggtgaaggaaaaagaaaacgcgggtggagactgcactatatgcttaggactgaaatgcaactgcagaagcaacatgtgaccttttagagatgcttgtgggactgcataaagtgaagagggaaactggaaaaaaacaatgaacatttatcaccatccagccactgtagataaatttgattggctgtctccctgccttcccttcacacccagtaccttccctgcctgaaatcctcattgagggcaagaactttatccccaggatctaaaccagtgctggacaatagatgctcatcccttccataggaaacagggaatgtttgtttctgtcttctggtaggagaaggattggtcccacccccagctccagggatggatcttgattgtttaagcccagtcagtgattctaacccatggaccaagaccctgccttggagattggggaacaggtgttggaagggctctattttggcaaagaatggattatttatgtgagcatatttccgcaaagctaatcccgaactcctggcctcaaatgatcttcctaccttggcttcccaaagtgctgggattacagacgtgagctgctgtgcctggccaagacttaattttgaatgacattgggactattgccaaaaatcaaatccatcttcatgttgtccacttctcagccttatattgaataggggaaacctggttcctgaaacaaactgaaaaagtggcttaaaaatgggccttggggcctcattgagaaac

SEQ ID NO: 372292 - DNA, 9360 bp, Homo sapiens
  misc_feature (5847)..(5847): n is a, c, g, or t
ccggagtcggttggtgcagctgcgtccccgccgctcagcagtccgcggctccggcgtcgccgccgccgccgcctctgcggggcctgcgccggccgcccgcccggccgcggggagggaggcccgcagcgcgggaagagcggcccggtcgcgggcgccgccaccgccgccgctgccaggactgaaatgcaactgcagaagcaacatgtgaccttttagagatgcttgtgggactgcataaagtgaagagggaaactggaaaaaaacaatgaaattgaatagggaaaacctgctttctgcaaacaactgaaaaagctgcatttagaaactgtttctttggccctcatcgagaagctggaacttgtattgttaggccccttatgggacaagctctcaactgctgatcacccagtgattgtcaccatggccagcaagaggaaatccaccacaccatgcatgatcccagtgaagactgtggtgttgcaagatgccagcatggaggcccagcccgctgagaccttgcctgaaggaccccagcaggatctgcccccagaagcatctgctgccagcagtgaggcagcacagaaccccagcagtactgatggctctacactggccaatgggcatcggagcactttagatggctatttatattcctgtaaatactgcgatttcagatcccatgacatgacccaatttgtgggacatatgaactcagagcacacagactttaataaagacccaacctttgtatgcagtgggtgcagttttctggcaaaaacccctgaggggctttccttgcacaatgccacatgtcactccggggaagccagctttgtgtggaacgtggccaagccagacaatcatgtggttgtggagcagagcatccctgagagcaccagcactcctgacctagcgggtgagcccagtgctgaaggggctgatggacaggcagaaatcatcattaccaaaactccaatcatgaagataatgaaaggcaaagctgaagccaaaaaaattcatacactcaaggagaatgtccctagccagcctgtgggtgaggccttaccaaagctgtcgactggagaaatggaggtgagagagggggaccattccttcatcaatggggcagttccagtcagccaggcatctgccagctctgcaaaaaacccccatgccgccaacgggcccctgataggaacagtgccagttttgccagctggcatagcacagttcctctccctccagcagcagcccccagtgcatgcccaacaccatgtccaccagccactgcccacggccaaggcccttcccaaagtgatgatccccctgagcagcattccaacgtacagtgcagccatggactctaacagcttcctgaagaactccttccacaagttcccctaccccaccaaagccgagctctgctatttgactgtggtgaccaagtatccagaagaacagctcaagatctggttcacagcccaaaggctgaagcaggggatcagctggtcccctgaggagattgaggatgcccggaaaaagatgttcaatacagtcatccagtctgtgcctcagcccacaattacggttctaaataccccactcgtcgccagtgctggcaatgtccagcatctcatccaggccgctcttccaggtcacgttgtggggcagccagagggtacaggagggggacttctggtcactcagccattgatggccaatgggttgcaagcaacaagttcccctctccccctcacggtgacatccgtccccaagcagccaggtgtggcacccattaacactgtgtgttcaaatacaacgtcagctgtgaaggtggtcaatgcggcccagtcgctcctcacggcctgccccagcataacctcccaagccttccttgatgctagcatctacaaaaataagaaatctcatgaacagctgtcagctctgaaagggagcttctgtcggaaccagttcccagggcagagcgaagttgaacatctcacaaaagtgacgggcctcagtaccagagaggtgcggaaatggttcagtgatcgtagataccactgccggaacttgaagggctccagagcgatgatacctggagatcacagttccatcatcattgactctgtgccagaggtgtccttctccccatcgtccaaggtccctgaggtaacctgcattccgacaacagccacactagcaacccacccttctgccaaacgacaatcttggcaccagactcctgacttcacaccaaccaaatacaaggagagagcccctgagcagctcagagccctggagagcagttttgcacaaaaccctcttcctcttgatgaggaactggaccgcctgagaagtgaaaccaaaatgacccgacgagaaattgatagctggttttcagagagacggaaaaaagtgaatgctgaggagaccaagaaggctgaggagaatgcctctcaggaggaagaggaggctgctgaggatgagggtggagaagaggatttggccagtgagctaagggtctctggtgaaaatggctctctggaaatgcccagcagccatatcttggcagagcgcaaagtcagccccattaaaatcaacctgaagaacctgagggtcactgaagccaatggcaggaacgagattccagggctgggtgcctgtgaccctgaggatgatgagtcaaacaaactggcagagcagctcccaggcaaagtgagctgcaaaaagactgcccagcagcggcacttgctgcggcagctctttgtccagacacagtggccaagcaaccaggactatgactccatcatggcccagacgggtctgccacggccagaggtggtgcgctggtttggagatagcaggtacgcactgaagaacggccaactcaaatggtacgaagactataagcgaggcaacttcccaccagggctactggtcattgcccctggcaaccgggagctcctgcaggactattacatgacacacaagatgctgtatgaagaggacctgcagaacctctgtgacaagacccagatgagctcccagcaggtcaagcagtggtttgctgagaaaatgggggaggagaccagagccgtggcagacacaggcagtgaggaccagggccctggtactggtgagctcacagcagttcacaaagggatgggtgacacctattcagaggtgtctgagaacagtgagtcgtgggagccccgtgtccctgaggccagctcagagccctttgacacatcgagtccccaggctggacgtcagctcgaaacagactgaatttgatctgattaatgtgaaggactggccagtctgggaaaccgcctgccacgtggaagagccaaacccgactctctgctgccacatgccgttcccatgcccggctgctgggcacctgggagagcttccagaatcctcgcagacagcccagagcctgccgctaccctcggcctgcccaccaccaagcaagcagcaagcaagatggggttctcatcagttcttcctcccacaatgtaggacctttcctttaccttccaatggataaaatagttcagagttcatagtcatattcatagacacagaatcaagcttttaacatatacatccacctctatatgttaaataaaacatcagattatcaacactgtcattacgtagaaactttggttagccaagcagtgcattgtcagttacgtcatctctaaaaatgacctgtgtctgttctctggggattgctgggtcacaggtgcccctcaccttccacagtcaggcagggaagttataggcacaaagctacgtctggaacccctttgtgccccctttgtgttcctcaaggaagcagtacctttgaagagatctctgctgcattaagtgatgaccggctacgtttcatgtcaggcttgctttgccttgtgggctactcagtgcagaacctgctgtaaccctcagttcaaaaaatggactggcaatgtgattagcgttggatgctttaccattctctttagttgttaccgtaattctgctttttcatgggagtttgaatcatggaccataacttttcagttatcagatcaactaaagaaacatttgttgttaagcctaatgtgctgacctatgtgcctgcattttttttttaatctagacatgtttggagtgagagaaagatggaaaaaagacatggggtagggacgtaagtggaaatctatagccacagcctgaagctttgaccactgcggttttcagagccctttctccacactcatttcagagcctcctatggtttgggaaggaataacacactggcccattagtaagggtgaaggctggagggatttgttgacttcttggaattatcagaggtagggtggtctttagcacaaagacttgcatgcagagatccctggcagaacacccagagtgcccgtggctcccaccccagggtctggccggtgtgctggatgcatgcccaagggtgctgggcatcactggtccttgtgaggatgcttttaaagttttatatttatgtccccaaacttggaaacaagaactctactttagcctaaccctcatgtccttttttgaattgagaaaattacaggaaatggtgcctttgaaaattagaaaacttgcttacagagctgttctaaatggtaaatcctcaatttccccaagaccggttgctctgagagtagctggtaaagaggggcgaactaaagacctgtccacctgtagctccgctcatttcttagaaaccacctgcttcccagagtgccaagccacaagtaccaggcttcgtgggcacagacacctcctgggctgggcagagtgacagtgctagaagaccccagagagagggcaagggctttgggcaagaagcactggtggtgttttagggaccgtccttctcccctacccagggaactggacctggcagggcaccgtgctcatgtggctccaaggacaagcatggcggtggccccttctgccttccaggagaggtcttgcttttgaaaccaaaatcatgttcttctaaagtgtcatcttctgccctccctgtcccaatagggaccacatcttatttgtctcaaacagggacttgtgagtacttggcaagttttgcagcctatttttgtattcttaatttggggagtaaagatgtttggtctcaaaaacctttgaggaattgccaagaatggcgagtgattgctttccttcagagaacagacacttggaatttctccttttagtgtttatatacgtgcagattaatttatatatatatatatacacacacacatatacagtataaatactcatttgattctcgtaaaacgcgcatctggcgtgtgcagttgagaaacttggtggcacatgggtgttgggggagtagcctgtgttggagggacaccagtgcactaggcagctggggcggcccaggctgaagccatctccgggtgtctgagaaaccacccagtgcctcacctccagatcctgctggcatcacctccagagccctgcatgcactggctgaagagttggtctgtggagaggattttcttggttacttgtattcacggttaatttacaacccaaacagcaaaacacagttggtggacaagttcatgcaggacctacagtgacccagccatgggcactagctcatctttcaggtggaaaagtacagtgctgcctgccctggtatgtttttcttatagatgttagccctgcccaacagccagggctacactacaaaaggcaagaatgcccatgtaaggagcccagcagtctggacagatccttcttcctctgctgttggatgagagtgagtgagtatgntctggaccttatccttgaaagatgatcaaaagcgatgatgagggaggcagtcatcacgcaggtgcttaaagggacattgtaggaggtactcaagggtttgggggcaaaaccctgaatccagccagtcgtgcacagagacacacccacactagcccagtggcagtgggggatgtgggatggcagcagccaggtatgtagccctgtcacaggacagctcactgtggttttgcacactgcctaagggttaaattgtgttgttgccttcagtagaaggcatttgtgggctgcagagttgagagttgggtgaggttagtctctcctgaagaaaaagcctataaaaagtggctaatcttatcccttttctctgtatgcagttggactcgtcagagatagtaaaatcatcttttagtgtttttttgttgctgatgtcttgtacccatttgttttttacatggggttgtagatcgagttctcaaaggtgaaaccagatgatcattctgataaaggaaatttaaatttgatacatatgctttgtatattttgattacttgttttcgtttttgactataaaggagctcttttttcttgctcagagtttacctgggagatttcaccagtttgactcaccatttgcagatgtgcttttgtattaaatttaaattttcacatatcacatccattctcaaggtagttatatgctggagaagaaaaatcctctagacacatgaaggcccacatagtcaagtcttccagggcaaagccagcagcccacccaggtcaggtagccagcagggctcagttcccctcactccagacacggaccctcctcttcagggtctcttgacccagcttccttctctccttttacctgagagcacagacctctctcagccagcctgcccagaccacggggggctactcccatgtagtttggggagcacttgatctcagaaaagctccattgtctgagcaaatgggcagttgtggagctcaagcctttctcctgtgctcaagtcccttccccaagcaaggcttcaacctcatctacccaccatgtagttttctctggccatttaagtggggcggcagggacatggttgggccatgccacaccagggctggtgaggcaaccagttttgattttgacagagtggctggaggaaaagtggcaatcaaggtgctgcttggtttgctctgagtgcaaatggaaccaacaggtttctgctgcaatctgtgtgttcccagtgccaggtcacaccaggaggggtggggcagggctaaccaagtggtctctgaactcaccgagcgtctgcacttggttgtgaagttaatgggagtacagagagcgtctggccttggagaggggttgagagcctcctttttggttcttcattcctgagctcttgcctgcccacaaatctgacctctttgaatggggacgcagtccttcaacagagaagtttctatggcaaagaagtttctatttagctctagatccagcagagtcatccattctaactgccctgaagtctagagcaggggagggaacccagaggctggggatgagactaggcagaccctggttaccatatggacaaggacaggggaaagcacccccttcctcaatttctgaaagttctatctttgggttcgcaggactttgaggatgataaagaacatataggtactagcttgttgttgctggtccaaagcttccacagccctgagaatttggctttcgtggctgctctggcagctgagcgaagggaggaaggcagccgctctggtggggactctaggcaccttccctgctgtccacttggataggcggtgagccccagggtactgagaggagcctgagcatttacctgccattagtgcctcttccttcaggagactggcttgaaacgtgtgttcatgtgcgcgtgcacacacacacatgagcacctgtatgtgttaatgaatagtttttcttggttaatgctttttaacttctgttcctttccgtaagtggatgattcaaaattaacgtgacttggctgggcgcagtggctcacacctgtaatcccagcactttgggaggccaagggaggcggatcacctgaggtcaggagttcgagaccagcctgatcggcatggtgaaaccccgtttctactaaaaatacaaaaattagccgggcgtggtggtgcgcgcctgtaatcccagctactcaggaggctgaggaaggagaatcacttgaacccgggaggtggaggttgcagtgagctgagatcgtgccactgcactccagcctgggcgacagagcgaaactccgtctcaaaaaaaaaaaaaaaacttaatgtgactggagttaaaagtgaaatgtcaggttgtttagtcactgaatagagagctacaagtgcttggtctttcccaagaatcaaacctgagtagaaatacatttaaaagaaaaatctacatggtacctatgaatcctgtaatttgtttagggagatcttgtcactcatccctggttcctgcccatactgtttggtctcgttcttgcagtttgcttggaacagggccagagccccacatgagattgtcagcaggagtgaggagcgccagtccctactcctcagcagggacccagcacagcaatccggttgttctcggttagactgggtcggggccaggggagaagcagtcacccctgtgtagagggttcccgctgtgcttctgagcagttgctttgttcagaagtgttaggagggtcagattgtgccataattgttattaaagagaaaacacgcccaccttcctttctcccctgctggccattgttcattgagttttactgagggcagcctttgtggaagtcagggaggttgccaaaggcctgtagatgcctcctgacaaggtcttgattcctggttttctagcacccatttgcattttggtcttcagcacaaagccttgttccctgtggccggacttctgggcaataagactggggagtgactgttgagcagtctgctgtcaggagagatggctgaaaaggtgatcatcttggtgctaaacaagtaagaggcaactgccctgtttttgtttgttttgaggcacaatgaaactttagccaaactctgcaagagggtcccatctcctgccatggccaggtgtgagagaccaaaccgagaaaacagcatactctatcacttaagccttgggtagaatgggaattctttaccctgggtaaacgttttaacaaaaaaatggaacttaacttcggtttggactgtggtcgtgctgaggcaggagtggggttgccctcttggggctgaatctccaggcctcacgaggtcccctgtggggatgctgctatttctaagatgcaaattgcacatttcctagattttgtatctgtggatttggataagggaggggaacacggacaaattgcttgtacaatttgaaatgggcctcaatggtacttcaaaccttttgattattcctaaataaaaacataaatatat

SEQ ID NO: 372293 - DNA, 9323 bp, Homo sapiens
  misc_feature (5810)..(5810): n is a, c, g, or t
agcgggtgatagccgtcaaaggcagcaaatagactgaatgaaagatgagcttctgcctttatatccttctctcctgctacccaactcattgtggtgaaggaaaaagaaaacgcgggtggagactgcactatatgcttaggactgaaatgcaactgcagaagcaacatgtgaccttttagagatgcttgtgggactgcataaagtgaagagggaaactggaaaaaaacaatgaaattgaatagggaaaacctgctttctgcaaacaactgaaaaagctgcatttagaaactgtttctttggccctcatcgagaagctggaacttgtattgttaggccccttatgggacaagctctcaactgctgatcacccagtgattgtcaccatggccagcaagaggaaatccaccacaccatgcatgatcccagtgaagactgtggtgttgcaagatgccagcatggaggcccagcccgctgagaccttgcctgaaggaccccagcaggatctgcccccagaagcatctgctgccagcagtgaggcagcacagaaccccagcagtactgatggctctacactggccaatgggcatcggagcactttagatggctatttatattcctgtaaatactgcgatttcagatcccatgacatgacccaatttgtgggacatatgaactcagagcacacagactttaataaagacccaacctttgtatgcagtgggtgcagttttctggcaaaaacccctgaggggctttccttgcacaatgccacatgtcactccggggaagccagctttgtgtggaacgtggccaagccagacaatcatgtggttgtggagcagagcatccctgagagcaccagcactcctgacctagcgggtgagcccagtgctgaaggggctgatggacaggcagaaatcatcattaccaaaactccaatcatgaagataatgaaaggcaaagctgaagccaaaaaaattcatacactcaaggagaatgtccctagccagcctgtgggtgaggccttaccaaagctgtcgactggagaaatggaggtgagagagggggaccattccttcatcaatggggcagttccagtcagccaggcatctgccagctctgcaaaaaacccccatgccgccaacgggcccctgataggaacagtgccagttttgccagctggcatagcacagttcctctccctccagcagcagcccccagtgcatgcccaacaccatgtccaccagccactgcccacggccaaggcccttcccaaagtgatgatccccctgagcagcattccaacgtacagtgcagccatggactctaacagcttcctgaagaactccttccacaagttcccctaccccaccaaagccgagctctgctatttgactgtggtgaccaagtatccagaagaacagctcaagatctggttcacagcccaaaggctgaagcaggggatcagctggtcccctgaggagattgaggatgcccggaaaaagatgttcaatacagtcatccagtctgtgcctcagcccacaattacggttctaaataccccactcgtcgccagtgctggcaatgtccagcatctcatccaggccgctcttccaggtcacgttgtggggcagccagagggtacaggagggggacttctggtcactcagccattgatggccaatgggttgcaagcaacaagttcccctctccccctcacggtgacatccgtccccaagcagccaggtgtggcacccattaacactgtgtgttcaaatacaacgtcagctgtgaaggtggtcaatgcggcccagtcgctcctcacggcctgccccagcataacctcccaagccttccttgatgctagcatctacaaaaataagaaatctcatgaacagctgtcagctctgaaagggagcttctgtcggaaccagttcccagggcagagcgaagttgaacatctcacaaaagtgacgggcctcagtaccagagaggtgcggaaatggttcagtgatcgtagataccactgccggaacttgaagggctccagagcgatgatacctggagatcacagttccatcatcattgactctgtgccagaggtgtccttctccccatcgtccaaggtccctgaggtaacctgcattccgacaacagccacactagcaacccacccttctgccaaacgacaatcttggcaccagactcctgacttcacaccaaccaaatacaaggagagagcccctgagcagctcagagccctggagagcagttttgcacaaaaccctcttcctcttgatgaggaactggaccgcctgagaagtgaaaccaaaatgacccgacgagaaattgatagctggttttcagagagacggaaaaaagtgaatgctgaggagaccaagaaggctgaggagaatgcctctcaggaggaagaggaggctgctgaggatgagggtggagaagaggatttggccagtgagctaagggtctctggtgaaaatggctctctggaaatgcccagcagccatatcttggcagagcgcaaagtcagccccattaaaatcaacctgaagaacctgagggtcactgaagccaatggcaggaacgagattccagggctgggtgcctgtgaccctgaggatgatgagtcaaacaaactggcagagcagctcccaggcaaagtgagctgcaaaaagactgcccagcagcggcacttgctgcggcagctctttgtccagacacagtggccaagcaaccaggactatgactccatcatggcccagacgggtctgccacggccagaggtggtgcgctggtttggagatagcaggtacgcactgaagaacggccaactcaaatggtacgaagactataagcgaggcaacttcccaccagggctactggtcattgcccctggcaaccgggagctcctgcaggactattacatgacacacaagatgctgtatgaagaggacctgcagaacctctgtgacaagacccagatgagctcccagcaggtcaagcagtggtttgctgagaaaatgggggaggagaccagagccgtggcagacacaggcagtgaggaccagggccctggtactggtgagctcacagcagttcacaaagggatgggtgacacctattcagaggtgtctgagaacagtgagtcgtgggagccccgtgtccctgaggccagctcagagccctttgacacatcgagtccccaggctggacgtcagctcgaaacagactgaatttgatctgattaatgtgaaggactggccagtctgggaaaccgcctgccacgtggaagagccaaacccgactctctgctgccacatgccgttcccatgcccggctgctgggcacctgggagagcttccagaatcctcgcagacagcccagagcctgccgctaccctcggcctgcccaccaccaagcaagcagcaagcaagatggggttctcatcagttcttcctcccacaatgtaggacctttcctttaccttccaatggataaaatagttcagagttcatagtcatattcatagacacagaatcaagcttttaacatatacatccacctctatatgttaaataaaacatcagattatcaacactgtcattacgtagaaactttggttagccaagcagtgcattgtcagttacgtcatctctaaaaatgacctgtgtctgttctctggggattgctgggtcacaggtgcccctcaccttccacagtcaggcagggaagttataggcacaaagctacgtctggaacccctttgtgccccctttgtgttcctcaaggaagcagtacctttgaagagatctctgctgcattaagtgatgaccggctacgtttcatgtcaggcttgctttgccttgtgggctactcagtgcagaacctgctgtaaccctcagttcaaaaaatggactggcaatgtgattagcgttggatgctttaccattctctttagttgttaccgtaattctgctttttcatgggagtttgaatcatggaccataacttttcagttatcagatcaactaaagaaacatttgttgttaagcctaatgtgctgacctatgtgcctgcattttttttttaatctagacatgtttggagtgagagaaagatggaaaaaagacatggggtagggacgtaagtggaaatctatagccacagcctgaagctttgaccactgcggttttcagagccctttctccacactcatttcagagcctcctatggtttgggaaggaataacacactggcccattagtaagggtgaaggctggagggatttgttgacttcttggaattatcagaggtagggtggtctttagcacaaagacttgcatgcagagatccctggcagaacacccagagtgcccgtggctcccaccccagggtctggccggtgtgctggatgcatgcccaagggtgctgggcatcactggtccttgtgaggatgcttttaaagttttatatttatgtccccaaacttggaaacaagaactctactttagcctaaccctcatgtccttttttgaattgagaaaattacaggaaatggtgcctttgaaaattagaaaacttgcttacagagctgttctaaatggtaaatcctcaatttccccaagaccggttgctctgagagtagctggtaaagaggggcgaactaaagacctgtccacctgtagctccgctcatttcttagaaaccacctgcttcccagagtgccaagccacaagtaccaggcttcgtgggcacagacacctcctgggctgggcagagtgacagtgctagaagaccccagagagagggcaagggctttgggcaagaagcactggtggtgttttagggaccgtccttctcccctacccagggaactggacctggcagggcaccgtgctcatgtggctccaaggacaagcatggcggtggccccttctgccttccaggagaggtcttgcttttgaaaccaaaatcatgttcttctaaagtgtcatcttctgccctccctgtcccaatagggaccacatcttatttgtctcaaacagggacttgtgagtacttggcaagttttgcagcctatttttgtattcttaatttggggagtaaagatgtttggtctcaaaaacctttgaggaattgccaagaatggcgagtgattgctttccttcagagaacagacacttggaatttctccttttagtgtttatatacgtgcagattaatttatatatatatatatacacacacacatatacagtataaatactcatttgattctcgtaaaacgcgcatctggcgtgtgcagttgagaaacttggtggcacatgggtgttgggggagtagcctgtgttggagggacaccagtgcactaggcagctggggcggcccaggctgaagccatctccgggtgtctgagaaaccacccagtgcctcacctccagatcctgctggcatcacctccagagccctgcatgcactggctgaagagttggtctgtggagaggattttcttggttacttgtattcacggttaatttacaacccaaacagcaaaacacagttggtggacaagttcatgcaggacctacagtgacccagccatgggcactagctcatctttcaggtggaaaagtacagtgctgcctgccctggtatgtttttcttatagatgttagccctgcccaacagccagggctacactacaaaaggcaagaatgcccatgtaaggagcccagcagtctggacagatccttcttcctctgctgttggatgagagtgagtgagtatgntctggaccttatccttgaaagatgatcaaaagcgatgatgagggaggcagtcatcacgcaggtgcttaaagggacattgtaggaggtactcaagggtttgggggcaaaaccctgaatccagccagtcgtgcacagagacacacccacactagcccagtggcagtgggggatgtgggatggcagcagccaggtatgtagccctgtcacaggacagctcactgtggttttgcacactgcctaagggttaaattgtgttgttgccttcagtagaaggcatttgtgggctgcagagttgagagttgggtgaggttagtctctcctgaagaaaaagcctataaaaagtggctaatcttatcccttttctctgtatgcagttggactcgtcagagatagtaaaatcatcttttagtgtttttttgttgctgatgtcttgtacccatttgttttttacatggggttgtagatcgagttctcaaaggtgaaaccagatgatcattctgataaaggaaatttaaatttgatacatatgctttgtatattttgattacttgttttcgtttttgactataaaggagctcttttttcttgctcagagtttacctgggagatttcaccagtttgactcaccatttgcagatgtgcttttgtattaaatttaaattttcacatatcacatccattctcaaggtagttatatgctggagaagaaaaatcctctagacacatgaaggcccacatagtcaagtcttccagggcaaagccagcagcccacccaggtcaggtagccagcagggctcagttcccctcactccagacacggaccctcctcttcagggtctcttgacccagcttccttctctccttttacctgagagcacagacctctctcagccagcctgcccagaccacggggggctactcccatgtagtttggggagcacttgatctcagaaaagctccattgtctgagcaaatgggcagttgtggagctcaagcctttctcctgtgctcaagtcccttccccaagcaaggcttcaacctcatctacccaccatgtagttttctctggccatttaagtggggcggcagggacatggttgggccatgccacaccagggctggtgaggcaaccagttttgattttgacagagtggctggaggaaaagtggcaatcaaggtgctgcttggtttgctctgagtgcaaatggaaccaacaggtttctgctgcaatctgtgtgttcccagtgccaggtcacaccaggaggggtggggcagggctaaccaagtggtctctgaactcaccgagcgtctgcacttggttgtgaagttaatgggagtacagagagcgtctggccttggagaggggttgagagcctcctttttggttcttcattcctgagctcttgcctgcccacaaatctgacctctttgaatggggacgcagtccttcaacagagaagtttctatggcaaagaagtttctatttagctctagatccagcagagtcatccattctaactgccctgaagtctagagcaggggagggaacccagaggctggggatgagactaggcagaccctggttaccatatggacaaggacaggggaaagcacccccttcctcaatttctgaaagttctatctttgggttcgcaggactttgaggatgataaagaacatataggtactagcttgttgttgctggtccaaagcttccacagccctgagaatttggctttcgtggctgctctggcagctgagcgaagggaggaaggcagccgctctggtggggactctaggcaccttccctgctgtccacttggataggcggtgagccccagggtactgagaggagcctgagcatttacctgccattagtgcctcttccttcaggagactggcttgaaacgtgtgttcatgtgcgcgtgcacacacacacatgagcacctgtatgtgttaatgaatagtttttcttggttaatgctttttaacttctgttcctttccgtaagtggatgattcaaaattaacgtgacttggctgggcgcagtggctcacacctgtaatcccagcactttgggaggccaagggaggcggatcacctgaggtcaggagttcgagaccagcctgatcggcatggtgaaaccccgtttctactaaaaatacaaaaattagccgggcgtggtggtgcgcgcctgtaatcccagctactcaggaggctgaggaaggagaatcacttgaacccgggaggtggaggttgcagtgagctgagatcgtgccactgcactccagcctgggcgacagagcgaaactccgtctcaaaaaaaaaaaaaaaacttaatgtgactggagttaaaagtgaaatgtcaggttgtttagtcactgaatagagagctacaagtgcttggtctttcccaagaatcaaacctgagtagaaatacatttaaaagaaaaatctacatggtacctatgaatcctgtaatttgtttagggagatcttgtcactcatccctggttcctgcccatactgtttggtctcgttcttgcagtttgcttggaacagggccagagccccacatgagattgtcagcaggagtgaggagcgccagtccctactcctcagcagggacccagcacagcaatccggttgttctcggttagactgggtcggggccaggggagaagcagtcacccctgtgtagagggttcccgctgtgcttctgagcagttgctttgttcagaagtgttaggagggtcagattgtgccataattgttattaaagagaaaacacgcccaccttcctttctcccctgctggccattgttcattgagttttactgagggcagcctttgtggaagtcagggaggttgccaaaggcctgtagatgcctcctgacaaggtcttgattcctggttttctagcacccatttgcattttggtcttcagcacaaagccttgttccctgtggccggacttctgggcaataagactggggagtgactgttgagcagtctgctgtcaggagagatggctgaaaaggtgatcatcttggtgctaaacaagtaagaggcaactgccctgtttttgtttgttttgaggcacaatgaaactttagccaaactctgcaagagggtcccatctcctgccatggccaggtgtgagagaccaaaccgagaaaacagcatactctatcacttaagccttgggtagaatgggaattctttaccctgggtaaacgttttaacaaaaaaatggaacttaacttcggtttggactgtggtcgtgctgaggcaggagtggggttgccctcttggggctgaatctccaggcctcacgaggtcccctgtggggatgctgctatttctaagatgcaaattgcacatttcctagattttgtatctgtggatttggataagggaggggaacacggacaaattgcttgtacaatttgaaatgggcctcaatggtacttcaaaccttttgattattcctaaataaaaacataaatatat

SEQ ID NO: 372294 - DNA, 9407 bp, Homo sapiens
  misc_feature (5894)..(5894): n is a, c, g, or t
tgggaagttctttccagctctggacaggaaaacatgaaaacagatgatcccaaggaggactgaaatgcaactgcagaagcaacatgtgaccttttagagatgcttgtgggactgcataaagtgaagagggaaactggaaaaaaacaatgaagctaatcccgaactcctggcctcaaatgatcttcctaccttggcttcccaaagtgctgggattacagacgtgagctgctgtgcctggccaagacttaattttgaatgacattgggactattgccaaaaatcaaatccatcttcatgttgtccacttctcagccttaattgaatagggaaaacctgctttctgcaaacaactgaaaaagctgcatttagaaactgtttctttggccctcatcgagaagctggaacttgtattgttaggccccttatgggacaagctctcaactgctgatcacccagtgattgtcaccatggccagcaagaggaaatccaccacaccatgcatgatcccagtgaagactgtggtgttgcaagatgccagcatggaggcccagcccgctgagaccttgcctgaaggaccccagcaggatctgcccccagaagcatctgctgccagcagtgaggcagcacagaaccccagcagtactgatggctctacactggccaatgggcatcggagcactttagatggctatttatattcctgtaaatactgcgatttcagatcccatgacatgacccaatttgtgggacatatgaactcagagcacacagactttaataaagacccaacctttgtatgcagtgggtgcagttttctggcaaaaacccctgaggggctttccttgcacaatgccacatgtcactccggggaagccagctttgtgtggaacgtggccaagccagacaatcatgtggttgtggagcagagcatccctgagagcaccagcactcctgacctagcgggtgagcccagtgctgaaggggctgatggacaggcagaaatcatcattaccaaaactccaatcatgaagataatgaaaggcaaagctgaagccaaaaaaattcatacactcaaggagaatgtccctagccagcctgtgggtgaggccttaccaaagctgtcgactggagaaatggaggtgagagagggggaccattccttcatcaatggggcagttccagtcagccaggcatctgccagctctgcaaaaaacccccatgccgccaacgggcccctgataggaacagtgccagttttgccagctggcatagcacagttcctctccctccagcagcagcccccagtgcatgcccaacaccatgtccaccagccactgcccacggccaaggcccttcccaaagtgatgatccccctgagcagcattccaacgtacagtgcagccatggactctaacagcttcctgaagaactccttccacaagttcccctaccccaccaaagccgagctctgctatttgactgtggtgaccaagtatccagaagaacagctcaagatctggttcacagcccaaaggctgaagcaggggatcagctggtcccctgaggagattgaggatgcccggaaaaagatgttcaatacagtcatccagtctgtgcctcagcccacaattacggttctaaataccccactcgtcgccagtgctggcaatgtccagcatctcatccaggccgctcttccaggtcacgttgtggggcagccagagggtacaggagggggacttctggtcactcagccattgatggccaatgggttgcaagcaacaagttcccctctccccctcacggtgacatccgtccccaagcagccaggtgtggcacccattaacactgtgtgttcaaatacaacgtcagctgtgaaggtggtcaatgcggcccagtcgctcctcacggcctgccccagcataacctcccaagccttccttgatgctagcatctacaaaaataagaaatctcatgaacagctgtcagctctgaaagggagcttctgtcggaaccagttcccagggcagagcgaagttgaacatctcacaaaagtgacgggcctcagtaccagagaggtgcggaaatggttcagtgatcgtagataccactgccggaacttgaagggctccagagcgatgatacctggagatcacagttccatcatcattgactctgtgccagaggtgtccttctccccatcgtccaaggtccctgaggtaacctgcattccgacaacagccacactagcaacccacccttctgccaaacgacaatcttggcaccagactcctgacttcacaccaaccaaatacaaggagagagcccctgagcagctcagagccctggagagcagttttgcacaaaaccctcttcctcttgatgaggaactggaccgcctgagaagtgaaaccaaaatgacccgacgagaaattgatagctggttttcagagagacggaaaaaagtgaatgctgaggagaccaagaaggctgaggagaatgcctctcaggaggaagaggaggctgctgaggatgagggtggagaagaggatttggccagtgagctaagggtctctggtgaaaatggctctctggaaatgcccagcagccatatcttggcagagcgcaaagtcagccccattaaaatcaacctgaagaacctgagggtcactgaagccaatggcaggaacgagattccagggctgggtgcctgtgaccctgaggatgatgagtcaaacaaactggcagagcagctcccaggcaaagtgagctgcaaaaagactgcccagcagcggcacttgctgcggcagctctttgtccagacacagtggccaagcaaccaggactatgactccatcatggcccagacgggtctgccacggccagaggtggtgcgctggtttggagatagcaggtacgcactgaagaacggccaactcaaatggtacgaagactataagcgaggcaacttcccaccagggctactggtcattgcccctggcaaccgggagctcctgcaggactattacatgacacacaagatgctgtatgaagaggacctgcagaacctctgtgacaagacccagatgagctcccagcaggtcaagcagtggtttgctgagaaaatgggggaggagaccagagccgtggcagacacaggcagtgaggaccagggccctggtactggtgagctcacagcagttcacaaagggatgggtgacacctattcagaggtgtctgagaacagtgagtcgtgggagccccgtgtccctgaggccagctcagagccctttgacacatcgagtccccaggctggacgtcagctcgaaacagactgaatttgatctgattaatgtgaaggactggccagtctgggaaaccgcctgccacgtggaagagccaaacccgactctctgctgccacatgccgttcccatgcccggctgctgggcacctgggagagcttccagaatcctcgcagacagcccagagcctgccgctaccctcggcctgcccaccaccaagcaagcagcaagcaagatggggttctcatcagttcttcctcccacaatgtaggacctttcctttaccttccaatggataaaatagttcagagttcatagtcatattcatagacacagaatcaagcttttaacatatacatccacctctatatgttaaataaaacatcagattatcaacactgtcattacgtagaaactttggttagccaagcagtgcattgtcagttacgtcatctctaaaaatgacctgtgtctgttctctggggattgctgggtcacaggtgcccctcaccttccacagtcaggcagggaagttataggcacaaagctacgtctggaacccctttgtgccccctttgtgttcctcaaggaagcagtacctttgaagagatctctgctgcattaagtgatgaccggctacgtttcatgtcaggcttgctttgccttgtgggctactcagtgcagaacctgctgtaaccctcagttcaaaaaatggactggcaatgtgattagcgttggatgctttaccattctctttagttgttaccgtaattctgctttttcatgggagtttgaatcatggaccataacttttcagttatcagatcaactaaagaaacatttgttgttaagcctaatgtgctgacctatgtgcctgcattttttttttaatctagacatgtttggagtgagagaaagatggaaaaaagacatggggtagggacgtaagtggaaatctatagccacagcctgaagctttgaccactgcggttttcagagccctttctccacactcatttcagagcctcctatggtttgggaaggaataacacactggcccattagtaagggtgaaggctggagggatttgttgacttcttggaattatcagaggtagggtggtctttagcacaaagacttgcatgcagagatccctggcagaacacccagagtgcccgtggctcccaccccagggtctggccggtgtgctggatgcatgcccaagggtgctgggcatcactggtccttgtgaggatgcttttaaagttttatatttatgtccccaaacttggaaacaagaactctactttagcctaaccctcatgtccttttttgaattgagaaaattacaggaaatggtgcctttgaaaattagaaaacttgcttacagagctgttctaaatggtaaatcctcaatttccccaagaccggttgctctgagagtagctggtaaagaggggcgaactaaagacctgtccacctgtagctccgctcatttcttagaaaccacctgcttcccagagtgccaagccacaagtaccaggcttcgtgggcacagacacctcctgggctgggcagagtgacagtgctagaagaccccagagagagggcaagggctttgggcaagaagcactggtggtgttttagggaccgtccttctcccctacccagggaactggacctggcagggcaccgtgctcatgtggctccaaggacaagcatggcggtggccccttctgccttccaggagaggtcttgcttttgaaaccaaaatcatgttcttctaaagtgtcatcttctgccctccctgtcccaatagggaccacatcttatttgtctcaaacagggacttgtgagtacttggcaagttttgcagcctatttttgtattcttaatttggggagtaaagatgtttggtctcaaaaacctttgaggaattgccaagaatggcgagtgattgctttccttcagagaacagacacttggaatttctccttttagtgtttatatacgtgcagattaatttatatatatatatatacacacacacatatacagtataaatactcatttgattctcgtaaaacgcgcatctggcgtgtgcagttgagaaacttggtggcacatgggtgttgggggagtagcctgtgttggagggacaccagtgcactaggcagctggggcggcccaggctgaagccatctccgggtgtctgagaaaccacccagtgcctcacctccagatcctgctggcatcacctccagagccctgcatgcactggctgaagagttggtctgtggagaggattttcttggttacttgtattcacggttaatttacaacccaaacagcaaaacacagttggtggacaagttcatgcaggacctacagtgacccagccatgggcactagctcatctttcaggtggaaaagtacagtgctgcctgccctggtatgtttttcttatagatgttagccctgcccaacagccagggctacactacaaaaggcaagaatgcccatgtaaggagcccagcagtctggacagatccttcttcctctgctgttggatgagagtgagtgagtatgntctggaccttatccttgaaagatgatcaaaagcgatgatgagggaggcagtcatcacgcaggtgcttaaagggacattgtaggaggtactcaagggtttgggggcaaaaccctgaatccagccagtcgtgcacagagacacacccacactagcccagtggcagtgggggatgtgggatggcagcagccaggtatgtagccctgtcacaggacagctcactgtggttttgcacactgcctaagggttaaattgtgttgttgccttcagtagaaggcatttgtgggctgcagagttgagagttgggtgaggttagtctctcctgaagaaaaagcctataaaaagtggctaatcttatcccttttctctgtatgcagttggactcgtcagagatagtaaaatcatcttttagtgtttttttgttgctgatgtcttgtacccatttgttttttacatggggttgtagatcgagttctcaaaggtgaaaccagatgatcattctgataaaggaaatttaaatttgatacatatgctttgtatattttgattacttgttttcgtttttgactataaaggagctcttttttcttgctcagagtttacctgggagatttcaccagtttgactcaccatttgcagatgtgcttttgtattaaatttaaattttcacatatcacatccattctcaaggtagttatatgctggagaagaaaaatcctctagacacatgaaggcccacatagtcaagtcttccagggcaaagccagcagcccacccaggtcaggtagccagcagggctcagttcccctcactccagacacggaccctcctcttcagggtctcttgacccagcttccttctctccttttacctgagagcacagacctctctcagccagcctgcccagaccacggggggctactcccatgtagtttggggagcacttgatctcagaaaagctccattgtctgagcaaatgggcagttgtggagctcaagcctttctcctgtgctcaagtcccttccccaagcaaggcttcaacctcatctacccaccatgtagttttctctggccatttaagtggggcggcagggacatggttgggccatgccacaccagggctggtgaggcaaccagttttgattttgacagagtggctggaggaaaagtggcaatcaaggtgctgcttggtttgctctgagtgcaaatggaaccaacaggtttctgctgcaatctgtgtgttcccagtgccaggtcacaccaggaggggtggggcagggctaaccaagtggtctctgaactcaccgagcgtctgcacttggttgtgaagttaatgggagtacagagagcgtctggccttggagaggggttgagagcctcctttttggttcttcattcctgagctcttgcctgcccacaaatctgacctctttgaatggggacgcagtccttcaacagagaagtttctatggcaaagaagtttctatttagctctagatccagcagagtcatccattctaactgccctgaagtctagagcaggggagggaacccagaggctggggatgagactaggcagaccctggttaccatatggacaaggacaggggaaagcacccccttcctcaatttctgaaagttctatctttgggttcgcaggactttgaggatgataaagaacatataggtactagcttgttgttgctggtccaaagcttccacagccctgagaatttggctttcgtggctgctctggcagctgagcgaagggaggaaggcagccgctctggtggggactctaggcaccttccctgctgtccacttggataggcggtgagccccagggtactgagaggagcctgagcatttacctgccattagtgcctcttccttcaggagactggcttgaaacgtgtgttcatgtgcgcgtgcacacacacacatgagcacctgtatgtgttaatgaatagtttttcttggttaatgctttttaacttctgttcctttccgtaagtggatgattcaaaattaacgtgacttggctgggcgcagtggctcacacctgtaatcccagcactttgggaggccaagggaggcggatcacctgaggtcaggagttcgagaccagcctgatcggcatggtgaaaccccgtttctactaaaaatacaaaaattagccgggcgtggtggtgcgcgcctgtaatcccagctactcaggaggctgaggaaggagaatcacttgaacccgggaggtggaggttgcagtgagctgagatcgtgccactgcactccagcctgggcgacagagcgaaactccgtctcaaaaaaaaaaaaaaaacttaatgtgactggagttaaaagtgaaatgtcaggttgtttagtcactgaatagagagctacaagtgcttggtctttcccaagaatcaaacctgagtagaaatacatttaaaagaaaaatctacatggtacctatgaatcctgtaatttgtttagggagatcttgtcactcatccctggttcctgcccatactgtttggtctcgttcttgcagtttgcttggaacagggccagagccccacatgagattgtcagcaggagtgaggagcgccagtccctactcctcagcagggacccagcacagcaatccggttgttctcggttagactgggtcggggccaggggagaagcagtcacccctgtgtagagggttcccgctgtgcttctgagcagttgctttgttcagaagtgttaggagggtcagattgtgccataattgttattaaagagaaaacacgcccaccttcctttctcccctgctggccattgttcattgagttttactgagggcagcctttgtggaagtcagggaggttgccaaaggcctgtagatgcctcctgacaaggtcttgattcctggttttctagcacccatttgcattttggtcttcagcacaaagccttgttccctgtggccggacttctgggcaataagactggggagtgactgttgagcagtctgctgtcaggagagatggctgaaaaggtgatcatcttggtgctaaacaagtaagaggcaactgccctgtttttgtttgttttgaggcacaatgaaactttagccaaactctgcaagagggtcccatctcctgccatggccaggtgtgagagaccaaaccgagaaaacagcatactctatcacttaagccttgggtagaatgggaattctttaccctgggtaaacgttttaacaaaaaaatggaacttaacttcggtttggactgtggtcgtgctgaggcaggagtggggttgccctcttggggctgaatctccaggcctcacgaggtcccctgtggggatgctgctatttctaagatgcaaattgcacatttcctagattttgtatctgtggatttggataagggaggggaacacggacaaattgcttgtacaatttgaaatgggcctcaatggtacttcaaaccttttgattattcctaaataaaaacataaatatat

SEQ ID NO: 372295 - DNA, 9489 bp, Homo sapiens
  misc_feature (5976)..(5976): n is a, c, g, or t
agcgggtgatagccgtcaaaggcagcaaatagactgaatgaaagatgagcttctgcctttatatccttctctcctgctacccaactcattgtggtgaaggaaaaagaaaacgcgggtggagactgcactatatgcttaggactgaaatgcaactgcagaagcaacatgtgaccttttagagatgcttgtgggactgcataaagtgaagagggaaactggaaaaaaacaatgaagctaatcccgaactcctggcctcaaatgatcttcctaccttggcttcccaaagtgctgggattacagacgtgagctgctgtgcctggccaagacttaattttgaatgacattgggactattgccaaaaatcaaatccatcttcatgttgtccacttctcagccttaattgaatagggaaaacctgctttctgcaaacaactgaaaaagctgcatttagaaactgtttctttggccctcatcgagaagctggaacttgtattgttaggccccttatgggacaagctctcaactgctgatcacccagtgattgtcaccatggccagcaagaggaaatccaccacaccatgcatgatcccagtgaagactgtggtgttgcaagatgccagcatggaggcccagcccgctgagaccttgcctgaaggaccccagcaggatctgcccccagaagcatctgctgccagcagtgaggcagcacagaaccccagcagtactgatggctctacactggccaatgggcatcggagcactttagatggctatttatattcctgtaaatactgcgatttcagatcccatgacatgacccaatttgtgggacatatgaactcagagcacacagactttaataaagacccaacctttgtatgcagtgggtgcagttttctggcaaaaacccctgaggggctttccttgcacaatgccacatgtcactccggggaagccagctttgtgtggaacgtggccaagccagacaatcatgtggttgtggagcagagcatccctgagagcaccagcactcctgacctagcgggtgagcccagtgctgaaggggctgatggacaggcagaaatcatcattaccaaaactccaatcatgaagataatgaaaggcaaagctgaagccaaaaaaattcatacactcaaggagaatgtccctagccagcctgtgggtgaggccttaccaaagctgtcgactggagaaatggaggtgagagagggggaccattccttcatcaatggggcagttccagtcagccaggcatctgccagctctgcaaaaaacccccatgccgccaacgggcccctgataggaacagtgccagttttgccagctggcatagcacagttcctctccctccagcagcagcccccagtgcatgcccaacaccatgtccaccagccactgcccacggccaaggcccttcccaaagtgatgatccccctgagcagcattccaacgtacagtgcagccatggactctaacagcttcctgaagaactccttccacaagttcccctaccccaccaaagccgagctctgctatttgactgtggtgaccaagtatccagaagaacagctcaagatctggttcacagcccaaaggctgaagcaggggatcagctggtcccctgaggagattgaggatgcccggaaaaagatgttcaatacagtcatccagtctgtgcctcagcccacaattacggttctaaataccccactcgtcgccagtgctggcaatgtccagcatctcatccaggccgctcttccaggtcacgttgtggggcagccagagggtacaggagggggacttctggtcactcagccattgatggccaatgggttgcaagcaacaagttcccctctccccctcacggtgacatccgtccccaagcagccaggtgtggcacccattaacactgtgtgttcaaatacaacgtcagctgtgaaggtggtcaatgcggcccagtcgctcctcacggcctgccccagcataacctcccaagccttccttgatgctagcatctacaaaaataagaaatctcatgaacagctgtcagctctgaaagggagcttctgtcggaaccagttcccagggcagagcgaagttgaacatctcacaaaagtgacgggcctcagtaccagagaggtgcggaaatggttcagtgatcgtagataccactgccggaacttgaagggctccagagcgatgatacctggagatcacagttccatcatcattgactctgtgccagaggtgtccttctccccatcgtccaaggtccctgaggtaacctgcattccgacaacagccacactagcaacccacccttctgccaaacgacaatcttggcaccagactcctgacttcacaccaaccaaatacaaggagagagcccctgagcagctcagagccctggagagcagttttgcacaaaaccctcttcctcttgatgaggaactggaccgcctgagaagtgaaaccaaaatgacccgacgagaaattgatagctggttttcagagagacggaaaaaagtgaatgctgaggagaccaagaaggctgaggagaatgcctctcaggaggaagaggaggctgctgaggatgagggtggagaagaggatttggccagtgagctaagggtctctggtgaaaatggctctctggaaatgcccagcagccatatcttggcagagcgcaaagtcagccccattaaaatcaacctgaagaacctgagggtcactgaagccaatggcaggaacgagattccagggctgggtgcctgtgaccctgaggatgatgagtcaaacaaactggcagagcagctcccaggcaaagtgagctgcaaaaagactgcccagcagcggcacttgctgcggcagctctttgtccagacacagtggccaagcaaccaggactatgactccatcatggcccagacgggtctgccacggccagaggtggtgcgctggtttggagatagcaggtacgcactgaagaacggccaactcaaatggtacgaagactataagcgaggcaacttcccaccagggctactggtcattgcccctggcaaccgggagctcctgcaggactattacatgacacacaagatgctgtatgaagaggacctgcagaacctctgtgacaagacccagatgagctcccagcaggtcaagcagtggtttgctgagaaaatgggggaggagaccagagccgtggcagacacaggcagtgaggaccagggccctggtactggtgagctcacagcagttcacaaagggatgggtgacacctattcagaggtgtctgagaacagtgagtcgtgggagccccgtgtccctgaggccagctcagagccctttgacacatcgagtccccaggctggacgtcagctcgaaacagactgaatttgatctgattaatgtgaaggactggccagtctgggaaaccgcctgccacgtggaagagccaaacccgactctctgctgccacatgccgttcccatgcccggctgctgggcacctgggagagcttccagaatcctcgcagacagcccagagcctgccgctaccctcggcctgcccaccaccaagcaagcagcaagcaagatggggttctcatcagttcttcctcccacaatgtaggacctttcctttaccttccaatggataaaatagttcagagttcatagtcatattcatagacacagaatcaagcttttaacatatacatccacctctatatgttaaataaaacatcagattatcaacactgtcattacgtagaaactttggttagccaagcagtgcattgtcagttacgtcatctctaaaaatgacctgtgtctgttctctggggattgctgggtcacaggtgcccctcaccttccacagtcaggcagggaagttataggcacaaagctacgtctggaacccctttgtgccccctttgtgttcctcaaggaagcagtacctttgaagagatctctgctgcattaagtgatgaccggctacgtttcatgtcaggcttgctttgccttgtgggctactcagtgcagaacctgctgtaaccctcagttcaaaaaatggactggcaatgtgattagcgttggatgctttaccattctctttagttgttaccgtaattctgctttttcatgggagtttgaatcatggaccataacttttcagttatcagatcaactaaagaaacatttgttgttaagcctaatgtgctgacctatgtgcctgcattttttttttaatctagacatgtttggagtgagagaaagatggaaaaaagacatggggtagggacgtaagtggaaatctatagccacagcctgaagctttgaccactgcggttttcagagccctttctccacactcatttcagagcctcctatggtttgggaaggaataacacactggcccattagtaagggtgaaggctggagggatttgttgacttcttggaattatcagaggtagggtggtctttagcacaaagacttgcatgcagagatccctggcagaacacccagagtgcccgtggctcccaccccagggtctggccggtgtgctggatgcatgcccaagggtgctgggcatcactggtccttgtgaggatgcttttaaagttttatatttatgtccccaaacttggaaacaagaactctactttagcctaaccctcatgtccttttttgaattgagaaaattacaggaaatggtgcctttgaaaattagaaaacttgcttacagagctgttctaaatggtaaatcctcaatttccccaagaccggttgctctgagagtagctggtaaagaggggcgaactaaagacctgtccacctgtagctccgctcatttcttagaaaccacctgcttcccagagtgccaagccacaagtaccaggcttcgtgggcacagacacctcctgggctgggcagagtgacagtgctagaagaccccagagagagggcaagggctttgggcaagaagcactggtggtgttttagggaccgtccttctcccctacccagggaactggacctggcagggcaccgtgctcatgtggctccaaggacaagcatggcggtggccccttctgccttccaggagaggtcttgcttttgaaaccaaaatcatgttcttctaaagtgtcatcttctgccctccctgtcccaatagggaccacatcttatttgtctcaaacagggacttgtgagtacttggcaagttttgcagcctatttttgtattcttaatttggggagtaaagatgtttggtctcaaaaacctttgaggaattgccaagaatggcgagtgattgctttccttcagagaacagacacttggaatttctccttttagtgtttatatacgtgcagattaatttatatatatatatatacacacacacatatacagtataaatactcatttgattctcgtaaaacgcgcatctggcgtgtgcagttgagaaacttggtggcacatgggtgttgggggagtagcctgtgttggagggacaccagtgcactaggcagctggggcggcccaggctgaagccatctccgggtgtctgagaaaccacccagtgcctcacctccagatcctgctggcatcacctccagagccctgcatgcactggctgaagagttggtctgtggagaggattttcttggttacttgtattcacggttaatttacaacccaaacagcaaaacacagttggtggacaagttcatgcaggacctacagtgacccagccatgggcactagctcatctttcaggtggaaaagtacagtgctgcctgccctggtatgtttttcttatagatgttagccctgcccaacagccagggctacactacaaaaggcaagaatgcccatgtaaggagcccagcagtctggacagatccttcttcctctgctgttggatgagagtgagtgagtatgntctggaccttatccttgaaagatgatcaaaagcgatgatgagggaggcagtcatcacgcaggtgcttaaagggacattgtaggaggtactcaagggtttgggggcaaaaccctgaatccagccagtcgtgcacagagacacacccacactagcccagtggcagtgggggatgtgggatggcagcagccaggtatgtagccctgtcacaggacagctcactgtggttttgcacactgcctaagggttaaattgtgttgttgccttcagtagaaggcatttgtgggctgcagagttgagagttgggtgaggttagtctctcctgaagaaaaagcctataaaaagtggctaatcttatcccttttctctgtatgcagttggactcgtcagagatagtaaaatcatcttttagtgtttttttgttgctgatgtcttgtacccatttgttttttacatggggttgtagatcgagttctcaaaggtgaaaccagatgatcattctgataaaggaaatttaaatttgatacatatgctttgtatattttgattacttgttttcgtttttgactataaaggagctcttttttcttgctcagagtttacctgggagatttcaccagtttgactcaccatttgcagatgtgcttttgtattaaatttaaattttcacatatcacatccattctcaaggtagttatatgctggagaagaaaaatcctctagacacatgaaggcccacatagtcaagtcttccagggcaaagccagcagcccacccaggtcaggtagccagcagggctcagttcccctcactccagacacggaccctcctcttcagggtctcttgacccagcttccttctctccttttacctgagagcacagacctctctcagccagcctgcccagaccacggggggctactcccatgtagtttggggagcacttgatctcagaaaagctccattgtctgagcaaatgggcagttgtggagctcaagcctttctcctgtgctcaagtcccttccccaagcaaggcttcaacctcatctacccaccatgtagttttctctggccatttaagtggggcggcagggacatggttgggccatgccacaccagggctggtgaggcaaccagttttgattttgacagagtggctggaggaaaagtggcaatcaaggtgctgcttggtttgctctgagtgcaaatggaaccaacaggtttctgctgcaatctgtgtgttcccagtgccaggtcacaccaggaggggtggggcagggctaaccaagtggtctctgaactcaccgagcgtctgcacttggttgtgaagttaatgggagtacagagagcgtctggccttggagaggggttgagagcctcctttttggttcttcattcctgagctcttgcctgcccacaaatctgacctctttgaatggggacgcagtccttcaacagagaagtttctatggcaaagaagtttctatttagctctagatccagcagagtcatccattctaactgccctgaagtctagagcaggggagggaacccagaggctggggatgagactaggcagaccctggttaccatatggacaaggacaggggaaagcacccccttcctcaatttctgaaagttctatctttgggttcgcaggactttgaggatgataaagaacatataggtactagcttgttgttgctggtccaaagcttccacagccctgagaatttggctttcgtggctgctctggcagctgagcgaagggaggaaggcagccgctctggtggggactctaggcaccttccctgctgtccacttggataggcggtgagccccagggtactgagaggagcctgagcatttacctgccattagtgcctcttccttcaggagactggcttgaaacgtgtgttcatgtgcgcgtgcacacacacacatgagcacctgtatgtgttaatgaatagtttttcttggttaatgctttttaacttctgttcctttccgtaagtggatgattcaaaattaacgtgacttggctgggcgcagtggctcacacctgtaatcccagcactttgggaggccaagggaggcggatcacctgaggtcaggagttcgagaccagcctgatcggcatggtgaaaccccgtttctactaaaaatacaaaaattagccgggcgtggtggtgcgcgcctgtaatcccagctactcaggaggctgaggaaggagaatcacttgaacccgggaggtggaggttgcagtgagctgagatcgtgccactgcactccagcctgggcgacagagcgaaactccgtctcaaaaaaaaaaaaaaaacttaatgtgactggagttaaaagtgaaatgtcaggttgtttagtcactgaatagagagctacaagtgcttggtctttcccaagaatcaaacctgagtagaaatacatttaaaagaaaaatctacatggtacctatgaatcctgtaatttgtttagggagatcttgtcactcatccctggttcctgcccatactgtttggtctcgttcttgcagtttgcttggaacagggccagagccccacatgagattgtcagcaggagtgaggagcgccagtccctactcctcagcagggacccagcacagcaatccggttgttctcggttagactgggtcggggccaggggagaagcagtcacccctgtgtagagggttcccgctgtgcttctgagcagttgctttgttcagaagtgttaggagggtcagattgtgccataattgttattaaagagaaaacacgcccaccttcctttctcccctgctggccattgttcattgagttttactgagggcagcctttgtggaagtcagggaggttgccaaaggcctgtagatgcctcctgacaaggtcttgattcctggttttctagcacccatttgcattttggtcttcagcacaaagccttgttccctgtggccggacttctgggcaataagactggggagtgactgttgagcagtctgctgtcaggagagatggctgaaaaggtgatcatcttggtgctaaacaagtaagaggcaactgccctgtttttgtttgttttgaggcacaatgaaactttagccaaactctgcaagagggtcccatctcctgccatggccaggtgtgagagaccaaaccgagaaaacagcatactctatcacttaagccttgggtagaatgggaattctttaccctgggtaaacgttttaacaaaaaaatggaacttaacttcggtttggactgtggtcgtgctgaggcaggagtggggttgccctcttggggctgaatctccaggcctcacgaggtcccctgtggggatgctgctatttctaagatgcaaattgcacatttcctagattttgtatctgtggatttggataagggaggggaacacggacaaattgcttgtacaatttgaaatgggcctcaatggtacttcaaaccttttgattattcctaaataaaaacataaatatat

SEQ ID NO: 372296 - DNA, 9539 bp, Homo sapiens
  misc_feature (6026)..(6026): n is a, c, g, or t
agcgggtgatagccgtcaaaggcagcaaatagactgaatgaaagatgagcttctgcctttatatccttctctcctgctacccaactcattgtggtgaaggaaaaagaaaacgcgggtggagactgcactatatgcttaggactgaaatgcaactgcagaagcaacatgtgaccttttagagatgcttgtgggactgcataaagtgaagagggaaactggaaaaaaacaatgaatcccttccataggaaacagggaatgtttgtttctgtcttctggtaggagaaggattggtcccacccccagctccagggatggatcttgattgtttaagcccagtcagtgattctaacccatggaccaagaccctgccttggagattggggaacaggtgttggaagggctctattttggcaaagaatggattatttatgtgagcatatttccgcaaaattgaatagggaaaacctgctttctgcaaacaactgaaaaagctgcatttagaaactgtttctttggccctcatcgagaagctggaacttgtattgttaggccccttatgggacaagctctcaactgctgatcacccagtgattgtcaccatggccagcaagaggaaatccaccacaccatgcatgatcccagtgaagactgtggtgttgcaagatgccagcatggaggcccagcccgctgagaccttgcctgaaggaccccagcaggatctgcccccagaagcatctgctgccagcagtgaggcagcacagaaccccagcagtactgatggctctacactggccaatgggcatcggagcactttagatggctatttatattcctgtaaatactgcgatttcagatcccatgacatgacccaatttgtgggacatatgaactcagagcacacagactttaataaagacccaacctttgtatgcagtgggtgcagttttctggcaaaaacccctgaggggctttccttgcacaatgccacatgtcactccggggaagccagctttgtgtggaacgtggccaagccagacaatcatgtggttgtggagcagagcatccctgagagcaccagcactcctgacctagcgggtgagcccagtgctgaaggggctgatggacaggcagaaatcatcattaccaaaactccaatcatgaagataatgaaaggcaaagctgaagccaaaaaaattcatacactcaaggagaatgtccctagccagcctgtgggtgaggccttaccaaagctgtcgactggagaaatggaggtgagagagggggaccattccttcatcaatggggcagttccagtcagccaggcatctgccagctctgcaaaaaacccccatgccgccaacgggcccctgataggaacagtgccagttttgccagctggcatagcacagttcctctccctccagcagcagcccccagtgcatgcccaacaccatgtccaccagccactgcccacggccaaggcccttcccaaagtgatgatccccctgagcagcattccaacgtacagtgcagccatggactctaacagcttcctgaagaactccttccacaagttcccctaccccaccaaagccgagctctgctatttgactgtggtgaccaagtatccagaagaacagctcaagatctggttcacagcccaaaggctgaagcaggggatcagctggtcccctgaggagattgaggatgcccggaaaaagatgttcaatacagtcatccagtctgtgcctcagcccacaattacggttctaaataccccactcgtcgccagtgctggcaatgtccagcatctcatccaggccgctcttccaggtcacgttgtggggcagccagagggtacaggagggggacttctggtcactcagccattgatggccaatgggttgcaagcaacaagttcccctctccccctcacggtgacatccgtccccaagcagccaggtgtggcacccattaacactgtgtgttcaaatacaacgtcagctgtgaaggtggtcaatgcggcccagtcgctcctcacggcctgccccagcataacctcccaagccttccttgatgctagcatctacaaaaataagaaatctcatgaacagctgtcagctctgaaagggagcttctgtcggaaccagttcccagggcagagcgaagttgaacatctcacaaaagtgacgggcctcagtaccagagaggtgcggaaatggttcagtgatcgtagataccactgccggaacttgaagggctccagagcgatgatacctggagatcacagttccatcatcattgactctgtgccagaggtgtccttctccccatcgtccaaggtccctgaggtaacctgcattccgacaacagccacactagcaacccacccttctgccaaacgacaatcttggcaccagactcctgacttcacaccaaccaaatacaaggagagagcccctgagcagctcagagccctggagagcagttttgcacaaaaccctcttcctcttgatgaggaactggaccgcctgagaagtgaaaccaaaatgacccgacgagaaattgatagctggttttcagagagacggaaaaaagtgaatgctgaggagaccaagaaggctgaggagaatgcctctcaggaggaagaggaggctgctgaggatgagggtggagaagaggatttggccagtgagctaagggtctctggtgaaaatggctctctggaaatgcccagcagccatatcttggcagagcgcaaagtcagccccattaaaatcaacctgaagaacctgagggtcactgaagccaatggcaggaacgagattccagggctgggtgcctgtgaccctgaggatgatgagtcaaacaaactggcagagcagctcccaggcaaagtgagctgcaaaaagactgcccagcagcggcacttgctgcggcagctctttgtccagacacagtggccaagcaaccaggactatgactccatcatggcccagacgggtctgccacggccagaggtggtgcgctggtttggagatagcaggtacgcactgaagaacggccaactcaaatggtacgaagactataagcgaggcaacttcccaccagggctactggtcattgcccctggcaaccgggagctcctgcaggactattacatgacacacaagatgctgtatgaagaggacctgcagaacctctgtgacaagacccagatgagctcccagcaggtcaagcagtggtttgctgagaaaatgggggaggagaccagagccgtggcagacacaggcagtgaggaccagggccctggtactggtgagctcacagcagttcacaaagggatgggtgacacctattcagaggtgtctgagaacagtgagtcgtgggagccccgtgtccctgaggccagctcagagccctttgacacatcgagtccccaggctggacgtcagctcgaaacagactgaatttgatctgattaatgtgaaggactggccagtctgggaaaccgcctgccacgtggaagagccaaacccgactctctgctgccacatgccgttcccatgcccggctgctgggcacctgggagagcttccagaatcctcgcagacagcccagagcctgccgctaccctcggcctgcccaccaccaagcaagcagcaagcaagatggggttctcatcagttcttcctcccacaatgtaggacctttcctttaccttccaatggataaaatagttcagagttcatagtcatattcatagacacagaatcaagcttttaacatatacatccacctctatatgttaaataaaacatcagattatcaacactgtcattacgtagaaactttggttagccaagcagtgcattgtcagttacgtcatctctaaaaatgacctgtgtctgttctctggggattgctgggtcacaggtgcccctcaccttccacagtcaggcagggaagttataggcacaaagctacgtctggaacccctttgtgccccctttgtgttcctcaaggaagcagtacctttgaagagatctctgctgcattaagtgatgaccggctacgtttcatgtcaggcttgctttgccttgtgggctactcagtgcagaacctgctgtaaccctcagttcaaaaaatggactggcaatgtgattagcgttggatgctttaccattctctttagttgttaccgtaattctgctttttcatgggagtttgaatcatggaccataacttttcagttatcagatcaactaaagaaacatttgttgttaagcctaatgtgctgacctatgtgcctgcattttttttttaatctagacatgtttggagtgagagaaagatggaaaaaagacatggggtagggacgtaagtggaaatctatagccacagcctgaagctttgaccactgcggttttcagagccctttctccacactcatttcagagcctcctatggtttgggaaggaataacacactggcccattagtaagggtgaaggctggagggatttgttgacttcttggaattatcagaggtagggtggtctttagcacaaagacttgcatgcagagatccctggcagaacacccagagtgcccgtggctcccaccccagggtctggccggtgtgctggatgcatgcccaagggtgctgggcatcactggtccttgtgaggatgcttttaaagttttatatttatgtccccaaacttggaaacaagaactctactttagcctaaccctcatgtccttttttgaattgagaaaattacaggaaatggtgcctttgaaaattagaaaacttgcttacagagctgttctaaatggtaaatcctcaatttccccaagaccggttgctctgagagtagctggtaaagaggggcgaactaaagacctgtccacctgtagctccgctcatttcttagaaaccacctgcttcccagagtgccaagccacaagtaccaggcttcgtgggcacagacacctcctgggctgggcagagtgacagtgctagaagaccccagagagagggcaagggctttgggcaagaagcactggtggtgttttagggaccgtccttctcccctacccagggaactggacctggcagggcaccgtgctcatgtggctccaaggacaagcatggcggtggccccttctgccttccaggagaggtcttgcttttgaaaccaaaatcatgttcttctaaagtgtcatcttctgccctccctgtcccaatagggaccacatcttatttgtctcaaacagggacttgtgagtacttggcaagttttgcagcctatttttgtattcttaatttggggagtaaagatgtttggtctcaaaaacctttgaggaattgccaagaatggcgagtgattgctttccttcagagaacagacacttggaatttctccttttagtgtttatatacgtgcagattaatttatatatatatatatacacacacacatatacagtataaatactcatttgattctcgtaaaacgcgcatctggcgtgtgcagttgagaaacttggtggcacatgggtgttgggggagtagcctgtgttggagggacaccagtgcactaggcagctggggcggcccaggctgaagccatctccgggtgtctgagaaaccacccagtgcctcacctccagatcctgctggcatcacctccagagccctgcatgcactggctgaagagttggtctgtggagaggattttcttggttacttgtattcacggttaatttacaacccaaacagcaaaacacagttggtggacaagttcatgcaggacctacagtgacccagccatgggcactagctcatctttcaggtggaaaagtacagtgctgcctgccctggtatgtttttcttatagatgttagccctgcccaacagccagggctacactacaaaaggcaagaatgcccatgtaaggagcccagcagtctggacagatccttcttcctctgctgttggatgagagtgagtgagtatgntctggaccttatccttgaaagatgatcaaaagcgatgatgagggaggcagtcatcacgcaggtgcttaaagggacattgtaggaggtactcaagggtttgggggcaaaaccctgaatccagccagtcgtgcacagagacacacccacactagcccagtggcagtgggggatgtgggatggcagcagccaggtatgtagccctgtcacaggacagctcactgtggttttgcacactgcctaagggttaaattgtgttgttgccttcagtagaaggcatttgtgggctgcagagttgagagttgggtgaggttagtctctcctgaagaaaaagcctataaaaagtggctaatcttatcccttttctctgtatgcagttggactcgtcagagatagtaaaatcatcttttagtgtttttttgttgctgatgtcttgtacccatttgttttttacatggggttgtagatcgagttctcaaaggtgaaaccagatgatcattctgataaaggaaatttaaatttgatacatatgctttgtatattttgattacttgttttcgtttttgactataaaggagctcttttttcttgctcagagtttacctgggagatttcaccagtttgactcaccatttgcagatgtgcttttgtattaaatttaaattttcacatatcacatccattctcaaggtagttatatgctggagaagaaaaatcctctagacacatgaaggcccacatagtcaagtcttccagggcaaagccagcagcccacccaggtcaggtagccagcagggctcagttcccctcactccagacacggaccctcctcttcagggtctcttgacccagcttccttctctccttttacctgagagcacagacctctctcagccagcctgcccagaccacggggggctactcccatgtagtttggggagcacttgatctcagaaaagctccattgtctgagcaaatgggcagttgtggagctcaagcctttctcctgtgctcaagtcccttccccaagcaaggcttcaacctcatctacccaccatgtagttttctctggccatttaagtggggcggcagggacatggttgggccatgccacaccagggctggtgaggcaaccagttttgattttgacagagtggctggaggaaaagtggcaatcaaggtgctgcttggtttgctctgagtgcaaatggaaccaacaggtttctgctgcaatctgtgtgttcccagtgccaggtcacaccaggaggggtggggcagggctaaccaagtggtctctgaactcaccgagcgtctgcacttggttgtgaagttaatgggagtacagagagcgtctggccttggagaggggttgagagcctcctttttggttcttcattcctgagctcttgcctgcccacaaatctgacctctttgaatggggacgcagtccttcaacagagaagtttctatggcaaagaagtttctatttagctctagatccagcagagtcatccattctaactgccctgaagtctagagcaggggagggaacccagaggctggggatgagactaggcagaccctggttaccatatggacaaggacaggggaaagcacccccttcctcaatttctgaaagttctatctttgggttcgcaggactttgaggatgataaagaacatataggtactagcttgttgttgctggtccaaagcttccacagccctgagaatttggctttcgtggctgctctggcagctgagcgaagggaggaaggcagccgctctggtggggactctaggcaccttccctgctgtccacttggataggcggtgagccccagggtactgagaggagcctgagcatttacctgccattagtgcctcttccttcaggagactggcttgaaacgtgtgttcatgtgcgcgtgcacacacacacatgagcacctgtatgtgttaatgaatagtttttcttggttaatgctttttaacttctgttcctttccgtaagtggatgattcaaaattaacgtgacttggctgggcgcagtggctcacacctgtaatcccagcactttgggaggccaagggaggcggatcacctgaggtcaggagttcgagaccagcctgatcggcatggtgaaaccccgtttctactaaaaatacaaaaattagccgggcgtggtggtgcgcgcctgtaatcccagctactcaggaggctgaggaaggagaatcacttgaacccgggaggtggaggttgcagtgagctgagatcgtgccactgcactccagcctgggcgacagagcgaaactccgtctcaaaaaaaaaaaaaaaacttaatgtgactggagttaaaagtgaaatgtcaggttgtttagtcactgaatagagagctacaagtgcttggtctttcccaagaatcaaacctgagtagaaatacatttaaaagaaaaatctacatggtacctatgaatcctgtaatttgtttagggagatcttgtcactcatccctggttcctgcccatactgtttggtctcgttcttgcagtttgcttggaacagggccagagccccacatgagattgtcagcaggagtgaggagcgccagtccctactcctcagcagggacccagcacagcaatccggttgttctcggttagactgggtcggggccaggggagaagcagtcacccctgtgtagagggttcccgctgtgcttctgagcagttgctttgttcagaagtgttaggagggtcagattgtgccataattgttattaaagagaaaacacgcccaccttcctttctcccctgctggccattgttcattgagttttactgagggcagcctttgtggaagtcagggaggttgccaaaggcctgtagatgcctcctgacaaggtcttgattcctggttttctagcacccatttgcattttggtcttcagcacaaagccttgttccctgtggccggacttctgggcaataagactggggagtgactgttgagcagtctgctgtcaggagagatggctgaaaaggtgatcatcttggtgctaaacaagtaagaggcaactgccctgtttttgtttgttttgaggcacaatgaaactttagccaaactctgcaagagggtcccatctcctgccatggccaggtgtgagagaccaaaccgagaaaacagcatactctatcacttaagccttgggtagaatgggaattctttaccctgggtaaacgttttaacaaaaaaatggaacttaacttcggtttggactgtggtcgtgctgaggcaggagtggggttgccctcttggggctgaatctccaggcctcacgaggtcccctgtggggatgctgctatttctaagatgcaaattgcacatttcctagattttgtatctgtggatttggataagggaggggaacacggacaaattgcttgtacaatttgaaatgggcctcaatggtacttcaaaccttttgattattcctaaataaaaacataaatatat

SEQ ID NO: 372297 - DNA, 9267 bp, Homo sapiens
  misc_feature (5754)..(5754): n is a, c, g, or t
cgaatcgtaaccgttcgtacgagaatcgctgtcctctccttgctcgagatccattgtgctctaaagtgtgaaaagacctagatggtagaaggcaagcagtggaatgtgtctgggtatccgagaaatatacagaaagcacttaagagaacttaatcatttttttctccctttccttagattgaatagggaaaacctgctttctgcaaacaactgaaaaagctgcatttagaaactgtttctttggccctcatcgagaagctggaacttgtattgttaggccccttatgggacaagctctcaactgctgatcacccagtgattgtcaccatggccagcaagaggaaatccaccacaccatgcatgatcccagtgaagactgtggtgttgcaagatgccagcatggaggcccagcccgctgagaccttgcctgaaggaccccagcaggatctgcccccagaagcatctgctgccagcagtgaggcagcacagaaccccagcagtactgatggctctacactggccaatgggcatcggagcactttagatggctatttatattcctgtaaatactgcgatttcagatcccatgacatgacccaatttgtgggacatatgaactcagagcacacagactttaataaagacccaacctttgtatgcagtgggtgcagttttctggcaaaaacccctgaggggctttccttgcacaatgccacatgtcactccggggaagccagctttgtgtggaacgtggccaagccagacaatcatgtggttgtggagcagagcatccctgagagcaccagcactcctgacctagcgggtgagcccagtgctgaaggggctgatggacaggcagaaatcatcattaccaaaactccaatcatgaagataatgaaaggcaaagctgaagccaaaaaaattcatacactcaaggagaatgtccctagccagcctgtgggtgaggccttaccaaagctgtcgactggagaaatggaggtgagagagggggaccattccttcatcaatggggcagttccagtcagccaggcatctgccagctctgcaaaaaacccccatgccgccaacgggcccctgataggaacagtgccagttttgccagctggcatagcacagttcctctccctccagcagcagcccccagtgcatgcccaacaccatgtccaccagccactgcccacggccaaggcccttcccaaagtgatgatccccctgagcagcattccaacgtacagtgcagccatggactctaacagcttcctgaagaactccttccacaagttcccctaccccaccaaagccgagctctgctatttgactgtggtgaccaagtatccagaagaacagctcaagatctggttcacagcccaaaggctgaagcaggggatcagctggtcccctgaggagattgaggatgcccggaaaaagatgttcaatacagtcatccagtctgtgcctcagcccacaattacggttctaaataccccactcgtcgccagtgctggcaatgtccagcatctcatccaggccgctcttccaggtcacgttgtggggcagccagagggtacaggagggggacttctggtcactcagccattgatggccaatgggttgcaagcaacaagttcccctctccccctcacggtgacatccgtccccaagcagccaggtgtggcacccattaacactgtgtgttcaaatacaacgtcagctgtgaaggtggtcaatgcggcccagtcgctcctcacggcctgccccagcataacctcccaagccttccttgatgctagcatctacaaaaataagaaatctcatgaacagctgtcagctctgaaagggagcttctgtcggaaccagttcccagggcagagcgaagttgaacatctcacaaaagtgacgggcctcagtaccagagaggtgcggaaatggttcagtgatcgtagataccactgccggaacttgaagggctccagagcgatgatacctggagatcacagttccatcatcattgactctgtgccagaggtgtccttctccccatcgtccaaggtccctgaggtaacctgcattccgacaacagccacactagcaacccacccttctgccaaacgacaatcttggcaccagactcctgacttcacaccaaccaaatacaaggagagagcccctgagcagctcagagccctggagagcagttttgcacaaaaccctcttcctcttgatgaggaactggaccgcctgagaagtgaaaccaaaatgacccgacgagaaattgatagctggttttcagagagacggaaaaaagtgaatgctgaggagaccaagaaggctgaggagaatgcctctcaggaggaagaggaggctgctgaggatgagggtggagaagaggatttggccagtgagctaagggtctctggtgaaaatggctctctggaaatgcccagcagccatatcttggcagagcgcaaagtcagccccattaaaatcaacctgaagaacctgagggtcactgaagccaatggcaggaacgagattccagggctgggtgcctgtgaccctgaggatgatgagtcaaacaaactggcagagcagctcccaggcaaagtgagctgcaaaaagactgcccagcagcggcacttgctgcggcagctctttgtccagacacagtggccaagcaaccaggactatgactccatcatggcccagacgggtctgccacggccagaggtggtgcgctggtttggagatagcaggtacgcactgaagaacggccaactcaaatggtacgaagactataagcgaggcaacttcccaccagggctactggtcattgcccctggcaaccgggagctcctgcaggactattacatgacacacaagatgctgtatgaagaggacctgcagaacctctgtgacaagacccagatgagctcccagcaggtcaagcagtggtttgctgagaaaatgggggaggagaccagagccgtggcagacacaggcagtgaggaccagggccctggtactggtgagctcacagcagttcacaaagggatgggtgacacctattcagaggtgtctgagaacagtgagtcgtgggagccccgtgtccctgaggccagctcagagccctttgacacatcgagtccccaggctggacgtcagctcgaaacagactgaatttgatctgattaatgtgaaggactggccagtctgggaaaccgcctgccacgtggaagagccaaacccgactctctgctgccacatgccgttcccatgcccggctgctgggcacctgggagagcttccagaatcctcgcagacagcccagagcctgccgctaccctcggcctgcccaccaccaagcaagcagcaagcaagatggggttctcatcagttcttcctcccacaatgtaggacctttcctttaccttccaatggataaaatagttcagagttcatagtcatattcatagacacagaatcaagcttttaacatatacatccacctctatatgttaaataaaacatcagattatcaacactgtcattacgtagaaactttggttagccaagcagtgcattgtcagttacgtcatctctaaaaatgacctgtgtctgttctctggggattgctgggtcacaggtgcccctcaccttccacagtcaggcagggaagttataggcacaaagctacgtctggaacccctttgtgccccctttgtgttcctcaaggaagcagtacctttgaagagatctctgctgcattaagtgatgaccggctacgtttcatgtcaggcttgctttgccttgtgggctactcagtgcagaacctgctgtaaccctcagttcaaaaaatggactggcaatgtgattagcgttggatgctttaccattctctttagttgttaccgtaattctgctttttcatgggagtttgaatcatggaccataacttttcagttatcagatcaactaaagaaacatttgttgttaagcctaatgtgctgacctatgtgcctgcattttttttttaatctagacatgtttggagtgagagaaagatggaaaaaagacatggggtagggacgtaagtggaaatctatagccacagcctgaagctttgaccactgcggttttcagagccctttctccacactcatttcagagcctcctatggtttgggaaggaataacacactggcccattagtaagggtgaaggctggagggatttgttgacttcttggaattatcagaggtagggtggtctttagcacaaagacttgcatgcagagatccctggcagaacacccagagtgcccgtggctcccaccccagggtctggccggtgtgctggatgcatgcccaagggtgctgggcatcactggtccttgtgaggatgcttttaaagttttatatttatgtccccaaacttggaaacaagaactctactttagcctaaccctcatgtccttttttgaattgagaaaattacaggaaatggtgcctttgaaaattagaaaacttgcttacagagctgttctaaatggtaaatcctcaatttccccaagaccggttgctctgagagtagctggtaaagaggggcgaactaaagacctgtccacctgtagctccgctcatttcttagaaaccacctgcttcccagagtgccaagccacaagtaccaggcttcgtgggcacagacacctcctgggctgggcagagtgacagtgctagaagaccccagagagagggcaagggctttgggcaagaagcactggtggtgttttagggaccgtccttctcccctacccagggaactggacctggcagggcaccgtgctcatgtggctccaaggacaagcatggcggtggccccttctgccttccaggagaggtcttgcttttgaaaccaaaatcatgttcttctaaagtgtcatcttctgccctccctgtcccaatagggaccacatcttatttgtctcaaacagggacttgtgagtacttggcaagttttgcagcctatttttgtattcttaatttggggagtaaagatgtttggtctcaaaaacctttgaggaattgccaagaatggcgagtgattgctttccttcagagaacagacacttggaatttctccttttagtgtttatatacgtgcagattaatttatatatatatatatacacacacacatatacagtataaatactcatttgattctcgtaaaacgcgcatctggcgtgtgcagttgagaaacttggtggcacatgggtgttgggggagtagcctgtgttggagggacaccagtgcactaggcagctggggcggcccaggctgaagccatctccgggtgtctgagaaaccacccagtgcctcacctccagatcctgctggcatcacctccagagccctgcatgcactggctgaagagttggtctgtggagaggattttcttggttacttgtattcacggttaatttacaacccaaacagcaaaacacagttggtggacaagttcatgcaggacctacagtgacccagccatgggcactagctcatctttcaggtggaaaagtacagtgctgcctgccctggtatgtttttcttatagatgttagccctgcccaacagccagggctacactacaaaaggcaagaatgcccatgtaaggagcccagcagtctggacagatccttcttcctctgctgttggatgagagtgagtgagtatgntctggaccttatccttgaaagatgatcaaaagcgatgatgagggaggcagtcatcacgcaggtgcttaaagggacattgtaggaggtactcaagggtttgggggcaaaaccctgaatccagccagtcgtgcacagagacacacccacactagcccagtggcagtgggggatgtgggatggcagcagccaggtatgtagccctgtcacaggacagctcactgtggttttgcacactgcctaagggttaaattgtgttgttgccttcagtagaaggcatttgtgggctgcagagttgagagttgggtgaggttagtctctcctgaagaaaaagcctataaaaagtggctaatcttatcccttttctctgtatgcagttggactcgtcagagatagtaaaatcatcttttagtgtttttttgttgctgatgtcttgtacccatttgttttttacatggggttgtagatcgagttctcaaaggtgaaaccagatgatcattctgataaaggaaatttaaatttgatacatatgctttgtatattttgattacttgttttcgtttttgactataaaggagctcttttttcttgctcagagtttacctgggagatttcaccagtttgactcaccatttgcagatgtgcttttgtattaaatttaaattttcacatatcacatccattctcaaggtagttatatgctggagaagaaaaatcctctagacacatgaaggcccacatagtcaagtcttccagggcaaagccagcagcccacccaggtcaggtagccagcagggctcagttcccctcactccagacacggaccctcctcttcagggtctcttgacccagcttccttctctccttttacctgagagcacagacctctctcagccagcctgcccagaccacggggggctactcccatgtagtttggggagcacttgatctcagaaaagctccattgtctgagcaaatgggcagttgtggagctcaagcctttctcctgtgctcaagtcccttccccaagcaaggcttcaacctcatctacccaccatgtagttttctctggccatttaagtggggcggcagggacatggttgggccatgccacaccagggctggtgaggcaaccagttttgattttgacagagtggctggaggaaaagtggcaatcaaggtgctgcttggtttgctctgagtgcaaatggaaccaacaggtttctgctgcaatctgtgtgttcccagtgccaggtcacaccaggaggggtggggcagggctaaccaagtggtctctgaactcaccgagcgtctgcacttggttgtgaagttaatgggagtacagagagcgtctggccttggagaggggttgagagcctcctttttggttcttcattcctgagctcttgcctgcccacaaatctgacctctttgaatggggacgcagtccttcaacagagaagtttctatggcaaagaagtttctatttagctctagatccagcagagtcatccattctaactgccctgaagtctagagcaggggagggaacccagaggctggggatgagactaggcagaccctggttaccatatggacaaggacaggggaaagcacccccttcctcaatttctgaaagttctatctttgggttcgcaggactttgaggatgataaagaacatataggtactagcttgttgttgctggtccaaagcttccacagccctgagaatttggctttcgtggctgctctggcagctgagcgaagggaggaaggcagccgctctggtggggactctaggcaccttccctgctgtccacttggataggcggtgagccccagggtactgagaggagcctgagcatttacctgccattagtgcctcttccttcaggagactggcttgaaacgtgtgttcatgtgcgcgtgcacacacacacatgagcacctgtatgtgttaatgaatagtttttcttggttaatgctttttaacttctgttcctttccgtaagtggatgattcaaaattaacgtgacttggctgggcgcagtggctcacacctgtaatcccagcactttgggaggccaagggaggcggatcacctgaggtcaggagttcgagaccagcctgatcggcatggtgaaaccccgtttctactaaaaatacaaaaattagccgggcgtggtggtgcgcgcctgtaatcccagctactcaggaggctgaggaaggagaatcacttgaacccgggaggtggaggttgcagtgagctgagatcgtgccactgcactccagcctgggcgacagagcgaaactccgtctcaaaaaaaaaaaaaaaacttaatgtgactggagttaaaagtgaaatgtcaggttgtttagtcactgaatagagagctacaagtgcttggtctttcccaagaatcaaacctgagtagaaatacatttaaaagaaaaatctacatggtacctatgaatcctgtaatttgtttagggagatcttgtcactcatccctggttcctgcccatactgtttggtctcgttcttgcagtttgcttggaacagggccagagccccacatgagattgtcagcaggagtgaggagcgccagtccctactcctcagcagggacccagcacagcaatccggttgttctcggttagactgggtcggggccaggggagaagcagtcacccctgtgtagagggttcccgctgtgcttctgagcagttgctttgttcagaagtgttaggagggtcagattgtgccataattgttattaaagagaaaacacgcccaccttcctttctcccctgctggccattgttcattgagttttactgagggcagcctttgtggaagtcagggaggttgccaaaggcctgtagatgcctcctgacaaggtcttgattcctggttttctagcacccatttgcattttggtcttcagcacaaagccttgttccctgtggccggacttctgggcaataagactggggagtgactgttgagcagtctgctgtcaggagagatggctgaaaaggtgatcatcttggtgctaaacaagtaagaggcaactgccctgtttttgtttgttttgaggcacaatgaaactttagccaaactctgcaagagggtcccatctcctgccatggccaggtgtgagagaccaaaccgagaaaacagcatactctatcacttaagccttgggtagaatgggaattctttaccctgggtaaacgttttaacaaaaaaatggaacttaacttcggtttggactgtggtcgtgctgaggcaggagtggggttgccctcttggggctgaatctccaggcctcacgaggtcccctgtggggatgctgctatttctaagatgcaaattgcacatttcctagattttgtatctgtggatttggataagggaggggaacacggacaaattgcttgtacaatttgaaatgggcctcaatggtacttcaaaccttttgattattcctaaataaaaacataaatatat

SEQ ID NO: 372298 - DNA, 7172 bp, Homo sapiens
  misc_feature (3659)..(3659): n is a, c, g, or t
ccggagtcggttggtgcagctgcgtccccgccgctcagcagtccgcggctccggcgtcgccgccgccgccgcctctgcggggcctgcgccggccgcccgcccggccgcggggagggaggcccgcagcgcgggaagagcggcccggtcgcgggcgccgccaccgccgccgctgccaggactgaaatgcaactgcagaagcaacatgtgaccttttagagatgcttgtgggactgcataaagtgaagagggaaactggaaaaaaacaatgaaattgaatagggaaaacctgctttctgcaaacaactgaaaaagctgcatttagaaactgtttctttggccctcatcgagaagctggaacttgtattgttaggccccttatgggacaagctctcaactgctgatcacccagtgattgtcaccatggccagcaagaggaaatccaccacaccatgcatgatcccagtgaagactgtggtgttgcaagatgccagcatggaggcccagcccgctgagaccttgcctgaaggaccccagcaggatctgcccccagaagcatctgctgccagcagtgaggcagcacagaaccccagcagtactgatggctctacactggccaatgggcatcggagcactttagatggctatttatattcctgtaaatactgcgatttcagatcccatgacatgacccaatttgtgggacatatgaactcagagcacacagactttaataaagacccaacctttgtatgcagtgggtgcagttttctggcaaaaacccctgaggggctttccttgcacaatgccacatgtcactccggggaagccagctttgtgtggaacgtggccaagccagacaatcatgtggttgtggagcagagcatccctgagagcaccagcactcctgacctagcgggtgagcccagtgctgaaggggctgatggacaggcagaaatcatcattaccaaaactccaatcatgaagataatgaaaggcaaagctgaagccaaaaaaattcatacactcaaggagaatgtccctagccagcctgtgggtgaggccttaccaaagctgtcgactggagaaatggagaaacagactgaatttgatctgattaatgtgaaggactggccagtctgggaaaccgcctgccacgtggaagagccaaacccgactctctgctgccacatgccgttcccatgcccggctgctgggcacctgggagagcttccagaatcctcgcagacagcccagagcctgccgctaccctcggcctgcccaccaccaagcaagcagcaagcaagatggggttctcatcagttcttcctcccacaatgtaggacctttcctttaccttccaatggataaaatagttcagagttcatagtcatattcatagacacagaatcaagcttttaacatatacatccacctctatatgttaaataaaacatcagattatcaacactgtcattacgtagaaactttggttagccaagcagtgcattgtcagttacgtcatctctaaaaatgacctgtgtctgttctctggggattgctgggtcacaggtgcccctcaccttccacagtcaggcagggaagttataggcacaaagctacgtctggaacccctttgtgccccctttgtgttcctcaaggaagcagtacctttgaagagatctctgctgcattaagtgatgaccggctacgtttcatgtcaggcttgctttgccttgtgggctactcagtgcagaacctgctgtaaccctcagttcaaaaaatggactggcaatgtgattagcgttggatgctttaccattctctttagttgttaccgtaattctgctttttcatgggagtttgaatcatggaccataacttttcagttatcagatcaactaaagaaacatttgttgttaagcctaatgtgctgacctatgtgcctgcattttttttttaatctagacatgtttggagtgagagaaagatggaaaaaagacatggggtagggacgtaagtggaaatctatagccacagcctgaagctttgaccactgcggttttcagagccctttctccacactcatttcagagcctcctatggtttgggaaggaataacacactggcccattagtaagggtgaaggctggagggatttgttgacttcttggaattatcagaggtagggtggtctttagcacaaagacttgcatgcagagatccctggcagaacacccagagtgcccgtggctcccaccccagggtctggccggtgtgctggatgcatgcccaagggtgctgggcatcactggtccttgtgaggatgcttttaaagttttatatttatgtccccaaacttggaaacaagaactctactttagcctaaccctcatgtccttttttgaattgagaaaattacaggaaatggtgcctttgaaaattagaaaacttgcttacagagctgttctaaatggtaaatcctcaatttccccaagaccggttgctctgagagtagctggtaaagaggggcgaactaaagacctgtccacctgtagctccgctcatttcttagaaaccacctgcttcccagagtgccaagccacaagtaccaggcttcgtgggcacagacacctcctgggctgggcagagtgacagtgctagaagaccccagagagagggcaagggctttgggcaagaagcactggtggtgttttagggaccgtccttctcccctacccagggaactggacctggcagggcaccgtgctcatgtggctccaaggacaagcatggcggtggccccttctgccttccaggagaggtcttgcttttgaaaccaaaatcatgttcttctaaagtgtcatcttctgccctccctgtcccaatagggaccacatcttatttgtctcaaacagggacttgtgagtacttggcaagttttgcagcctatttttgtattcttaatttggggagtaaagatgtttggtctcaaaaacctttgaggaattgccaagaatggcgagtgattgctttccttcagagaacagacacttggaatttctccttttagtgtttatatacgtgcagattaatttatatatatatatatacacacacacatatacagtataaatactcatttgattctcgtaaaacgcgcatctggcgtgtgcagttgagaaacttggtggcacatgggtgttgggggagtagcctgtgttggagggacaccagtgcactaggcagctggggcggcccaggctgaagccatctccgggtgtctgagaaaccacccagtgcctcacctccagatcctgctggcatcacctccagagccctgcatgcactggctgaagagttggtctgtggagaggattttcttggttacttgtattcacggttaatttacaacccaaacagcaaaacacagttggtggacaagttcatgcaggacctacagtgacccagccatgggcactagctcatctttcaggtggaaaagtacagtgctgcctgccctggtatgtttttcttatagatgttagccctgcccaacagccagggctacactacaaaaggcaagaatgcccatgtaaggagcccagcagtctggacagatccttcttcctctgctgttggatgagagtgagtgagtatgntctggaccttatccttgaaagatgatcaaaagcgatgatgagggaggcagtcatcacgcaggtgcttaaagggacattgtaggaggtactcaagggtttgggggcaaaaccctgaatccagccagtcgtgcacagagacacacccacactagcccagtggcagtgggggatgtgggatggcagcagccaggtatgtagccctgtcacaggacagctcactgtggttttgcacactgcctaagggttaaattgtgttgttgccttcagtagaaggcatttgtgggctgcagagttgagagttgggtgaggttagtctctcctgaagaaaaagcctataaaaagtggctaatcttatcccttttctctgtatgcagttggactcgtcagagatagtaaaatcatcttttagtgtttttttgttgctgatgtcttgtacccatttgttttttacatggggttgtagatcgagttctcaaaggtgaaaccagatgatcattctgataaaggaaatttaaatttgatacatatgctttgtatattttgattacttgttttcgtttttgactataaaggagctcttttttcttgctcagagtttacctgggagatttcaccagtttgactcaccatttgcagatgtgcttttgtattaaatttaaattttcacatatcacatccattctcaaggtagttatatgctggagaagaaaaatcctctagacacatgaaggcccacatagtcaagtcttccagggcaaagccagcagcccacccaggtcaggtagccagcagggctcagttcccctcactccagacacggaccctcctcttcagggtctcttgacccagcttccttctctccttttacctgagagcacagacctctctcagccagcctgcccagaccacggggggctactcccatgtagtttggggagcacttgatctcagaaaagctccattgtctgagcaaatgggcagttgtggagctcaagcctttctcctgtgctcaagtcccttccccaagcaaggcttcaacctcatctacccaccatgtagttttctctggccatttaagtggggcggcagggacatggttgggccatgccacaccagggctggtgaggcaaccagttttgattttgacagagtggctggaggaaaagtggcaatcaaggtgctgcttggtttgctctgagtgcaaatggaaccaacaggtttctgctgcaatctgtgtgttcccagtgccaggtcacaccaggaggggtggggcagggctaaccaagtggtctctgaactcaccgagcgtctgcacttggttgtgaagttaatgggagtacagagagcgtctggccttggagaggggttgagagcctcctttttggttcttcattcctgagctcttgcctgcccacaaatctgacctctttgaatggggacgcagtccttcaacagagaagtttctatggcaaagaagtttctatttagctctagatccagcagagtcatccattctaactgccctgaagtctagagcaggggagggaacccagaggctggggatgagactaggcagaccctggttaccatatggacaaggacaggggaaagcacccccttcctcaatttctgaaagttctatctttgggttcgcaggactttgaggatgataaagaacatataggtactagcttgttgttgctggtccaaagcttccacagccctgagaatttggctttcgtggctgctctggcagctgagcgaagggaggaaggcagccgctctggtggggactctaggcaccttccctgctgtccacttggataggcggtgagccccagggtactgagaggagcctgagcatttacctgccattagtgcctcttccttcaggagactggcttgaaacgtgtgttcatgtgcgcgtgcacacacacacatgagcacctgtatgtgttaatgaatagtttttcttggttaatgctttttaacttctgttcctttccgtaagtggatgattcaaaattaacgtgacttggctgggcgcagtggctcacacctgtaatcccagcactttgggaggccaagggaggcggatcacctgaggtcaggagttcgagaccagcctgatcggcatggtgaaaccccgtttctactaaaaatacaaaaattagccgggcgtggtggtgcgcgcctgtaatcccagctactcaggaggctgaggaaggagaatcacttgaacccgggaggtggaggttgcagtgagctgagatcgtgccactgcactccagcctgggcgacagagcgaaactccgtctcaaaaaaaaaaaaaaaacttaatgtgactggagttaaaagtgaaatgtcaggttgtttagtcactgaatagagagctacaagtgcttggtctttcccaagaatcaaacctgagtagaaatacatttaaaagaaaaatctacatggtacctatgaatcctgtaatttgtttagggagatcttgtcactcatccctggttcctgcccatactgtttggtctcgttcttgcagtttgcttggaacagggccagagccccacatgagattgtcagcaggagtgaggagcgccagtccctactcctcagcagggacccagcacagcaatccggttgttctcggttagactgggtcggggccaggggagaagcagtcacccctgtgtagagggttcccgctgtgcttctgagcagttgctttgttcagaagtgttaggagggtcagattgtgccataattgttattaaagagaaaacacgcccaccttcctttctcccctgctggccattgttcattgagttttactgagggcagcctttgtggaagtcagggaggttgccaaaggcctgtagatgcctcctgacaaggtcttgattcctggttttctagcacccatttgcattttggtcttcagcacaaagccttgttccctgtggccggacttctgggcaataagactggggagtgactgttgagcagtctgctgtcaggagagatggctgaaaaggtgatcatcttggtgctaaacaagtaagaggcaactgccctgtttttgtttgttttgaggcacaatgaaactttagccaaactctgcaagagggtcccatctcctgccatggccaggtgtgagagaccaaaccgagaaaacagcatactctatcacttaagccttgggtagaatgggaattctttaccctgggtaaacgttttaacaaaaaaatggaacttaacttcggtttggactgtggtcgtgctgaggcaggagtggggttgccctcttggggctgaatctccaggcctcacgaggtcccctgtggggatgctgctatttctaagatgcaaattgcacatttcctagattttgtatctgtggatttggataagggaggggaacacggacaaattgcttgtacaatttgaaatgggcctcaatggtacttcaaaccttttgattattcctaaataaaaacataaatatat

SEQ ID NO: 372299 - DNA, 6109 bp, Homo sapiens
  misc_feature (2596)..(2596): n is a, c, g, or t
accccatcagagggcagccagaagctcagaaacagactgaatttgatctgattaatgtgaaggactggccagtctgggaaaccgcctgccacgtggaagagccaaacccgactctctgctgccacatgccgttcccatgcccggctgctgggcacctgggagagcttccagaatcctcgcagacagcccagagcctgccgctaccctcggcctgcccaccaccaagcaagcagcaagcaagatggggttctcatcagttcttcctcccacaatgtaggacctttcctttaccttccaatggataaaatagttcagagttcatagtcatattcatagacacagaatcaagcttttaacatatacatccacctctatatgttaaataaaacatcagattatcaacactgtcattacgtagaaactttggttagccaagcagtgcattgtcagttacgtcatctctaaaaatgacctgtgtctgttctctggggattgctgggtcacaggtgcccctcaccttccacagtcaggcagggaagttataggcacaaagctacgtctggaacccctttgtgccccctttgtgttcctcaaggaagcagtacctttgaagagatctctgctgcattaagtgatgaccggctacgtttcatgtcaggcttgctttgccttgtgggctactcagtgcagaacctgctgtaaccctcagttcaaaaaatggactggcaatgtgattagcgttggatgctttaccattctctttagttgttaccgtaattctgctttttcatgggagtttgaatcatggaccataacttttcagttatcagatcaactaaagaaacatttgttgttaagcctaatgtgctgacctatgtgcctgcattttttttttaatctagacatgtttggagtgagagaaagatggaaaaaagacatggggtagggacgtaagtggaaatctatagccacagcctgaagctttgaccactgcggttttcagagccctttctccacactcatttcagagcctcctatggtttgggaaggaataacacactggcccattagtaagggtgaaggctggagggatttgttgacttcttggaattatcagaggtagggtggtctttagcacaaagacttgcatgcagagatccctggcagaacacccagagtgcccgtggctcccaccccagggtctggccggtgtgctggatgcatgcccaagggtgctgggcatcactggtccttgtgaggatgcttttaaagttttatatttatgtccccaaacttggaaacaagaactctactttagcctaaccctcatgtccttttttgaattgagaaaattacaggaaatggtgcctttgaaaattagaaaacttgcttacagagctgttctaaatggtaaatcctcaatttccccaagaccggttgctctgagagtagctggtaaagaggggcgaactaaagacctgtccacctgtagctccgctcatttcttagaaaccacctgcttcccagagtgccaagccacaagtaccaggcttcgtgggcacagacacctcctgggctgggcagagtgacagtgctagaagaccccagagagagggcaagggctttgggcaagaagcactggtggtgttttagggaccgtccttctcccctacccagggaactggacctggcagggcaccgtgctcatgtggctccaaggacaagcatggcggtggccccttctgccttccaggagaggtcttgcttttgaaaccaaaatcatgttcttctaaagtgtcatcttctgccctccctgtcccaatagggaccacatcttatttgtctcaaacagggacttgtgagtacttggcaagttttgcagcctatttttgtattcttaatttggggagtaaagatgtttggtctcaaaaacctttgaggaattgccaagaatggcgagtgattgctttccttcagagaacagacacttggaatttctccttttagtgtttatatacgtgcagattaatttatatatatatatatacacacacacatatacagtataaatactcatttgattctcgtaaaacgcgcatctggcgtgtgcagttgagaaacttggtggcacatgggtgttgggggagtagcctgtgttggagggacaccagtgcactaggcagctggggcggcccaggctgaagccatctccgggtgtctgagaaaccacccagtgcctcacctccagatcctgctggcatcacctccagagccctgcatgcactggctgaagagttggtctgtggagaggattttcttggttacttgtattcacggttaatttacaacccaaacagcaaaacacagttggtggacaagttcatgcaggacctacagtgacccagccatgggcactagctcatctttcaggtggaaaagtacagtgctgcctgccctggtatgtttttcttatagatgttagccctgcccaacagccagggctacactacaaaaggcaagaatgcccatgtaaggagcccagcagtctggacagatccttcttcctctgctgttggatgagagtgagtgagtatgntctggaccttatccttgaaagatgatcaaaagcgatgatgagggaggcagtcatcacgcaggtgcttaaagggacattgtaggaggtactcaagggtttgggggcaaaaccctgaatccagccagtcgtgcacagagacacacccacactagcccagtggcagtgggggatgtgggatggcagcagccaggtatgtagccctgtcacaggacagctcactgtggttttgcacactgcctaagggttaaattgtgttgttgccttcagtagaaggcatttgtgggctgcagagttgagagttgggtgaggttagtctctcctgaagaaaaagcctataaaaagtggctaatcttatcccttttctctgtatgcagttggactcgtcagagatagtaaaatcatcttttagtgtttttttgttgctgatgtcttgtacccatttgttttttacatggggttgtagatcgagttctcaaaggtgaaaccagatgatcattctgataaaggaaatttaaatttgatacatatgctttgtatattttgattacttgttttcgtttttgactataaaggagctcttttttcttgctcagagtttacctgggagatttcaccagtttgactcaccatttgcagatgtgcttttgtattaaatttaaattttcacatatcacatccattctcaaggtagttatatgctggagaagaaaaatcctctagacacatgaaggcccacatagtcaagtcttccagggcaaagccagcagcccacccaggtcaggtagccagcagggctcagttcccctcactccagacacggaccctcctcttcagggtctcttgacccagcttccttctctccttttacctgagagcacagacctctctcagccagcctgcccagaccacggggggctactcccatgtagtttggggagcacttgatctcagaaaagctccattgtctgagcaaatgggcagttgtggagctcaagcctttctcctgtgctcaagtcccttccccaagcaaggcttcaacctcatctacccaccatgtagttttctctggccatttaagtggggcggcagggacatggttgggccatgccacaccagggctggtgaggcaaccagttttgattttgacagagtggctggaggaaaagtggcaatcaaggtgctgcttggtttgctctgagtgcaaatggaaccaacaggtttctgctgcaatctgtgtgttcccagtgccaggtcacaccaggaggggtggggcagggctaaccaagtggtctctgaactcaccgagcgtctgcacttggttgtgaagttaatgggagtacagagagcgtctggccttggagaggggttgagagcctcctttttggttcttcattcctgagctcttgcctgcccacaaatctgacctctttgaatggggacgcagtccttcaacagagaagtttctatggcaaagaagtttctatttagctctagatccagcagagtcatccattctaactgccctgaagtctagagcaggggagggaacccagaggctggggatgagactaggcagaccctggttaccatatggacaaggacaggggaaagcacccccttcctcaatttctgaaagttctatctttgggttcgcaggactttgaggatgataaagaacatataggtactagcttgttgttgctggtccaaagcttccacagccctgagaatttggctttcgtggctgctctggcagctgagcgaagggaggaaggcagccgctctggtggggactctaggcaccttccctgctgtccacttggataggcggtgagccccagggtactgagaggagcctgagcatttacctgccattagtgcctcttccttcaggagactggcttgaaacgtgtgttcatgtgcgcgtgcacacacacacatgagcacctgtatgtgttaatgaatagtttttcttggttaatgctttttaacttctgttcctttccgtaagtggatgattcaaaattaacgtgacttggctgggcgcagtggctcacacctgtaatcccagcactttgggaggccaagggaggcggatcacctgaggtcaggagttcgagaccagcctgatcggcatggtgaaaccccgtttctactaaaaatacaaaaattagccgggcgtggtggtgcgcgcctgtaatcccagctactcaggaggctgaggaaggagaatcacttgaacccgggaggtggaggttgcagtgagctgagatcgtgccactgcactccagcctgggcgacagagcgaaactccgtctcaaaaaaaaaaaaaaaacttaatgtgactggagttaaaagtgaaatgtcaggttgtttagtcactgaatagagagctacaagtgcttggtctttcccaagaatcaaacctgagtagaaatacatttaaaagaaaaatctacatggtacctatgaatcctgtaatttgtttagggagatcttgtcactcatccctggttcctgcccatactgtttggtctcgttcttgcagtttgcttggaacagggccagagccccacatgagattgtcagcaggagtgaggagcgccagtccctactcctcagcagggacccagcacagcaatccggttgttctcggttagactgggtcggggccaggggagaagcagtcacccctgtgtagagggttcccgctgtgcttctgagcagttgctttgttcagaagtgttaggagggtcagattgtgccataattgttattaaagagaaaacacgcccaccttcctttctcccctgctggccattgttcattgagttttactgagggcagcctttgtggaagtcagggaggttgccaaaggcctgtagatgcctcctgacaaggtcttgattcctggttttctagcacccatttgcattttggtcttcagcacaaagccttgttccctgtggccggacttctgggcaataagactggggagtgactgttgagcagtctgctgtcaggagagatggctgaaaaggtgatcatcttggtgctaaacaagtaagaggcaactgccctgtttttgtttgttttgaggcacaatgaaactttagccaaactctgcaagagggtcccatctcctgccatggccaggtgtgagagaccaaaccgagaaaacagcatactctatcacttaagccttgggtagaatgggaattctttaccctgggtaaacgttttaacaaaaaaatggaacttaacttcggtttggactgtggtcgtgctgaggcaggagtggggttgccctcttggggctgaatctccaggcctcacgaggtcccctgtggggatgctgctatttctaagatgcaaattgcacatttcctagattttgtatctgtggatttggataagggaggggaacacggacaaattgcttgtacaatttgaaatgggcctcaatggtacttcaaaccttttgattattcctaaataaaaacataaatatat

SEQ ID NO: 372300 - DNA, 3236 bp, Homo sapiens
ggcctaggggcaggtcctgtgttctctccctctctctcctggctctgggacatctgtccctggctgcctttcatggaggaaggacactggcctttctggttggatgctgtgtggatgctctctgcttgagcctcgtggtctcttgtctctttttggaccaatatcctcagattggtgcagctttttcagttcagatatcacaccccaagtggataaaggcaacttgcaggagaggagagccagccaagaagaaaattttaaaaccaaacctcgtttaggattttcctaaagtcatcttctcttttttcttgctcagagtttacctgggagatttcaccagtttgactcaccatttgcagatgtgcttttgtattaaatttaaattttcacatatcacatccattctcaaggtagttatatgctggagaagaaaaatcctctagacacatgaaggcccacatagtcaagtcttccagggcaaagccagcagcccacccaggtcaggtagccagcagggctcagttcccctcactccagacacggaccctcctcttcagggtctcttgacccagcttccttctctccttttacctgagagcacagacctctctcagccagcctgcccagaccacggggggctactcccatgtagtttggggagcacttgatctcagaaaagctccattgtctgagcaaatgggcagttgtggagctcaagcctttctcctgtgctcaagtcccttccccaagcaaggcttcaacctcatctacccaccatgtagttttctctggccatttaagtggggcggcagggacatggttgggccatgccacaccagggctggtgaggcaaccagttttgattttgacagagtggctggaggaaaagtggcaatcaaggtgctgcttggtttgctctgagtgcaaatggaaccaacaggtttctgctgcaatctgtgtgttcccagtgccaggtcacaccaggaggggtggggcagggctaaccaagtggtctctgaactcaccgagcgtctgcacttggttgtgaagttaatgggagtacagagagcgtctggccttggagaggggttgagagcctcctttttggttcttcattcctgagctcttgcctgcccacaaatctgacctctttgaatggggacgcagtccttcaacagagaagtttctatggcaaagaagtttctatttagctctagatccagcagagtcatccattctaactgccctgaagtctagagcaggggagggaacccagaggctggggatgagactaggcagaccctggttaccatatggacaaggacaggggaaagcacccccttcctcaatttctgaaagttctatctttgggttcgcaggactttgaggatgataaagaacatataggtactagcttgttgttgctggtccaaagcttccacagccctgagaatttggctttcgtggctgctctggcagctgagcgaagggaggaaggcagccgctctggtggggactctaggcaccttccctgctgtccacttggataggcggtgagccccagggtactgagaggagcctgagcatttacctgccattagtgcctcttccttcaggagactggcttgaaacgtgtgttcatgtgcgcgtgcacacacacacatgagcacctgtatgtgttaatgaatagtttttcttggttaatgctttttaacttctgttcctttccgtaagtggatgattcaaaattaacgtgacttggctgggcgcagtggctcacacctgtaatcccagcactttgggaggccaagggaggcggatcacctgaggtcaggagttcgagaccagcctgatcggcatggtgaaaccccgtttctactaaaaatacaaaaattagccgggcgtggtggtgcgcgcctgtaatcccagctactcaggaggctgaggaaggagaatcacttgaacccgggaggtggaggttgcagtgagctgagatcgtgccactgcactccagcctgggcgacagagcgaaactccgtctcaaaaaaaaaaaaaaaacttaatgtgactggagttaaaagtgaaatgtcaggttgtttagtcactgaatagagagctacaagtgcttggtctttcccaagaatcaaacctgagtagaaatacatttaaaagaaaaatctacatggtacctatgaatcctgtaatttgtttagggagatcttgtcactcatccctggttcctgcccatactgtttggtctcgttcttgcagtttgcttggaacagggccagagccccacatgagattgtcagcaggagtgaggagcgccagtccctactcctcagcagggacccagcacagcaatccggttgttctcggttagactgggtcggggccaggggagaagcagtcacccctgtgtagagggttcccgctgtgcttctgagcagttgctttgttcagaagtgttaggagggtcagattgtgccataattgttattaaagagaaaacacgcccaccttcctttctcccctgctggccattgttcattgagttttactgagggcagcctttgtggaagtcagggaggttgccaaaggcctgtagatgcctcctgacaaggtcttgattcctggttttctagcacccatttgcattttggtcttcagcacaaagccttgttccctgtggccggacttctgggcaataagactggggagtgactgttgagcagtctgctgtcaggagagatggctgaaaaggtgatcatcttggtgctaaacaagtaagaggcaactgccctgtttttgtttgttttgaggcacaatgaaactttagccaaactctgcaagagggtcccatctcctgccatggccaggtgtgagagaccaaaccgagaaaacagcatactctatcacttaagccttgggtagaatgggaattctttaccctgggtaaacgttttaacaaaaaaatggaacttaacttcggtttggactgtggtcgtgctgaggcaggagtggggttgccctcttggggctgaatctccaggcctcacgaggtcccctgtggggatgctgctatttctaagatgcaaattgcacatttcctagattttgtatctgtggatttggataagggaggggaacacggacaaattgcttgtacaatttgaaatgggcctcaatggtacttcaaaccttttgattattcctaaataaaaacataaatatat

SEQ ID NO: 372301 - DNA, 3425 bp, Homo sapiens
ccggagtcggttggtgcagctgcgtccccgccgctcagcagtccgcggctccggcgtcgccgccgccgccgcctctgcggggcctgcgccggccgcccgcccggccgcggggagggaggcccgcagcgcgggaagagcggcccggtcgcgggcgccgccaccgccgccgctgccaggactgaaatgcaactgcagaagcaacatgtgaccttttagagatgcttgtgggactgcataaagtgaagagggaaactggaaaaaaacaatgaaattgaatagggaaaacctgctttctgcaaacaactgaaaaagctgcatttagaaactgtttctttggccctcatcgagaagctggaacttgtattgttaggccccttatgggacaagctctcaactgctgatcacccagtgattgtcaccatggccagcaagaggaaatccaccacaccatgcatgatcccagtgaagactgtggtgttgcaagatgccagcatggaggcccagcccgctgagaccttgcctgaaggaccccagcaggatctgcccccagaagcatctgctgccagcagtgaggcagcacagaaccccagcagtactgatggctctacactggccaatgggcatcggagcactttagatggctatttatattcctgtaaatactgcgatttcagatcccatgacatgacccaatttgtgggacatatgaactcagagcacacagactttaataaagacccaacctttgtatgcagtgggtgcagttttctggcaaaaacccctgaggggctttccttgcacaatgccacatgtcactccggggaagccagctttgtgtggaacgtggccaagccagacaatcatgtggttgtggagcagagcatccctgagagcaccagcactcctgacctagcgggtgagcccagtgctgaaggggctgatggacaggcagaaatcatcattaccaaaactccaatcatgaagataatgaaaggcaaagctgaagccaaaaaaattcatacactcaaggagaatgtccctagccagcctgtgggtgaggccttaccaaagctgtcgactggagaaatggaggtgagagagggggaccattccttcatcaatggggcagttccagtcagccaggcatctgccagctctgcaaaaaacccccatgccgccaacgggcccctgataggaacagtgccagttttgccagctggcatagcacagttcctctccctccagcagcagcccccagtgcatgcccaacaccatgtccaccagccactgcccacggccaaggcccttcccaaagtgatgatccccctgagcagcattccaacgtacagtgcagccatggactctaacagcttcctgaagaactccttccacaagttcccctaccccaccaaagccgagctctgctatttgactgtggtgaccaagtatccagaagaacagctcaagatctggttcacagcccaaaggctgaagcaggggatcagctggtcccctgaggagattgaggatgcccggaaaaagatgttcaatacagtcatccagtctgtgcctcagcccacaattacggttctaaataccccactcgtcgccagtgctggcaatgtccagcatctcatccaggccgctcttccaggtcacgttgtggggcagccagagggtacaggagggggacttctggtcactcagccattgatggccaatgggttgcaagcaacaagttcccctctccccctcacggtgacatccgtccccaagcagccaggtgtggcacccattaacactgtgtgttcaaatacaacgtcagctgtgaaggtggtcaatgcggcccagtcgctcctcacggcctgccccagcataacctcccaagccttccttgatgctagcatctacaaaaataagaaatctcatgaacagctgtcagctctgaaagggagcttctgtcggaaccagttcccagggcagagcgaagttgaacatctcacaaaagtgacgggcctcagtaccagagaggtgcggaaatggttcagtgatcgtagataccactgccggaacttgaagggctccagagcgatgatacctggagatcacagttccatcatcattgactctgtgccagaggtgtccttctccccatcgtccaaggtccctgaggtaacctgcattccgacaacagccacactagcaacccacccttctgccaaacgacaatcttggcaccagactcctgacttcacaccaaccaaatacaaggagagagcccctgagcagctcagagccctggagagcagttttgcacaaaaccctcttcctcttgatgaggaactggaccgcctgagaagtgaaaccaaaatgacccgacgagaaattgatagctggttttcagagagacggaaaaaagtgaatgctgaggagaccaagaaggctgaggagaatgcctctcaggaggaagaggaggctgctgaggatgagggtggagaagaggatttggccagtgagctaagggtctctggtgaaaatggctctctggaaatgcccagcagccatatcttggcagagcgcaaagtcagccccattaaaatcaacctgaagaacctgagggtcactgaagccaatggcaggaacgagattccagggctgggtgcctgtgaccctgaggatgatgagtcaaacaaactggcagagcagctcccaggcaaagtgagctgcaaaaagactgcccagcagcggcacttgctgcggcagctctttgtccagacacagtggccaagcaaccaggactatgactccatcatggcccagacgggtctgccacggccagaggtggtgcgctggtttggagatagcaggtacgcactgaagaacggccaactcaaatggtacgaagactataagcgaggcaacttcccaccagggctactggtcattgcccctggcaaccgggagctcctgcaggactattacatgacacacaagatgctgtatgaagaggacctgcagaacctctgtgacaagacccagatgagctcccagcaggtcaagcagtggtttgctgagaaaatgggggaggagaccagagccgtggcagacacaggcagtgaggaccagggccctggtactggtgagctcacagcagttcacaaagggatgggtgacacctattcagaggtgtctgagaacagtgagtcgtgggagccccgtgtccctgaggccagctcagagccctttgacacatcgagtccccaggctggacgtcagctcggtaaggagtccacaggggccatggctatcctgtgtgggtaaggggaggaggcacttatggttgggcactgaatttactgcacaggggcatctgctgtctctaaggctgcctggcagcagcattaaccgcctggctgcttcagagg

SEQ ID NO: 372302 - DNA, 446 bp, Homo sapiens
atggatcttgattgtttaagcccagtcaggtaaaccccacacctgttgcacagtgattaacccagtggcagtcatgccaagaggtttgttcatggctgggcatgtgacctgtgcaggccaccagcatgcttgctgaggactttgggaagaaggctcttcagtcttctgatagacctccccaagacggccctctctctgtgtccttctggatgtttgggacatgaagcttggggctgctggagttaccttgctgtcacgagggaagctacccctaggatgtggttgacgaagtagaaagaaagaaaataggcccttattggccaggcacggtggctcacgcctgtaatcccagcactttgggaggccgaggcgggcggatcacgaggtcaggagaccgagagcatcctggctaacatggtgaaaccccgtttctactaaaaaataca

SEQ ID NO: 372303 - DNA, 8080 bp, Homo sapiens
  misc_feature (4567)..(4567): n is a, c, g, or t
ggccacaatatcactcaaagacgactgaagtgacagtccaccacatgaaagcagcattccaacgtacagtgcagccatggactctaacagcttcctgaagaactccttccacaagttcccctaccccaccaaagccgagctctgctatttgactgtggtgaccaagtatccagaagaacagctcaagatctggttcacagcccaaaggctgaagcaggggatcagctggtcccctgaggagattgaggatgcccggaaaaagatgttcaatacagtcatccagtctgtgcctcagcccacaattacggttctaaataccccactcgtcgccagtgctggcaatgtccagcatctcatccaggccgctcttccaggtcacgttgtggggcagccagagggtacaggagggggacttctggtcactcagccattgatggccaatgggttgcaagcaacaagttcccctctccccctcacggtgacatccgtccccaagcagccaggtgtggcacccattaacactgtgtgttcaaatacaacgtcagctgtgaaggtggtcaatgcggcccagtcgctcctcacggcctgccccagcataacctcccaagccttccttgatgctagcatctacaaaaataagaaatctcatgaacagctgtcagctctgaaagggagcttctgtcggaaccagttcccagggcagagcgaagttgaacatctcacaaaagtgacgggcctcagtaccagagaggtgcggaaatggttcagtgatcgtagataccactgccggaacttgaagggctccagagcgatgatacctggagatcacagttccatcatcattgactctgtgccagaggtgtccttctccccatcgtccaaggtccctgaggtaacctgcattccgacaacagccacactagcaacccacccttctgccaaacgacaatcttggcaccagactcctgacttcacaccaaccaaatacaaggagagagcccctgagcagctcagagccctggagagcagttttgcacaaaaccctcttcctcttgatgaggaactggaccgcctgagaagtgaaaccaaaatgacccgacgagaaattgatagctggttttcagagagacggaaaaaagtgaatgctgaggagaccaagaaggctgaggagaatgcctctcaggaggaagaggaggctgctgaggatgagggtggagaagaggatttggccagtgagctaagggtctctggtgaaaatggctctctggaaatgcccagcagccatatcttggcagagcgcaaagtcagccccattaaaatcaacctgaagaacctgagggtcactgaagccaatggcaggaacgagattccagggctgggtgcctgtgaccctgaggatgatgagtcaaacaaactggcagagcagctcccaggcaaagtgagctgcaaaaagactgcccagcagcggcacttgctgcggcagctctttgtccagacacagtggccaagcaaccaggactatgactccatcatggcccagacgggtctgccacggccagaggtggtgcgctggtttggagatagcaggtacgcactgaagaacggccaactcaaatggtacgaagactataagcgaggcaacttcccaccagggctactggtcattgcccctggcaaccgggagctcctgcaggactattacatgacacacaagatgctgtatgaagaggacctgcagaacctctgtgacaagacccagatgagctcccagcaggtcaagcagtggtttgctgagaaaatgggggaggagaccagagccgtggcagacacaggcagtgaggaccagggccctggtactggtgagctcacagcagttcacaaagggatgggtgacacctattcagaggtgtctgagaacagtgagtcgtgggagccccgtgtccctgaggccagctcagagccctttgacacatcgagtccccaggctggacgtcagctcgaaacagactgaatttgatctgattaatgtgaaggactggccagtctgggaaaccgcctgccacgtggaagagccaaacccgactctctgctgccacatgccgttcccatgcccggctgctgggcacctgggagagcttccagaatcctcgcagacagcccagagcctgccgctaccctcggcctgcccaccaccaagcaagcagcaagcaagatggggttctcatcagttcttcctcccacaatgtaggacctttcctttaccttccaatggataaaatagttcagagttcatagtcatattcatagacacagaatcaagcttttaacatatacatccacctctatatgttaaataaaacatcagattatcaacactgtcattacgtagaaactttggttagccaagcagtgcattgtcagttacgtcatctctaaaaatgacctgtgtctgttctctggggattgctgggtcacaggtgcccctcaccttccacagtcaggcagggaagttataggcacaaagctacgtctggaacccctttgtgccccctttgtgttcctcaaggaagcagtacctttgaagagatctctgctgcattaagtgatgaccggctacgtttcatgtcaggcttgctttgccttgtgggctactcagtgcagaacctgctgtaaccctcagttcaaaaaatggactggcaatgtgattagcgttggatgctttaccattctctttagttgttaccgtaattctgctttttcatgggagtttgaatcatggaccataacttttcagttatcagatcaactaaagaaacatttgttgttaagcctaatgtgctgacctatgtgcctgcattttttttttaatctagacatgtttggagtgagagaaagatggaaaaaagacatggggtagggacgtaagtggaaatctatagccacagcctgaagctttgaccactgcggttttcagagccctttctccacactcatttcagagcctcctatggtttgggaaggaataacacactggcccattagtaagggtgaaggctggagggatttgttgacttcttggaattatcagaggtagggtggtctttagcacaaagacttgcatgcagagatccctggcagaacacccagagtgcccgtggctcccaccccagggtctggccggtgtgctggatgcatgcccaagggtgctgggcatcactggtccttgtgaggatgcttttaaagttttatatttatgtccccaaacttggaaacaagaactctactttagcctaaccctcatgtccttttttgaattgagaaaattacaggaaatggtgcctttgaaaattagaaaacttgcttacagagctgttctaaatggtaaatcctcaatttccccaagaccggttgctctgagagtagctggtaaagaggggcgaactaaagacctgtccacctgtagctccgctcatttcttagaaaccacctgcttcccagagtgccaagccacaagtaccaggcttcgtgggcacagacacctcctgggctgggcagagtgacagtgctagaagaccccagagagagggcaagggctttgggcaagaagcactggtggtgttttagggaccgtccttctcccctacccagggaactggacctggcagggcaccgtgctcatgtggctccaaggacaagcatggcggtggccccttctgccttccaggagaggtcttgcttttgaaaccaaaatcatgttcttctaaagtgtcatcttctgccctccctgtcccaatagggaccacatcttatttgtctcaaacagggacttgtgagtacttggcaagttttgcagcctatttttgtattcttaatttggggagtaaagatgtttggtctcaaaaacctttgaggaattgccaagaatggcgagtgattgctttccttcagagaacagacacttggaatttctccttttagtgtttatatacgtgcagattaatttatatatatatatatacacacacacatatacagtataaatactcatttgattctcgtaaaacgcgcatctggcgtgtgcagttgagaaacttggtggcacatgggtgttgggggagtagcctgtgttggagggacaccagtgcactaggcagctggggcggcccaggctgaagccatctccgggtgtctgagaaaccacccagtgcctcacctccagatcctgctggcatcacctccagagccctgcatgcactggctgaagagttggtctgtggagaggattttcttggttacttgtattcacggttaatttacaacccaaacagcaaaacacagttggtggacaagttcatgcaggacctacagtgacccagccatgggcactagctcatctttcaggtggaaaagtacagtgctgcctgccctggtatgtttttcttatagatgttagccctgcccaacagccagggctacactacaaaaggcaagaatgcccatgtaaggagcccagcagtctggacagatccttcttcctctgctgttggatgagagtgagtgagtatgntctggaccttatccttgaaagatgatcaaaagcgatgatgagggaggcagtcatcacgcaggtgcttaaagggacattgtaggaggtactcaagggtttgggggcaaaaccctgaatccagccagtcgtgcacagagacacacccacactagcccagtggcagtgggggatgtgggatggcagcagccaggtatgtagccctgtcacaggacagctcactgtggttttgcacactgcctaagggttaaattgtgttgttgccttcagtagaaggcatttgtgggctgcagagttgagagttgggtgaggttagtctctcctgaagaaaaagcctataaaaagtggctaatcttatcccttttctctgtatgcagttggactcgtcagagatagtaaaatcatcttttagtgtttttttgttgctgatgtcttgtacccatttgttttttacatggggttgtagatcgagttctcaaaggtgaaaccagatgatcattctgataaaggaaatttaaatttgatacatatgctttgtatattttgattacttgttttcgtttttgactataaaggagctcttttttcttgctcagagtttacctgggagatttcaccagtttgactcaccatttgcagatgtgcttttgtattaaatttaaattttcacatatcacatccattctcaaggtagttatatgctggagaagaaaaatcctctagacacatgaaggcccacatagtcaagtcttccagggcaaagccagcagcccacccaggtcaggtagccagcagggctcagttcccctcactccagacacggaccctcctcttcagggtctcttgacccagcttccttctctccttttacctgagagcacagacctctctcagccagcctgcccagaccacggggggctactcccatgtagtttggggagcacttgatctcagaaaagctccattgtctgagcaaatgggcagttgtggagctcaagcctttctcctgtgctcaagtcccttccccaagcaaggcttcaacctcatctacccaccatgtagttttctctggccatttaagtggggcggcagggacatggttgggccatgccacaccagggctggtgaggcaaccagttttgattttgacagagtggctggaggaaaagtggcaatcaaggtgctgcttggtttgctctgagtgcaaatggaaccaacaggtttctgctgcaatctgtgtgttcccagtgccaggtcacaccaggaggggtggggcagggctaaccaagtggtctctgaactcaccgagcgtctgcacttggttgtgaagttaatgggagtacagagagcgtctggccttggagaggggttgagagcctcctttttggttcttcattcctgagctcttgcctgcccacaaatctgacctctttgaatggggacgcagtccttcaacagagaagtttctatggcaaagaagtttctatttagctctagatccagcagagtcatccattctaactgccctgaagtctagagcaggggagggaacccagaggctggggatgagactaggcagaccctggttaccatatggacaaggacaggggaaagcacccccttcctcaatttctgaaagttctatctttgggttcgcaggactttgaggatgataaagaacatataggtactagcttgttgttgctggtccaaagcttccacagccctgagaatttggctttcgtggctgctctggcagctgagcgaagggaggaaggcagccgctctggtggggactctaggcaccttccctgctgtccacttggataggcggtgagccccagggtactgagaggagcctgagcatttacctgccattagtgcctcttccttcaggagactggcttgaaacgtgtgttcatgtgcgcgtgcacacacacacatgagcacctgtatgtgttaatgaatagtttttcttggttaatgctttttaacttctgttcctttccgtaagtggatgattcaaaattaacgtgacttggctgggcgcagtggctcacacctgtaatcccagcactttgggaggccaagggaggcggatcacctgaggtcaggagttcgagaccagcctgatcggcatggtgaaaccccgtttctactaaaaatacaaaaattagccgggcgtggtggtgcgcgcctgtaatcccagctactcaggaggctgaggaaggagaatcacttgaacccgggaggtggaggttgcagtgagctgagatcgtgccactgcactccagcctgggcgacagagcgaaactccgtctcaaaaaaaaaaaaaaaacttaatgtgactggagttaaaagtgaaatgtcaggttgtttagtcactgaatagagagctacaagtgcttggtctttcccaagaatcaaacctgagtagaaatacatttaaaagaaaaatctacatggtacctatgaatcctgtaatttgtttagggagatcttgtcactcatccctggttcctgcccatactgtttggtctcgttcttgcagtttgcttggaacagggccagagccccacatgagattgtcagcaggagtgaggagcgccagtccctactcctcagcagggacccagcacagcaatccggttgttctcggttagactgggtcggggccaggggagaagcagtcacccctgtgtagagggttcccgctgtgcttctgagcagttgctttgttcagaagtgttaggagggtcagattgtgccataattgttattaaagagaaaacacgcccaccttcctttctcccctgctggccattgttcattgagttttactgagggcagcctttgtggaagtcagggaggttgccaaaggcctgtagatgcctcctgacaaggtcttgattcctggttttctagcacccatttgcattttggtcttcagcacaaagccttgttccctgtggccggacttctgggcaataagactggggagtgactgttgagcagtctgctgtcaggagagatggctgaaaaggtgatcatcttggtgctaaacaagtaagaggcaactgccctgtttttgtttgttttgaggcacaatgaaactttagccaaactctgcaagagggtcccatctcctgccatggccaggtgtgagagaccaaaccgagaaaacagcatactctatcacttaagccttgggtagaatgggaattctttaccctgggtaaacgttttaacaaaaaaatggaacttaacttcggtttggactgtggtcgtgctgaggcaggagtggggttgccctcttggggctgaatctccaggcctcacgaggtcccctgtggggatgctgctatttctaagatgcaaattgcacatttcctagattttgtatctgtggatttggataagggaggggaacacggacaaattgcttgtacaatttgaaatgggcctcaatggtacttcaaaccttttgattattcctaaataaaaacataaatatat

SEQ ID NO: 372304 - DNA, 7632 bp, Homo sapiens
  misc_feature (4119)..(4119): n is a, c, g, or t
cgaatcgtaaccgttcgtacgagaatcgctgtcctctccttgctcgagatccattgtgctctaaagattaacactgtgtgttcaaatacaacgtcagctgtgaaggtggtcaatgcggcccagtcgctcctcacggcctgccccagcataacctcccaagccttccttgatgctagcatctacaaaaataagaaatctcatgaacagctgtcagctctgaaagggagcttctgtcggaaccagttcccagggcagagcgaagttgaacatctcacaaaagtgacgggcctcagtaccagagaggtgcggaaatggttcagtgatcgtagataccactgccggaacttgaagggctccagagcgatgatacctggagatcacagttccatcatcattgactctgtgccagaggtgtccttctccccatcgtccaaggtccctgaggtaacctgcattccgacaacagccacactagcaacccacccttctgccaaacgacaatcttggcaccagactcctgacttcacaccaaccaaatacaaggagagagcccctgagcagctcagagccctggagagcagttttgcacaaaaccctcttcctcttgatgaggaactggaccgcctgagaagtgaaaccaaaatgacccgacgagaaattgatagctggttttcagagagacggaaaaaagtgaatgctgaggagaccaagaaggctgaggagaatgcctctcaggaggaagaggaggctgctgaggatgagggtggagaagaggatttggccagtgagctaagggtctctggtgaaaatggctctctggaaatgcccagcagccatatcttggcagagcgcaaagtcagccccattaaaatcaacctgaagaacctgagggtcactgaagccaatggcaggaacgagattccagggctgggtgcctgtgaccctgaggatgatgagtcaaacaaactggcagagcagctcccaggcaaagtgagctgcaaaaagactgcccagcagcggcacttgctgcggcagctctttgtccagacacagtggccaagcaaccaggactatgactccatcatggcccagacgggtctgccacggccagaggtggtgcgctggtttggagatagcaggtacgcactgaagaacggccaactcaaatggtacgaagactataagcgaggcaacttcccaccagggctactggtcattgcccctggcaaccgggagctcctgcaggactattacatgacacacaagatgctgtatgaagaggacctgcagaacctctgtgacaagacccagatgagctcccagcaggtcaagcagtggtttgctgagaaaatgggggaggagaccagagccgtggcagacacaggcagtgaggaccagggccctggtactggtgagctcacagcagttcacaaagggatgggtgacacctattcagaggtgtctgagaacagtgagtcgtgggagccccgtgtccctgaggccagctcagagccctttgacacatcgagtccccaggctggacgtcagctcgaaacagactgaatttgatctgattaatgtgaaggactggccagtctgggaaaccgcctgccacgtggaagagccaaacccgactctctgctgccacatgccgttcccatgcccggctgctgggcacctgggagagcttccagaatcctcgcagacagcccagagcctgccgctaccctcggcctgcccaccaccaagcaagcagcaagcaagatggggttctcatcagttcttcctcccacaatgtaggacctttcctttaccttccaatggataaaatagttcagagttcatagtcatattcatagacacagaatcaagcttttaacatatacatccacctctatatgttaaataaaacatcagattatcaacactgtcattacgtagaaactttggttagccaagcagtgcattgtcagttacgtcatctctaaaaatgacctgtgtctgttctctggggattgctgggtcacaggtgcccctcaccttccacagtcaggcagggaagttataggcacaaagctacgtctggaacccctttgtgccccctttgtgttcctcaaggaagcagtacctttgaagagatctctgctgcattaagtgatgaccggctacgtttcatgtcaggcttgctttgccttgtgggctactcagtgcagaacctgctgtaaccctcagttcaaaaaatggactggcaatgtgattagcgttggatgctttaccattctctttagttgttaccgtaattctgctttttcatgggagtttgaatcatggaccataacttttcagttatcagatcaactaaagaaacatttgttgttaagcctaatgtgctgacctatgtgcctgcattttttttttaatctagacatgtttggagtgagagaaagatggaaaaaagacatggggtagggacgtaagtggaaatctatagccacagcctgaagctttgaccactgcggttttcagagccctttctccacactcatttcagagcctcctatggtttgggaaggaataacacactggcccattagtaagggtgaaggctggagggatttgttgacttcttggaattatcagaggtagggtggtctttagcacaaagacttgcatgcagagatccctggcagaacacccagagtgcccgtggctcccaccccagggtctggccggtgtgctggatgcatgcccaagggtgctgggcatcactggtccttgtgaggatgcttttaaagttttatatttatgtccccaaacttggaaacaagaactctactttagcctaaccctcatgtccttttttgaattgagaaaattacaggaaatggtgcctttgaaaattagaaaacttgcttacagagctgttctaaatggtaaatcctcaatttccccaagaccggttgctctgagagtagctggtaaagaggggcgaactaaagacctgtccacctgtagctccgctcatttcttagaaaccacctgcttcccagagtgccaagccacaagtaccaggcttcgtgggcacagacacctcctgggctgggcagagtgacagtgctagaagaccccagagagagggcaagggctttgggcaagaagcactggtggtgttttagggaccgtccttctcccctacccagggaactggacctggcagggcaccgtgctcatgtggctccaaggacaagcatggcggtggccccttctgccttccaggagaggtcttgcttttgaaaccaaaatcatgttcttctaaagtgtcatcttctgccctccctgtcccaatagggaccacatcttatttgtctcaaacagggacttgtgagtacttggcaagttttgcagcctatttttgtattcttaatttggggagtaaagatgtttggtctcaaaaacctttgaggaattgccaagaatggcgagtgattgctttccttcagagaacagacacttggaatttctccttttagtgtttatatacgtgcagattaatttatatatatatatatacacacacacatatacagtataaatactcatttgattctcgtaaaacgcgcatctggcgtgtgcagttgagaaacttggtggcacatgggtgttgggggagtagcctgtgttggagggacaccagtgcactaggcagctggggcggcccaggctgaagccatctccgggtgtctgagaaaccacccagtgcctcacctccagatcctgctggcatcacctccagagccctgcatgcactggctgaagagttggtctgtggagaggattttcttggttacttgtattcacggttaatttacaacccaaacagcaaaacacagttggtggacaagttcatgcaggacctacagtgacccagccatgggcactagctcatctttcaggtggaaaagtacagtgctgcctgccctggtatgtttttcttatagatgttagccctgcccaacagccagggctacactacaaaaggcaagaatgcccatgtaaggagcccagcagtctggacagatccttcttcctctgctgttggatgagagtgagtgagtatgntctggaccttatccttgaaagatgatcaaaagcgatgatgagggaggcagtcatcacgcaggtgcttaaagggacattgtaggaggtactcaagggtttgggggcaaaaccctgaatccagccagtcgtgcacagagacacacccacactagcccagtggcagtgggggatgtgggatggcagcagccaggtatgtagccctgtcacaggacagctcactgtggttttgcacactgcctaagggttaaattgtgttgttgccttcagtagaaggcatttgtgggctgcagagttgagagttgggtgaggttagtctctcctgaagaaaaagcctataaaaagtggctaatcttatcccttttctctgtatgcagttggactcgtcagagatagtaaaatcatcttttagtgtttttttgttgctgatgtcttgtacccatttgttttttacatggggttgtagatcgagttctcaaaggtgaaaccagatgatcattctgataaaggaaatttaaatttgatacatatgctttgtatattttgattacttgttttcgtttttgactataaaggagctcttttttcttgctcagagtttacctgggagatttcaccagtttgactcaccatttgcagatgtgcttttgtattaaatttaaattttcacatatcacatccattctcaaggtagttatatgctggagaagaaaaatcctctagacacatgaaggcccacatagtcaagtcttccagggcaaagccagcagcccacccaggtcaggtagccagcagggctcagttcccctcactccagacacggaccctcctcttcagggtctcttgacccagcttccttctctccttttacctgagagcacagacctctctcagccagcctgcccagaccacggggggctactcccatgtagtttggggagcacttgatctcagaaaagctccattgtctgagcaaatgggcagttgtggagctcaagcctttctcctgtgctcaagtcccttccccaagcaaggcttcaacctcatctacccaccatgtagttttctctggccatttaagtggggcggcagggacatggttgggccatgccacaccagggctggtgaggcaaccagttttgattttgacagagtggctggaggaaaagtggcaatcaaggtgctgcttggtttgctctgagtgcaaatggaaccaacaggtttctgctgcaatctgtgtgttcccagtgccaggtcacaccaggaggggtggggcagggctaaccaagtggtctctgaactcaccgagcgtctgcacttggttgtgaagttaatgggagtacagagagcgtctggccttggagaggggttgagagcctcctttttggttcttcattcctgagctcttgcctgcccacaaatctgacctctttgaatggggacgcagtccttcaacagagaagtttctatggcaaagaagtttctatttagctctagatccagcagagtcatccattctaactgccctgaagtctagagcaggggagggaacccagaggctggggatgagactaggcagaccctggttaccatatggacaaggacaggggaaagcacccccttcctcaatttctgaaagttctatctttgggttcgcaggactttgaggatgataaagaacatataggtactagcttgttgttgctggtccaaagcttccacagccctgagaatttggctttcgtggctgctctggcagctgagcgaagggaggaaggcagccgctctggtggggactctaggcaccttccctgctgtccacttggataggcggtgagccccagggtactgagaggagcctgagcatttacctgccattagtgcctcttccttcaggagactggcttgaaacgtgtgttcatgtgcgcgtgcacacacacacatgagcacctgtatgtgttaatgaatagtttttcttggttaatgctttttaacttctgttcctttccgtaagtggatgattcaaaattaacgtgacttggctgggcgcagtggctcacacctgtaatcccagcactttgggaggccaagggaggcggatcacctgaggtcaggagttcgagaccagcctgatcggcatggtgaaaccccgtttctactaaaaatacaaaaattagccgggcgtggtggtgcgcgcctgtaatcccagctactcaggaggctgaggaaggagaatcacttgaacccgggaggtggaggttgcagtgagctgagatcgtgccactgcactccagcctgggcgacagagcgaaactccgtctcaaaaaaaaaaaaaaaacttaatgtgactggagttaaaagtgaaatgtcaggttgtttagtcactgaatagagagctacaagtgcttggtctttcccaagaatcaaacctgagtagaaatacatttaaaagaaaaatctacatggtacctatgaatcctgtaatttgtttagggagatcttgtcactcatccctggttcctgcccatactgtttggtctcgttcttgcagtttgcttggaacagggccagagccccacatgagattgtcagcaggagtgaggagcgccagtccctactcctcagcagggacccagcacagcaatccggttgttctcggttagactgggtcggggccaggggagaagcagtcacccctgtgtagagggttcccgctgtgcttctgagcagttgctttgttcagaagtgttaggagggtcagattgtgccataattgttattaaagagaaaacacgcccaccttcctttctcccctgctggccattgttcattgagttttactgagggcagcctttgtggaagtcagggaggttgccaaaggcctgtagatgcctcctgacaaggtcttgattcctggttttctagcacccatttgcattttggtcttcagcacaaagccttgttccctgtggccggacttctgggcaataagactggggagtgactgttgagcagtctgctgtcaggagagatggctgaaaaggtgatcatcttggtgctaaacaagtaagaggcaactgccctgtttttgtttgttttgaggcacaatgaaactttagccaaactctgcaagagggtcccatctcctgccatggccaggtgtgagagaccaaaccgagaaaacagcatactctatcacttaagccttgggtagaatgggaattctttaccctgggtaaacgttttaacaaaaaaatggaacttaacttcggtttggactgtggtcgtgctgaggcaggagtggggttgccctcttggggctgaatctccaggcctcacgaggtcccctgtggggatgctgctatttctaagatgcaaattgcacatttcctagattttgtatctgtggatttggataagggaggggaacacggacaaattgcttgtacaatttgaaatgggcctcaatggtacttcaaaccttttgattattcctaaataaaaacataaatatat

SEQ ID NO: 372305 - DNA, 7546 bp, Homo sapiens
  misc_feature (4033)..(4033): n is a, c, g, or t
cgaatcgtaaccgttcgtacgagaatcgctgtcctctccttgctcgagatccattgtgctctaaagctcccaagccttccttgatgctagcatctacaaaaataagaaatctcatgaacagctgtcagctctgaaagggagcttctgtcggaaccagttcccagggcagagcgaagttgaacatctcacaaaagtgacgggcctcagtaccagagaggtgcggaaatggttcagtgatcgtagataccactgccggaacttgaagggctccagagcgatgatacctggagatcacagttccatcatcattgactctgtgccagaggtgtccttctccccatcgtccaaggtccctgaggtaacctgcattccgacaacagccacactagcaacccacccttctgccaaacgacaatcttggcaccagactcctgacttcacaccaaccaaatacaaggagagagcccctgagcagctcagagccctggagagcagttttgcacaaaaccctcttcctcttgatgaggaactggaccgcctgagaagtgaaaccaaaatgacccgacgagaaattgatagctggttttcagagagacggaaaaaagtgaatgctgaggagaccaagaaggctgaggagaatgcctctcaggaggaagaggaggctgctgaggatgagggtggagaagaggatttggccagtgagctaagggtctctggtgaaaatggctctctggaaatgcccagcagccatatcttggcagagcgcaaagtcagccccattaaaatcaacctgaagaacctgagggtcactgaagccaatggcaggaacgagattccagggctgggtgcctgtgaccctgaggatgatgagtcaaacaaactggcagagcagctcccaggcaaagtgagctgcaaaaagactgcccagcagcggcacttgctgcggcagctctttgtccagacacagtggccaagcaaccaggactatgactccatcatggcccagacgggtctgccacggccagaggtggtgcgctggtttggagatagcaggtacgcactgaagaacggccaactcaaatggtacgaagactataagcgaggcaacttcccaccagggctactggtcattgcccctggcaaccgggagctcctgcaggactattacatgacacacaagatgctgtatgaagaggacctgcagaacctctgtgacaagacccagatgagctcccagcaggtcaagcagtggtttgctgagaaaatgggggaggagaccagagccgtggcagacacaggcagtgaggaccagggccctggtactggtgagctcacagcagttcacaaagggatgggtgacacctattcagaggtgtctgagaacagtgagtcgtgggagccccgtgtccctgaggccagctcagagccctttgacacatcgagtccccaggctggacgtcagctcgaaacagactgaatttgatctgattaatgtgaaggactggccagtctgggaaaccgcctgccacgtggaagagccaaacccgactctctgctgccacatgccgttcccatgcccggctgctgggcacctgggagagcttccagaatcctcgcagacagcccagagcctgccgctaccctcggcctgcccaccaccaagcaagcagcaagcaagatggggttctcatcagttcttcctcccacaatgtaggacctttcctttaccttccaatggataaaatagttcagagttcatagtcatattcatagacacagaatcaagcttttaacatatacatccacctctatatgttaaataaaacatcagattatcaacactgtcattacgtagaaactttggttagccaagcagtgcattgtcagttacgtcatctctaaaaatgacctgtgtctgttctctggggattgctgggtcacaggtgcccctcaccttccacagtcaggcagggaagttataggcacaaagctacgtctggaacccctttgtgccccctttgtgttcctcaaggaagcagtacctttgaagagatctctgctgcattaagtgatgaccggctacgtttcatgtcaggcttgctttgccttgtgggctactcagtgcagaacctgctgtaaccctcagttcaaaaaatggactggcaatgtgattagcgttggatgctttaccattctctttagttgttaccgtaattctgctttttcatgggagtttgaatcatggaccataacttttcagttatcagatcaactaaagaaacatttgttgttaagcctaatgtgctgacctatgtgcctgcattttttttttaatctagacatgtttggagtgagagaaagatggaaaaaagacatggggtagggacgtaagtggaaatctatagccacagcctgaagctttgaccactgcggttttcagagccctttctccacactcatttcagagcctcctatggtttgggaaggaataacacactggcccattagtaagggtgaaggctggagggatttgttgacttcttggaattatcagaggtagggtggtctttagcacaaagacttgcatgcagagatccctggcagaacacccagagtgcccgtggctcccaccccagggtctggccggtgtgctggatgcatgcccaagggtgctgggcatcactggtccttgtgaggatgcttttaaagttttatatttatgtccccaaacttggaaacaagaactctactttagcctaaccctcatgtccttttttgaattgagaaaattacaggaaatggtgcctttgaaaattagaaaacttgcttacagagctgttctaaatggtaaatcctcaatttccccaagaccggttgctctgagagtagctggtaaagaggggcgaactaaagacctgtccacctgtagctccgctcatttcttagaaaccacctgcttcccagagtgccaagccacaagtaccaggcttcgtgggcacagacacctcctgggctgggcagagtgacagtgctagaagaccccagagagagggcaagggctttgggcaagaagcactggtggtgttttagggaccgtccttctcccctacccagggaactggacctggcagggcaccgtgctcatgtggctccaaggacaagcatggcggtggccccttctgccttccaggagaggtcttgcttttgaaaccaaaatcatgttcttctaaagtgtcatcttctgccctccctgtcccaatagggaccacatcttatttgtctcaaacagggacttgtgagtacttggcaagttttgcagcctatttttgtattcttaatttggggagtaaagatgtttggtctcaaaaacctttgaggaattgccaagaatggcgagtgattgctttccttcagagaacagacacttggaatttctccttttagtgtttatatacgtgcagattaatttatatatatatatatacacacacacatatacagtataaatactcatttgattctcgtaaaacgcgcatctggcgtgtgcagttgagaaacttggtggcacatgggtgttgggggagtagcctgtgttggagggacaccagtgcactaggcagctggggcggcccaggctgaagccatctccgggtgtctgagaaaccacccagtgcctcacctccagatcctgctggcatcacctccagagccctgcatgcactggctgaagagttggtctgtggagaggattttcttggttacttgtattcacggttaatttacaacccaaacagcaaaacacagttggtggacaagttcatgcaggacctacagtgacccagccatgggcactagctcatctttcaggtggaaaagtacagtgctgcctgccctggtatgtttttcttatagatgttagccctgcccaacagccagggctacactacaaaaggcaagaatgcccatgtaaggagcccagcagtctggacagatccttcttcctctgctgttggatgagagtgagtgagtatgntctggaccttatccttgaaagatgatcaaaagcgatgatgagggaggcagtcatcacgcaggtgcttaaagggacattgtaggaggtactcaagggtttgggggcaaaaccctgaatccagccagtcgtgcacagagacacacccacactagcccagtggcagtgggggatgtgggatggcagcagccaggtatgtagccctgtcacaggacagctcactgtggttttgcacactgcctaagggttaaattgtgttgttgccttcagtagaaggcatttgtgggctgcagagttgagagttgggtgaggttagtctctcctgaagaaaaagcctataaaaagtggctaatcttatcccttttctctgtatgcagttggactcgtcagagatagtaaaatcatcttttagtgtttttttgttgctgatgtcttgtacccatttgttttttacatggggttgtagatcgagttctcaaaggtgaaaccagatgatcattctgataaaggaaatttaaatttgatacatatgctttgtatattttgattacttgttttcgtttttgactataaaggagctcttttttcttgctcagagtttacctgggagatttcaccagtttgactcaccatttgcagatgtgcttttgtattaaatttaaattttcacatatcacatccattctcaaggtagttatatgctggagaagaaaaatcctctagacacatgaaggcccacatagtcaagtcttccagggcaaagccagcagcccacccaggtcaggtagccagcagggctcagttcccctcactccagacacggaccctcctcttcagggtctcttgacccagcttccttctctccttttacctgagagcacagacctctctcagccagcctgcccagaccacggggggctactcccatgtagtttggggagcacttgatctcagaaaagctccattgtctgagcaaatgggcagttgtggagctcaagcctttctcctgtgctcaagtcccttccccaagcaaggcttcaacctcatctacccaccatgtagttttctctggccatttaagtggggcggcagggacatggttgggccatgccacaccagggctggtgaggcaaccagttttgattttgacagagtggctggaggaaaagtggcaatcaaggtgctgcttggtttgctctgagtgcaaatggaaccaacaggtttctgctgcaatctgtgtgttcccagtgccaggtcacaccaggaggggtggggcagggctaaccaagtggtctctgaactcaccgagcgtctgcacttggttgtgaagttaatgggagtacagagagcgtctggccttggagaggggttgagagcctcctttttggttcttcattcctgagctcttgcctgcccacaaatctgacctctttgaatggggacgcagtccttcaacagagaagtttctatggcaaagaagtttctatttagctctagatccagcagagtcatccattctaactgccctgaagtctagagcaggggagggaacccagaggctggggatgagactaggcagaccctggttaccatatggacaaggacaggggaaagcacccccttcctcaatttctgaaagttctatctttgggttcgcaggactttgaggatgataaagaacatataggtactagcttgttgttgctggtccaaagcttccacagccctgagaatttggctttcgtggctgctctggcagctgagcgaagggaggaaggcagccgctctggtggggactctaggcaccttccctgctgtccacttggataggcggtgagccccagggtactgagaggagcctgagcatttacctgccattagtgcctcttccttcaggagactggcttgaaacgtgtgttcatgtgcgcgtgcacacacacacatgagcacctgtatgtgttaatgaatagtttttcttggttaatgctttttaacttctgttcctttccgtaagtggatgattcaaaattaacgtgacttggctgggcgcagtggctcacacctgtaatcccagcactttgggaggccaagggaggcggatcacctgaggtcaggagttcgagaccagcctgatcggcatggtgaaaccccgtttctactaaaaatacaaaaattagccgggcgtggtggtgcgcgcctgtaatcccagctactcaggaggctgaggaaggagaatcacttgaacccgggaggtggaggttgcagtgagctgagatcgtgccactgcactccagcctgggcgacagagcgaaactccgtctcaaaaaaaaaaaaaaaacttaatgtgactggagttaaaagtgaaatgtcaggttgtttagtcactgaatagagagctacaagtgcttggtctttcccaagaatcaaacctgagtagaaatacatttaaaagaaaaatctacatggtacctatgaatcctgtaatttgtttagggagatcttgtcactcatccctggttcctgcccatactgtttggtctcgttcttgcagtttgcttggaacagggccagagccccacatgagattgtcagcaggagtgaggagcgccagtccctactcctcagcagggacccagcacagcaatccggttgttctcggttagactgggtcggggccaggggagaagcagtcacccctgtgtagagggttcccgctgtgcttctgagcagttgctttgttcagaagtgttaggagggtcagattgtgccataattgttattaaagagaaaacacgcccaccttcctttctcccctgctggccattgttcattgagttttactgagggcagcctttgtggaagtcagggaggttgccaaaggcctgtagatgcctcctgacaaggtcttgattcctggttttctagcacccatttgcattttggtcttcagcacaaagccttgttccctgtggccggacttctgggcaataagactggggagtgactgttgagcagtctgctgtcaggagagatggctgaaaaggtgatcatcttggtgctaaacaagtaagaggcaactgccctgtttttgtttgttttgaggcacaatgaaactttagccaaactctgcaagagggtcccatctcctgccatggccaggtgtgagagaccaaaccgagaaaacagcatactctatcacttaagccttgggtagaatgggaattctttaccctgggtaaacgttttaacaaaaaaatggaacttaacttcggtttggactgtggtcgtgctgaggcaggagtggggttgccctcttggggctgaatctccaggcctcacgaggtcccctgtggggatgctgctatttctaagatgcaaattgcacatttcctagattttgtatctgtggatttggataagggaggggaacacggacaaattgcttgtacaatttgaaatgggcctcaatggtacttcaaaccttttgattattcctaaataaaaacataaatatat

SEQ ID NO: 372306 - DNA, 6889 bp, Homo sapiens
  misc_feature (3376)..(3376): n is a, c, g, or t
agcgggtgatagccgtcaaaggcagcaaatagactgaatgaaagatgagcttctgcctttatatccttctctcctgctacccaactcattgtggtgaaggaaaaagaaaacgcgggtggagactgcactatatgcttaggactgaaatgcaactgcagaagcaacatgtgaccttttagagatgcttgtgggactgcataaagtgaagagggaaactggaaaaaaacaatgaatcccttccataggaaacagggaatgtttgtttctgtcttctggtaggagaaggattggtcccacccccagctccagggatggatcttgattgtttaagcccagtcagtgattctaacccatggaccaagaccctgccttggagattggggaacaggtgttggaagggctctattttggcaaagaatggattatttatgtgagcatatttccgcaaaattgaatagggaaaacctgctttctgcaaacaactgaaaaagctgcatttagaaactgtttctttggccctcatcgagaagctggaacttgtattgttaggccccttatgggacaagctctcaactgctgatcacccagtgattgtcaccatggccagcaagaggaaatccaccacaccatgcatgatcccagtgaagactgtggtgttgcaagatgccagcatggaggcccagcccgctgagaccttgcctgaaggaccccagcaggatctgcccccagaagcatctgctgccagcagtgaggcagcacagaaccccagccctttgacacatcgagtccccaggctggacgtcagctcgaaacagactgaatttgatctgattaatgtgaaggactggccagtctgggaaaccgcctgccacgtggaagagccaaacccgactctctgctgccacatgccgttcccatgcccggctgctgggcacctgggagagcttccagaatcctcgcagacagcccagagcctgccgctaccctcggcctgcccaccaccaagcaagcagcaagcaagatggggttctcatcagttcttcctcccacaatgtaggacctttcctttaccttccaatggataaaatagttcagagttcatagtcatattcatagacacagaatcaagcttttaacatatacatccacctctatatgttaaataaaacatcagattatcaacactgtcattacgtagaaactttggttagccaagcagtgcattgtcagttacgtcatctctaaaaatgacctgtgtctgttctctggggattgctgggtcacaggtgcccctcaccttccacagtcaggcagggaagttataggcacaaagctacgtctggaacccctttgtgccccctttgtgttcctcaaggaagcagtacctttgaagagatctctgctgcattaagtgatgaccggctacgtttcatgtcaggcttgctttgccttgtgggctactcagtgcagaacctgctgtaaccctcagttcaaaaaatggactggcaatgtgattagcgttggatgctttaccattctctttagttgttaccgtaattctgctttttcatgggagtttgaatcatggaccataacttttcagttatcagatcaactaaagaaacatttgttgttaagcctaatgtgctgacctatgtgcctgcattttttttttaatctagacatgtttggagtgagagaaagatggaaaaaagacatggggtagggacgtaagtggaaatctatagccacagcctgaagctttgaccactgcggttttcagagccctttctccacactcatttcagagcctcctatggtttgggaaggaataacacactggcccattagtaagggtgaaggctggagggatttgttgacttcttggaattatcagaggtagggtggtctttagcacaaagacttgcatgcagagatccctggcagaacacccagagtgcccgtggctcccaccccagggtctggccggtgtgctggatgcatgcccaagggtgctgggcatcactggtccttgtgaggatgcttttaaagttttatatttatgtccccaaacttggaaacaagaactctactttagcctaaccctcatgtccttttttgaattgagaaaattacaggaaatggtgcctttgaaaattagaaaacttgcttacagagctgttctaaatggtaaatcctcaatttccccaagaccggttgctctgagagtagctggtaaagaggggcgaactaaagacctgtccacctgtagctccgctcatttcttagaaaccacctgcttcccagagtgccaagccacaagtaccaggcttcgtgggcacagacacctcctgggctgggcagagtgacagtgctagaagaccccagagagagggcaagggctttgggcaagaagcactggtggtgttttagggaccgtccttctcccctacccagggaactggacctggcagggcaccgtgctcatgtggctccaaggacaagcatggcggtggccccttctgccttccaggagaggtcttgcttttgaaaccaaaatcatgttcttctaaagtgtcatcttctgccctccctgtcccaatagggaccacatcttatttgtctcaaacagggacttgtgagtacttggcaagttttgcagcctatttttgtattcttaatttggggagtaaagatgtttggtctcaaaaacctttgaggaattgccaagaatggcgagtgattgctttccttcagagaacagacacttggaatttctccttttagtgtttatatacgtgcagattaatttatatatatatatatacacacacacatatacagtataaatactcatttgattctcgtaaaacgcgcatctggcgtgtgcagttgagaaacttggtggcacatgggtgttgggggagtagcctgtgttggagggacaccagtgcactaggcagctggggcggcccaggctgaagccatctccgggtgtctgagaaaccacccagtgcctcacctccagatcctgctggcatcacctccagagccctgcatgcactggctgaagagttggtctgtggagaggattttcttggttacttgtattcacggttaatttacaacccaaacagcaaaacacagttggtggacaagttcatgcaggacctacagtgacccagccatgggcactagctcatctttcaggtggaaaagtacagtgctgcctgccctggtatgtttttcttatagatgttagccctgcccaacagccagggctacactacaaaaggcaagaatgcccatgtaaggagcccagcagtctggacagatccttcttcctctgctgttggatgagagtgagtgagtatgntctggaccttatccttgaaagatgatcaaaagcgatgatgagggaggcagtcatcacgcaggtgcttaaagggacattgtaggaggtactcaagggtttgggggcaaaaccctgaatccagccagtcgtgcacagagacacacccacactagcccagtggcagtgggggatgtgggatggcagcagccaggtatgtagccctgtcacaggacagctcactgtggttttgcacactgcctaagggttaaattgtgttgttgccttcagtagaaggcatttgtgggctgcagagttgagagttgggtgaggttagtctctcctgaagaaaaagcctataaaaagtggctaatcttatcccttttctctgtatgcagttggactcgtcagagatagtaaaatcatcttttagtgtttttttgttgctgatgtcttgtacccatttgttttttacatggggttgtagatcgagttctcaaaggtgaaaccagatgatcattctgataaaggaaatttaaatttgatacatatgctttgtatattttgattacttgttttcgtttttgactataaaggagctcttttttcttgctcagagtttacctgggagatttcaccagtttgactcaccatttgcagatgtgcttttgtattaaatttaaattttcacatatcacatccattctcaaggtagttatatgctggagaagaaaaatcctctagacacatgaaggcccacatagtcaagtcttccagggcaaagccagcagcccacccaggtcaggtagccagcagggctcagttcccctcactccagacacggaccctcctcttcagggtctcttgacccagcttccttctctccttttacctgagagcacagacctctctcagccagcctgcccagaccacggggggctactcccatgtagtttggggagcacttgatctcagaaaagctccattgtctgagcaaatgggcagttgtggagctcaagcctttctcctgtgctcaagtcccttccccaagcaaggcttcaacctcatctacccaccatgtagttttctctggccatttaagtggggcggcagggacatggttgggccatgccacaccagggctggtgaggcaaccagttttgattttgacagagtggctggaggaaaagtggcaatcaaggtgctgcttggtttgctctgagtgcaaatggaaccaacaggtttctgctgcaatctgtgtgttcccagtgccaggtcacaccaggaggggtggggcagggctaaccaagtggtctctgaactcaccgagcgtctgcacttggttgtgaagttaatgggagtacagagagcgtctggccttggagaggggttgagagcctcctttttggttcttcattcctgagctcttgcctgcccacaaatctgacctctttgaatggggacgcagtccttcaacagagaagtttctatggcaaagaagtttctatttagctctagatccagcagagtcatccattctaactgccctgaagtctagagcaggggagggaacccagaggctggggatgagactaggcagaccctggttaccatatggacaaggacaggggaaagcacccccttcctcaatttctgaaagttctatctttgggttcgcaggactttgaggatgataaagaacatataggtactagcttgttgttgctggtccaaagcttccacagccctgagaatttggctttcgtggctgctctggcagctgagcgaagggaggaaggcagccgctctggtggggactctaggcaccttccctgctgtccacttggataggcggtgagccccagggtactgagaggagcctgagcatttacctgccattagtgcctcttccttcaggagactggcttgaaacgtgtgttcatgtgcgcgtgcacacacacacatgagcacctgtatgtgttaatgaatagtttttcttggttaatgctttttaacttctgttcctttccgtaagtggatgattcaaaattaacgtgacttggctgggcgcagtggctcacacctgtaatcccagcactttgggaggccaagggaggcggatcacctgaggtcaggagttcgagaccagcctgatcggcatggtgaaaccccgtttctactaaaaatacaaaaattagccgggcgtggtggtgcgcgcctgtaatcccagctactcaggaggctgaggaaggagaatcacttgaacccgggaggtggaggttgcagtgagctgagatcgtgccactgcactccagcctgggcgacagagcgaaactccgtctcaaaaaaaaaaaaaaaacttaatgtgactggagttaaaagtgaaatgtcaggttgtttagtcactgaatagagagctacaagtgcttggtctttcccaagaatcaaacctgagtagaaatacatttaaaagaaaaatctacatggtacctatgaatcctgtaatttgtttagggagatcttgtcactcatccctggttcctgcccatactgtttggtctcgttcttgcagtttgcttggaacagggccagagccccacatgagattgtcagcaggagtgaggagcgccagtccctactcctcagcagggacccagcacagcaatccggttgttctcggttagactgggtcggggccaggggagaagcagtcacccctgtgtagagggttcccgctgtgcttctgagcagttgctttgttcagaagtgttaggagggtcagattgtgccataattgttattaaagagaaaacacgcccaccttcctttctcccctgctggccattgttcattgagttttactgagggcagcctttgtggaagtcagggaggttgccaaaggcctgtagatgcctcctgacaaggtcttgattcctggttttctagcacccatttgcattttggtcttcagcacaaagccttgttccctgtggccggacttctgggcaataagactggggagtgactgttgagcagtctgctgtcaggagagatggctgaaaaggtgatcatcttggtgctaaacaagtaagaggcaactgccctgtttttgtttgttttgaggcacaatgaaactttagccaaactctgcaagagggtcccatctcctgccatggccaggtgtgagagaccaaaccgagaaaacagcatactctatcacttaagccttgggtagaatgggaattctttaccctgggtaaacgttttaacaaaaaaatggaacttaacttcggtttggactgtggtcgtgctgaggcaggagtggggttgccctcttggggctgaatctccaggcctcacgaggtcccctgtggggatgctgctatttctaagatgcaaattgcacatttcctagattttgtatctgtggatttggataagggaggggaacacggacaaattgcttgtacaatttgaaatgggcctcaatggtacttcaaaccttttgattattcctaaataaaaacataaatatat

SEQ ID NO: 372307 - DNA, 6617 bp, Homo sapiens
  misc_feature (3104)..(3104): n is a, c, g, or t
cgaatcgtaaccgttcgtacgagaatcgctgtcctctccttgctcgagatccattgtgctctaaagtgtgaaaagacctagatggtagaaggcaagcagtggaatgtgtctgggtatccgagaaatatacagaaagcacttaagagaacttaatcatttttttctccctttccttagattgaatagggaaaacctgctttctgcaaacaactgaaaaagctgcatttagaaactgtttctttggccctcatcgagaagctggaacttgtattgttaggccccttatgggacaagctctcaactgctgatcacccagtgattgtcaccatggccagcaagaggaaatccaccacaccatgcatgatcccagtgaagactgtggtgttgcaagatgccagcatggaggcccagcccgctgagaccttgcctgaaggaccccagcaggatctgcccccagaagcatctgctgccagcagtgaggcagcacagaaccccagccctttgacacatcgagtccccaggctggacgtcagctcgaaacagactgaatttgatctgattaatgtgaaggactggccagtctgggaaaccgcctgccacgtggaagagccaaacccgactctctgctgccacatgccgttcccatgcccggctgctgggcacctgggagagcttccagaatcctcgcagacagcccagagcctgccgctaccctcggcctgcccaccaccaagcaagcagcaagcaagatggggttctcatcagttcttcctcccacaatgtaggacctttcctttaccttccaatggataaaatagttcagagttcatagtcatattcatagacacagaatcaagcttttaacatatacatccacctctatatgttaaataaaacatcagattatcaacactgtcattacgtagaaactttggttagccaagcagtgcattgtcagttacgtcatctctaaaaatgacctgtgtctgttctctggggattgctgggtcacaggtgcccctcaccttccacagtcaggcagggaagttataggcacaaagctacgtctggaacccctttgtgccccctttgtgttcctcaaggaagcagtacctttgaagagatctctgctgcattaagtgatgaccggctacgtttcatgtcaggcttgctttgccttgtgggctactcagtgcagaacctgctgtaaccctcagttcaaaaaatggactggcaatgtgattagcgttggatgctttaccattctctttagttgttaccgtaattctgctttttcatgggagtttgaatcatggaccataacttttcagttatcagatcaactaaagaaacatttgttgttaagcctaatgtgctgacctatgtgcctgcattttttttttaatctagacatgtttggagtgagagaaagatggaaaaaagacatggggtagggacgtaagtggaaatctatagccacagcctgaagctttgaccactgcggttttcagagccctttctccacactcatttcagagcctcctatggtttgggaaggaataacacactggcccattagtaagggtgaaggctggagggatttgttgacttcttggaattatcagaggtagggtggtctttagcacaaagacttgcatgcagagatccctggcagaacacccagagtgcccgtggctcccaccccagggtctggccggtgtgctggatgcatgcccaagggtgctgggcatcactggtccttgtgaggatgcttttaaagttttatatttatgtccccaaacttggaaacaagaactctactttagcctaaccctcatgtccttttttgaattgagaaaattacaggaaatggtgcctttgaaaattagaaaacttgcttacagagctgttctaaatggtaaatcctcaatttccccaagaccggttgctctgagagtagctggtaaagaggggcgaactaaagacctgtccacctgtagctccgctcatttcttagaaaccacctgcttcccagagtgccaagccacaagtaccaggcttcgtgggcacagacacctcctgggctgggcagagtgacagtgctagaagaccccagagagagggcaagggctttgggcaagaagcactggtggtgttttagggaccgtccttctcccctacccagggaactggacctggcagggcaccgtgctcatgtggctccaaggacaagcatggcggtggccccttctgccttccaggagaggtcttgcttttgaaaccaaaatcatgttcttctaaagtgtcatcttctgccctccctgtcccaatagggaccacatcttatttgtctcaaacagggacttgtgagtacttggcaagttttgcagcctatttttgtattcttaatttggggagtaaagatgtttggtctcaaaaacctttgaggaattgccaagaatggcgagtgattgctttccttcagagaacagacacttggaatttctccttttagtgtttatatacgtgcagattaatttatatatatatatatacacacacacatatacagtataaatactcatttgattctcgtaaaacgcgcatctggcgtgtgcagttgagaaacttggtggcacatgggtgttgggggagtagcctgtgttggagggacaccagtgcactaggcagctggggcggcccaggctgaagccatctccgggtgtctgagaaaccacccagtgcctcacctccagatcctgctggcatcacctccagagccctgcatgcactggctgaagagttggtctgtggagaggattttcttggttacttgtattcacggttaatttacaacccaaacagcaaaacacagttggtggacaagttcatgcaggacctacagtgacccagccatgggcactagctcatctttcaggtggaaaagtacagtgctgcctgccctggtatgtttttcttatagatgttagccctgcccaacagccagggctacactacaaaaggcaagaatgcccatgtaaggagcccagcagtctggacagatccttcttcctctgctgttggatgagagtgagtgagtatgntctggaccttatccttgaaagatgatcaaaagcgatgatgagggaggcagtcatcacgcaggtgcttaaagggacattgtaggaggtactcaagggtttgggggcaaaaccctgaatccagccagtcgtgcacagagacacacccacactagcccagtggcagtgggggatgtgggatggcagcagccaggtatgtagccctgtcacaggacagctcactgtggttttgcacactgcctaagggttaaattgtgttgttgccttcagtagaaggcatttgtgggctgcagagttgagagttgggtgaggttagtctctcctgaagaaaaagcctataaaaagtggctaatcttatcccttttctctgtatgcagttggactcgtcagagatagtaaaatcatcttttagtgtttttttgttgctgatgtcttgtacccatttgttttttacatggggttgtagatcgagttctcaaaggtgaaaccagatgatcattctgataaaggaaatttaaatttgatacatatgctttgtatattttgattacttgttttcgtttttgactataaaggagctcttttttcttgctcagagtttacctgggagatttcaccagtttgactcaccatttgcagatgtgcttttgtattaaatttaaattttcacatatcacatccattctcaaggtagttatatgctggagaagaaaaatcctctagacacatgaaggcccacatagtcaagtcttccagggcaaagccagcagcccacccaggtcaggtagccagcagggctcagttcccctcactccagacacggaccctcctcttcagggtctcttgacccagcttccttctctccttttacctgagagcacagacctctctcagccagcctgcccagaccacggggggctactcccatgtagtttggggagcacttgatctcagaaaagctccattgtctgagcaaatgggcagttgtggagctcaagcctttctcctgtgctcaagtcccttccccaagcaaggcttcaacctcatctacccaccatgtagttttctctggccatttaagtggggcggcagggacatggttgggccatgccacaccagggctggtgaggcaaccagttttgattttgacagagtggctggaggaaaagtggcaatcaaggtgctgcttggtttgctctgagtgcaaatggaaccaacaggtttctgctgcaatctgtgtgttcccagtgccaggtcacaccaggaggggtggggcagggctaaccaagtggtctctgaactcaccgagcgtctgcacttggttgtgaagttaatgggagtacagagagcgtctggccttggagaggggttgagagcctcctttttggttcttcattcctgagctcttgcctgcccacaaatctgacctctttgaatggggacgcagtccttcaacagagaagtttctatggcaaagaagtttctatttagctctagatccagcagagtcatccattctaactgccctgaagtctagagcaggggagggaacccagaggctggggatgagactaggcagaccctggttaccatatggacaaggacaggggaaagcacccccttcctcaatttctgaaagttctatctttgggttcgcaggactttgaggatgataaagaacatataggtactagcttgttgttgctggtccaaagcttccacagccctgagaatttggctttcgtggctgctctggcagctgagcgaagggaggaaggcagccgctctggtggggactctaggcaccttccctgctgtccacttggataggcggtgagccccagggtactgagaggagcctgagcatttacctgccattagtgcctcttccttcaggagactggcttgaaacgtgtgttcatgtgcgcgtgcacacacacacatgagcacctgtatgtgttaatgaatagtttttcttggttaatgctttttaacttctgttcctttccgtaagtggatgattcaaaattaacgtgacttggctgggcgcagtggctcacacctgtaatcccagcactttgggaggccaagggaggcggatcacctgaggtcaggagttcgagaccagcctgatcggcatggtgaaaccccgtttctactaaaaatacaaaaattagccgggcgtggtggtgcgcgcctgtaatcccagctactcaggaggctgaggaaggagaatcacttgaacccgggaggtggaggttgcagtgagctgagatcgtgccactgcactccagcctgggcgacagagcgaaactccgtctcaaaaaaaaaaaaaaaacttaatgtgactggagttaaaagtgaaatgtcaggttgtttagtcactgaatagagagctacaagtgcttggtctttcccaagaatcaaacctgagtagaaatacatttaaaagaaaaatctacatggtacctatgaatcctgtaatttgtttagggagatcttgtcactcatccctggttcctgcccatactgtttggtctcgttcttgcagtttgcttggaacagggccagagccccacatgagattgtcagcaggagtgaggagcgccagtccctactcctcagcagggacccagcacagcaatccggttgttctcggttagactgggtcggggccaggggagaagcagtcacccctgtgtagagggttcccgctgtgcttctgagcagttgctttgttcagaagtgttaggagggtcagattgtgccataattgttattaaagagaaaacacgcccaccttcctttctcccctgctggccattgttcattgagttttactgagggcagcctttgtggaagtcagggaggttgccaaaggcctgtagatgcctcctgacaaggtcttgattcctggttttctagcacccatttgcattttggtcttcagcacaaagccttgttccctgtggccggacttctgggcaataagactggggagtgactgttgagcagtctgctgtcaggagagatggctgaaaaggtgatcatcttggtgctaaacaagtaagaggcaactgccctgtttttgtttgttttgaggcacaatgaaactttagccaaactctgcaagagggtcccatctcctgccatggccaggtgtgagagaccaaaccgagaaaacagcatactctatcacttaagccttgggtagaatgggaattctttaccctgggtaaacgttttaacaaaaaaatggaacttaacttcggtttggactgtggtcgtgctgaggcaggagtggggttgccctcttggggctgaatctccaggcctcacgaggtcccctgtggggatgctgctatttctaagatgcaaattgcacatttcctagattttgtatctgtggatttggataagggaggggaacacggacaaattgcttgtacaatttgaaatgggcctcaatggtacttcaaaccttttgattattcctaaataaaaacataaatatat

SEQ ID NO: 372308 - DNA, 8239 bp, Homo sapiens
  misc_feature (5847)..(5847): n is a, c, g, or t
ccggagtcggttggtgcagctgcgtccccgccgctcagcagtccgcggctccggcgtcgccgccgccgccgcctctgcggggcctgcgccggccgcccgcccggccgcggggagggaggcccgcagcgcgggaagagcggcccggtcgcgggcgccgccaccgccgccgctgccaggactgaaatgcaactgcagaagcaacatgtgaccttttagagatgcttgtgggactgcataaagtgaagagggaaactggaaaaaaacaatgaaattgaatagggaaaacctgctttctgcaaacaactgaaaaagctgcatttagaaactgtttctttggccctcatcgagaagctggaacttgtattgttaggccccttatgggacaagctctcaactgctgatcacccagtgattgtcaccatggccagcaagaggaaatccaccacaccatgcatgatcccagtgaagactgtggtgttgcaagatgccagcatggaggcccagcccgctgagaccttgcctgaaggaccccagcaggatctgcccccagaagcatctgctgccagcagtgaggcagcacagaaccccagcagtactgatggctctacactggccaatgggcatcggagcactttagatggctatttatattcctgtaaatactgcgatttcagatcccatgacatgacccaatttgtgggacatatgaactcagagcacacagactttaataaagacccaacctttgtatgcagtgggtgcagttttctggcaaaaacccctgaggggctttccttgcacaatgccacatgtcactccggggaagccagctttgtgtggaacgtggccaagccagacaatcatgtggttgtggagcagagcatccctgagagcaccagcactcctgacctagcgggtgagcccagtgctgaaggggctgatggacaggcagaaatcatcattaccaaaactccaatcatgaagataatgaaaggcaaagctgaagccaaaaaaattcatacactcaaggagaatgtccctagccagcctgtgggtgaggccttaccaaagctgtcgactggagaaatggaggtgagagagggggaccattccttcatcaatggggcagttccagtcagccaggcatctgccagctctgcaaaaaacccccatgccgccaacgggcccctgataggaacagtgccagttttgccagctggcatagcacagttcctctccctccagcagcagcccccagtgcatgcccaacaccatgtccaccagccactgcccacggccaaggcccttcccaaagtgatgatccccctgagcagcattccaacgtacagtgcagccatggactctaacagcttcctgaagaactccttccacaagttcccctaccccaccaaagccgagctctgctatttgactgtggtgaccaagtatccagaagaacagctcaagatctggttcacagcccaaaggctgaagcaggggatcagctggtcccctgaggagattgaggatgcccggaaaaagatgttcaatacagtcatccagtctgtgcctcagcccacaattacggttctaaataccccactcgtcgccagtgctggcaatgtccagcatctcatccaggccgctcttccaggtcacgttgtggggcagccagagggtacaggagggggacttctggtcactcagccattgatggccaatgggttgcaagcaacaagttcccctctccccctcacggtgacatccgtccccaagcagccaggtgtggcacccattaacactgtgtgttcaaatacaacgtcagctgtgaaggtggtcaatgcggcccagtcgctcctcacggcctgccccagcataacctcccaagccttccttgatgctagcatctacaaaaataagaaatctcatgaacagctgtcagctctgaaagggagcttctgtcggaaccagttcccagggcagagcgaagttgaacatctcacaaaagtgacgggcctcagtaccagagaggtgcggaaatggttcagtgatcgtagataccactgccggaacttgaagggctccagagcgatgatacctggagatcacagttccatcatcattgactctgtgccagaggtgtccttctccccatcgtccaaggtccctgaggtaacctgcattccgacaacagccacactagcaacccacccttctgccaaacgacaatcttggcaccagactcctgacttcacaccaaccaaatacaaggagagagcccctgagcagctcagagccctggagagcagttttgcacaaaaccctcttcctcttgatgaggaactggaccgcctgagaagtgaaaccaaaatgacccgacgagaaattgatagctggttttcagagagacggaaaaaagtgaatgctgaggagaccaagaaggctgaggagaatgcctctcaggaggaagaggaggctgctgaggatgagggtggagaagaggatttggccagtgagctaagggtctctggtgaaaatggctctctggaaatgcccagcagccatatcttggcagagcgcaaagtcagccccattaaaatcaacctgaagaacctgagggtcactgaagccaatggcaggaacgagattccagggctgggtgcctgtgaccctgaggatgatgagtcaaacaaactggcagagcagctcccaggcaaagtgagctgcaaaaagactgcccagcagcggcacttgctgcggcagctctttgtccagacacagtggccaagcaaccaggactatgactccatcatggcccagacgggtctgccacggccagaggtggtgcgctggtttggagatagcaggtacgcactgaagaacggccaactcaaatggtacgaagactataagcgaggcaacttcccaccagggctactggtcattgcccctggcaaccgggagctcctgcaggactattacatgacacacaagatgctgtatgaagaggacctgcagaacctctgtgacaagacccagatgagctcccagcaggtcaagcagtggtttgctgagaaaatgggggaggagaccagagccgtggcagacacaggcagtgaggaccagggccctggtactggtgagctcacagcagttcacaaagggatgggtgacacctattcagaggtgtctgagaacagtgagtcgtgggagccccgtgtccctgaggccagctcagagccctttgacacatcgagtccccaggctggacgtcagctcgaaacagactgaatttgatctgattaatgtgaaggactggccagtctgggaaaccgcctgccacgtggaagagccaaacccgactctctgctgccacatgccgttcccatgcccggctgctgggcacctgggagagcttccagaatcctcgcagacagcccagagcctgccgctaccctcggcctgcccaccaccaagcaagcagcaagcaagatggggttctcatcagttcttcctcccacaatgtaggacctttcctttaccttccaatggataaaatagttcagagttcatagtcatattcatagacacagaatcaagcttttaacatatacatccacctctatatgttaaataaaacatcagattatcaacactgtcattacgtagaaactttggttagccaagcagtgcattgtcagttacgtcatctctaaaaatgacctgtgtctgttctctggggattgctgggtcacaggtgcccctcaccttccacagtcaggcagggaagttataggcacaaagctacgtctggaacccctttgtgccccctttgtgttcctcaaggaagcagtacctttgaagagatctctgctgcattaagtgatgaccggctacgtttcatgtcaggcttgctttgccttgtgggctactcagtgcagaacctgctgtaaccctcagttcaaaaaatggactggcaatgtgattagcgttggatgctttaccattctctttagttgttaccgtaattctgctttttcatgggagtttgaatcatggaccataacttttcagttatcagatcaactaaagaaacatttgttgttaagcctaatgtgctgacctatgtgcctgcattttttttttaatctagacatgtttggagtgagagaaagatggaaaaaagacatggggtagggacgtaagtggaaatctatagccacagcctgaagctttgaccactgcggttttcagagccctttctccacactcatttcagagcctcctatggtttgggaaggaataacacactggcccattagtaagggtgaaggctggagggatttgttgacttcttggaattatcagaggtagggtggtctttagcacaaagacttgcatgcagagatccctggcagaacacccagagtgcccgtggctcccaccccagggtctggccggtgtgctggatgcatgcccaagggtgctgggcatcactggtccttgtgaggatgcttttaaagttttatatttatgtccccaaacttggaaacaagaactctactttagcctaaccctcatgtccttttttgaattgagaaaattacaggaaatggtgcctttgaaaattagaaaacttgcttacagagctgttctaaatggtaaatcctcaatttccccaagaccggttgctctgagagtagctggtaaagaggggcgaactaaagacctgtccacctgtagctccgctcatttcttagaaaccacctgcttcccagagtgccaagccacaagtaccaggcttcgtgggcacagacacctcctgggctgggcagagtgacagtgctagaagaccccagagagagggcaagggctttgggcaagaagcactggtggtgttttagggaccgtccttctcccctacccagggaactggacctggcagggcaccgtgctcatgtggctccaaggacaagcatggcggtggccccttctgccttccaggagaggtcttgcttttgaaaccaaaatcatgttcttctaaagtgtcatcttctgccctccctgtcccaatagggaccacatcttatttgtctcaaacagggacttgtgagtacttggcaagttttgcagcctatttttgtattcttaatttggggagtaaagatgtttggtctcaaaaacctttgaggaattgccaagaatggcgagtgattgctttccttcagagaacagacacttggaatttctccttttagtgtttatatacgtgcagattaatttatatatatatatatacacacacacatatacagtataaatactcatttgattctcgtaaaacgcgcatctggcgtgtgcagttgagaaacttggtggcacatgggtgttgggggagtagcctgtgttggagggacaccagtgcactaggcagctggggcggcccaggctgaagccatctccgggtgtctgagaaaccacccagtgcctcacctccagatcctgctggcatcacctccagagccctgcatgcactggctgaagagttggtctgtggagaggattttcttggttacttgtattcacggttaatttacaacccaaacagcaaaacacagttggtggacaagttcatgcaggacctacagtgacccagccatgggcactagctcatctttcaggtggaaaagtacagtgctgcctgccctggtatgtttttcttatagatgttagccctgcccaacagccagggctacactacaaaaggcaagaatgcccatgtaaggagcccagcagtctggacagatccttcttcctctgctgttggatgagagtgagtgagtatgntctggaccttatccttgaaagatgatcaaaagcgatgatgagggaggcagtcatcacgcaggtgcttaaagggacattgtaggaggtactcaagggtttgggggcaaaaccctgaatccagccagtcgtgcacagagacacacccacactagcccagtggcagtgggggatgtgggatggcagcagccaggtatgtagccctgtcacaggacagctcactgtggttttgcacactgcctaagggttaaattgtgttgttgccttcagtagaaggcatttgtgggctgcagagttgagagttgggtgaggttagtctctcctgaagaaaaagcctataaaaagtggctaatcttatcccttttctctgtatgcagttggactcgtcagagatagtaaaatcatcttttagtgtttttttgttgctgatgtcttgtacccatttgttttttacatggggttgtagatcgagttctcaaaggtgaaaccagatgatcattctgataaaggaaatttaaatttgatacatatgctttgtatattttgattacttgttttcgtttttgactataaaggagctcttttttcttgctcagagtttacctgggagatttcaccagtttgactcaccatttgcagatgtgcttttgtattaaatttaaattttcacatatcacatccattctcaaggtagttatatgctggagaagaaaaatcctctagacacatgaaggcccacatagtcaagtcttccagggcaaagccagcagcccacccaggtcaggtagccagcagggctcagttcccctcactccagacacggaccctcctcttcagggtctcttgacccagcttccttctctccttttacctgagagcacagacctctctcagccagcctgcccagaccacggggggctactcccatgtagtttggggagcacttgatctcagaaaagctccattgtctgagcaaatgggcagttgtggagctcaagcctttctcctgtgctcaagtcccttccccaagcaaggcttcaacctcatctacccaccatgtagttttctctggccatttaagtggggcggcagggacatggttgggccatgccacaccagggctggtgaggcaaccagttttgattttgacagagtggctggaggaaaagtggcaatcaaggtgctgcttggtttgctctgagtgcaaatggaaccaacaggtttctgctgcaatctgtgtgttcccagtgccaggtcacaccaggaggggtggggcagggctaaccaagtggtctctgaactcaccgagcgtctgcacttggttgtgaagttaatgggagtacagagagcgtctggccttggagaggggttgagagcctcctttttggttcttcattcctgagctcttgcctgcccacaaatctgacctctttgaatggggacgcagtccttcaacagagaagtttctatggcaaagaagtttctatttagctctagatccagcagagtcatccattctaactgccctgaagtctagagcaggggagggaacccagaggctggggatgagactaggcagaccctggttaccatatggacaaggacaggggaaagcacccccttcctcaatttctgaaagttctatctttgggttcgcaggactttgaggatgataaagaacatataggtactagcttgttgttgctggtccaaagcttccacagccctgagaatttggctttcgtggctgctctggcagctgagcgaagggaggaaggcagccgctctggtggggactctaggcaccttccctgctgtccacttggataggcggtgagccccagggtactgagaggagcctgagcatttacctgccattagtgcctcttccttcaggagactggcttgaaacgtgtgttcatgtgcgcgtgcacacacacacatgagcacctgtatgtgttaatgaatagtttttcttggttaatgctttttaacttctgttcctttccgtaagtggatgattcaaaattaacgtgacttggctgggcgcagtggctcacacctgtaatcccagcactttgggaggccaagggaggcggatcacctgaggtcaggagttcgagaccagcctgatcggcatggtgaaaccccgtttctactaaaaatacaaaaattagccgggcgtggtggtgcgcgcctgtaatcccagctactcaggaggctgaggaaggagaatcacttgaacccgggaggtggaggttgcagtgagctgagatcgtgccactgcactccagcctgggcgacagagcgaaactccgtctcaaaaaaaaaaaaaaaactcgacctactaccagacaaccttagccaaaccatttacccaaataaaggataggcg

SEQ ID NO: 372309 - DNA, 6688 bp, Homo sapiens
  misc_feature (5847)..(5847): n is a, c, g, or t
ccggagtcggttggtgcagctgcgtccccgccgctcagcagtccgcggctccggcgtcgccgccgccgccgcctctgcggggcctgcgccggccgcccgcccggccgcggggagggaggcccgcagcgcgggaagagcggcccggtcgcgggcgccgccaccgccgccgctgccaggactgaaatgcaactgcagaagcaacatgtgaccttttagagatgcttgtgggactgcataaagtgaagagggaaactggaaaaaaacaatgaaattgaatagggaaaacctgctttctgcaaacaactgaaaaagctgcatttagaaactgtttctttggccctcatcgagaagctggaacttgtattgttaggccccttatgggacaagctctcaactgctgatcacccagtgattgtcaccatggccagcaagaggaaatccaccacaccatgcatgatcccagtgaagactgtggtgttgcaagatgccagcatggaggcccagcccgctgagaccttgcctgaaggaccccagcaggatctgcccccagaagcatctgctgccagcagtgaggcagcacagaaccccagcagtactgatggctctacactggccaatgggcatcggagcactttagatggctatttatattcctgtaaatactgcgatttcagatcccatgacatgacccaatttgtgggacatatgaactcagagcacacagactttaataaagacccaacctttgtatgcagtgggtgcagttttctggcaaaaacccctgaggggctttccttgcacaatgccacatgtcactccggggaagccagctttgtgtggaacgtggccaagccagacaatcatgtggttgtggagcagagcatccctgagagcaccagcactcctgacctagcgggtgagcccagtgctgaaggggctgatggacaggcagaaatcatcattaccaaaactccaatcatgaagataatgaaaggcaaagctgaagccaaaaaaattcatacactcaaggagaatgtccctagccagcctgtgggtgaggccttaccaaagctgtcgactggagaaatggaggtgagagagggggaccattccttcatcaatggggcagttccagtcagccaggcatctgccagctctgcaaaaaacccccatgccgccaacgggcccctgataggaacagtgccagttttgccagctggcatagcacagttcctctccctccagcagcagcccccagtgcatgcccaacaccatgtccaccagccactgcccacggccaaggcccttcccaaagtgatgatccccctgagcagcattccaacgtacagtgcagccatggactctaacagcttcctgaagaactccttccacaagttcccctaccccaccaaagccgagctctgctatttgactgtggtgaccaagtatccagaagaacagctcaagatctggttcacagcccaaaggctgaagcaggggatcagctggtcccctgaggagattgaggatgcccggaaaaagatgttcaatacagtcatccagtctgtgcctcagcccacaattacggttctaaataccccactcgtcgccagtgctggcaatgtccagcatctcatccaggccgctcttccaggtcacgttgtggggcagccagagggtacaggagggggacttctggtcactcagccattgatggccaatgggttgcaagcaacaagttcccctctccccctcacggtgacatccgtccccaagcagccaggtgtggcacccattaacactgtgtgttcaaatacaacgtcagctgtgaaggtggtcaatgcggcccagtcgctcctcacggcctgccccagcataacctcccaagccttccttgatgctagcatctacaaaaataagaaatctcatgaacagctgtcagctctgaaagggagcttctgtcggaaccagttcccagggcagagcgaagttgaacatctcacaaaagtgacgggcctcagtaccagagaggtgcggaaatggttcagtgatcgtagataccactgccggaacttgaagggctccagagcgatgatacctggagatcacagttccatcatcattgactctgtgccagaggtgtccttctccccatcgtccaaggtccctgaggtaacctgcattccgacaacagccacactagcaacccacccttctgccaaacgacaatcttggcaccagactcctgacttcacaccaaccaaatacaaggagagagcccctgagcagctcagagccctggagagcagttttgcacaaaaccctcttcctcttgatgaggaactggaccgcctgagaagtgaaaccaaaatgacccgacgagaaattgatagctggttttcagagagacggaaaaaagtgaatgctgaggagaccaagaaggctgaggagaatgcctctcaggaggaagaggaggctgctgaggatgagggtggagaagaggatttggccagtgagctaagggtctctggtgaaaatggctctctggaaatgcccagcagccatatcttggcagagcgcaaagtcagccccattaaaatcaacctgaagaacctgagggtcactgaagccaatggcaggaacgagattccagggctgggtgcctgtgaccctgaggatgatgagtcaaacaaactggcagagcagctcccaggcaaagtgagctgcaaaaagactgcccagcagcggcacttgctgcggcagctctttgtccagacacagtggccaagcaaccaggactatgactccatcatggcccagacgggtctgccacggccagaggtggtgcgctggtttggagatagcaggtacgcactgaagaacggccaactcaaatggtacgaagactataagcgaggcaacttcccaccagggctactggtcattgcccctggcaaccgggagctcctgcaggactattacatgacacacaagatgctgtatgaagaggacctgcagaacctctgtgacaagacccagatgagctcccagcaggtcaagcagtggtttgctgagaaaatgggggaggagaccagagccgtggcagacacaggcagtgaggaccagggccctggtactggtgagctcacagcagttcacaaagggatgggtgacacctattcagaggtgtctgagaacagtgagtcgtgggagccccgtgtccctgaggccagctcagagccctttgacacatcgagtccccaggctggacgtcagctcgaaacagactgaatttgatctgattaatgtgaaggactggccagtctgggaaaccgcctgccacgtggaagagccaaacccgactctctgctgccacatgccgttcccatgcccggctgctgggcacctgggagagcttccagaatcctcgcagacagcccagagcctgccgctaccctcggcctgcccaccaccaagcaagcagcaagcaagatggggttctcatcagttcttcctcccacaatgtaggacctttcctttaccttccaatggataaaatagttcagagttcatagtcatattcatagacacagaatcaagcttttaacatatacatccacctctatatgttaaataaaacatcagattatcaacactgtcattacgtagaaactttggttagccaagcagtgcattgtcagttacgtcatctctaaaaatgacctgtgtctgttctctggggattgctgggtcacaggtgcccctcaccttccacagtcaggcagggaagttataggcacaaagctacgtctggaacccctttgtgccccctttgtgttcctcaaggaagcagtacctttgaagagatctctgctgcattaagtgatgaccggctacgtttcatgtcaggcttgctttgccttgtgggctactcagtgcagaacctgctgtaaccctcagttcaaaaaatggactggcaatgtgattagcgttggatgctttaccattctctttagttgttaccgtaattctgctttttcatgggagtttgaatcatggaccataacttttcagttatcagatcaactaaagaaacatttgttgttaagcctaatgtgctgacctatgtgcctgcattttttttttaatctagacatgtttggagtgagagaaagatggaaaaaagacatggggtagggacgtaagtggaaatctatagccacagcctgaagctttgaccactgcggttttcagagccctttctccacactcatttcagagcctcctatggtttgggaaggaataacacactggcccattagtaagggtgaaggctggagggatttgttgacttcttggaattatcagaggtagggtggtctttagcacaaagacttgcatgcagagatccctggcagaacacccagagtgcccgtggctcccaccccagggtctggccggtgtgctggatgcatgcccaagggtgctgggcatcactggtccttgtgaggatgcttttaaagttttatatttatgtccccaaacttggaaacaagaactctactttagcctaaccctcatgtccttttttgaattgagaaaattacaggaaatggtgcctttgaaaattagaaaacttgcttacagagctgttctaaatggtaaatcctcaatttccccaagaccggttgctctgagagtagctggtaaagaggggcgaactaaagacctgtccacctgtagctccgctcatttcttagaaaccacctgcttcccagagtgccaagccacaagtaccaggcttcgtgggcacagacacctcctgggctgggcagagtgacagtgctagaagaccccagagagagggcaagggctttgggcaagaagcactggtggtgttttagggaccgtccttctcccctacccagggaactggacctggcagggcaccgtgctcatgtggctccaaggacaagcatggcggtggccccttctgccttccaggagaggtcttgcttttgaaaccaaaatcatgttcttctaaagtgtcatcttctgccctccctgtcccaatagggaccacatcttatttgtctcaaacagggacttgtgagtacttggcaagttttgcagcctatttttgtattcttaatttggggagtaaagatgtttggtctcaaaaacctttgaggaattgccaagaatggcgagtgattgctttccttcagagaacagacacttggaatttctccttttagtgtttatatacgtgcagattaatttatatatatatatatacacacacacatatacagtataaatactcatttgattctcgtaaaacgcgcatctggcgtgtgcagttgagaaacttggtggcacatgggtgttgggggagtagcctgtgttggagggacaccagtgcactaggcagctggggcggcccaggctgaagccatctccgggtgtctgagaaaccacccagtgcctcacctccagatcctgctggcatcacctccagagccctgcatgcactggctgaagagttggtctgtggagaggattttcttggttacttgtattcacggttaatttacaacccaaacagcaaaacacagttggtggacaagttcatgcaggacctacagtgacccagccatgggcactagctcatctttcaggtggaaaagtacagtgctgcctgccctggtatgtttttcttatagatgttagccctgcccaacagccagggctacactacaaaaggcaagaatgcccatgtaaggagcccagcagtctggacagatccttcttcctctgctgttggatgagagtgagtgagtatgntctggaccttatccttgaaagatgatcaaaagcgatgatgagggaggcagtcatcacgcaggtgcttaaagggacattgtaggaggtactcaagggtttgggggcaaaaccctgaatccagccagtcgtgcacagagacacacccacactagcccagtggcagtgggggatgtgggatggcagcagccaggtatgtagccctgtcacaggacagctcactgtggttttgcacactgcctaagggttaaattgtgttgttgccttcagtagaaggcatttgtgggctgcagagttgagagttgggtgaggttagtctctcctgaagaaaaagcctataaaaagtggctaatcttatcccttttctctgtatgcagttggactcgtcagagatagtaaaatcatcttttagtgtttttttgttgctgatgtcttgtacccatttgttttttacatggggttgtagatcgagttctcaaaggtgaaaccagatgatcattctgataaaggaaatttaaatttgatacatatgctttgtatattttgattacttgttttcgtttttgactataaaggagcttttttattttgggaggggaggagtgtcatttttgagaatcttgggttcctgaaaaagaacgccctagttggatggcttgccagggccttggggtttggtagtgattgtacaacttaaagctcctttctcttggctgagtgacaggtggctgttcaggtggaccaaagcaccttgacacaaggactccacactgtgctctctagtagcacaaggaggaagttggacagaacattgggtagtgccttgcgggctcacacatgtact

SEQ ID NO: 372310 - DNA, 2124 bp, Homo sapiens
ccggagtcggttggtgcagctgcgtccccgccgctcagcagtccgcggctccggcgtcgccgccgccgccgcctctgcggggcctgcgccggccgcccgcccggccgcggggagggaggcccgcagcgcgggaagagcggcccggtcgcgggcgccgccaccgccgccgctgccaggactgaaatgcaactgcagaagcaacatgtgaccttttagagatgcttgtgggactgcataaagtgaagagggaaactggaaaaaaacaatgaaattgaatagggaaaacctgctttctgcaaacaactgaaaaagctgcatttagaaactgtttctttggccctcatcgagaagctggaacttgtattgttaggccccttatgggacaagctctcaactgctgatcacccagtgattgtcaccatggccagcaagaggaaatccaccacaccatgcatgatcccagtgaagactgtggtgttgcaagatgccagcatggaggcccagcccgctgagaccttgcctgaaggaccccagcaggatctgcccccagaagcatctgctgccagcagtgaggcagcacagaaccccagcagtactgatggctctacactggccaatgggcatcggagcactttagatggctatttatattcctgtaaatactgcgatttcagatcccatgacatgacccaatttgtgggacatatgaactcagagcacacagactttaataaagacccaacctttgtatgcagtgggtgcagttttctggcaaaaacccctgaggggctttccttgcacaatgccacatgtcactccggggaagccagctttgtgtggaacgtggccaagccagacaatcatgtggttgtggagcagagcatccctgagagcaccagcactcctgacctagcgggtgagcccagtgctgaaggggctgatggacaggcagaaatcatcattaccaaaactccaatcatgaagataatgaaaggcaaagctgaagccaaaaaaattcatacactcaaggagaatgtccctagccagcctgtgggtgaggccttaccaaagctgtcgactggagaaatggaggtgagagagggggaccattccttcatcaatggggcagttccagtcagccaggcatctgccagctctgcaaaaaacccccatgccgccaacgggcccctgataggaacagtgccagttttgccagctggcatagcacagttcctctccctccagcagcagcccccagtgcatgcccaacaccatgtccaccagccactgcccacggccaaggcccttcccaaagtgatgatccccctgagcagcattccaacgtacagtgcagccatggactctaacagcttcctgaagaactccttccacaagttcccctaccccaccaaagccgagctctgctatttgactgtggtgaccaagtatccagaagaacagctcaagatctggttcacagcccaaaggctgaagcaggggatcagctggtcccctgaggagattgaggatgcccggaaaaagatgttcaatacagtcatccagtctgtgcctcagcccacaattacggttctaaataccccactcgtcgccagtgctggcaatgtccagcatctcatccaggccgctcttccaggtcacgttgtggggcagccagagggtacaggagggggacttctggtcactcagccattgatggccaatgggttgcaagcaacaagttcccctctccccctcacggtgacatccgtccccaagcagccaggtgtggcacccattaacactgtgtgttcaaatacaacgtcagctgtgaaggtggtcaatgcggcccagtcgctcctcacggcctgccccagcataacctcccaagccttccttgatgctagcatctacaaaaataagaaatctcatgaacagctgtcagctctgaaagggagcttctgtcggaaccagttcccagggcagagcgaagttgaacatctcacaaaagtgcgcctgggtgcagaagtgcgcctgggtgcagaagtgcgcctgggtgcagaagtgcgcctgggtgcagaagtgcgcctgggtgcagaagtgcgccgggagcagaaggcgcctggt

SEQ ID NO: 372311 - DNA, 1186 bp, Homo sapiens
  misc_feature (2)..(3): n is a, c, g, or t
  misc_feature (1185)..(1185): n is a, c, g, or t
gnngataatgcagagcatgtgaagggagaccggctcggtctctctctctcccagtggactagaaggagcagagagttgtgctgtttctcccattctttacagctcaccggatgtaaaagaactctggctagagaccctccaaggacagaggcacagccacacgggagtgaaatccacccctggacagtcagccgcaatactgatgaagctgagaagcagccacaatgcttcaaaaacactaaacgccaataatatggagacactaatcgaatgtcaatcagagggtgatatcaaggaacatcccctgttggcatcatgtgagagtgaagacagtatttgccagctcattgaagttaagaagagaaagaaggtgctgtcctggccctttctcatgagaaggctctcccctgcatcagatttttctggggctttggagacagacttgaaagcatcgctatttgatcagcccttgtcaattatctgcggtgacagtgacacactccccagacccatccaggacattctcactattctatgccttaaaggcccttcaacggaagggatattcaggagagcagccaacgagaaagcccgtaaggagctgaaggaggagctcaactctggggatgcggtggatctggagaggctccccgtgcacctcctcgctgtggtctttaaggacttcctcagaagtatcccccggaagctactttcaagcgacctctttgaggagtggatgggtgctctggagatgcaggacgaggaggacagaatcgaggccctgaaacaggttgcagataagctcccccggcccaacctcctgctactcaagcacttggtctatgtgctgcacctcatcagcaagaactctgaggtgaacaggatggactccagcaatctggccatctgcattggacccaacatgctcaccctggagaatgaccagagcctgtcatttgaagcccagaaggacctgaacaacaaggtttgttctgcttactgatgagaaatccccaacttatgatctcaccatctgtttgccaagtccaggcaataaaatgcttcagaatgtctccaactgactcagaatcacagtgaaaatataaaatgcaaaatgcttttgtcatagttccactctctcagatacatgtatctaatgaaactgaataaatccgtgtcttctgnc

SEQ ID NO: 372312 - DNA, 471 bp, Homo sapiens
tgagagttggagtcgtatttcaagtgggaccagaatttatacaatctgggctacaggccagttctcccttggctcgcttgatgaagtagaactaggaactacaactatgaactggctctatgccacagctcacaattttccatcttcggtcacgatggagcccttgtagcccttgacagcagaactgttacacatgaggtctttgatccatggcaaaccctttcttgaagtagcagttttatcattgtggcccttccttcctcagaattcctaataagggagggaggatcccggcctaacctcagctctcctgttctcctcagacctctgtgtgagcggcggaagtttcttcatgacaacatggttgaaattccaaaccggatcatgttctcagaaatgaagcgagtcacagtaagtgaagaccctatgctaggcagtgtcctagaagtttgaaagcagggcagagaactc

SEQ ID NO: 372313 - DNA, 3465 bp, Homo sapiens
tgcgcctgcgcgctgcctcccgctctaggacccggatttaaagagacaggcgctccaaccgtcgtgggctgcccgcggcctgtaatgagcaagttccgaggcctacggtgagcgccggagccggagaggcagctatatgtctttggctttcaagatcttctttccacaaaccctccgtgcactcagccgaaaagaactgtgcctattccgaaaacatcactggcgtgatgtaagacaattcagccagtggtcagaaacagatctgcttcatggacatcccctcttcctgagaagaaagcctgttctatcattccagggaagccatctaagatcacgtgccacctaccttgttttcttgccagggttgcatgtgggactctgcagtggcccctgtgagatggctgagcaacggttctgtgtggactatgccaagcgtggcacagctggctgcaaaaaatgcaaggaaaagattgtgaagggcgtatgccgaattggcaaagtggtgcccaatcccttctcagagtctgggggtgatatgaaagagtggtaccacattaaatgcatgtttgagaaactagagcgggcccgggccaccacaaaaaaaatcgaggacctcacagagctggaaggctgggaagagctggaagataatgagaaggaacagataacccagcacattgcagatctgtcttctaaggcagcaggtacaccaaagaagaaagctgttgtccaggctaagttgacaaccactggccaggtgacttctccagtgaaaggcgcctcatttgtcaccagtaccaatccccggaaattttctggcttttcagccaagcccaacaactctggggaagccccctcgagccccacccctaagagaagtctgtcttcaagcaaatgtgaccccaggcataaggactgtctgctacgggagtttcgaaagttatgcgccatggtggccgataatcctagctacaacacgaagacccagatcatccaggacttccttcggaaaggctcagcaggagatggtttccacggtgatgtgtacctaacagtgaagctgctgctgccaggagtcattaagactgtttacaacttgaacgataagcagattgtgaagcttttcagtcgcatttttaactgcaacccagatgatatggcacgggacctagagcagggtgacgtgtcagagacaatcagagtcttctttgagcagagcaagtctttccccccagctgccaagagcctccttaccatccaggaagtggatgagttccttctgcggctgtccaagctcaccaaggaggatgagcagcaacaggccctacaggacattgcctccaggtgtacagccaatgaccttaaatgcatcatcaggttgatcaaacatgatctgaagatgaactcaggtgcaaaacatgtgttagacgcccttgaccccaatgcctatgaagccttcaaagcctcgcgcaacctgcaggatgtggtggagcgggtccttcacaacgcgcaggaggtggagaaggagccgggccagagacgagctctgagcgtccaggcctcgctgatgacacctgtgcagcccatgttggcggaggcctgcaagtccgttgagtatgcaatgaagaaatgtcccaatggcatgttctctgagatcaagtacgatggagagcgagtccaggtgcataagaatggagaccacttcagctacttcagccgcagtctcaagcccgtccttcctcacaaggtggcccactttaaggactacattccccaggcttttcctgggggccacagcatgatcttggattctgaagtgcttctgattgacaacaagacaggcaaaccactgccctttgggactctgggagtacacaagaaagcagccttccaggatgctaatgtctgcctgtttgtttttgattgtatctactttaatgatgtcagcttgatggacagacctctgtgtgagcggcggaagtttcttcatgacaacatggttgaaattccaaaccggatcatgttctcagaaatgaagcgagtcacaaaagctttggacttggctgacatgataacccgggtgatccaggagggattggaggggctggtgctgaaggatgtgaagggtacatatgagcctgggaagcggcactggctgaaagtgaagaaagactatttgaacgagggggccatggccgacacagctgacctggtggtccttggagccttctatgggcaagggagcaaaggcggcatgatgtcaatcttcctcatgggctgctacgaccctggcagccagaagtggtgcacagtcaccaagtgtgcaggaggccatgatgatgccacgcttgcccgcctgcagaatgaactagacatggtgaagatcagcaaggaccccagcaaaatacccagctggttgaaggtcaacaagatctactatcctgacttcatcgtcccagacccaaagaaagctgccgtgtgggagatcacaggggctgaattctccaaatcggaggctcatacagctgacgggatctccatccgattccctcgctgcacccgaatccgagatgataaggactggaaatctgccactaaccttccccaactcaaggaactgtaccagttgtccaaggagaaggcagacttcactgtagtggctggagatgaggggagctccactacagggggtagcagtgaagagaataagggtccctcagggtctgctgtgtcccgcaaggcccccagcaagccctcagccagtaccaagaaagcagaagggaagctgagtaactccaacagcaaagatggcaacatgcagactgcaaagccttccgctatgaaggtgggggagaagctggccacaaagtcttctccagtgaaagtaggggagaagcggaaagctgctgatgagacgctgtgccaaacaaaggtattgctggacatcttcactggggtgcggctttacttgccaccctccacaccagacttcagccgtctcagacgctactttgtggcattcgacggggacctggtacaggaatttgatatgacttcagccacgcacgtgctgggtagcagggacaagaaccctgcggcccagcaggtctccccagagtggatttgggcatgtatccggaaacggagactggtagctccctgctaggtttgctgtcttccctctccctcaggccatactctcctttaccatactattggactggactcaggctggaggcagatagacacagtatagggggaatgggcttgcttctcccaaacccaccagttctccactgtctcttctggaccaggaattagttgctgtgggtgccacagctgaagtcagtttgtcttgctggtttaaatagatctttcagagctgggtgctgggtttgccatctttttgttttctttgaaaagcagcttagttaccctttttataaataaaatatcttgcagtta

SEQ ID NO: 372314 - DNA, 3731 bp, Homo sapiens
tgcgcctgcgcgctgcctcccgctctaggacccggatttaaagagacaggcgctccaaccgtcgtgggctgcccgcggcctgtaatgagcaagttccgaggcctacggtgagcgccggagccggagaggcagctatatgtctttggctttcaagatcttctttccacaaaccctccgtgcactcagccgaaaagaactgtgcctattccgaaaacatcactggcgtgatgtaagacaattcagccagtggtcagaaacagatctgcttcatggacatcccctcttcctgagaagaaagcctgttctatcattccagggaagccatctaagatcacgtgccacctaccttgttttcttgccagggttgcatgtgggactctgcagtggcccctgtgagatggctgagcaacggttctgtgtggactatgccaagcgtggcacagctggctgcaaaaaatgcaaggaaaagattgtgaagggcgtatgccgaattggcaaagtggtgcccaatcccttctcagagtctgggggtgatatgaaagagtggtaccacattaaatgcatgtttgagaaactagagcgggcccgggccaccacaaaaaaaatcgaggacctcacagagctggaaggctgggaagagctggaagataatgagaaggaacagataacccagcacattgcagatctgtcttctaaggcagcaggtacaccaaagaagaaagctgttgtccaggctaagttgacaaccactggccaggtgacttctccagtgaaaggcgcctcatttgtcaccagtaccaatccccggaaattttctggcttttcagccaagcccaacaactctggggaagccccctcgagccccacccctaagagaagtctgtcttcaagcaaatgtgaccccaggcataaggactgtctgctacgggagtttcgaaagttatgcgccatggtggccgataatcctagctacaacacgaagacccagatcatccaggacttccttcggaaaggctcagcaggagatggtttccacggtgatgtgtacctaacagtgaagctgctgctgccaggagtcattaagactgtttacaacttgaacgataagcagattgtgaagcttttcagtcgcatttttaactgcaacccagatgatatggcacgggacctagagcagggtgacgtgtcagagacaatcagagtcttctttgagcagagcaagtctttccccccagctgccaagagcctccttaccatccaggaagtggatgagttccttctgcggctgtccaagctcaccaaggaggatgagcagcaacaggccctacaggacattgcctccaggtgtacagccaatgaccttaaatgcatcatcaggttgatcaaacatgatctgaagatgaactcaggtgcaaaacatgtgttagacgcccttgaccccaatgcctatgaagccttcaaagcctcgcgcaacctgcaggatgtggtggagcgggtccttcacaacgcgcaggaggtggagaaggagccgggccagagacgagctctgagcgtccaggcctcgctgatgacacctgtgcagcccatgttggcggaggcctgcaagtccgttgagtatgcaatgaagaaatgtcccaatggcatgttctctgagatcaagtacgatggagagcgagtccaggtgcataagaatggagaccacttcagctacttcagccgcagtctcaagcccgtccttcctcacaaggtggcccactttaaggactacattccccaggcttttcctgggggccacagcatgatcttggattctgaagtgcttctgattgacaacaagacaggcaaaccactgccctttgggactctgggagtacacaagaaagcagccttccaggatgctaatgtctgcctgtttgtttttgattgtatctactttaatgatgtcagcttgatggacagacctctgtgtgagcggcggaagtttcttcatgacaacatggttgaaattccaaaccggatcatgttctcagaaatgaagcgagtcacaaaagctttggacttggctgacatgataacccgggtgatccaggagggattggaggggctggtgctgaaggatgtgaagggtacatatgagcctgggaagcggcactggctgaaagtgaagaaagactatttgaacgagggggccatggccgacacagctgacctggtggtccttggagccttctatgggcaagggagcaaaggcggcatgatgtcaatcttcctcatgggctgctacgaccctggcagccagaagtggtgcacagtcaccaagtgtgcaggaggccatgatgatgccacgcttgcccgcctgcagaatgaactagacatggtgaagatcagcaaggaccccagcaaaatacccagctggttgaaggtcaacaagatctactatcctgacttcatcgtcccagacccaaagaaagctgccgtgtgggagatcacaggggctgaattctccaaatcggaggctcatacagctgacgggatctccatccgattccctcgctgcacccgaatccgagatgataaggactggaaatctgccactaaccttccccaactcaaggaactgtaccagttgtccaaggagaaggcagacttcactgtagtggctggagatgaggggagctccactacagggggtagcagtgaagagaataagggtccctcagggtctgctgtgtcccgcaaggcccccagcaagccctcagccagtaccaagaaagcagaagggaagctgagtaactccaacagcaaagatggcaacatgcagactgcaaagccttccgctatgaaggtgggggagaagctggccacaaagtcttctccagtgaaagtaggggagaagcggaaagctgctgatgagacgctgtgccaaacaaaggtattgctggacatcttcactggggtgcggctttacttgccaccctccacaccagacttcagccgtctcagacgctactttgtggcattcgacggggacctggtacaggaatttgatatgacttcagccacgcacgtgctgggtagcagggacaagaaccctgcggcccagcaggtctccccagagtggatttgggcatgtatccggaaacggagactggtagctccctgctaggtttgctgtcttccctctccctcaggccatactctcctttaccatactattggactggactcaggctggaggcagatagacacagtatagggggaatgggcttgcttctcccaaacccaccagttctccactgtctcttctggaccaggaattagttgctgtgggtgccacagctgaagtcagtttgtcttgctggtttaaatagatctttcagagctgggtgctgggtttgccatctttttgttttctttgaaaagcagcttagttaccctttttataaataaaatatcttgcagttatctttgtcctttccccacctacacccccaataatttccctagagattaaggagtaaaggctgggctatggcagctctgtccacaaagccttctctcccatccttgcctgttcctttgtacttccaggctcattttaaagttgtatttaaaggactgccctcggaaatgcttctgtttagcggaacttgtattcagcctgacacgctttgccaggaacaaacctcatgtgaaagaaaacaaaatgaatttttttactttcttctctg

SEQ ID NO: 372315 - DNA, 3180 bp, Homo sapiens
tgcgcctgcgcgctgcctcccgctctaggacccggatttaaagagacaggcgctccaaccgtcgtgggctgcccgcggcctgtaatgagcaagttccgaggcctacggtgagcgccggagccggagaggcagatctgtcttctaaggcagcaggtacaccaaagaagaaagctgttgtccaggctaagttgacaaccactggccaggtgacttctccagtgaaaggcgcctcatttgtcaccagtaccaatccccggaaattttctggcttttcagccaagcccaacaactctggggaagccccctcgagccccacccctaagagaagtctgtcttcaagcaaatgtgaccccaggcataaggactgtctgctacgggagtttcgaaagttatgcgccatggtggccgataatcctagctacaacacgaagacccagatcatccaggacttccttcggaaaggctcagcaggagatggtttccacggtgatgtgtacctaacagtgaagctgctgctgccaggagtcattaagactgtttacaacttgaacgataagcagattgtgaagcttttcagtcgcatttttaactgcaacccagatgatatggcacgggacctagagcagggtgacgtgtcagagacaatcagagtcttctttgagcagagcaagtctttccccccagctgccaagagcctccttaccatccaggaagtggatgagttccttctgcggctgtccaagctcaccaaggaggatgagcagcaacaggccctacaggacattgcctccaggtgtacagccaatgaccttaaatgcatcatcaggttgatcaaacatgatctgaagatgaactcaggtgcaaaacatgtgttagacgcccttgaccccaatgcctatgaagccttcaaagcctcgcgcaacctgcaggatgtggtggagcgggtccttcacaacgcgcaggaggtggagaaggagccgggccagagacgagctctgagcgtccaggcctcgctgatgacacctgtgcagcccatgttggcggaggcctgcaagtccgttgagtatgcaatgaagaaatgtcccaatggcatgttctctgagatcaagtacgatggagagcgagtccaggtgcataagaatggagaccacttcagctacttcagccgcagtctcaagcccgtccttcctcacaaggtggcccactttaaggactacattccccaggcttttcctgggggccacagcatgatcttggattctgaagtgcttctgattgacaacaagacaggcaaaccactgccctttgggactctgggagtacacaagaaagcagccttccaggatgctaatgtctgcctgtttgtttttgattgtatctactttaatgatgtcagcttgatggacagacctctgtgtgagcggcggaagtttcttcatgacaacatggttgaaattccaaaccggatcatgttctcagaaatgaagcgagtcacaaaagctttggacttggctgacatgataacccgggtgatccaggagggattggaggggctggtgctgaaggatgtgaagggtacatatgagcctgggaagcggcactggctgaaagtgaagaaagactatttgaacgagggggccatggccgacacagctgacctggtggtccttggagccttctatgggcaagggagcaaaggcggcatgatgtcaatcttcctcatgggctgctacgaccctggcagccagaagtggtgcacagtcaccaagtgtgcaggaggccatgatgatgccacgcttgcccgcctgcagaatgaactagacatggtgaagatcagcaaggaccccagcaaaatacccagctggttgaaggtcaacaagatctactatcctgacttcatcgtcccagacccaaagaaagctgccgtgtgggagatcacaggggctgaattctccaaatcggaggctcatacagctgacgggatctccatccgattccctcgctgcacccgaatccgagatgataaggactggaaatctgccactaaccttccccaactcaaggaactgtaccagttgtccaaggagaaggcagacttcactgtagtggctggagatgaggggagctccactacagggggtagcagtgaagagaataagggtccctcagggtctgctgtgtcccgcaaggcccccagcaagccctcagccagtaccaagaaagcagaagggaagctgagtaactccaacagcaaagatggcaacatgcagactgcaaagccttccgctatgaaggtgggggagaagctggccacaaagtcttctccagtgaaagtaggggagaagcggaaagctgctgatgagacgctgtgccaaacaaaggtattgctggacatcttcactggggtgcggctttacttgccaccctccacaccagacttcagccgtctcagacgctactttgtggcattcgacggggacctggtacaggaatttgatatgacttcagccacgcacgtgctgggtagcagggacaagaaccctgcggcccagcaggtctccccagagtggatttgggcatgtatccggaaacggagactggtagctccctgctaggtttgctgtcttccctctccctcaggccatactctcctttaccatactattggactggactcaggctggaggcagatagacacagtatagggggaatgggcttgcttctcccaaacccaccagttctccactgtctcttctggaccaggaattagttgctgtgggtgccacagctgaagtcagtttgtcttgctggtttaaatagatctttcagagctgggtgctgggtttgccatctttttgttttctttgaaaagcagcttagttaccctttttataaataaaatatcttgcagttatctttgtcctttccccacctacacccccaataatttccctagagattaaggagtaaaggctgggctatggcagctctgtccacaaagccttctctcccatccttgcctgttcctttgtacttccaggctcattttaaagttgtatttaaaggactgccctcggaaatgcttctgtttagcggaacttgtattcagcctgacacgctttgccaggaacaaacctcatgtgaaagaaaacaaaatgaatttttttactttcttctctg

SEQ ID NO: 372316 - DNA, 3706 bp, Homo sapiens
tgcgcctgcgcgctgcctcccgctctaggacccggatttaaagagacaggcgctccaaccgtcgtgggctgcccgcggcctgtaatgagcaagttccgaggcctacgctatatgtctttggctttcaagatcttctttccacaaaccctccgtgcactcagccgaaaagaactgtgcctattccgaaaacatcactggcgtgatgtaagacaattcagccagtggtcagaaacagatctgcttcatggacatcccctcttcctgagaagaaagcctgttctatcattccagggaagccatctaagatcacgtgccacctaccttgttttcttgccagggttgcatgtgggactctgcagtggcccctgtgagatggctgagcaacggttctgtgtggactatgccaagcgtggcacagctggctgcaaaaaatgcaaggaaaagattgtgaagggcgtatgccgaattggcaaagtggtgcccaatcccttctcagagtctgggggtgatatgaaagagtggtaccacattaaatgcatgtttgagaaactagagcgggcccgggccaccacaaaaaaaatcgaggacctcacagagctggaaggctgggaagagctggaagataatgagaaggaacagataacccagcacattgcagatctgtcttctaaggcagcaggtacaccaaagaagaaagctgttgtccaggctaagttgacaaccactggccaggtgacttctccagtgaaaggcgcctcatttgtcaccagtaccaatccccggaaattttctggcttttcagccaagcccaacaactctggggaagccccctcgagccccacccctaagagaagtctgtcttcaagcaaatgtgaccccaggcataaggactgtctgctacgggagtttcgaaagttatgcgccatggtggccgataatcctagctacaacacgaagacccagatcatccaggacttccttcggaaaggctcagcaggagatggtttccacggtgatgtgtacctaacagtgaagctgctgctgccaggagtcattaagactgtttacaacttgaacgataagcagattgtgaagcttttcagtcgcatttttaactgcaacccagatgatatggcacgggacctagagcagggtgacgtgtcagagacaatcagagtcttctttgagcagagcaagtctttccccccagctgccaagagcctccttaccatccaggaagtggatgagttccttctgcggctgtccaagctcaccaaggaggatgagcagcaacaggccctacaggacattgcctccaggtgtacagccaatgaccttaaatgcatcatcaggttgatcaaacatgatctgaagatgaactcaggtgcaaaacatgtgttagacgcccttgaccccaatgcctatgaagccttcaaagcctcgcgcaacctgcaggatgtggtggagcgggtccttcacaacgcgcaggaggtggagaaggagccgggccagagacgagctctgagcgtccaggcctcgctgatgacacctgtgcagcccatgttggcggaggcctgcaagtccgttgagtatgcaatgaagaaatgtcccaatggcatgttctctgagatcaagtacgatggagagcgagtccaggtgcataagaatggagaccacttcagctacttcagccgcagtctcaagcccgtccttcctcacaaggtggcccactttaaggactacattccccaggcttttcctgggggccacagcatgatcttggattctgaagtgcttctgattgacaacaagacaggcaaaccactgccctttgggactctgggagtacacaagaaagcagccttccaggatgctaatgtctgcctgtttgtttttgattgtatctactttaatgatgtcagcttgatggacagacctctgtgtgagcggcggaagtttcttcatgacaacatggttgaaattccaaaccggatcatgttctcagaaatgaagcgagtcacaaaagctttggacttggctgacatgataacccgggtgatccaggagggattggaggggctggtgctgaaggatgtgaagggtacatatgagcctgggaagcggcactggctgaaagtgaagaaagactatttgaacgagggggccatggccgacacagctgacctggtggtccttggagccttctatgggcaagggagcaaaggcggcatgatgtcaatcttcctcatgggctgctacgaccctggcagccagaagtggtgcacagtcaccaagtgtgcaggaggccatgatgatgccacgcttgcccgcctgcagaatgaactagacatggtgaagatcagcaaggaccccagcaaaatacccagctggttgaaggtcaacaagatctactatcctgacttcatcgtcccagacccaaagaaagctgccgtgtgggagatcacaggggctgaattctccaaatcggaggctcatacagctgacgggatctccatccgattccctcgctgcacccgaatccgagatgataaggactggaaatctgccactaaccttccccaactcaaggaactgtaccagttgtccaaggagaaggcagacttcactgtagtggctggagatgaggggagctccactacagggggtagcagtgaagagaataagggtccctcagggtctgctgtgtcccgcaaggcccccagcaagccctcagccagtaccaagaaagcagaagggaagctgagtaactccaacagcaaagatggcaacatgcagactgcaaagccttccgctatgaaggtgggggagaagctggccacaaagtcttctccagtgaaagtaggggagaagcggaaagctgctgatgagacgctgtgccaaacaaaggtattgctggacatcttcactggggtgcggctttacttgccaccctccacaccagacttcagccgtctcagacgctactttgtggcattcgacggggacctggtacaggaatttgatatgacttcagccacgcacgtgctgggtagcagggacaagaaccctgcggcccagcaggtctccccagagtggatttgggcatgtatccggaaacggagactggtagctccctgctaggtttgctgtcttccctctccctcaggccatactctcctttaccatactattggactggactcaggctggaggcagatagacacagtatagggggaatgggcttgcttctcccaaacccaccagttctccactgtctcttctggaccaggaattagttgctgtgggtgccacagctgaagtcagtttgtcttgctggtttaaatagatctttcagagctgggtgctgggtttgccatctttttgttttctttgaaaagcagcttagttaccctttttataaataaaatatcttgcagttatctttgtcctttccccacctacacccccaataatttccctagagattaaggagtaaaggctgggctatggcagctctgtccacaaagccttctctcccatccttgcctgttcctttgtacttccaggctcattttaaagttgtatttaaaggactgccctcggaaatgcttctgtttagcggaacttgtattcagcctgacacgctttgccaggaacaaacctcatgtgaaagaaaacaaaatgaatttttttactttcttctctg

SEQ ID NO: 372317 - DNA, 3501 bp, Homo sapiens
tgcgcctgcgcgctgcctcccgctctaggacccggatttaaagagacaggcgctccaaccgtcgtgggctgcccgcggcctgtaatgagcaagttccgaggcctacggtgagcgccggagccggagaggcagggttgcatgtgggactctgcagtggcccctgtgagatggctgagcaacggttctgtgtggactatgccaagcgtggcacagctggctgcaaaaaatgcaaggaaaagattgtgaagggcgtatgccgaattggcaaagtggtgcccaatcccttctcagagtctgggggtgatatgaaagagtggtaccacattaaatgcatgtttgagaaactagagcgggcccgggccaccacaaaaaaaatcgaggacctcacagagctggaaggctgggaagagctggaagataatgagaaggaacagataacccagcacattgcagatctgtcttctaaggcagcaggtacaccaaagaagaaagctgttgtccaggctaagttgacaaccactggccaggtgacttctccagtgaaaggcgcctcatttgtcaccagtaccaatccccggaaattttctggcttttcagccaagcccaacaactctggggaagccccctcgagccccacccctaagagaagtctgtcttcaagcaaatgtgaccccaggcataaggactgtctgctacgggagtttcgaaagttatgcgccatggtggccgataatcctagctacaacacgaagacccagatcatccaggacttccttcggaaaggctcagcaggagatggtttccacggtgatgtgtacctaacagtgaagctgctgctgccaggagtcattaagactgtttacaacttgaacgataagcagattgtgaagcttttcagtcgcatttttaactgcaacccagatgatatggcacgggacctagagcagggtgacgtgtcagagacaatcagagtcttctttgagcagagcaagtctttccccccagctgccaagagcctccttaccatccaggaagtggatgagttccttctgcggctgtccaagctcaccaaggaggatgagcagcaacaggccctacaggacattgcctccaggtgtacagccaatgaccttaaatgcatcatcaggttgatcaaacatgatctgaagatgaactcaggtgcaaaacatgtgttagacgcccttgaccccaatgcctatgaagccttcaaagcctcgcgcaacctgcaggatgtggtggagcgggtccttcacaacgcgcaggaggtggagaaggagccgggccagagacgagctctgagcgtccaggcctcgctgatgacacctgtgcagcccatgttggcggaggcctgcaagtccgttgagtatgcaatgaagaaatgtcccaatggcatgttctctgagatcaagtacgatggagagcgagtccaggtgcataagaatggagaccacttcagctacttcagccgcagtctcaagcccgtccttcctcacaaggtggcccactttaaggactacattccccaggcttttcctgggggccacagcatgatcttggattctgaagtgcttctgattgacaacaagacaggcaaaccactgccctttgggactctgggagtacacaagaaagcagccttccaggatgctaatgtctgcctgtttgtttttgattgtatctactttaatgatgtcagcttgatggacagacctctgtgtgagcggcggaagtttcttcatgacaacatggttgaaattccaaaccggatcatgttctcagaaatgaagcgagtcacaaaagctttggacttggctgacatgataacccgggtgatccaggagggattggaggggctggtgctgaaggatgtgaagggtacatatgagcctgggaagcggcactggctgaaagtgaagaaagactatttgaacgagggggccatggccgacacagctgacctggtggtccttggagccttctatgggcaagggagcaaaggcggcatgatgtcaatcttcctcatgggctgctacgaccctggcagccagaagtggtgcacagtcaccaagtgtgcaggaggccatgatgatgccacgcttgcccgcctgcagaatgaactagacatggtgaagatcagcaaggaccccagcaaaatacccagctggttgaaggtcaacaagatctactatcctgacttcatcgtcccagacccaaagaaagctgccgtgtgggagatcacaggggctgaattctccaaatcggaggctcatacagctgacgggatctccatccgattccctcgctgcacccgaatccgagatgataaggactggaaatctgccactaaccttccccaactcaaggaactgtaccagttgtccaaggagaaggcagacttcactgtagtggctggagatgaggggagctccactacagggggtagcagtgaagagaataagggtccctcagggtctgctgtgtcccgcaaggcccccagcaagccctcagccagtaccaagaaagcagaagggaagctgagtaactccaacagcaaagatggcaacatgcagactgcaaagccttccgctatgaaggtgggggagaagctggccacaaagtcttctccagtgaaagtaggggagaagcggaaagctgctgatgagacgctgtgccaaacaaaggtattgctggacatcttcactggggtgcggctttacttgccaccctccacaccagacttcagccgtctcagacgctactttgtggcattcgacggggacctggtacaggaatttgatatgacttcagccacgcacgtgctgggtagcagggacaagaaccctgcggcccagcaggtctccccagagtggatttgggcatgtatccggaaacggagactggtagctccctgctaggtttgctgtcttccctctccctcaggccatactctcctttaccatactattggactggactcaggctggaggcagatagacacagtatagggggaatgggcttgcttctcccaaacccaccagttctccactgtctcttctggaccaggaattagttgctgtgggtgccacagctgaagtcagtttgtcttgctggtttaaatagatctttcagagctgggtgctgggtttgccatctttttgttttctttgaaaagcagcttagttaccctttttataaataaaatatcttgcagttatctttgtcctttccccacctacacccccaataatttccctagagattaaggagtaaaggctgggctatggcagctctgtccacaaagccttctctcccatccttgcctgttcctttgtacttccaggctcattttaaagttgtatttaaaggactgccctcggaaatgcttctgtttagcggaacttgtattcagcctgacacgctttgccaggaacaaacctcatgtgaaagaaaacaaaatgaatttttttactttcttctctg

SEQ ID NO: 372318 - DNA, 3750 bp, Homo sapiens
tgcgcctgcgcgctgcctcccgctctaggacccggatttaaagagacaggcgctccaaccgtcgtgggctgcccgcggcctgtaatgagcaagttccgaggcctacggtgagcgccggagccggagaggcagctatatgtctttggctttcaagatcttctttccacaaaccctccgtgcactcagccgaaaagaactgtgcctattccgaaaacatcactggcgtgatgtaagacaattcagccagtggtcagaaacagatctgcttcatggacatcccctcttcctgagaagaaagcctgttctatcattccagggaagccatctaagatcacgtgccacctaccttgttttcttgccagggttgcatgtgggactctgcagtggcccctgtgagatggctgagcaacggttctgtgtggactatgccaagcgtggcacagctggctgcaaaaaatgcaaggaaaagattgtgaagggcgtatgccgaattggcaaagtggtgcccaatcccttctcagagtctgggggtgatatgaaagagtggtaccacattaaatgcatgtttgagaaactagagcgggcccgggccaccacaaaaaaaatcgaggacctcacagagctggaaggctgggaagagctggaagataatgagaaggaacagataacccagcacattgcagatctgtcttctaaggcagcaggtacaccaaagaagaaagctgttgtccaggctaagttgacaaccactggccaggtgacttctccagtgaaaggcgcctcatttgtcaccagtaccaatccccggaaattttctggcttttcagccaagcccaacaactctggggaagccccctcgagccccacccctaagagaagtctgtcttcaagcaaatgtgaccccaggcataaggactgtctgctacgggagtttcgaaagttatgcgccatggtggccgataatcctagctacaacacgaagacccagatcatccaggacttccttcggaaaggctcagcaggagatggtttccacggtgatgtgtacctaacagtgaagctgctgctgccaggagtcattaagactgtttacaacttgaacgataagcagattgtgaagcttttcagtcgcatttttaactgcaacccagatgatatggcacgggacctagagcagggtgacgtgtcagagacaatcagagtcttctttgagcagagcaagtctttccccccagctgccaagagcctccttaccatccaggaagtggatgagttccttctgcggctgtccaagctcaccaaggaggatgagcagcaacaggccctacaggacattgcctccaggtgtacagccaatgaccttaaatgcatcatcaggttgatcaaacatgatctgaagatgaactcaggtgcaaaacatgtgttagacgcccttgaccccaatgcctatgaagccttcaaagcctcgcgcaacctgcaggatgtggtggagcgggtccttcacaacgcgcaggaggtggagaaggagccgggccagagacgagctctgagcgtccaggcctcgctgatgacacctgtgcagcccatgttggcggaggcctgcaagtccgttgagtatgcaatgaagaaatgtcccaatggcatgttctctgagatcaagtacgatggagagcgagtccaggtgcataagaatggagaccacttcagctacttcagccgcagtctcaagcccgtccttcctcacaaggtggcccactttaaggactacattccccaggcttttcctgggggccacagcatgatcttggattctgaagtgcttctgattgacaacaagacaggcaaaccactgccctttgggactctgggagtacacaagaaagcagccttccaggatgctaatgtctgcctgtttgtttttgattgtatctactttaatgatgtcagcttgatggacagacctctgtgtgagcggcggaagtttcttcatgacaacatggttgaaattccaaaccggatcatgttctcagaaatgaagcgagtcacacatctctcttgtccctcagaaagctttggacttggctgacatgataacccgggtgatccaggagggattggaggggctggtgctgaaggatgtgaagggtacatatgagcctgggaagcggcactggctgaaagtgaagaaagactatttgaacgagggggccatggccgacacagctgacctggtggtccttggagccttctatgggcaagggagcaaaggcggcatgatgtcaatcttcctcatgggctgctacgaccctggcagccagaagtggtgcacagtcaccaagtgtgcaggaggccatgatgatgccacgcttgcccgcctgcagaatgaactagacatggtgaagatcagcaaggaccccagcaaaatacccagctggttgaaggtcaacaagatctactatcctgacttcatcgtcccagacccaaagaaagctgccgtgtgggagatcacaggggctgaattctccaaatcggaggctcatacagctgacgggatctccatccgattccctcgctgcacccgaatccgagatgataaggactggaaatctgccactaaccttccccaactcaaggaactgtaccagttgtccaaggagaaggcagacttcactgtagtggctggagatgaggggagctccactacagggggtagcagtgaagagaataagggtccctcagggtctgctgtgtcccgcaaggcccccagcaagccctcagccagtaccaagaaagcagaagggaagctgagtaactccaacagcaaagatggcaacatgcagactgcaaagccttccgctatgaaggtgggggagaagctggccacaaagtcttctccagtgaaagtaggggagaagcggaaagctgctgatgagacgctgtgccaaacaaaggtattgctggacatcttcactggggtgcggctttacttgccaccctccacaccagacttcagccgtctcagacgctactttgtggcattcgacggggacctggtacaggaatttgatatgacttcagccacgcacgtgctgggtagcagggacaagaaccctgcggcccagcaggtctccccagagtggatttgggcatgtatccggaaacggagactggtagctccctgctaggtttgctgtcttccctctccctcaggccatactctcctttaccatactattggactggactcaggctggaggcagatagacacagtatagggggaatgggcttgcttctcccaaacccaccagttctccactgtctcttctggaccaggaattagttgctgtgggtgccacagctgaagtcagtttgtcttgctggtttaaatagatctttcagagctgggtgctgggtttgccatctttttgttttctttgaaaagcagcttagttaccctttttataaataaaatatcttgcagttatctttgtcctttccccacctacacccccaataatttccctagagattaaggagtaaaggctgggctatggcagctctgtccacaaagccttctctcccatccttgcctgttcctttgtacttccaggctcattttaaagttgtatttaaaggactgccctcggaaatgcttctgtttagcggaacttgtattcagcctgacacgctttgccaggaacaaacctcatgtgaaagaaaacaaaatgaatttttttactttcttctctg

SEQ ID NO: 372319 - DNA, 2095 bp, Homo sapiens
tgagagttggagtcgtatttcaagtgggaccagaatttatacaatctgggctacaggccagttctcccttggctcgcttgatgaagtagaactaggaactacaactatgaactggctctatgccacagctcacaattttccatcttcggtcacgatggagcccttgtagcccttgacagcagaactgttacacatgaggtctttgatccatggcaaaccctttcttgaagtagcagttttatcattgtggcccttccttcctcagaattcctaataagggagggaggatcccggcctaacctcagctctcctgttctcctcagacctctgtgtgagcggcggaagtttcttcatgacaacatggttgaaattccaaaccggatcatgttctcagaaatgaagcgagtcacaaaagctttggacttggctgacatgataacccgggtgatccaggagggattggaggggctggtgctgaaggatgtgaagggtacatatgagcctgggaagcggcactggctgaaagtgaagaaagactatttgaacgagggggccatggccgacacagctgacctggtggtccttggagccttctatgggcaagggagcaaaggcggcatgatgtcaatcttcctcatgggctgctacgaccctggcagccagaagtggtgcacagtcaccaagtgtgcaggaggccatgatgatgccacgcttgcccgcctgcagaatgaactagacatggtgaagatcagcaaggaccccagcaaaatacccagctggttgaaggtcaacaagatctactatcctgacttcatcgtcccagacccaaagaaagctgccgtgtgggagatcacaggggctgaattctccaaatcggaggctcatacagctgacgggatctccatccgattccctcgctgcacccgaatccgagatgataaggactggaaatctgccactaaccttccccaactcaaggaactgtaccagttgtccaaggagaaggcagacttcactgtagtggctggagatgaggggagctccactacagggggtagcagtgaagagaataagggtccctcagggtctgctgtgtcccgcaaggcccccagcaagccctcagccagtaccaagaaagcagaagggaagctgagtaactccaacagcaaagatggcaacatgcagactgcaaagccttccgctatgaaggtgggggagaagctggccacaaagtcttctccagtgaaagtaggggagaagcggaaagctgctgatgagacgctgtgccaaacaaaggtattgctggacatcttcactggggtgcggctttacttgccaccctccacaccagacttcagccgtctcagacgctactttgtggcattcgacggggacctggtacaggaatttgatatgacttcagccacgcacgtgctgggtagcagggacaagaaccctgcggcccagcaggtctccccagagtggatttgggcatgtatccggaaacggagactggtagctccctgctaggtttgctgtcttccctctccctcaggccatactctcctttaccatactattggactggactcaggctggaggcagatagacacagtatagggggaatgggcttgcttctcccaaacccaccagttctccactgtctcttctggaccaggaattagttgctgtgggtgccacagctgaagtcagtttgtcttgctggtttaaatagatctttcagagctgggtgctgggtttgccatctttttgttttctttgaaaagcagcttagttaccctttttataaataaaatatcttgcagttatctttgtcctttccccacctacacccccaataatttccctagagattaaggagtaaaggctgggctatggcagctctgtccacaaagccttctctcccatccttgcctgttcctttgtacttccaggctcattttaaagttgtatttaaaggactgccctcggaaatgcttctgtttagcggaacttgtattcagcctgacacgctttgccaggaacaaacctcatgtgaaagaaaacaaaatgaatttttttactttcttctctg

SEQ ID NO: 372320 - DNA, 3596 bp, Homo sapiens
tgcgcctgcgcgctgcctcccgctctaggacccggatttaaagagacaggcgctccaaccgtcgtgggctgcccgcggcctgtaatgagcaagttccgaggcctacggtgagcgccggagccggagaggcagctatatgtctttggctttcaagatcttctttccacaaaccctccgtgcactcagccgaaaagaactgtgcctattccgaaaacatcactggcgtgatgtaagacaattcagccagtggtcagaaacagatctgcttcatggacatcccctcttcctgagaagaaagcctgttctatcattccagggaagccatctaagatcacgtgccacctaccttgttttcttgccagggttgcatgtgggactctgcagtggcccctgtgagatggctgagcaacggttctgtgtggactatgccaagcgtggcacagctggctgcaaaaaatgcaaggaaaagattgtgaagggcgtatgccgaattggcaaagtggtgcccaatcccttctcagagtctgggggtgatatgaaagagtggtaccacattaaatgcatgtttgagaaactagagcgggcccgggccaccacaaaaaaaatcgaggacctcacagagctggaaggctgggaagagctggaagataatgagaaggaacagataacccagcacattgcagatctgtcttctaaggcagcaggtacaccaaagaagaaagctgttgtccaggctaagttgacaaccactggccaggtgacttctccagtgaaaggcgcctcatttgtcaccagtaccaatccccggaaattttctggcttttcagccaagcccaacaactctggggaagccccctcgagccccacccctaagagaagtctgtcttcaagcaaatgtgaccccaggcataaggactgtctgctacgggagtttcgaaagttatgcgccatggtggccgataatcctagctacaacacgaagacccagatcatccaggacttccttcggaaaggctcagcaggagatggtttccacggtgatgtgtacctaacagtgaagctgctgctgccaggagtcattaagactgtttacaacttgaacgataagcagattgtgaagcttttcagtcgcatttttaactgcaacccagatgatatggcacgggacctagagcagggtgacgtgtcagagacaatcagagtcttctttgagcagagcaagtctttccccccagctgccaagagcctccttaccatccaggaagtggatgagttccttctgcggctgtccaagctcaccaaggaggatgagcagcaacaggccctacaggacattgcctccaggtgtacagccaatgaccttaaatgcatcatcaggttgatcaaacatgatctgaagatgaactcaggtgcaaaacatgtgttagacgcccttgaccccaatgcctatgaagccttcaaagcctcgcgcaacctgcaggatgtggtggagcgggtccttcacaacgcgcaggaggtggagaaggagccgggccagagacgagctctgagcgtccaggcctcgctgatgacacctgtgcagcccatgttggcggaggcctgcaagtccgttgagtatgcaatgaagaaatgtcccaatggcatgttctctgagatcaagtacgatggagagcgagtccaggtgcataagaatggagaccacttcagctacttcagccgcagtctcaagcccgtccttcctcacaaggtggcccactttaaggactacattccccaggcttttcctgggggccacagcatgatcttggattctgaagtgcttctgattgacaacaagacaggcaaaccactgccctttgggactctgggagtacacaagaaagcagccttccaggatgctaatgtctgcctgtttgtttttgattgtatctactttaatgatgtcagcttgatggacagacctctgtgtgagcggcggaagtttcttcatgacaacatggttgaaattccaaaccggatcatgttctcagaaatgaagcgagtcacaaaagctttggacttggctgacatgataacccgggtgatccaggagggattggaggggctggtgctgaaggatgtgaagggtacatatgagcctgggaagcggcactggctgaaagtgaagaaagactatttgaacgagggggccatggccgacacagctgacctggtggtccttggagccttctatgggcaagggagcaaaggcggcatgatgtcaatcttcctcatgggctgctacgaccctggcagccagaagtggtgcacagtcaccaagtgtgcaggaggccatgatgatgccacgcttgcccgcctgcagaatgaactagacatggtgaagatcagcaaggaccccagcaaaatacccagctggttgaaggtcaacaagatctactatcctgacttcatcgtcccagacccaaagaaagctgccgtgtgggagatcacaggggctgaattctccaaatcggaggctcatacagctgacgggatctccatccgattccctcgctgcacccgaatccgagatgataaggactggaaatctgccactaaccttccccaactcaaggaactgtaccagttgtccaaggagaaggcagacttcactgtagtggctggagatgaggggagctccactacagggggtagcagtgaagagaataagggtccctcagggtctgctgtgtcccgcaaggcccccagcaagccctcagccagtaccaagaaagcagaagggaagctgagtaactccaacagcaaagatggtaaggatagggagggggctggtatggtgaagagggcggtgtgaggggcagagatccaagggcagggacccagtctcacattccagccctgagatctcatgattatctgtgtccactgcagtggacacagactacattcctggtgtgtgtccagccatgggccagagacccttctgctgggcaccctgtatctgctcagcaaacctgaatggagcagtaccctggggacagccagtctgaccagggaataagctacctttgagtaaagggcttagctgataactcttcactcccctctcacctatgctcatagcagagaaagcccctggtccttcccattactgcccctgacttcagggagcattatcagcaatccctaccctcttagttcttttgtatcatatgttttttagagacagggtctcactctgtcatccaggctggagtgcagtggcacgaccatagctcactgcagcctcgaactcctgagttgaattgatcctcccgagtagctgggactataggtgtgcaccaccacacccagcttcctctctgtcctgcaggcaacatgcagactgcaaagccttccgctatgaaggtgggggagaagctggccacaaagtcttctccagtgaaagtaggggagaagcggaaagctgctgatgagacgctgtgccaaacaaaggtgagggtaaaaacagcaacacaccacgtgggccagtttagcccaggttgtgttcccaaccttctgtacaagaagtttgaaagaggatgagcaaaggtgtt

SEQ ID NO: 372321 - DNA, 394 bp, Homo sapiens
gatgataaggactggaaatctgccactaaccttccccaactcaaggtagcagctcttaggctgtatatgtattctccaccccactgtccaggccttggagccttgggcatctagaccattcacatgtcctctgtcttctcctttcccccattctcctgaggcagagcaaggagggcaattagagagggagacaaactgctgctgggccaggggcacagcactagacctccttctccctccatctctgagtagagaaccttgcatttgcaaggccccactgagcagcctttagtctggggaataagagtttgctcctgttgccccagcaaagcctgctttgctgtacagagaacaatgatttgtaccctgattactcaggctatagggccatact

SEQ ID NO: 372322 - DNA, 3110 bp, Homo sapiens
tgcgcctgcgcgctgcctcccgctctaggacccggatttaaagagacaggcgctccaaccgtcgtgggctgcccgcggcctgtaatgagcaagttccgaggcctacggtgagcgccggagccggagaggcagctatatgtctttggctttcaagatcttctttccacaaaccctccgtgcactcagccgaaaagaactgtgcctattccgaaaacatcactggcgtgatgtaagacaattcagccagtggtcagaaacagatctgcttcatggacatcccctcttcctgagaagaaagcctgttctatcattccagggaagccatctaagatcacgtgccacctaccttgttttcttgccagggttgcatgtgggactctgcagtggcccctgtgagatggctgagcaacggttctgtgtggactatgccaagcgtggcacagctggctgcaaaaaatgcaaggaaaagattgtgaagggcgtatgccgaattggcaaagtggtgcccaatcccttctcagagtctgggggtgatatgaaagagtggtaccacattaaatgcatgtttgagaaactagagcgggcccgggccaccacaaaaaaaatcgaggacctcacagagctggaaggctgggaagagctggaagataatgagaaggaacagataacccagcacattgcagatctgtcttctaaggcagcaggtacaccaaagaagaaagctgttgtccaggctaagttgacaaccactggccaggtgacttctccagtgaaaggcgcctcatttgtcaccagtaccaatccccggaaattttctggcttttcagccaagcccaacaactctggggaagccccctcgagccccacccctaagagaagtctgtcttcaagcaaatgtgaccccaggcataaggactgtctgctacgggagtttcgaaagttatgcgccatggtggccgataatcctagctacaacacgaagacccagatcatccaggacttccttcggaaaggctcagcaggagatggtttccacggtgatgtgtacctaacagtgaagctgctgctgccaggagtcattaagactgtttacaacttgaacgataagcagattgtgaagcttttcagtcgcatttttaactgcaacccagatgatatggcacgggacctagagcagggtgacgtgtcagagacaatcagagtcttctttgagcagagcaagtctttccccccagctgccaagagcctccttaccatccaggaagtggatgagttccttctgcggctgtccaagctcaccaaggaggatgagcagcaacaggccctacaggacattgcctccaggtgtacagccaatgaccttaaatgcatcatcaggttgatcaaacatgatctgaagatgaactcaggtgcaaaacatgtgttagacgcccttgaccccaatgcctatgaagccttcaaagcctcgcgcaacctgcaggatgtggtggagcgggtccttcacaacgcgcaggaggtggagaaggagccgggccagagacgagctctgagcgtccaggcctcgctgatgacacctgtgcagcccatgttggcggaggcctgcaagtccgttgagtatgcaatgaagaaatgtcccaatggcatgttctctgagatcaagtacgatggagagcgagtccaggtgcataagaatggagaccacttcagctacttcagccgcagtctcaagcccgtccttcctcacaaggtggcccactttaaggactacattccccaggcttttcctgggggccacagcatgatcttggattctgaagtgcttctgattgacaacaagacaggcaaaccactgccctttgggactctgggagtacacaagaaagcagccttccaggatgctaatgtctgcctgtttgtttttgattgtatctactttaatgatgtcagcttgatggacagacctctgtgtgagcggcggaagtttcttcatgacaacatggttgaaattccaaaccggatcatgttctcagaaatgaagcgagtcacaaaagctttggacttggctgacatgataacccgggtgatccaggagggattggaggggctggtgctgaaggatgtgaagggtacatatgagcctgggaagcggcactggctgaaagtgaagaaagactatttgaacgagggggccatggccgacacagctgacctggtggtccttggagccttctatgggcaagggagcaaaggcggcatgatgtcaatcttcctcatgggctgctacgaccctggcagccagaagtggtgcacagtcaccaagtgtgcaggaggccatgatgatgccacgcttgcccgcctgcagaatgaactagacatggtgaagatcagcaaggaccccagcaaaatacccagctggttgaaggtcaacaagatctactatcctgacttcatcgtcccagacccaaagaaagctgccgtgtgggagatcacaggggctgaattctccaaatcggaggctcatacagctgacgggatctccatccgattccctcgctgcacccgaatccgagatgataaggactggaaatctgccactaaccttccccaactcaaggaactgtaccagttgtccaaggagaaggcagacttcactgtagtggctggagatgaggggagctccactacagggggtagcagtgaagagaataagggtccctcagggtctgctgtgtcccgcaaggcccccagcaagccctcagccagtaccaagaaagcagaagggaagctgagtaactccaacagcaaagatggcaacatgcagactgcaaagccttccgctatgaaggtgggggagaagctggccacaaagtcttctccagtgaaagtaggggagaagcggaaagctgctgatgagacgctgtgccaaacaaagaggcggccagccagtgagcagagaggaagaactgtgccagcaggcaggagatagaacagcccggcctagccaggagagactgcagggactcactcagctgctggccccaagtcaaaatttacattaaagggaaaagcccagtctgggtgtgggaatgcagcattgagtttgtggtcag

SEQ ID NO: 372323 - DNA, 3689 bp, Homo sapiens
acgacgattatgttttcgcgtccgtacgttatgtttccaactgacgaggtgtctgtcttggctgttaatgagtaagttccgaggcctacgctatatgtctttggctttcaagatcttctttccacaaaccctccgtgcactcagccgaaaagaactgtgcctattccgaaaacatcactggcgtgatgtaagacaattcagccagtggtcagaaacagatctgcttcatggacatcccctcttcctgagaagaaagcctgttctatcattccagggaagccatctaagatcacgtgccacctaccttgttttcttgccagggttgcatgtgggactctgcagtggcccctgtgagatggctgagcaacggttctgtgtggactatgccaagcgtggcacagctggctgcaaaaaatgcaaggaaaagattgtgaagggcgtatgccgaattggcaaagtggtgcccaatcccttctcagagtctgggggtgatatgaaagagtggtaccacattaaatgcatgtttgagaaactagagcgggcccgggccaccacaaaaaaaatcgaggacctcacagagctggaaggctgggaagagctggaagataatgagaaggaacagataacccagcacattgcagatctgtcttctaaggcagcaggtacaccaaagaagaaagctgttgtccaggctaagttgacaaccactggccaggtgacttctccagtgaaaggcgcctcatttgtcaccagtaccaatccccggaaattttctggcttttcagccaagcccaacaactctggggaagccccctcgagccccacccctaagagaagtctgtcttcaagcaaatgtgaccccaggcataaggactgtctgctacgggagtttcgaaagttatgcgccatggtggccgataatcctagctacaacacgaagacccagatcatccaggacttccttcggaaaggctcagcaggagatggtttccacggtgatgtgtacctaacagtgaagctgctgctgccaggagtcattaagactgtttacaacttgaacgataagcagattgtgaagcttttcagtcgcatttttaactgcaacccagatgatatggcacgggacctagagcagggtgacgtgtcagagacaatcagagtcttctttgagcagagcaagtctttccccccagctgccaagagcctccttaccatccaggaagtggatgagttccttctgcggctgtccaagctcaccaaggaggatgagcagcaacaggccctacaggacattgcctccaggtgtacagccaatgaccttaaatgcatcatcaggttgatcaaacatgatctgaagatgaactcaggtgcaaaacatgtgttagacgcccttgaccccaatgcctatgaagccttcaaagcctcgcgcaacctgcaggatgtggtggagcgggtccttcacaacgcgcaggaggtggagaaggagccgggccagagacgagctctgagcgtccaggcctcgctgatgacacctgtgcagcccatgttggcggaggcctgcaagtccgttgagtatgcaatgaagaaatgtcccaatggcatgttctctgagatcaagtacgatggagagcgagtccaggtgcataagaatggagaccacttcagctacttcagccgcagtctcaagcccgtccttcctcacaaggtggcccactttaaggactacattccccaggcttttcctgggggccacagcatgatcttggattctgaagtgcttctgattgacaacaagacaggcaaaccactgccctttgggactctgggagtacacaagaaagcagccttccaggatgctaatgtctgcctgtttgtttttgattgtatctactttaatgatgtcagcttgatggacagacctctgtgtgagcggcggaagtttcttcatgacaacatggttgaaattccaaaccggatcatgttctcagaaatgaagcgagtcacaaaagctttggacttggctgacatgataacccgggtgatccaggagggattggaggggctggtgctgaaggatgtgaagggtacatatgagcctgggaagcggcactggctgaaagtgaagaaagactatttgaacgagggggccatggccgacacagctgacctggtggtccttggagccttctatgggcaagggagcaaaggcggcatgatgtcaatcttcctcatgggctgctacgaccctggcagccagaagtggtgcacagtcaccaagtgtgcaggaggccatgatgatgccacgcttgcccgcctgcagaatgaactagacatggtgaagatcagcaaggaccccagcaaaatacccagctggttgaaggtcaacaagatctactatcctgacttcatcgtcccagacccaaagaaagctgccgtgtgggagatcacaggggctgaattctccaaatcggaggctcatacagctgacgggatctccatccgattccctcgctgcacccgaatccgagatgataaggactggaaatctgccactaaccttccccaactcaaggaactgtaccagttgtccaaggagaaggcagacttcactgtagtggctggagatgaggggagctccactacagggggtagcagtgaagagaataagggtccctcagggtctgctgtgtcccgcaaggcccccagcaagccctcagccagtaccaagaaagcagaagggaagctgagtaactccaacagcaaagatggcaacatgcagactgcaaagccttccgctatgaaggtgggggagaagctggccacaaagtcttctccagtgaaagtaggggagaagcggaaagctgctgatgagacgctgtgccaaacaaaggtattgctggacatcttcactggggtgcggctttacttgccaccctccacaccagacttcagccgtctcagacgctactttgtggcattcgacggggacctggtacaggaatttgatatgacttcagccacgcacgtgctgggtagcagggacaagaaccctgcggcccagcaggtctccccagagtggatttgggcatgtatccggaaacggagactggtagctccctgctaggtttgctgtcttccctctccctcaggccatactctcctttaccatactattggactggactcaggctggaggcagatagacacagtatagggggaatgggcttgcttctcccaaacccaccagttctccactgtctcttctggaccaggaattagttgctgtgggtgccacagctgaagtcagtttgtcttgctggtttaaatagatctttcagagctgggtgctgggtttgccatctttttgttttctttgaaaagcagcttagttaccctttttataaataaaatatcttgcagttatctttgtcctttccccacctacacccccaataatttccctagagattaaggagtaaaggctgggctatggcagctctgtccacaaagccttctctcccatccttgcctgttcctttgtacttccaggctcattttaaagttgtatttaaaggactgccctcggaaatgcttctgtttagcggaacttgtattcagcctgacacgctttgccaggaacaaacctcatgtgaaagaaaacaaaatgaatttttttactttcttctctg

SEQ ID NO: 372324 - DNA, 3645 bp, Homo sapiens
cgcggcacggcgcggcggggcccggcgtggggaaggcagcgggcccggggcgaggagctcggcgcggccggggagccagccccccggctcctcccccgcccgcctgcggagccccggggcacaccctccgtgacgtggcggccctcccgggagcccagggggaggctcgcggctccccgggacccccacggggccgcgtgaggcggggaggccggcgcccgggctgtgttccctgtggaacccacggggccttctcgtaccctggcccggcgtgcgtcctcctgcgctgaaccgggagcgctcgggtgggactcagggagccttgatcacttcccgcctgcgtcccggacccggtggaggagcgctcctttctgcctcgccgggggtcgcggcctacgccgccgaccccactgtccccgccactctccgacagcggcgcgggaagcccttcgagaaaagcggcggcggccaggcctcagcgatttccttctcgggcccctgggctgcggcagttgtgaggagagctcagaacagcctccctcccccacaaccagcgcattcatggattccttgtaattttcccaactaccctgtgagatctgtcttctaaggcagcaggtacaccaaagaagaaagctgttgtccaggctaagttgacaaccactggccaggtgacttctccagtgaaaggcgcctcatttgtcaccagtaccaatccccggaaattttctggcttttcagccaagcccaacaactctggggaagccccctcgagccccacccctaagagaagtctgtcttcaagcaaatgtgaccccaggcataaggactgtctgctacgggagtttcgaaagttatgcgccatggtggccgataatcctagctacaacacgaagacccagatcatccaggacttccttcggaaaggctcagcaggagatggtttccacggtgatgtgtacctaacagtgaagctgctgctgccaggagtcattaagactgtttacaacttgaacgataagcagattgtgaagcttttcagtcgcatttttaactgcaacccagatgatatggcacgggacctagagcagggtgacgtgtcagagacaatcagagtcttctttgagcagagcaagtctttccccccagctgccaagagcctccttaccatccaggaagtggatgagttccttctgcggctgtccaagctcaccaaggaggatgagcagcaacaggccctacaggacattgcctccaggtgtacagccaatgaccttaaatgcatcatcaggttgatcaaacatgatctgaagatgaactcaggtgcaaaacatgtgttagacgcccttgaccccaatgcctatgaagccttcaaagcctcgcgcaacctgcaggatgtggtggagcgggtccttcacaacgcgcaggaggtggagaaggagccgggccagagacgagctctgagcgtccaggcctcgctgatgacacctgtgcagcccatgttggcggaggcctgcaagtccgttgagtatgcaatgaagaaatgtcccaatggcatgttctctgagatcaagtacgatggagagcgagtccaggtgcataagaatggagaccacttcagctacttcagccgcagtctcaagcccgtccttcctcacaaggtggcccactttaaggactacattccccaggcttttcctgggggccacagcatgatcttggattctgaagtgcttctgattgacaacaagacaggcaaaccactgccctttgggactctgggagtacacaagaaagcagccttccaggatgctaatgtctgcctgtttgtttttgattgtatctactttaatgatgtcagcttgatggacagacctctgtgtgagcggcggaagtttcttcatgacaacatggttgaaattccaaaccggatcatgttctcagaaatgaagcgagtcacaaaagctttggacttggctgacatgataacccgggtgatccaggagggattggaggggctggtgctgaaggatgtgaagggtacatatgagcctgggaagcggcactggctgaaagtgaagaaagactatttgaacgagggggccatggccgacacagctgacctggtggtccttggagccttctatgggcaagggagcaaaggcggcatgatgtcaatcttcctcatgggctgctacgaccctggcagccagaagtggtgcacagtcaccaagtgtgcaggaggccatgatgatgccacgcttgcccgcctgcagaatgaactagacatggtgaagatcagcaaggaccccagcaaaatacccagctggttgaaggtcaacaagatctactatcctgacttcatcgtcccagacccaaagaaagctgccgtgtgggagatcacaggggctgaattctccaaatcggaggctcatacagctgacgggatctccatccgattccctcgctgcacccgaatccgagatgataaggactggaaatctgccactaaccttccccaactcaaggaactgtaccagttgtccaaggagaaggcagacttcactgtagtggctggagatgaggggagctccactacagggggtagcagtgaagagaataagggtccctcagggtctgctgtgtcccgcaaggcccccagcaagccctcagccagtaccaagaaagcagaagggaagctgagtaactccaacagcaaagatggcaacatgcagactgcaaagccttccgctatgaaggtgggggagaagctggccacaaagtcttctccagtgaaagtaggggagaagcggaaagctgctgatgagacgctgtgccaaacaaaggtattgctggacatcttcactggggtgcggctttacttgccaccctccacaccagacttcagccgtctcagacgctactttgtggcattcgacggggacctggtacaggaatttgatatgacttcagccacgcacgtgctgggtagcagggacaagaaccctgcggcccagcaggtctccccagagtggatttgggcatgtatccggaaacggagactggtagctccctgctaggtttgctgtcttccctctccctcaggccatactctcctttaccatactattggactggactcaggctggaggcagatagacacagtatagggggaatgggcttgcttctcccaaacccaccagttctccactgtctcttctggaccaggaattagttgctgtgggtgccacagctgaagtcagtttgtcttgctggtttaaatagatctttcagagctgggtgctgggtttgccatctttttgttttctttgaaaagcagcttagttaccctttttataaataaaatatcttgcagttatctttgtcctttccccacctacacccccaataatttccctagagattaaggagtaaaggctgggctatggcagctctgtccacaaagccttctctcccatccttgcctgttcctttgtacttccaggctcattttaaagttgtatttaaaggactgccctcggaaatgcttctgtttagcggaacttgtattcagcctgacacgctttgccaggaacaaacctcatgtgaaagaaaacaaaatgaatttttttactttcttctctg

SEQ ID NO: 372325 - DNA, 4294 bp, Homo sapiens
tgcgcctgcgcgctgcctcccgctctaggacccggatttaaagagacaggcgctccaaccgtcgtgggctgcccgcggcctgtaatgagcaagttccgaggcctacggtgagcgccggagccggagaggcagctatatgtctttggctttcaagatcttctttccacaaaccctccgtgcactcagccgaaaagaactgtgcctattccgaaaacatcactggcgtgatgtaagacaattcagccagtggtcagaaacagatctgcttcatggacatcccctcttcctgagaagaaagcctgttctatcattccagggaagccatctaagatcacgtgccacctaccttgttttcttgccagggttgcatgtgggactctgcagtggcccctgtgagatggctgagcaacggttctgtgtggactatgccaagcgtggcacagctggctgcaaaaaatgcaaggaaaagattgtgaagggcgtatgccgaattggcaaagtggtgcccaatcccttctcagagtctgggggtgatatgaaagagtggtaccacattaaatgcatgtttgagaaactagagcgggcccgggccaccacaaaaaaaatcgaggacctcacagagctggaaggctgggaagagctggaagataatgagaaggaacagataacccagcacattgcagatctgtcttctaaggcagcaggtacaccaaagaagaaagctgttgtccaggctaagttgacaaccactggccaggtgacttctccagtgaaaggcgcctcatttgtcaccagtaccaatccccggaaattttctggcttttcagccaagcccaacaactctggggaagccccctcgagccccacccctaagagaagtctgtcttcaagcaaatgtgaccccaggcataaggactgtctgctacgggagtttcgaaagttatgcgccatggtggccgataatcctagctacaacacgaagacccagatcatccaggacttccttcggaaaggctcagcaggagatggtttccacggtgatgtgtacctaacagtgaagctgctgctgccaggagtcattaagactgtttacaacttgaacgataagcagattgtgaagcttttcagtcgcatttttaactgcaacccagatgatatggcacgggacctagagcagggtgacgtgtcagagacaatcagagtcttctttgagcagagcaagtctttccccccagctgccaagagcctccttaccatccaggaagtggatgagttccttctgcggctgtccaagctcaccaaggaggatgagcagcaacaggccctacaggacattgcctccaggtgtacagccaatgaccttaaatgcatcatcaggttgatcaaacatgatctgaagatgaactcaggtgcaaaacatgtgttagacgcccttgaccccaatgcctatgaagccttcaaagcctcgcgcaacctgcaggatgtggtggagcgggtccttcacaacgcgcaggaggtggagaaggagccgggccagagacgagctctgagcgtccaggcctcgctgatgacacctgtgcagcccatgttggcggaggcctgcaagtccgttgagtatgcaatgaagaaatgtcccaatggcatgttctctgagatcaagtacgatggagagcgagtccaggtgcataagaatggagaccacttcagctacttcagccgcagtctcaagcccgtccttcctcacaaggtggcccactttaaggactacattccccaggcttttcctgggggccacagcatgatcttggattctgaagtgcttctgattgacaacaagacaggcaaaccactgccctttgggactctgggagtacacaagaaagcagccttccaggatgctaatgtctgcctgtttgtttttgattgtatctactttaatgatgtcagcttgatggacagacctctgtgtgagcggcggaagtttcttcatgacaacatggttgaaattccaaaccggatcatgttctcagaaatgaagcgagtcacaaaagctttggacttggctgacatgataacccgggtgatccaggagggattggaggggctggtgctgaaggatgtgaagggtacatatgagcctgggaagcggcactggctgaaagtgaagaaagactatttgaacgagggggccatggccgacacagctgacctggtggtccttggagccttctatgggcaagggagcaaaggcggcatgatgtcaatcttcctcatgggctgctacgaccctggcagccagaagtggtgcacagtcaccaagtgtgcaggaggccatgatgatgccacgcttgcccgcctgcagaatgaactagacatggtgaagatcagcaaggaccccagcaaaatacccagctggttgaaggtcaacaagatctactatcctgacttcatcgtcccagacccaaagaaagctgccgtgtgggagatcacaggggctgaattctccaaatcggaggctcatacagctgacgggatctccatccgattccctcgctgcacccgaatccgagatgataaggactggaaatctgccactaaccttccccaactcaaggaactgtaccagttgtccaaggagaaggcagacttcactgtagtggctggagatgaggggagctccactacagggggtagcagtgaagagaataagggtccctcagggtctgctgtgtcccgcaaggcccccagcaagccctcagccagtaccaagaaagcagaagggaagctgagtaactccaacagcaaagatggtaaggatagggagggggctggtatggtgaagagggcggtgtgaggggcagagatccaagggcagggacccagtctcacattccagccctgagatctcatgattatctgtgtccactgcagtggacacagactacattcctggtgtgtgtccagccatgggccagagacccttctgctgggcaccctgtatctgctcagcaaacctgaatggagcagtaccctggggacagccagtctgaccagggaataagctacctttgagtaaagggcttagctgataactcttcactcccctctcacctatgctcatagcagagaaagcccctggtccttcccattactgcccctgacttcagggagcattatcagcaatccctaccctcttagttcttttgtatcatatgttttttagagacagggtctcactctgtcatccaggctggagtgcagtggcacgaccatagctcactgcagcctcgaactcctgagttgaattgatcctcccgagtagctgggactataggtgtgcaccaccacacccagcttcctctctgtcctgcaggcaacatgcagactgcaaagccttccgctatgaaggtgggggagaagctggccacaaagtcttctccagtgaaagtaggggagaagcggaaagctgctgatgagacgctgtgccaaacaaaggtattgctggacatcttcactggggtgcggctttacttgccaccctccacaccagacttcagccgtctcagacgctactttgtggcattcgacggggacctggtacaggaatttgatatgacttcagccacgcacgtgctgggtagcagggacaagaaccctgcggcccagcaggtctccccagagtggatttgggcatgtatccggaaacggagactggtagctccctgctaggtttgctgtcttccctctccctcaggccatactctcctttaccatactattggactggactcaggctggaggcagatagacacagtatagggggaatgggcttgcttctcccaaacccaccagttctccactgtctcttctggaccaggaattagttgctgtgggtgccacagctgaagtcagtttgtcttgctggtttaaatagatctttcagagctgggtgctgggtttgccatctttttgttttctttgaaaagcagcttagttaccctttttataaataaaatatcttgcagttatctttgtcctttccccacctacacccccaataatttccctagagattaaggagtaaaggctgggctatggcagctctgtccacaaagccttctctcccatccttgcctgttcctttgtacttccaggctcattttaaagttgtatttaaaggactgccctcggaaatgcttctgtttagcggaacttgtattcagcctgacacgctttgccaggaacaaacctcatgtgaaagaaaacaaaatgaatttttttactttcttctctg

SEQ ID NO: 372326 - DNA, 3033 bp, Homo sapiens
tgcgcctgcgcgctgcctcccgctctaggacccggatttaaagagacaggcgctccaaccgtcgtgggctgcccgcggcctgtaatgagcaagttccgaggcctacggtgagcgccggagccggagaggcagctatatgtctttggctttcaagatcttctttccacaaaccctccgtgcactcagccgaaaagaactgtgcctattccgaaaacatcactggcgtgatgtaagacaattcagccagtggtcagaaacagatctgcttcatggacatcccctcttcctgagaagaaagcctgttctatcattccagggaagccatctaagatcacgtgccacctaccttgttttcttgccagggttgcatgtgggactctgcagtggcccctgtgagatggctgagcaacggttctgtgtggactatgccaagcgtggcacagctggctgcaaaaaatgcaaggaaaagattgtgaagggcgtatgccgaattggcaaagtggtgcccaatcccttctcagagtctgggggtgatatgaaagagtggtaccacattaaatgcatgtttgagaaactagagcgggcccgggccaccacaaaaaaaatcgaggacctcacagagctggaaggctgggaagagctggaagataatgagaaggaacagataacccagcacattgcagatctgtcttctaaggcagcaggtacaccaaagaagaaagctgttgtccaggctaagttgacaaccactggccaggtgacttctccagtgaaaggcgcctcatttgtcaccagtaccaatccccggaaattttctggcttttcagccaagcccaacaactctggggaagccccctcgagccccacccctaagagaagtctgtcttcaagcaaatgtgaccccaggcataaggactgtctgctacgggagtttcgaaagttatgcgccatggtggccgataatcctagctacaacacgaagacccagatcatccaggacttccttcggaaaggctcagcaggagatggtttccacggtgatgtgtacctaacagtgaagctgctgctgccaggagtcattaagactgtttacaacttgaacgataagcagattgtgaagcttttcagtcgcatttttaactgcaacccagatgatatggcacgggacctagagcagggtgacgtgtcagagacaatcagagtcttctttgagcagagcaagtctttccccccagctgccaagagcctccttaccatccaggaagtggatgagttccttctgcggctgtccaagctcaccaaggaggatgagcagcaacaggccctacaggacattgcctccaggtgtacagccaatgaccttaaatgcatcatcaggttgatcaaacatgatctgaagatgaactcaggtgcaaaacatgtgttagacgcccttgaccccaatgcctatgaagccttcaaagcctcgcgcaacctgcaggatgtggtggagcgggtccttcacaacgcgcaggaggtggagaaggagccgggccagagacgagctctgagcgtccaggcctcgctgatgacacctgtgcagcccatgttggcggaggcctgcaagtccgttgagtatgcaatgaagaaatgtcccaatggcatgttctctgagatcaagtacgatggagagcgagtccaggtgcataagaatggagaccacttcagctacttcagccgcagtctcaagcccgtccttcctcacaaggtggcccactttaaggactacattccccaggcttttcctgggggccacagcatgatcttggattctgaagtgcttctgattgacaacaagacaggcaaaccactgccctttgggactctgggagtacacaagaaagcagccttccaggatgctaatgtctgcctgtttgtttttgattgtatctactttaatgatgtcagcttgatggacagacctctgtgtgagcggcggaagtttcttcatgacaacatggttgaaattccaaaccggatcatgttctcagaaatgaagcgagtcacaaaagctttggacttggctgacatgataacccgggtgatccaggagggattggaggggctggtgctgaaggatgtgaagggtacatatgagcctgggaagcggcactggctgaaagtgaagaaagactatttgaacgagggggccatggccgacacagctgacctggtggtccttggagccttctatgggcaagggagcaaaggcggcatgatgtcaatcttcctcatgggctgctacgaccctggcagccagaagtggtgcacagtcaccaagtgtgcaggaggccatgatgatgccacgcttgcccgcctgcagaatgaactagacatggtgaagatcagcaaggaccccagcaaaatacccagctggttgaaggtcaacaagatctactatcctgacttcatcgtcccagacccaaagaaagctgccgtgtgggagatcacaggggctgaattctccaaatcggaggctcatacagctgacgggatctccatccgattccctcgctgcacccgaatccgagatgataaggactggaaatctgccactaaccttccccaactcaaggaactgtaccagttgtccaaggagaaggcagacttcactgtagtggctggagatgaggggagctccactacagggggtagcagtgaagagaataagggtccctcagggtctgctgtgtcccgcaaggcccccagcaagccctcagccagtaccaagaaagcagaagggaagctgagtaactccaacagcaaagatggcaacatgcagactgcaaagccttccgctatgaaggtgggggagaagctggccacaaagtcttctccagtgaaagtaggggagaagcggaaagctgctgatgagacgctgtgccaaacaaaggtgagggtaaaaacagcaacacaccacgtgggccagtttagcccaggttgtgttcccaaccttctgtacaagaagtttgaaagaggatgagcaaaggtgtt

SEQ ID NO: 372327 - DNA, 1241 bp, Homo sapiens
tgcgcctgcgcgctgcctcccgctctaggacccggatttaaagagacaggcgctccaaccgtcgtgggctgcccgcggcctgtaatgagcaagttccgaggcctacggtgagcgccggagccggagaggcagctatatgtctttggctttcaagatcttctttccacaaaccctccgtgcactcagccgaaaagaactgtgcctattccgaaaacatcactggcgtgatgtaagacaattcagccagtggtcagaaacagatctgcttcatggacatcccctcttcctgagaagaaagcctgttctatcattccagggaagccatctaagatcacgtgccacctaccttgttttcttgccagggttgcatgtgggactctgcagtggcccctgtgagatggctgagcaacggttctgtgtggactatgccaagcgtggcacagctggctgcaaaaaatgcaaggaaaagattgtgaagggcgtatgccgaattggcaaagtggtgcccaatcccttctcagagtctgggggtgatatgaaagagtggtaccacattaaatgcatgtttgagaaactagagcgggcccgggccaccacaaaaaaaatcgaggacctcacagagctggaaggctgggaagagctggaagataatgagaaggaacagataacccagcacattgcagatctgtcttctaaggcagcaggtacaccaaagaagaaagctgttgtccaggctaagttgacaaccactggccaggtgacttctccagtgaaaggcgcctcatttgtcaccagtaccaatccccggaaattttctggcttttcagccaagcccaacaactctggggaagccccctcgagccccacccctaagagaagtctgtcttcaagcaaatgtgaccccaggcataaggactgtctgctacgggagtttcgaaagttatgcgccatggtggccgataatcctagctacaacacgaagacccagatcatccaggacttccttcggaaaggctcagcaggaggtgtggcatgagcatcctgaataggcctttcctccggagagctcaaggccatggctgccttcctgggcatgtgagctgtatagttgcccgggatcccatgcttggtttaatgctgtactgtagtgctatctggaaattcttaataattttgaacaaggggcctcgcatttgcattttgcactgtactccacaaattatgtagccagtttttctcag

SEQ ID NO: 372328 - DNA, 1122 bp, Homo sapiens
ctactactactaggccacgcgtcgactagtacgggggggggaaagcgcgcgagcaagatggccaccaccaagcgcgtcttgtacgtgggtggactggcagaggaagtggacgacaaagttcttcatgctgcgttcattccttttggagacatcacagatattcagattcctctggattatgaaacagaaaagcaccgaggatttgcttttgttgaatttgagttggcagaggatgctgcagcagctatcgacaacatgaatgaatctgagctttttggacgtacaattcgtgtcaatttggccaaaccaatgagaattaaggaaggctcttccaggccagtttggtcagatgatgactggttgaagaagttttctgggaagacgcttgaagagaataaagaggaagaagggtcagagcctcccaaagcagagacccaggagggagagcccattgctaaaaaggcccgctcaaatcctcaggtgtacatggacatcaagattgggaacaagccggctggccgcatccagatgctcctgcgttctgatgtcgtgcccatgacagcagagaatttccgctgcctgtgcactcatgaaaagggctttggctttaagggaagcagcttccaccgcatcatcccccagttcatgtgccagggcggtgatttcacaaaccacaatggcactgggggcaagtccatctatgggaagaagttcgatgatgaaaactttatcctcaagcatacgggaccaggtctactatccatggccaactctggcccaaacaccaatggctctcagttcttcctgacatgtgacaagacagactggctggatggcaagcatgtggtgtttggagaggtcaccgaaggcctagatgtcttgcggcaaattgagaaacaagaagagtcagcaattaccagccagccgaggtcctggaagctgacgtagagctcgtgccgacggcagacctgccggccgtgggagccgtggacgtcatctgcagggacagaaggggcaaggtcttttctggggttcctactgtgtgcagctactatggggtaccagggtgggggatgccctgatgagcacatttgtcaaataaatgaatgacaggaaaccaat

SEQ ID NO: 372329 - DNA, 991 bp, Homo sapiens
  misc_feature (905)..(905): n is a, c, g, or t
  misc_feature (908)..(908): n is a, c, g, or t
  misc_feature (913)..(914): n is a, c, g, or t
  misc_feature (922)..(922): n is a, c, g, or t
  misc_feature (938)..(938): n is a, c, g, or t
aaacttacggctaggtacgaggctgggtggtggcagatggccaccaccaagcgcgtcttgtacgtgggtggactggcagaggaagtggacgacaaagttcttcatgctgcgttcattccttttggagacatcacagatattcagattcctctggattatgaaacagaaaagcaccgaggatttgcttttgttgaatttgagttggcagaggatgctgcagcagctatcgacaacatgaatgaatctgagctttttggacgtacaattcgtgtcaatttggccaaaccaatgagaattaaggaaggctcttccaggccagtttggtcagatgatgactggttgaagaagttttctgggaagacgcttgaagagaataaagaggaagaagggtcagagcctcccaaagcagagacccaggagggagagcccattgctaaaaaggcccgctcaaatcctcaggtgtacatggacatcaagattgggaacaagccggctggccgcatccagatgctcctgcgttctgatgtcgtgcccatgacagcagagaatttccgctgcctgtgcactcatgaaaagggctttggctttaagggaagcagcttccaccgcatcatcccccagttcatgtgccagggcggtgatttcacaaaccacaatggcactgggggcaagtccatctatgggaagaagttcgatgatgaaaactttatcctcaagcatacgggaccaggtctactatccatggccaactctggcccaaacaccaatggctctcagttcttcctgacatgtgacaagacagactggctggatggcaagcatgtggtgtttggagaggtcaccgaaggcctagatgtcttgcggcaaattgagtggggaaatgaggccggcccagacggaaccanaangggcnngccggggngacgtgagggaccttncccccgttacgttcgaggggcccaggggccggtctgaaatgttgccccggggg

SEQ ID NO: 372330 - DNA, 985 bp, Homo sapiens
tcctatcggtcccggggatgcccctgtctaaaaggcccctgatattctccggtgaacgcgacatccagatggggaacaatccggtcggcccggcttccagatgcgcgcaggcgttttcgaacgtcctgcccctgctacacgcaagggaagttcgtgccgcgtgcccgggaccacttccattgaaataggggcttttcggcctttaaggggaatgcccaagccttcccatccggcagtacattccgccccgagcttacaatgtatgccaagcccgggtgaactttccgccctaagccctcctattgggcacttggggggccagagggtccattttaatgcggaaagaaaagtttcgaatggatggaaaatcttgtatcccttcaaaggtcatttaccggggaaccaagggtcttactattcccagtgggcccaaacttcttgggcccccaaaaccaccccaaatgggctcttcaagtttcttcctgacatgtgacaagacagactggctggatggcaagcatgtggtgtttggagaggtcaccgaaggcctagatgtcttgcggcaaattgaggcccagggcagcaaggacgggaagccaaagcagaaggtgatcatcgccgactgtggggagtacgtgtgaggcggcactctctctgcttccccctccgctcttgaccctgcatatccaggaaggaactgccagcctcagaggaggcagcaccgagggtgcctgtttgaagcaagcagcatttgggatatgtgcccttcctcagggtctgcttggagcagctcctctgcaggcacagcctggactattcccaggcacagctgtgggcccaggagccagctcaggtgctcccctccaccatgggcaggctgtgcaaaaagccactggcttttctcagcatttgctgctgggcctctcctgggactaccagtgtggctcttacgtgttttctttgctaaaataaaccctagttctta

SEQ ID NO: 372331 - DNA, 1306 bp, Homo sapiens
ggtcgcgtcgacacggctgcgagaagacgacaaaagggggaaagcgcgcgagcaagatggccaccaccaagcgcgtcttgtacgtgggtggactggcagaggaagtggacgacaaagttcttcatgctgcgttcattccttttggagacatcacagatattcagattcctctggattatgaaacagaaaagcaccgaggatttgcttttgttgaatttgagttggcagaggatgctgcagcagctatcgacaacatgaatgaatctgagctttttggacgtacaattcgtgtcaatttggccaaaccaatgagaattaaggaaggctcttccaggccagtttggtcagatgatgactggttgaagaagttttctgggaagacgcttgaagagaataaagaggaagaagggtcagagcctcccaaagcagagacccaggagggagagcccattgctaaaaaggcccgctcaaatcctcaggtgtacatggacatcaagattgggaacaagccggctggccgcatccagatgctcctgcgttctgatgtcgtgcccatgacagcagagaatttccgctgcctgtgcactcatgaaaagggctttggctttaagggaagcagcttccaccgcatcatcccccagttcatgtgccagggcggtgatttcacaaaccacaatggcactgggggcaagtccatctatgggaagaagttcgatgatgaaaactttatcctcaagcatacgggaccaggtctactatccatggccaactctggcccaaacaccaatggctctcagttcttcctgacatgtgacaagacagactggctggatggcaagcatgtggtgtttggagaggtcaccgaaggcctagatgtcttgcggcaaattgaggcccagggcagcaaggacgggaagccaaagcagaaggtgatcatcgccgactgtggggagtacgtgtgaggcggcactctctctgcttccccctccgctcttgaccctgcatatccaggaaggaactgccagcctcagaggaggcagcaccgagggtgcctgtttgaagcaagcagcatttgggatatgtgcccttcctcagggtctgcttggagcagctcctctgcaggcacagcctggactattcccaggcacagctgtgggcccaggagccagctcaggtgctcccctccaccatgggcaggctgtgcaaaaagccactggcttttctcagcatttgctgctgggcctctcctgggactaccagtgtggctcttacgtgttttctttgctaaaataaaccctagttctta

SEQ ID NO: 372332 - DNA, 1907 bp, Homo sapiens
cggctagtacaggccggggtaatcggccgaggcaccaagcgcgtcttgtacgtgggtggactggcagaggaagtggacgacaaagttcttcatgctgcgttcattccttttggagacatcacagatattcagattcctctggattatgaaacagaaaagcaccgaggatttgcttttgttgaatttgagttggcagaggatgctgcagcagctatcgacaacatgaatgaatctgagctttttggacgtacaattcgtgtcaatttggccaaaccaatgagaattaaggaaggctcttccaggccagtttggtcagatgatgactggttgaagaagttttctgggaagacgcttgaagagaataaagaggaagaagggtcagagcctcccaaagcagagacccaggagggagagcccattgctaaaaaggcccgctcaaatcctcaggtgtacatggacatcaagattgggaacaagccggctggccgcatccagatgctcctgcgttctgatgtcgtgcccatgacagcagagaatttccgctgcctgtgcactcatgaaaagggctttggctttaagggaagcagcttccaccgcatcatcccccagttcatgtgccagggcggtgatttcacaaaccacaatggcactgggggcaagtccatctatgggaagaagttcgatgatgaaaactttatcctcaagcatacgggaccaggtctactatccatggccaactctggcccaaacaccaatggctctcagttcttcctgacatgtgacaagacagactggctggatggcaagcatgtggtgtttggagaggtcaccgaaggcctagatgtcttgcggcaaattgaggcccagggcagcaaggacgggaagccaaagcagaaggtgatcatcgccgactgtggggagtacgtgtgaggcggcactctctctgcttccccctccgctcttgaccctgcatatccaggaaggaactgccagcctcagaggaggcagcaccgagggtgcctgtttgaagcaagcagcatttgggatatgtgcccttcctcagggtctgcttggagcagctcctctgcaggcacagcctggactattcccaggcacagctgtgggcccaggagccagctcaggtgctcccctccaccatgggcaggctgtgcaaaaagccactggcttttctcagcatttgctgctgggcctctcctgggactaccagtgtggctcttacgtgttttctttgctaaaataaaccctagttcttatattgctcttcctgctagttcttgggagttgtcagagattgtgtctgtggctaagctggacctctgaggcaggctggtgagtggggagagcagagcatctttttcacagctttcatttcctcccttgggccgatccccttagatgtcaggtgatgtatcttcacaccaggcatcgatgtcagggcaacggaaattaaagactggaaagctccggtcttctgctgcctctgctcctaaacccagctgccggccttacagccagcaagtgtactctcagtggttcatttgtttatttgttcactttcaccctacagattttaaaaaatgaaatttttataactcaaagtgccttctctgtgccaagtactatgcctatttgtcaggagacaggaagccaacaaactacatgtgccagggcggtgatttcacaaaccacaatggcactgggggcaagtccatctatgggaagaagttcgatgatgaaaactttatcctcaagcatacgggaccaggtctactatccatggccaactctggcccaaacaccaatggctctcagttcttcctgacatgtgacaagacagactggctggatggcaagcatgtggtgtttggagaggcaccgaagcctag

SEQ ID NO: 372333 - DNA, 1286 bp, Homo sapiens
aaacttacggctaggtacgaggctgggtggtggcagatggccaccaccaagcgcgtcttgtacgtgggtggactggcagaggaagtggacgacaaagttcttcatgctgcgttcattccttttggagacatcacagatattcagattcctctggattatgaaacagaaaagcaccgaggatttgcttttgttgaatttgagttggcagaggatgctgcagcagctatcgacaacatgaatgaatctgagctttttggacgtacaattcgtgtcaatttggccaaaccaatgagaattaaggaaggctcttccaggccagtttggtcagatgatgactggttgaagaagttttctgggaagacgcttgaagagaataaagaggaagaagggtcagagcctcccaaagcagagacccaggagggagagcccattgctaaaaaggcccgctcaaatcctcaggtgtacatggacatcaagattgggaacaagccggctggccgcatccagatgctcctgcgttctgatgtcgtgcccatgacagcagagaatttccgctgcctgtgcactcatgaaaagggctttggctttaagggaagcagcttccaccgcatcatcccccagttcatgtgccagggcggtgatttcacaaaccacaatggcactgggggcaagtccatctatgggaagaagttcgatgatgaaaactttatcctcaagcatacgggaccaggtctactatccatggccaactctggcccaaacaccaatggctctcagttcttcctgacatgtgacaagacagactggctggatggcaagcatgtggtgtttggagaggtcaccgaaggcctagatgtcttgcggcaaattgaggcccagggcagcaaggacgggaagccaaagcagaaggtgatcatcgccgactgtggggagtacgtgtgaggcggcactctctctgcttccccctccgctcttgaccctgcatatccaggaaggaactgccagcctcagaggaggcagcaccgagggtgcctgtttgaagcaagcagcatttgggatatgtgcccttcctcagggtctgcttggagcagctcctctgcaggcacagcctggactattcccaggcacagctgtgggcccaggagccagctcaggtgctcccctccaccatgggcaggctgtgcaaaaagccactggcttttctcagcatttgctgctgggcctctcctgggactaccagtgtggctcttacgtgttttctttgctaaaataaaccctagttctta

SEQ ID NO: 372334 - DNA, 1383 bp, Homo sapiens
gcgacccccaagggtcggggcgtggggtgggacgcatctctgaaccaggaggacggcgagctgctgtcaaggccgggtctctggcggtagtgctggcgatagctctggctgtgcttaaactccttccaaggtttcccactgtcctcaggaaaaagtgcagacttgtggactggcagaggaagtggacgacaaagttcttcatgctgcgttcattccttttggagacatcacagatattcagattcctctggattatgaaacagaaaagcaccgaggatttgcttttgttgaatttgagttggcagaggatgctgcagcagctatcgacaacatgaatgaatctgagctttttggacgtacaattcgtgtcaatttggccaaaccaatgagaattaaggaaggctcttccaggccagtttggtcagatgatgactggttgaagaagttttctgggaagacgcttgaagagaataaagaggaagaagggtcagagcctcccaaagcagagacccaggagggagagcccattgctaaaaaggcccgctcaaatcctcaggtgtacatggacatcaagattgggaacaagccggctggccgcatccagatgctcctgcgttctgatgtcgtgcccatgacagcagagaatttccgctgcctgtgcactcatgaaaagggctttggctttaagggaagcagcttccaccgcatcatcccccagttcatgtgccagggcggtgatttcacaaaccacaatggcactgggggcaagtccatctatgggaagaagttcgatgatgaaaactttatcctcaagcatacgggaccaggtctactatccatggccaactctggcccaaacaccaatggctctcagttcttcctgacatgtgacaagacagactggctggatggcaagcatgtggtgtttggagaggtcaccgaaggcctagatgtcttgcggcaaattgaggcccagggcagcaaggacgggaagccaaagcagaaggtgatcatcgccgactgtggggagtacgtgtgaggcggcactctctctgcttccccctccgctcttgaccctgcatatccaggaaggaactgccagcctcagaggaggcagcaccgagggtgcctgtttgaagcaagcagcatttgggatatgtgcccttcctcagggtctgcttggagcagctcctctgcaggcacagcctggactattcccaggcacagctgtgggcccaggagccagctcaggtgctcccctccaccatgggcaggctgtgcaaaaagccactggcttttctcagcatttgctgctgggcctctcctgggactaccagtgtggctcttacgtgttttctttgctaaaataaaccctagttctta

SEQ ID NO: 372335 - DNA, 1224 bp, Homo sapiens
cggctagtacaggccggggtaatcggccgaggcaccaagcgcgtcttgtacgtgggtggactggcagaggaagtggacgacaaagttcttcatgctgcgttcattccttttggagacatcacagatattcagattcctctggattatgaaacagaaaagcaccgaggatttgcttttgttgaatttgagttggcagaggatgctgcagcagctatcgacaacatgaatgaatctgagctttttggacgtacaattcgtgtcaatttggccaaaccaatgagaattaaggaaggctcttccaggccagtttggtcagatgatgactggttgaagaagttttctgggaagacgcttgaagagaataaagaggaagaagggtcagagcctcccaaagcagagacccaggagggagagcccattgctaaaaaggcccgctcaaatcctcaggtgtacatggacatcaagattgggaacaagccggctggccgcatccagatgctcctgcgttctgatgtcgtgcccatgacagcagagaatttccgctgcctgtgcactcatgaaaagggctttggctttaagggaagcagcttccaccgcatcatcccccagttcatgtgccagggcggtgatttcacaaaccacaatggcactgggggcaagtccatctatgggaagaagttcgatgatgaaaactttatcctcaagcatacgggaccaggtctactatccatggccaactctggcccaaacaccaatggctctcagttcttcctgacatgtgacaagacagactggctggatggcaagcatgtggtgtttggagaggtcaccgaaggcctagatgtcttgcggcaaattgaggttgccccagataccaaggcatcaaaagccaggggatccagaaaaaacaaagatggccaagagagaaactgggggaaaagccaaaaggttgagagccacaccatctagaagcttcctgcctgcggtgcggcacagaaacaagaagagtcagcaattaccagccagccgaggtcctggaagctgacgtagagctcgtgccgacggcagacctgccggccgtgggagccgtggacgtcatctgcagggacagaaggggcaaggtcttttctggggttcctactgtgtgcagctactatggggtaccagggtgggggatgccctgatgagcacatttgtcaaataaatgaatgacaggaaaccaat

SEQ ID NO: 372336 - DNA, 979 bp, Homo sapiens
  misc_feature (893)..(893): n is a, c, g, or t
  misc_feature (896)..(896): n is a, c, g, or t
  misc_feature (901)..(902): n is a, c, g, or t
  misc_feature (910)..(910): n is a, c, g, or t
  misc_feature (926)..(926): n is a, c, g, or t
cggctagtacaggccggggtaatcggccgaggcaccaagcgcgtcttgtacgtgggtggactggcagaggaagtggacgacaaagttcttcatgctgcgttcattccttttggagacatcacagatattcagattcctctggattatgaaacagaaaagcaccgaggatttgcttttgttgaatttgagttggcagaggatgctgcagcagctatcgacaacatgaatgaatctgagctttttggacgtacaattcgtgtcaatttggccaaaccaatgagaattaaggaaggctcttccaggccagtttggtcagatgatgactggttgaagaagttttctgggaagacgcttgaagagaataaagaggaagaagggtcagagcctcccaaagcagagacccaggagggagagcccattgctaaaaaggcccgctcaaatcctcaggtgtacatggacatcaagattgggaacaagccggctggccgcatccagatgctcctgcgttctgatgtcgtgcccatgacagcagagaatttccgctgcctgtgcactcatgaaaagggctttggctttaagggaagcagcttccaccgcatcatcccccagttcatgtgccagggcggtgatttcacaaaccacaatggcactgggggcaagtccatctatgggaagaagttcgatgatgaaaactttatcctcaagcatacgggaccaggtctactatccatggccaactctggcccaaacaccaatggctctcagttcttcctgacatgtgacaagacagactggctggatggcaagcatgtggtgtttggagaggtcaccgaaggcctagatgtcttgcggcaaattgagtggggaaatgaggccggcccagacggaaccanaangggcnngccggggngacgtgagggaccttncccccgttacgttcgaggggcccaggggccggtctgaaatgttgccccggggg

SEQ ID NO: 372337 - DNA, 1416 bp, Homo sapiens
ggtcgcgtcgacacggctgcgagaagacgacaaaagggggaaagcgcgcgagcaagatggccaccaccaagcgcgtcttgtacgtgggtggactggcagaggaagtggacgacaaagttcttcatgctgcgttcattccttttggagacatcacagatattcagattcctctggattatgaaacagaaaagcaccgaggatttgcttttgttgaatttgagttggcagaggatgctgcagcagctatcgacaacatggtatggctgggaatcttaattctaactaaagttgctttttggtggtacagaggctccttattcatatatcagtgttctggacttccaaagttacaaggttgcatggggagaatgaatctgagctttttggacgtacaattcgtgtcaatttggccaaaccaatgagaattaaggaaggctcttccaggccagtttggtcagatgatgactggttgaagaagttttctgggaagacgcttgaagagaataaagaggaagaagggtcagagcctcccaaagcagagacccaggagggagagcccattgctaaaaaggcccgctcaaatcctcaggtgtacatggacatcaagattgggaacaagccggctggccgcatccagatgctcctgcgttctgatgtcgtgcccatgacagcagagaatttccgctgcctgtgcactcatgaaaagggctttggctttaagggaagcagcttccaccgcatcatcccccagttcatgtgccagggcggtgatttcacaaaccacaatggcactgggggcaagtccatctatgggaagaagttcgatgatgaaaactttatcctcaagcatacgggaccaggtctactatccatggccaactctggcccaaacaccaatggctctcagttcttcctgacatgtgacaagacagactggctggatggcaagcatgtggtgtttggagaggtcaccgaaggcctagatgtcttgcggcaaattgaggcccagggcagcaaggacgggaagccaaagcagaaggtgatcatcgccgactgtggggagtacgtgtgaggcggcactctctctgcttccccctccgctcttgaccctgcatatccaggaaggaactgccagcctcagaggaggcagcaccgagggtgcctgtttgaagcaagcagcatttgggatatgtgcccttcctcagggtctgcttggagcagctcctctgcaggcacagcctggactattcccaggcacagctgtgggcccaggagccagctcaggtgctcccctccaccatgggcaggctgtgcaaaaagccactggcttttctcagcatttgctgctgggcctctcctgggactaccagtgtggctcttacgtgttttctttgctaaaataaaccctagttctta

SEQ ID NO: 372338 - DNA, 1267 bp, Homo sapiens
ggtcgcgtcgacacggctgcgagaagacgacaaaagggggaaagcgcgcgagcaagatggccaccaccaagcgcgtcttgtacgtgggtggactggcagaggaagtggacgacaaagttcttcatgctgcgttcattccttttggagacatcacagatattcagattcctctggattatgaaacagaaaagcaccgaggatttgcttttgttgaatttgagttggcagaggatgctgcagcagctatcgacaacatgaatgaatctgagctttttggacgtacaattcgtgtcaatttggccaaaccaatgagaattaaggaaggctcttccaggccagtttggtcagatgatgactggttgaagaagttttctgggaagacgcttgaagagaataaagaggaagaagggtcagagcctcccaaagcagagacccaggaggtgtacatggacatcaagattgggaacaagccggctggccgcatccagatgctcctgcgttctgatgtcgtgcccatgacagcagagaatttccgctgcctgtgcactcatgaaaagggctttggctttaagggaagcagcttccaccgcatcatcccccagttcatgtgccagggcggtgatttcacaaaccacaatggcactgggggcaagtccatctatgggaagaagttcgatgatgaaaactttatcctcaagcatacgggaccaggtctactatccatggccaactctggcccaaacaccaatggctctcagttcttcctgacatgtgacaagacagactggctggatggcaagcatgtggtgtttggagaggtcaccgaaggcctagatgtcttgcggcaaattgaggcccagggcagcaaggacgggaagccaaagcagaaggtgatcatcgccgactgtggggagtacgtgtgaggcggcactctctctgcttccccctccgctcttgaccctgcatatccaggaaggaactgccagcctcagaggaggcagcaccgagggtgcctgtttgaagcaagcagcatttgggatatgtgcccttcctcagggtctgcttggagcagctcctctgcaggcacagcctggactattcccaggcacagctgtgggcccaggagccagctcaggtgctcccctccaccatgggcaggctgtgcaaaaagccactggcttttctcagcatttgctgctgggcctctcctgggactaccagtgtggctcttacgtgttttctttgctaaaataaaccctagttctta

SEQ ID NO: 372339 - DNA, 1153 bp, Homo sapiens
ggtcgcgtcgacacggctgcgagaagacgacaaaagggggaaagcgcgcgagcaagatggccaccaccaagcgcgtcttgtacgtgggtggactggcagaggaagtggacgacaaagttcttcatgctgcgttcattccttttggagacatcacagatattcagattcctctggattatgaaacagtttggtcagatgatgactggttgaagaagttttctgggaagacgcttgaagagaataaagaggaagaagggtcagagcctcccaaagcagagacccaggagggagagcccattgctaaaaaggcccgctcaaatcctcaggtgtacatggacatcaagattgggaacaagccggctggccgcatccagatgctcctgcgttctgatgtcgtgcccatgacagcagagaatttccgctgcctgtgcactcatgaaaagggctttggctttaagggaagcagcttccaccgcatcatcccccagttcatgtgccagggcggtgatttcacaaaccacaatggcactgggggcaagtccatctatgggaagaagttcgatgatgaaaactttatcctcaagcatacgggaccaggtctactatccatggccaactctggcccaaacaccaatggctctcagttcttcctgacatgtgacaagacagactggctggatggcaagcatgtggtgtttggagaggtcaccgaaggcctagatgtcttgcggcaaattgaggcccagggcagcaaggacgggaagccaaagcagaaggtgatcatcgccgactgtggggagtacgtgtgaggcggcactctctctgcttccccctccgctcttgaccctgcatatccaggaaggaactgccagcctcagaggaggcagcaccgagggtgcctgtttgaagcaagcagcatttgggatatgtgcccttcctcagggtctgcttggagcagctcctctgcaggcacagcctggactattcccaggcacagctgtgggcccaggagccagctcaggtgctcccctccaccatgggcaggctgtgcaaaaagccactggcttttctcagcatttgctgctgggcctctcctgggactaccagtgtggctcttacgtgttttctttgctaaaataaaccctagttctta

SEQ ID NO: 372340 - DNA, 900 bp, Homo sapiens
cggctagtacaggccggggtaatcggccgaggcaccaagcgcgtcttgtacgtgggtggactggcagaggaagtggacgacaaagttcttcatgctgcgttcattccttttggagacatcacagatattcagattcctctggattatgaaacagaaaagcaccgaggatttgcttttgttgaatttgagttggcagaggatgctgcagcagctatcgacaacatgaatgaatctgagctttttggacgtacaattcgtgtcaatttggccaaaccaatgagaattaaggaaggctcttccaggccagtttggtcagatgatgactggttgaagaagttttctgggaagacgcttgaagagaataaagaggaagaagggtcagagcctcccaaagcagagacccaggagggagagcccattgctaaaaaggcccgctcaaatcctcaggtgtacatggacatcaagattgggaacaagccggctggccgcatccagatgctcctgcgttctgatgtcgtgcccatgacagcagagaatttccgctgcctgtgcactcatgaaaagggctttggctttaagggaagcagcttccaccgcatcatcccccagttcatgtgccagggcggtgatttcacaaaccacaatggcactgggggcaagtccatctatgggaagaagttcgatgatgaaaactttatcctcaagcatacgggaccaggtctactatccatggccaactctggcccaaacaccaatggctctcagttcttcctgacatgtgacaagacagagctgtgcaaaaagccactggcttttctcagcatttgctgctgggcctctcctgggactaccagtgtggctcttacgtgttttctttgctaaaataaaccctagttctta

SEQ ID NO: 372341 - DNA, 1463 bp, Homo sapiens
aaacttacggctaggtacgaggctgggtggtggcagatggccaccaccaagcgcgtcttgtacgtgggtggactggcagaggaagtggacgacaaagttcttcatgctgcgttcattccttttggagacatcacagatattcagattcctctggattatgaaacagaaaagcaccgaggatttgcttttgttgaatttgagttggcagaggatgctgcagcagctatcgacaacatgaatgaatctgagctttttggacgtacaattcgtgtcaatttggccaaaccaatgagaattaaggaaggctcttccaggccagtttggtcagatgatgactggttgaagaagttttctgggaagacgcttgaagagaataaagaggaagaagggtcagagcctcccaaagcagagacccaggagggagagcccattgctaaaaaggcccgctcaaatcctcaggtgtacatggacatcaagattgggaacaagccggctggccgcatccagatgctcctgcgttctgatgtcgtgcccatgacagcagccaggtgtatggtacatgcctgtagtcccagctactcaagaggctgaggcaggggaatgacttgaacccaagaggtggaagttgcagtgaactgagattgtgccattgcactgcagcatgggcaacaagagtgaaactccgtctcaaggaaaaagaatcccttatagtccttacaagagaatttccgctgcctgtgcactcatgaaaagggctttggctttaagggaagcagcttccaccgcatcatcccccagttcatgtgccagggcggtgatttcacaaaccacaatggcactgggggcaagtccatctatgggaagaagttcgatgatgaaaactttatcctcaagcatacgggaccaggtctactatccatggccaactctggcccaaacaccaatggctctcagttcttcctgacatgtgacaagacagactggctggatggcaagcatgtggtgtttggagaggtcaccgaaggcctagatgtcttgcggcaaattgaggcccagggcagcaaggacgggaagccaaagcagaaggtgatcatcgccgactgtggggagtacgtgtgaggcggcactctctctgcttccccctccgctcttgaccctgcatatccaggaaggaactgccagcctcagaggaggcagcaccgagggtgcctgtttgaagcaagcagcatttgggatatgtgcccttcctcagggtctgcttggagcagctcctctgcaggcacagcctggactattcccaggcacagctgtgggcccaggagccagctcaggtgctcccctccaccatgggcaggctgtgcaaaaagccactggcttttctcagcatttgctgctgggcctctcctgggactaccagtgtggctcttacgtgttttctttgctaaaataaaccctagttctta

SEQ ID NO: 372342 - DNA, 1323 bp, Homo sapiens
gaataatattccgttgtatttggataaatatcttgttcattcatttgttgatgggcacttgcacattgttttcaccttttgactattgtaaatgcctgtgtgaatatccacatgtaagtatatgtttaaattcctgttttcaattcttttggatatatatgcctaggaatggaaatgcttagtcatatggtaactctgtatttaactttttgaggaaatgccaaactattttccacagtggctggaccattttacatttctaccagcaatgtatgagtgtttcagtttttccacatcttctctttttttttttttttttttttttttgagacagagtctcgcactgttgcccgggctggagtacagtggcgtgatattggctcactgcaacctccgcctcccaggttcaagtgattcttgtgcctcagctcccagctactcaagaggctgaggcaggggaatgacttgaacccaagaggtggaagttgcagtgaactgagattgtgccattgcactgcagcatgggcaacaagagtgaaactccgtctcaaggaaaaagaatcccttatagtccttacaagagaatttccgctgcctgtgcactcatgaaaagggctttggctttaagggaagcagcttccaccgcatcatcccccagttcatgtgccagggcggtgatttcacaaaccacaatggcactgggggcaagtccatctatgggaagaagttcgatgatgaaaactttatcctcaagcatacgggaccaggtctactatccatggccaactctggcccaaacaccaatggctctcagttcttcctgacatgtgacaagacagactggctggatggcaagcatgtggtgtttggagaggtcaccgaaggcctagatgtcttgcggcaaattgaggcccagggcagcaaggacgggaagccaaagcagaaggtgatcatcgccgactgtggggagtacgtgtgaggcggcactctctctgcttccccctccgctcttgaccctgcatatccaggaaggaactgccagcctcagaggaggcagcaccgagggtgcctgtttgaagcaagcagcatttgggatatgtgcccttcctcagggtctgcttggagcagctcctctgcaggcacagcctggactattcccaggcacagctgtgggcccaggagccagctcaggtgctcccctccaccatgggcaggctgtgcaaaaagccactggcttttctcagcatttgctgctgggcctctcctgggactaccagtgtggctcttacgtgttttctttgctaaaataaaccctagttctta

SEQ ID NO: 372343 - DNA, 911 bp, Homo sapiens
ggtcgcgtcgacacggctgcgagaagacgacaaaagggggaaagcgcgcgagcaagatggccaccaccaagcgcgtcttgtacgtgggtggactggcagaggaagtggacgacaaagttcttcatgctgcgttcattccttttggagacatcacagatattcagattcctctggattatgaaacagaaaagcaccgaggatttgcttttgttgaatttgagttggcagaggatgctgcagcagctatcgacaacatgaatgaatctgagctttttggacgtacaattcgtgtcaatttggccaaaccaatgagaattaaggaaggctcttccaggccagtttggtcagatgatgactggttgaagaagttttctgggaagacgcttgaagagaataaagaggaagaagggtcagagcctcccaaagcagagacccaggagggagagcccattgctaaaaaggcccgctcaaatcctcaggtgtacatggacatcaagattgggaacaagccggctggccgcatccagatgctcctgcgttctgatgtcgtgcccatgacagcagagaatttccgctgcctgtgcactcatgaaaagggctttggctttaagggaagcagcttccaccgcatcatcccccagttcatgtgccagggcggtgatttcacaaaccacaatggcactgggggcaagtccatctatgggaagaagttcgatgatgaaaactttatcctcaagcatacgggaccagtctatatcatggcaatcttggccaaacatgtattcatttccgggcattgaccccagctgggtgctgcactttgtgtcgaagaccgcgcaaatctggcgacaagcccgtccacgcggaacaaccacacaacacagggacagtacgctctgcactcacaacaa

SEQ ID NO: 372344 - DNA, 483 bp, Homo sapiens
ggtcgcgtcgacacggctgcgagaagacgacaaaagggggaaagcgcgcgagcaagatggccaccaccaagcgcgtcttgtacgtgggtggactggcagaggaagtggacgacaaagttcttcatgctgcgttcattccttttggagacatcacagatattcagattcctctggattatgaaacagaaaagcaccgaggatttgcttttgttgaatttgagttggcagaggatgctgcagcagctatcgacaacatgaatgaatctgagctttttggacgtacaattcgtgtcaatttggccaaaccaatgagaattaaggaaggctcttccaggccaggagccagctcaggtgctcccctccaccatgggcaggctgtgcaaaaagccactggcttttctcagcatttgctgctgggcctctcctgggactaccagtgtggctcttacgtgttttctttgctaaaataaaccctagttctta

SEQ ID NO: 372345 - DNA, 319 bp, Homo sapiens
caggaactgggattctaggtaaaaagttctagaaggaagcctcggtgccagaatccacaaacacacagagcactcaacagtgagcagcaccagtgatcccatcagaaacctgcttttgtcctttaaggttgccccagataccaaggcatcaaaagccaggggatccagaaaaaacaaagatggccaagagagaaactgggggaaaagccaaaaggttgagagccacaccatctagaagcttcctgcctgcggtgcggcacaggtgggtgagtgcacacgcacaccccacacactgtgcacacatatcacgggcggtcag

SEQ ID NO: 372346 - DNA, 332 bp, Homo sapiens
aggctgtgcaataccaggaactgggattctaggtaaaaagttctagaaggaagcctcggtgccagaatccacaaacacacagagcactcaacagtgagcagcaccagtgatcccatcagaaacctgcttttgtcctttaaggttgccccagataccaaggcatcaaaagccaggggatccagaaaaaacaaagatggccaagagagaaactgggggaaaagccaaaaggttgagagccacaccatctagaagcttcctgcctgcggtgcggcacaggtgggtgagtgcacacgcacaccccacacactgtgcacacatatcacgggcggtca

SEQ ID NO: 372347 - DNA, 1307 bp, Homo sapiens
ctactactactaggccacgcgtcgactagtacgggggggggaaagcgcgcgagcaagatggccaccaccaagcgcgtcttgtacgtgggtggactggcagaggaagtggacgacaaagttcttcatgctgcgttcattccttttggagacatcacagatattcagattcctctggattatgaaacagaaaagcaccgaggatttgcttttgttgaatttgagttggcagaggatgctgcagcagctatcgacaacatgaatgaatctgagctttttggacgtacaattcgtgtcaatttggccaaaccaatgagaattaaggaaggctcttccaggccagtttggtcagatgatgactggttgaagaagttttctgggaagacgcttgaagagaataaagaggaagaagggtcagagcctcccaaagcagagacccaggagggagagcccattgctaaaaaggcccgctcaaatcctcaggtgtacatggacatcaagattgggaacaagccggctggccgcatccagatgctcctgcgttctgatgtcgtgcccatgacagcagagaatttccgctgcctgtgcactcatgaaaagggctttggctttaagggaagcagcttccaccgcatcatcccccagttcatgtgccagggcggtgatttcacaaaccacaatggcactgggggcaagtccatctatgggaagaagttcgatgatgaaaactttatcctcaagcatacgggaccaggtctactatccatggccaactctggcccaaacaccaatggctctcagttcttcctgacatgtgacaagacagactggctggatggcaagcatgtggtgtttggagaggtcaccgaaggcctagatgtcttgcggcaaattgaggcccagggcagcaaggacgggaagccaaagcagaaggtgatcatcgccgactgtggggagtacgtgtgaggcggcactctctctgcttccccctccgctcttgaccctgcatatccaggaaggaactgccagcctcagaggaggcagcaccgagggtgcctgtttgaagcaagcagcatttgggatatgtgcccttcctcagggtctgcttggagcagctcctctgcaggcacagcctggactattcccaggcacagctgtgggcccaggagccagctcaggtgctcccctccaccatgggcaggctgtgcaaaaagccactggcttttctcagcatttgctgctgggcctctcctgggactaccagtgtggctcttacgtgttttctttgctaaaataaaccctagttctta

SEQ ID NO: 372348 - DNA, 877 bp, Homo sapiens
taggctaggtacgaggctgggtgttactcggccgaggcgcgtcttgtacgtgggtggactggcagaggaagtggacgacaaagttcttcatgctgcgttcattccttttggagacatcacagatattcagattcctctggattatgaaacagaaaagcaccgaggatttgcttttgttgaatttgagttggcagaggatgctgcagcagctatcgacaacatgaatgaatctgagctttttggacgtacaattcgtgtcaatttggccaaaccaatgagaattaaggaaggctcttccaggccagtttggtcagatgatgactggttgaagaagttttctgggaagacgcttgaagagaataaagaggaagaagggtcagagcctcccaaagcagagacccaggagggagagcccattgctaaaaaggcccgctcaaatcctcaggtgtacatggacatcaagattgggaacaagccggctggccgcatccagatgctcctgcgttctgatgtcgtgcccatgacagcagagaatttccgctgcctgtgcactcatgaaaagggctttggctttaagggaagcagcttccaccgcatcatcccccagttcatgtgccagggcggtgatttcacaaaccacaatggcactgggggcaagtccatctatgggaagaagttcgatgatgaaaactttatcctcaagcatacgggaccagtctatatcatggcaatcttggccaaacatgtattcatttccgggcattgaccccagctgggtgctgcactttgtgtcgaagaccgcgcaaatctggcgacaagcccgtccacgcggaacaaccacacaacacagggacagtacgctctgcactcacaacaa

SEQ ID NO: 372349 - DNA, 1274 bp, Homo sapiens
cggctagtacaggccggggtaatcggccgaggcaccaagcgcgtcttgtacgtgggtggactggcagaggaagtggacgacaaagttcttcatgctgcgttcattccttttggagacatcacagatattcagattcctctggattatgaaacagaaaagcaccgaggatttgcttttgttgaatttgagttggcagaggatgctgcagcagctatcgacaacatgaatgaatctgagctttttggacgtacaattcgtgtcaatttggccaaaccaatgagaattaaggaaggctcttccaggccagtttggtcagatgatgactggttgaagaagttttctgggaagacgcttgaagagaataaagaggaagaagggtcagagcctcccaaagcagagacccaggagggagagcccattgctaaaaaggcccgctcaaatcctcaggtgtacatggacatcaagattgggaacaagccggctggccgcatccagatgctcctgcgttctgatgtcgtgcccatgacagcagagaatttccgctgcctgtgcactcatgaaaagggctttggctttaagggaagcagcttccaccgcatcatcccccagttcatgtgccagggcggtgatttcacaaaccacaatggcactgggggcaagtccatctatgggaagaagttcgatgatgaaaactttatcctcaagcatacgggaccaggtctactatccatggccaactctggcccaaacaccaatggctctcagttcttcctgacatgtgacaagacagactggctggatggcaagcatgtggtgtttggagaggtcaccgaaggcctagatgtcttgcggcaaattgaggcccagggcagcaaggacgggaagccaaagcagaaggtgatcatcgccgactgtggggagtacgtgtgaggcggcactctctctgcttccccctccgctcttgaccctgcatatccaggaaggaactgccagcctcagaggaggcagcaccgagggtgcctgtttgaagcaagcagcatttgggatatgtgcccttcctcagggtctgcttggagcagctcctctgcaggcacagcctggactattcccaggcacagctgtgggcccaggagccagctcaggtgctcccctccaccatgggcaggctgtgcaaaaagccactggcttttctcagcatttgctgctgggcctctcctgggactaccagtgtggctcttacgtgttttctttgctaaaataaaccctagttctta

SEQ ID NO: 372350 - DNA, 1448 bp, Homo sapiens
cggctagtacaggccggggtaatcggccgaggcaccaagcgcgtcttgtacgtgggtggactggcagaggaagtggacgacaaagttcttcatgctgcgttcattccttttggagacatcacagatattcagattcctctggattatgaaacagaaaagcaccgaggatttgcttttgttgaatttgagttggcagaggatgctgcagcagctatcgacaacatgaatgaatctgagctttttggacgtacaattcgtgtcaatttggccaaaccaatgagaattaaggaaggctcttccaggccagtttggtcagatgatgactggttgaagaagttttctgggaagacgcttgaagagaataaagaggaagaagggtcagagcctcccaaagcagagacccaggagggagagcccattgctaaaaaggcccgctcaaatcctcaggtgtacatggacatcaagattgggaacaagccggctggccgcatccagatgctcctgcgttctgatgtcgtgcccatgacagcagagaatttccgctgcctgtgcactcatgaaaagggctttggctttaagggaagcagcttccaccgcatcatcccccagttcatgtgccagggcggtgatttcacaaaccacaatggcactgggggcaagtccatctatgggaagaagttcgatgatgaaaactttatcctcaagcatacgggaccaggtctactatccatggccaactctggcccaaacaccaatggctctcagttcttcctgacatgtgacaagacagactggctggatggcaagcatgtggtgtttggagaggtcaccgaaggcctagatgtcttgcggcaaattgaggcccagggcagcaaggacgggaagccaaagcagaaggtgatcatcgccgactgtggggagtacgtgtgaggcggcactctctctgcttccccctccgctcttgaccctgcatatccaggaaggaactgccagcctcagaggaggcagcaccgagggtgcctgtttgaagcaagcagcatttgggatatgtgcccttcctcagggtctgcttggagcagctcctctgcaggcacagcctggactattcccaggcacagctgtgggcccaggagccagctcaggtgctcccctccaccatgggcaggctgtgcaaaaagccactggcttttctcagcatttgctgctgggcctctcctgggactaccagtgtggctcttacgtgttttctttgctaaaataaaccctagttcttaaaaaaaaaaaactcgggctcattccggggcggaaaggtaatgatggctggcagctgtcccggccctttcggacaggggatgccggccctagggggtaaatcaagcgtcgtttatacgagggtaaaaaagggaaaagggaaaaagagtcaacaagaaaaagagaaatagacgcat

SEQ ID NO: 372351 - DNA, 1272 bp, Homo sapiens
taggctaggtacgaggctgggtgttactcggccgaggcgcgtcttgtacgtgggtggactggcagaggaagtggacgacaaagttcttcatgctgcgttcattccttttggagacatcacagatattcagattcctctggattatgaaacagaaaagcaccgaggatttgcttttgttgaatttgagttggcagaggatgctgcagcagctatcgacaacatgaatgaatctgagctttttggacgtacaattcgtgtcaatttggccaaaccaatgagaattaaggaaggctcttccaggccagtttggtcagatgatgactggttgaagaagttttctgggaagacgcttgaagagaataaagaggaagaagggtcagagcctcccaaagcagagacccaggagggagagcccattgctaaaaaggcccgctcaaatcctcaggtgtacatggacatcaagattgggaacaagccggctggccgcatccagatgctcctgcgttctgatgtcgtgcccatgacagcagagaatttccgctgcctgtgcactcatgaaaagggctttggctttaagggaagcagcttccaccgcatcatcccccagttcatgtgccagggcggtgatttcacaaaccacaatggcactgggggcaagtccatctatgggaagaagttcgatgatgaaaactttatcctcaagcatacgggaccaggtctactatccatggccaactctggcccaaacaccaatggctctcagttcttcctgacatgtgacaagacagactggctggatggcaagcatgtggtgtttggagaggtcaccgaaggcctagatgtcttgcggcaaattgaggcccagggcagcaaggacgggaagccaaagcagaaggtgatcatcgccgactgtggggagtacgtgtgaggcggcactctctctgcttccccctccgctcttgaccctgcatatccaggaaggaactgccagcctcagaggaggcagcaccgagggtgcctgtttgaagcaagcagcatttgggatatgtgcccttcctcagggtctgcttggagcagctcctctgcaggcacagcctggactattcccaggcacagctgtgggcccaggagccagctcaggtgctcccctccaccatgggcaggctgtgcaaaaagccactggcttttctcagcatttgctgctgggcctctcctgggactaccagtgtggctcttacgtgttttctttgctaaaataaaccctagttctta

SEQ ID NO: 372352 - DNA, 1102 bp, Homo sapiens
ggtcgcgtcgacacggctgcgagaagacgacaaaagggggaaagcgcgcgagcaagatggccaccaccaagcgcgtcttgtacgtgggtggactggcagaggaagtggacgacaaagttcttcatgctgcgttcattccttttggagacatcacagatattcagattcctctggattatgaaacagaaaagcaccgaggatttgcttttgttgaatttgagttggcagaggatgctgcagcagctatcgacaacatgaatgaatctgagctttttggacgtacaattcgtgtcaatttggccaaaccaatgagaattaaggaaggctcttccaggccagtttggtcagatgatgactggttgaagaagttttctgggaagacgcttgaagagaataaagaggaagaagggtcagagcctcccaaagcagagacccaggagggagagcccattgctaaaaaggcccgctcaaatcctcaggtgtacatggacatcaagattgggaacaagccggctggccgcatccagatgctcctgcgttctgatgtcgtgcccatgacagcagagaatttccgctgcctgtgcactcatgaaaagggctttggctttaagggaagcagcttccaccgcatcatcccccagttcatgtgccagggcggtgatttcacaaaccacaatggcactgggggcaagtccatctatgggaagaagttcgatgatgaaaactttatcctcaagcatacgggaccaggtctactatccatggccaactctggcccaaacaccaatggctctcagttcttcctgacatgtgacaagacagactggctggatggcaagcatgtggtgtttggagaggtcaccgaaggcctagatgtcttgcggcaaattgagaaacaagaagagtcagcaattaccagccagccgaggtcctggaagctgacgtagagctcgtgccgtgggagccgtggacgtcatctgcagggacagaaggggcaaggtcttttctggggttcctactgtgtgcagctactatggggtaccagggtgggggatgccctgatgagcacatttgtcaaataaatgaatgacaggaaaccaat

SEQ ID NO: 372353 - DNA, 1653 bp, Homo sapiens
gcgacccccaagggtcggggcgtggggtgggacgcatctctgaaccaggaggacggcgagctgctgtcaaggccgggtctctggcggtagtgctggcgatagctctggctgtgcttaaactccttccaaggtttcccactgtcctcaggaaaaagtgcagacttcttagcagtacgcacttctccagcttctttgctttgcttcccgattcgctgggtctcccgaaaaatgacccacttgcccccaaggttcaggttatttcacacctttgggcctctgcttttgcgactcccttgcagtgaacagccttgccacacacctcaggtggactggcagaggaagtggacgacaaagttcttcatgctgcgttcattccttttggagacatcacagatattcagattcctctggattatgaaacagaaaagcaccgaggatttgcttttgttgaatttgagttggcagaggatgctgcagcagctatcgacaacatggtatggctgggaatcttaattctaactaaagttgctttttggtggtacagaggctccttattcatatatcagtgttctggacttccaaagttacaaggttgcatggggagaatgaatctgagctttttggacgtacaattcgtgtcaatttggccaaaccaatgagaattaaggaaggctcttccaggccagtttggtcagatgatgactggttgaagaagttttctgggaagacgcttgaagagaataaagaggaagaagggtcagagcctcccaaagcagagacccaggagggagagcccattgctaaaaaggcccgctcaaatcctcaggtgtacatggacatcaagattgggaacaagccggctggccgcatccagatgctcctgcgttctgatgtcgtgcccatgacagcagagaatttccgctgcctgtgcactcatgaaaagggctttggctttaagggaagcagcttccaccgcatcatcccccagttcatgtgccagggcggtgatttcacaaaccacaatggcactgggggcaagtccatctatgggaagaagttcgatgatgaaaactttatcctcaagcatacgggaccaggtctactatccatggccaactctggcccaaacaccaatggctctcagttcttcctgacatgtgacaagacagactggctggatggcaagcatgtggtgtttggagaggtcaccgaaggcctagatgtcttgcggcaaattgaggcccagggcagcaaggacgggaagccaaagcagaaggtgatcatcgccgactgtggggagtacgtgtgaggcggcactctctctgcttccccctccgctcttgaccctgcatatccaggaaggaactgccagcctcagaggaggcagcaccgagggtgcctgtttgaagcaagcagcatttgggatatgtgcccttcctcagggtctgcttggagcagctcctctgcaggcacagcctggactattcccaggcacagctgtgggcccaggagccagctcaggtgctcccctccaccatgggcaggctgtgcaaaaagccactggcttttctcagcatttgctgctgggcctctcctgggactaccagtgtggctcttacgtgttttctttgctaaaataaaccctagttctta

SEQ ID NO: 372354 - DNA, 1252 bp, Homo sapiens
ggtcgcgtcgacacggctgcgagaagacgacaaaagggggaaagcgcgcgagcaagatggccaccaccaagcgcgtcttgtacgtgggtggactggcagaggaagtggacgacaaagttcttcatgctgcgttcattccttttggagacatcacagatattcagattcctctggattatgaaacagaaaagcaccgaggatttgcttttgttgaatttgagttggcagaggatgctgcagcagctatcgacaacatgaatgaatctgagctttttggacgtacaattcgtgtcaatttggccaaaccaatgagaattaaggaaggctcttccaggccagtttggtcagatgatgactggttgaagaagttttctgggaagacgcttgaagagaataaagaggaagaagggtcagagcctcccaaagcagagacccaggagggagagcccattgctaaaaaggcccgctcaaatcctcaggtgtacatggacatcaagattgggaacaagccggctggccgcatccagatgctcctgcgttctgatgtcgtgcccatgacagcagagaatttccgctgcctgtgcactcatgaaaagggctttggctttaagggaagcagcttccaccgcatcatcccccagttcatgtgccagggcggtgatttcacaaaccacaatggcactgggggcaagtccatctatgggaagaagttcgatgatggcccaaacaccaatggctctcagttcttcctgacatgtgacaagacagactggctggatggcaagcatgtggtgtttggagaggtcaccgaaggcctagatgtcttgcggcaaattgaggcccagggcagcaaggacgggaagccaaagcagaaggtgatcatcgccgactgtggggagtacgtgtgaggcggcactctctctgcttccccctccgctcttgaccctgcatatccaggaaggaactgccagcctcagaggaggcagcaccgagggtgcctgtttgaagcaagcagcatttgggatatgtgcccttcctcagggtctgcttggagcagctcctctgcaggcacagcctggactattcccaggcacagctgtgggcccaggagccagctcaggtgctcccctccaccatgggcaggctgtgcaaaaagccactggcttttctcagcatttgctgctgggcctctcctgggactaccagtgtggctcttacgtgttttctttgctaaaataaaccctagttctta

SEQ ID NO: 372355 - DNA, 1483 bp, Homo sapiens
ggtcgcgtcgacacggctgcgagaagacgacaaaagggggaaagcgcgcgagcaagatggccaccaccaagcgcgtcttgtacgtgggtggactggcagaggaagtggacgacaaagttcttcatgctgcgttcattccttttggagacatcacagatattcagattcctctggattatgaaacagaaaagcaccgaggatttgcttttgttgaatttgagttggcagaggatgctgcagcagctatcgacaacatgaatgaatctgagctttttggacgtacaattcgtgtcaatttggccaaaccaatgagaattaaggaaggctcttccaggccagtttggtcagatgatgactggttgaagaagttttctgggaagacgcttgaagagaataaagaggaagaagggtcagagcctcccaaagcagagacccaggagggagagcccattgctaaaaaggcccgctcaaatcctcaggtgtacatggacatcaagattgggaacaagccggctggccgcatccagatgctcctgcgttctgatgtcgtgcccatgacagcagccaggtgtatggtacatgcctgtagtcccagctactcaagaggctgaggcaggggaatgacttgaacccaagaggtggaagttgcagtgaactgagattgtgccattgcactgcagcatgggcaacaagagtgaaactccgtctcaaggaaaaagaatcccttatagtccttacaagagaatttccgctgcctgtgcactcatgaaaagggctttggctttaagggaagcagcttccaccgcatcatcccccagttcatgtgccagggcggtgatttcacaaaccacaatggcactgggggcaagtccatctatgggaagaagttcgatgatgaaaactttatcctcaagcatacgggaccaggtctactatccatggccaactctggcccaaacaccaatggctctcagttcttcctgacatgtgacaagacagactggctggatggcaagcatgtggtgtttggagaggtcaccgaaggcctagatgtcttgcggcaaattgaggcccagggcagcaaggacgggaagccaaagcagaaggtgatcatcgccgactgtggggagtacgtgtgaggcggcactctctctgcttccccctccgctcttgaccctgcatatccaggaaggaactgccagcctcagaggaggcagcaccgagggtgcctgtttgaagcaagcagcatttgggatatgtgcccttcctcagggtctgcttggagcagctcctctgcaggcacagcctggactattcccaggcacagctgtgggcccaggagccagctcaggtgctcccctccaccatgggcaggctgtgcaaaaagccactggcttttctcagcatttgctgctgggcctctcctgggactaccagtgtggctcttacgtgttttctttgctaaaataaaccctagttctta

SEQ ID NO: 372356 - DNA, 851 bp, Homo sapiens
gttttaaaataagagatactcattataaacctttgtgatactaaccttgtaaggactataagggattctttttccttgagacggagtttcactcttgttgcccatgctgagaatttccgctgcctgtgcactcatgaaaagggctttggctttaagggaagcagcttccaccgcatcatcccccagttcatgtgccagggcggtgatttcacaaaccacaatggcactgggggcaagtccatctatgggaagaagttcgatgatgaaaactttatcctcaagcatacgggaccaggtctactatccatggccaactctggcccaaacaccaatggctctcagttcttcctgacatgtgacaagacagactggctggatggcaagcatgtggtgtttggagaggtcaccgaaggcctagatgtcttgcggcaaattgaggcccagggcagcaaggacgggaagccaaagcagaaggtgatcatcgccgactgtggggagtacgtgtgaggcggcactctctctgcttccccctccgctcttgaccctgcatatccaggaaggaactgccagcctcagaggaggcagcaccgagggtgcctgtttgaagcaagcagcatttgggatatgtgcccttcctcagggtctgcttggagcagctcctctgcaggcacagcctggactattcccaggcacagctgtgggcccaggagccagctcaggtgctcccctccaccatgggcaggctgtgcaaaaagccactggcttttctcagcatttgctgctgggcctctcctgggactaccagtgtggctcttacgtgttttctttgctaaaataaaccctagttctta

SEQ ID NO: 372357 - DNA, 985 bp, Homo sapiens
ggtcgcgtcgacacggctgcgagaagacgacaaaagggggaaagcgcgcgagcaagatggccaccaccaagcgcgtcttgtacgtgggtggactggcagaggaagtggacgacaaagttcttcatgctgcgttcattccttttggagacatcacagatattcagattcctctggattatgaaacagaaaagcaccgaggatttgcttttgttgaatttgagttggcagaggatgctgcagcagctatcgacaacatgaatgaatctgagctttttggacgtacaattcgtgtcaatttggccaaaccaatgagaattaaggaaggctcttccaggccagtttggtcagatgatgactggttgaagaagttttctgggaagacgcttgaagagaataaagaggaagaagggtcagagcctcccaaagcagagacccaggagagaatttccgctgcctgtgcactcatgaaaagggctttggctttaagggaagcagcttccaccgcatcatcccccagttcatgtgccagggcggtgatttcacaaaccacaatggcactgggggcaagtccatctatgggaagaagttcgatgatgaaaactttatcctcaagcatacgggaccaggtctactatccatggccaactctggcccaaacaccaatggctctcagttcttcctgacatgtgacaagacagactggctggatggcaagcatgtggtgtttggagaggtcaccgaaggcctagatgtcttgcggcaaattgagaggtatgtggccaggaatgggcctcctccttacccaggccctaggagcacagccctgtgtgagggctggagagtctctgtggcctgagagagatggccaggggctgtgtccagcgggaggggctgctgctgcccaggttccggggtggaagtgggcaaatgggcaggcaggggttggtatccctaaaccactgttagtctccggccttactccctc

SEQ ID NO: 372358 - DNA, 1489 bp, Homo sapiens
gggccgaggagcgcggcggccagagcggggccgcggaggcgacgccggggacgcccgcgcgacgagcaggtggcggcggctgcaggcttgtccagccggaagccctgagggcagctgttcccactggctctgctgaccttgtgccttggacggctgtcctcagcgaggggccgtgcacccgctcctgagcagcgccatgggcctgctggccttcctgaagacccagttcgtgctgcacctgctggtcggctttgtcttcgtggtgagtggtctggtcatcaacttcgtccagctgtgcacgctggcgctctggccggtcagcaagcagctctaccgccgcctcaactgccgcctcgcctactcactctggagccaactggtcatgctgctggagtggtggtcctgcacggagtgtacactgttcacggaccaggccacggtagagcgctttgggaaggagcacgcagtcatcatcctcaaccacaacttcgagatcgacttcctctgtgggtggaccatgtgtgagcgcttcggagtgctggggagctccaaggtcctcgctaagaaggagctgctctacgtgcccctcatcggctggacgtggtactttctggagattgtgttctgcaagcggaagtgggaggaggaccgggacaccgtggtcgaagggctgaggcgcctgtcggactaccccgagtacatgtggtttctcctgtactgcgaggggacgcgcttcacggagaccaagcaccgcgttagcatggaggtggcggctgctaaggggcttcctgtcctcaagtaccacctgctgccgcggaccaagggcttcaccaccgcagtcaagtgcctccgggggacagtcgcagctgtctatgatgtaaccctgaacttcagaggaaacaagaacccgtccctgctggggatcctctacgggaagaagtacgaggcggacatgtgcgtgaggagatttcctctggaagacatcccgctggatgaaaaggaagcagctcagtggcttcataaactgtaccaggagaaggacgcgctccaggagatatataatcagaagggcatgtttccaggggagcagtttaagcctgcccggaggccgtggaccctcctgaacttcctgtcctgggccaccattctcctgtctcccctcttcagttttgtcttgggcgtctttgccagcggatcacctctcctgatcctgactttcttggggtttgtgggagcagcttcctttggagttcgcagactgataggagtaactgagatagaaaaaggctccagctacggaaaccaagagtttaagaaaaaggaataattaatggctgtgactgaacacacgcggccctgacggtggtatccagttaactcaaaaccaacacacagagtgcaggaaaagacaattagaaactatttttcttattaactggtgactaatattaacaaaacttgagccaagagtaaagaattcagaaggcct

SEQ ID NO: 372359 - DNA, 775 bp, Homo sapiens
gtgctgtcagcggcatgcctgccttctgcaagcccctcttccctgttccccagcccgcacttccaatgagctgtgggccaggaaaccagcccgtcacacttgtccacgctgcgtttaaagcgggaggaaggaggacccaatgcagggcccgaaaggtccactgacctccaggacgtagaggttgatgatccgggcaggtggccttcagcgagggagcacgtcaaaaggctgtgggccgtgcagacagctgggggacaccgtcccgggtgtgaccttgggccacacggcagggtggtggacttgctcctagaattgggctccagggctgaagccagcccctctgatctggcactggccggctccattcaccctttttggggcttactgccgcagagacttcctttgaggagagctggacccaagacgccagagttccgggggcactgagtgctgtgtggcacccgggccaggagaaacatgtgccagagggcaggcgtgggctctccggggagtctctgcgtagactttctagcccagaggttcaggtgatggaccagagactggccgctttgtgacaccgaggacggttgataaagtggattctcgaggggaagctgcatccacacagaggctgggacgtgaatgtgcatcacggctctatctgtggcccccaaaggctgggtgccagctgcctgtcggcagggagcgtatcaccgtggcacgtccatgccgtgggggtcactcagcagccacggatgcgccctgggtgctgtcc

SEQ ID NO: 372360 - DNA, 3594 bp, Homo sapiens
tctatgaaaccaacatacatggcgtttgcatcacagttggagtcagatgtgagcccggagggcaggtgtctggcttgtccagccggaagccctgagggcagctgttcccactggctctgctgaccttgtgccttggacggctgtcctcagcgaggggccgtgcacccgctcctgagcagcgccatgggcctgctggccttcctgaagacccagttcgtgctgcacctgctggtcggctttgtcttcgtggtgagtggtctggtcatcaacttcgtccagctgtgcacgctggcgctctggccggtcagcaagcagctctaccgccgcctcaactgccgcctcgcctactcactctggagccaactggtcatgctgctggagtggtggtcctgcacggagtgtacactgttcacggaccaggccacggtagagcgctttgggaaggagcacgcagtcatcatcctcaaccacaacttcgagatcgacttcctctgtgggtggaccatgtgtgagcgcttcggagtgctggggagctccaaggtcctcgctaagaaggagctgctctacgtgcccctcatcggctggacgtggtactttctggagattgtgttctgcaagcggaagtgggaggaggaccgggacaccgtggtcgaagggctgaggcgcctgtcggactaccccgagtacatgtggtttctcctgtactgcgaggggacgcgcttcacggagaccaagcaccgcgttagcatggaggtggcggctgctaaggggcttcctgtcctcaagtaccacctgctgccgcggaccaagggcttcaccaccgcagtcaagtgcctccgggggacagtcgcagctgtctatgatgtaaccctgaacttcagaggaaacaagaacccgtccctgctggggatcctctacgggaagaagtacgaggcggacatgtgcgtgaggagatttcctctggaagacatcccgctggatgaaaaggaagcagctcagtggcttcataaactgtaccaggagaaggacgcgctccaggagatatataatcagaagggcatgtttccaggggagcagtttaagcctgcccggaggccgtggaccctcctgaacttcctgtcctgggccaccattctcctgtctcccctcttcagttttgtcttgggcgtctttgccagcggatcacctctcctgatcctgactttcttggggtttgtgggagcagcttcctttggagttcgcagactgataggagtaactgagatagaaaaaggctccagctacggaaaccaagagtttaagaaaaaggaataattaatggctgtgactgaacacacgcggccctgacggtggtatccagttaactcaaaaccaacacacagagtgcaggaaaagacaattagaaactatttttcttattaactggtgactaatattaacaaaacttgagccaagagtaaagaattcagaaggcctgtcaggtgaagtcttcagcctcccacagcgcagggtcccagcatctccacgcgcgcccgtgggaggtgggtccggccggagaggcctcccgcggacgccgtctctccagaactccgcttccaagagggagcctttggctgctttctctccttaaacttagatcaaattttttggtttttaatcagttatcttgggaacttaacctggcccctcacctcttctgcaccccccgcccccgaaactgtctcgtaatgaatttctgctgtcctcctgggagtggacggccgggtcccgtcccccgggagcatcgctcggctcagcaccttggctcccagtgggggccccgtggagggcgcccgtagtgataagcacaccggcacgaacgtcaggtccattcctcgaagtcggagccctcactctgccctgtcctggggctggctgagggcgaacgccccacctcactttctagagccctgtctgtcctagctcctatctgaccttgtgtgtaaatacgtacatctgtttttaaagtggatgggcccctgagaactcagtgaaatgcagagttctccatgcacctaaagctcctttgtcgctctcatggctgtcagatcctggtccctccacactgggtgctggggagggaggaccctcggggctaccgcgcgcccccccatcccacagatcaggagccaaggagggagaacagggcagcctgtgggactctaggatgcttcagaagaagcgacggcaccgtcaaccctctgttttttaaaggtggttggagactgttaacactgagctcattgacttctagagattttatttttactggttgatctcttggtggttttcaacttcctgctggaaactagaggtggggcaccccccaccccccagcctcgcactgtgtccttggggagggcccgcccccatcctggccggtgtcactgtggcccggccacccctgagcgcccagctccctacctcctggacgtctctgagagtccaggcagagcagagggcagcgctcggccggtcatgctggctcccttggccttgcagcgagcccctggcccacgccgagcgagggatgcttctccctacagcatgtccactcccccggcatggccaggtggggcccctggggcaatggcagtggtagaacgctcaacttggttgcggtaccatcagcccacctgcatttggctttcgacttgcttgttctaagtcacagcgccctcatctttttagcaaggtaaaaaaaccaaaatgggtgttatctctgatatcttgaaaccagcgttctgaatagaggtaggttgagttttctaggggaaaacaaatggagaaaagaggcatgaagaaaagtaaaccgagaacataattaggcatcgggcctaagtgtcctggggagattggaggggacggcagcgttctgcatgatggaggcgctgccgggccccgggtctgtgggggccgtgctctcagggcgtgtgcgggacgccacctgtgcacacctgctcagagcacggctcctcgcaggggtgaaggggcagaccaacgaaaccagatgagaccaacgacaccatgcgagacacgcttgcagacactgttgttttggaaatgtgcttccctccatctgaaatctcatccctccacccgcccactcgggcagctgtgccgtgggcagggcatgcgctcccctggctgagcaccccagagattctcctgcaccttcctcatgccgcacgctgctcatccgtctccatgtgtgtttagatccatgccattcactgactcactaacacctgcaaaatctttaaggaaaaaagctgaagggtacgaccatgcacatatgtgacctggaaaatgcaaatttagatcttttatgatttaattattattgtttcccatagaagttccctccctttgaaattaatatataatgtataaattctgcactgagccatggcggagctgggcagcccctaggttagagtggagacggaggcccaggcgcaggggtcacacctcatctggtttccttcccatctcacagcttagcttgtgcttctcaacaccaagtctttaagagcaataaaaactacaccatga

SEQ ID NO: 372361 - DNA, 4051 bp, Homo sapiens
cgccgacacatggtcgttcgacttctggcttggcctcttttgtgagtgtggggcctggtcatatcctcttggtcagtgtctctgtgatgatgagaacgggaagacggccacggtgcccaccctggcaggactctctcccctcgctggcgctggctcagctgccgtgagcggccgtaggcactgtcccgggccctcctgtggttgctcccagccatgctgctggctgcttctgccgtcctggcttgcagagactctgggtcatgcggggaagagggcagagtcctcctccctgctcaggcaagagaggatccagcaagatttcttcctccccaccctcctgcccctcccagtctgggcagcagataaaagccagggccccacacttctgccacctcctgctgctcacacactccagccagggacctgcccccggggtccaacaaggacggctgtcctcagcgaggggccgtgcacccgctcctgagcagcgccatgggcctgctggccttcctgaagacccagttcgtgctgcacctgctggtcggctttgtcttcgtggtgagtggtctggtcatcaacttcgtccagctgtgcacgctggcgctctggccggtcagcaagcagctctaccgccgcctcaactgccgcctcgcctactcactctggagcctagcacaaaactagaagcaacccaagcacctgtcactggagactaattatgcggcacccatacagggaccctctgcggccatcatggagagccttcatcttgcccgtacagttttaagcgaaaaaggaagtatacaacaaagtccataaactggtcatgctgctggagtggtggtcctgcacggagtgtacactgttcacggaccaggccacggtagagcgctttgggaaggagcacgcagtcatcatcctcaaccacaacttcgagatcgacttcctctgtgggtggaccatgtgtgagcgcttcggagtgctggggagctccaaggtcctcgctaagaaggagctgctctacgtgcccctcatcggctggacgtggtactttctggagattgtgttctgcaagcggaagtgggaggaggaccgggacaccgtggtcgaagggctgaggcgcctgtcggactaccccgagtacatgtggtttctcctgtactgcgaggggacgcgcttcacggagaccaagcaccgcgttagcatggaggtggcggctgctaaggggcttcctgtcctcaagtaccacctgctgccgcggaccaagggcttcaccaccgcagtcaagtgcctccgggggacagtcgcagctgtctatgatgtaaccctgaacttcagaggaaacaagaacccgtccctgctggggatcctctacgggaagaagtacgaggcggacatgtgcgtgaggagatttcctctggaagacatcccgctggatgaaaaggaagcagctcagtggcttcataaactgtaccaggagaaggacgcgctccaggagatatataatcagaagggcatgtttccaggggagcagtttaagcctgcccggaggccgtggaccctcctgaacttcctgtcctgggccaccattctcctgtctcccctcttcagttttgtcttgggcgtctttgccagcggatcacctctcctgatcctgactttcttggggtttgtgggagcagcttcctttggagttcgcagactgataggagtaactgagatagaaaaaggctccagctacggaaaccaagagtttaagaaaaaggaataattaatggctgtgactgaacacacgcggccctgacggtggtatccagttaactcaaaaccaacacacagagtgcaggaaaagacaattagaaactatttttcttattaactggtgactaatattaacaaaacttgagccaagagtaaagaattcagaaggcctgtcaggtgaagtcttcagcctcccacagcgcagggtcccagcatctccacgcgcgcccgtgggaggtgggtccggccggagaggcctcccgcggacgccgtctctccagaactccgcttccaagagggagcctttggctgctttctctccttaaacttagatcaaattttttggtttttaatcagttatcttgggaacttaacctggcccctcacctcttctgcaccccccgcccccgaaactgtctcgtaatgaatttctgctgtcctcctgggagtggacggccgggtcccgtcccccgggagcatcgctcggctcagcaccttggctcccagtgggggccccgtggagggcgcccgtagtgataagcacaccggcacgaacgtcaggtccattcctcgaagtcggagccctcactctgccctgtcctggggctggctgagggcgaacgccccacctcactttctagagccctgtctgtcctagctcctatctgaccttgtgtgtaaatacgtacatctgtttttaaagtggatgggcccctgagaactcagtgaaatgcagagttctccatgcacctaaagctcctttgtcgctctcatggctgtcagatcctggtccctccacactgggtgctggggagggaggaccctcggggctaccgcgcgcccccccatcccacagatcaggagccaaggagggagaacagggcagcctgtgggactctaggatgcttcagaagaagcgacggcaccgtcaaccctctgttttttaaaggtggttggagactgttaacactgagctcattgacttctagagattttatttttactggttgatctcttggtggttttcaacttcctgctggaaactagaggtggggcaccccccaccccccagcctcgcactgtgtccttggggagggcccgcccccatcctggccggtgtcactgtggcccggccacccctgagcgcccagctccctacctcctggacgtctctgagagtccaggcagagcagagggcagcgctcggccggtcatgctggctcccttggccttgcagcgagcccctggcccacgccgagcgagggatgcttctccctacagcatgtccactcccccggcatggccaggtggggcccctggggcaatggcagtggtagaacgctcaacttggttgcggtaccatcagcccacctgcatttggctttcgacttgcttgttctaagtcacagcgccctcatctttttagcaaggtaaaaaaaccaaaatgggtgttatctctgatatcttgaaaccagcgttctgaatagaggtaggttgagttttctaggggaaaacaaatggagaaaagaggcatgaagaaaagtaaaccgagaacataattaggcatcgggcctaagtgtcctggggagattggaggggacggcagcgttctgcatgatggaggcgctgccgggccccgggtctgtgggggccgtgctctcagggcgtgtgcgggacgccacctgtgcacacctgctcagagcacggctcctcgcaggggtgaaggggcagaccaacgaaaccagatgagaccaacgacaccatgcgagacacgcttgcagacactgttgttttggaaatgtgcttccctccatctgaaatctcatccctccacccgcccactcgggcagctgtgccgtgggcagggcatgcgctcccctggctgagcaccccagagattctcctgcaccttcctcatgccgcacgctgctcatccgtctccatgtgtgtttagatccatgccattcactgactcactaacacctgcaaaatctttaaggaaaaaagctgaagggtacgaccatgcacatatgtgacctggaaaatgcaaatttagatcttttatgatttaattattattgtttcccatagaagttccctccctttgaaattaatatataatgtataaattctgcactgagccatggcggagctgggcagcccctaggttagagtggagacggaggcccaggcgcaggggtcacacctcatctggtttccttcccatctcacagcttagcttgtgcttctcaacaccaagtctttaagagcaataaaaactacaccatga

SEQ ID NO: 372362 - DNA, 3726 bp, Homo sapiens
atgtggattggaaggacactctgtcagccgctccctgccatcaccacacactcctggagcctctgccaccacggcccgtgctgaccccagagcgagtcaaagccaggagccttcccacggacggctgtcctcagcgaggggccgtgcacccgctcctgagcagcgccatgggcctgctggccttcctgaagacccagttcgtgctgcacctgctggtcggctttgtcttcgtggtgagtggtctggtcatcaacttcgtccagctgtgcacgctggcgctctggccggtcagcaagcagctctaccgccgcctcaactgccgcctcgcctactcactctggagcctagcacaaaactagaagcaacccaagcacctgtcactggagactaattatgcggcacccatacagggaccctctgcggccatcatggagagccttcatcttgcccgtacagttttaagcgaaaaaggaagtatacaacaaagtccataaactggtcatgctgctggagtggtggtcctgcacggagtgtacactgttcacggaccaggccacggtagagcgctttgggaaggagcacgcagtcatcatcctcaaccacaacttcgagatcgacttcctctgtgggtggaccatgtgtgagcgcttcggagtgctggggagctccaaggtcctcgctaagaaggagctgctctacgtgcccctcatcggctggacgtggtactttctggagattgtgttctgcaagcggaagtgggaggaggaccgggacaccgtggtcgaagggctgaggcgcctgtcggactaccccgagtacatgtggtttctcctgtactgcgaggggacgcgcttcacggagaccaagcaccgcgttagcatggaggtggcggctgctaaggggcttcctgtcctcaagtaccacctgctgccgcggaccaagggcttcaccaccgcagtcaagtgcctccgggggacagtcgcagctgtctatgatgtaaccctgaacttcagaggaaacaagaacccgtccctgctggggatcctctacgggaagaagtacgaggcggacatgtgcgtgaggagatttcctctggaagacatcccgctggatgaaaaggaagcagctcagtggcttcataaactgtaccaggagaaggacgcgctccaggagatatataatcagaagggcatgtttccaggggagcagtttaagcctgcccggaggccgtggaccctcctgaacttcctgtcctgggccaccattctcctgtctcccctcttcagttttgtcttgggcgtctttgccagcggatcacctctcctgatcctgactttcttggggtttgtgggagcagcttcctttggagttcgcagactgataggagtaactgagatagaaaaaggctccagctacggaaaccaagagtttaagaaaaaggaataattaatggctgtgactgaacacacgcggccctgacggtggtatccagttaactcaaaaccaacacacagagtgcaggaaaagacaattagaaactatttttcttattaactggtgactaatattaacaaaacttgagccaagagtaaagaattcagaaggcctgtcaggtgaagtcttcagcctcccacagcgcagggtcccagcatctccacgcgcgcccgtgggaggtgggtccggccggagaggcctcccgcggacgccgtctctccagaactccgcttccaagagggagcctttggctgctttctctccttaaacttagatcaaattttttggtttttaatcagttatcttgggaacttaacctggcccctcacctcttctgcaccccccgcccccgaaactgtctcgtaatgaatttctgctgtcctcctgggagtggacggccgggtcccgtcccccgggagcatcgctcggctcagcaccttggctcccagtgggggccccgtggagggcgcccgtagtgataagcacaccggcacgaacgtcaggtccattcctcgaagtcggagccctcactctgccctgtcctggggctggctgagggcgaacgccccacctcactttctagagccctgtctgtcctagctcctatctgaccttgtgtgtaaatacgtacatctgtttttaaagtggatgggcccctgagaactcagtgaaatgcagagttctccatgcacctaaagctcctttgtcgctctcatggctgtcagatcctggtccctccacactgggtgctggggagggaggaccctcggggctaccgcgcgcccccccatcccacagatcaggagccaaggagggagaacagggcagcctgtgggactctaggatgcttcagaagaagcgacggcaccgtcaaccctctgttttttaaaggtggttggagactgttaacactgagctcattgacttctagagattttatttttactggttgatctcttggtggttttcaacttcctgctggaaactagaggtggggcaccccccaccccccagcctcgcactgtgtccttggggagggcccgcccccatcctggccggtgtcactgtggcccggccacccctgagcgcccagctccctacctcctggacgtctctgagagtccaggcagagcagagggcagcgctcggccggtcatgctggctcccttggccttgcagcgagcccctggcccacgccgagcgagggatgcttctccctacagcatgtccactcccccggcatggccaggtggggcccctggggcaatggcagtggtagaacgctcaacttggttgcggtaccatcagcccacctgcatttggctttcgacttgcttgttctaagtcacagcgccctcatctttttagcaaggtaaaaaaaccaaaatgggtgttatctctgatatcttgaaaccagcgttctgaatagaggtaggttgagttttctaggggaaaacaaatggagaaaagaggcatgaagaaaagtaaaccgagaacataattaggcatcgggcctaagtgtcctggggagattggaggggacggcagcgttctgcatgatggaggcgctgccgggccccgggtctgtgggggccgtgctctcagggcgtgtgcgggacgccacctgtgcacacctgctcagagcacggctcctcgcaggggtgaaggggcagaccaacgaaaccagatgagaccaacgacaccatgcgagacacgcttgcagacactgttgttttggaaatgtgcttccctccatctgaaatctcatccctccacccgcccactcgggcagctgtgccgtgggcagggcatgcgctcccctggctgagcaccccagagattctcctgcaccttcctcatgccgcacgctgctcatccgtctccatgtgtgtttagatccatgccattcactgactcactaacacctgcaaaatctttaaggaaaaaagctgaagggtacgaccatgcacatatgtgacctggaaaatgcaaatttagatcttttatgatttaattattattgtttcccatagaagttccctccctttgaaattaatatataatgtataaattctgcactgagccatggcggagctgggcagcccctaggttagagtggagacggaggcccaggcgcaggggtcacacctcatctggtttccttcccatctcacagcttagcttgtgcttctcaacaccaagtctttaagagcaataaaaactacaccatga

SEQ ID NO: 372363 - DNA, 3903 bp, Homo sapiens
cgccgacacatggtcgttcgacttctggcttggcctcttttgtgagtgtggggcctggtcatatcctcttggtcagtgtctctgtgatgatgagaacgggaagacggccacggtgcccaccctggcaggactctctcccctcgctggcgctggctcagctgccgtgagcggccgtaggcactgtcccgggccctcctgtggttgctcccagccatgctgctggctgcttctgccgtcctggcttgcagagactctgggtcatgcggggaagagggcagagtcctcctccctgctcaggcaagagaggatccagcaagatttcttcctccccaccctcctgcccctcccagtctgggcagcagataaaagccagggccccacacttctgccacctcctgctgctcacacactccagccagggacctgcccccggggtccaacaaggacggctgtcctcagcgaggggccgtgcacccgctcctgagcagcgccatgggcctgctggccttcctgaagacccagttcgtgctgcacctgctggtcggctttgtcttcgtggtgagtggtctggtcatcaacttcgtccagctgtgcacgctggcgctctggccggtcagcaagcagctctaccgccgcctcaactgccgcctcgcctactcactctggagccaactggtcatgctgctggagtggtggtcctgcacggagtgtacactgttcacggaccaggccacggtagagcgctttgggaaggagcacgcagtcatcatcctcaaccacaacttcgagatcgacttcctctgtgggtggaccatgtgtgagcgcttcggagtgctggggagctccaaggtcctcgctaagaaggagctgctctacgtgcccctcatcggctggacgtggtactttctggagattgtgttctgcaagcggaagtgggaggaggaccgggacaccgtggtcgaagggctgaggcgcctgtcggactaccccgagtacatgtggtttctcctgtactgcgaggggacgcgcttcacggagaccaagcaccgcgttagcatggaggtggcggctgctaaggggcttcctgtcctcaagtaccacctgctgccgcggaccaagggcttcaccaccgcagtcaagtgcctccgggggacagtcgcagctgtctatgatgtaaccctgaacttcagaggaaacaagaacccgtccctgctggggatcctctacgggaagaagtacgaggcggacatgtgcgtgaggagatttcctctggaagacatcccgctggatgaaaaggaagcagctcagtggcttcataaactgtaccaggagaaggacgcgctccaggagatatataatcagaagggcatgtttccaggggagcagtttaagcctgcccggaggccgtggaccctcctgaacttcctgtcctgggccaccattctcctgtctcccctcttcagttttgtcttgggcgtctttgccagcggatcacctctcctgatcctgactttcttggggtttgtgggagcagcttcctttggagttcgcagactgataggagtaactgagatagaaaaaggctccagctacggaaaccaagagtttaagaaaaaggaataattaatggctgtgactgaacacacgcggccctgacggtggtatccagttaactcaaaaccaacacacagagtgcaggaaaagacaattagaaactatttttcttattaactggtgactaatattaacaaaacttgagccaagagtaaagaattcagaaggcctgtcaggtgaagtcttcagcctcccacagcgcagggtcccagcatctccacgcgcgcccgtgggaggtgggtccggccggagaggcctcccgcggacgccgtctctccagaactccgcttccaagagggagcctttggctgctttctctccttaaacttagatcaaattttttggtttttaatcagttatcttgggaacttaacctggcccctcacctcttctgcaccccccgcccccgaaactgtctcgtaatgaatttctgctgtcctcctgggagtggacggccgggtcccgtcccccgggagcatcgctcggctcagcaccttggctcccagtgggggccccgtggagggcgcccgtagtgataagcacaccggcacgaacgtcaggtccattcctcgaagtcggagccctcactctgccctgtcctggggctggctgagggcgaacgccccacctcactttctagagccctgtctgtcctagctcctatctgaccttgtgtgtaaatacgtacatctgtttttaaagtggatgggcccctgagaactcagtgaaatgcagagttctccatgcacctaaagctcctttgtcgctctcatggctgtcagatcctggtccctccacactgggtgctggggagggaggaccctcggggctaccgcgcgcccccccatcccacagatcaggagccaaggagggagaacagggcagcctgtgggactctaggatgcttcagaagaagcgacggcaccgtcaaccctctgttttttaaaggtggttggagactgttaacactgagctcattgacttctagagattttatttttactggttgatctcttggtggttttcaacttcctgctggaaactagaggtggggcaccccccaccccccagcctcgcactgtgtccttggggagggcccgcccccatcctggccggtgtcactgtggcccggccacccctgagcgcccagctccctacctcctggacgtctctgagagtccaggcagagcagagggcagcgctcggccggtcatgctggctcccttggccttgcagcgagcccctggcccacgccgagcgagggatgcttctccctacagcatgtccactcccccggcatggccaggtggggcccctggggcaatggcagtggtagaacgctcaacttggttgcggtaccatcagcccacctgcatttggctttcgacttgcttgttctaagtcacagcgccctcatctttttagcaaggtaaaaaaaccaaaatgggtgttatctctgatatcttgaaaccagcgttctgaatagaggtaggttgagttttctaggggaaaacaaatggagaaaagaggcatgaagaaaagtaaaccgagaacataattaggcatcgggcctaagtgtcctggggagattggaggggacggcagcgttctgcatgatggaggcgctgccgggccccgggtctgtgggggccgtgctctcagggcgtgtgcgggacgccacctgtgcacacctgctcagagcacggctcctcgcaggggtgaaggggcagaccaacgaaaccagatgagaccaacgacaccatgcgagacacgcttgcagacactgttgttttggaaatgtgcttccctccatctgaaatctcatccctccacccgcccactcgggcagctgtgccgtgggcagggcatgcgctcccctggctgagcaccccagagattctcctgcaccttcctcatgccgcacgctgctcatccgtctccatgtgtgtttagatccatgccattcactgactcactaacacctgcaaaatctttaaggaaaaaagctgaagggtacgaccatgcacatatgtgacctggaaaatgcaaatttagatcttttatgatttaattattattgtttcccatagaagttccctccctttgaaattaatatataatgtataaattctgcactgagccatggcggagctgggcagcccctaggttagagtggagacggaggcccaggcgcaggggtcacacctcatctggtttccttcccatctcacagcttagcttgtgcttctcaacaccaagtctttaagagcaataaaaactacaccatga

SEQ ID NO: 372364 - DNA, 3594 bp, Homo sapiens
aggtccattgtgcagtcatcaggccctgggagctttccacatccctccacctcccacccaacatcaccactctccggccagtgagaccgtcacagcaccccagaggagacaaattctggagctcagagagctggggacggctgtcctcagcgaggggccgtgcacccgctcctgagcagcgccatgggcctgctggccttcctgaagacccagttcgtgctgcacctgctggtcggctttgtcttcgtggtgagtggtctggtcatcaacttcgtccagctgtgcacgctggcgctctggccggtcagcaagcagctctaccgccgcctcaactgccgcctcgcctactcactctggagccaactggtcatgctgctggagtggtggtcctgcacggagtgtacactgttcacggaccaggccacggtagagcgctttgggaaggagcacgcagtcatcatcctcaaccacaacttcgagatcgacttcctctgtgggtggaccatgtgtgagcgcttcggagtgctggggagctccaaggtcctcgctaagaaggagctgctctacgtgcccctcatcggctggacgtggtactttctggagattgtgttctgcaagcggaagtgggaggaggaccgggacaccgtggtcgaagggctgaggcgcctgtcggactaccccgagtacatgtggtttctcctgtactgcgaggggacgcgcttcacggagaccaagcaccgcgttagcatggaggtggcggctgctaaggggcttcctgtcctcaagtaccacctgctgccgcggaccaagggcttcaccaccgcagtcaagtgcctccgggggacagtcgcagctgtctatgatgtaaccctgaacttcagaggaaacaagaacccgtccctgctggggatcctctacgggaagaagtacgaggcggacatgtgcgtgaggagatttcctctggaagacatcccgctggatgaaaaggaagcagctcagtggcttcataaactgtaccaggagaaggacgcgctccaggagatatataatcagaagggcatgtttccaggggagcagtttaagcctgcccggaggccgtggaccctcctgaacttcctgtcctgggccaccattctcctgtctcccctcttcagttttgtcttgggcgtctttgccagcggatcacctctcctgatcctgactttcttggggtttgtgggagcagcttcctttggagttcgcagactgataggagtaactgagatagaaaaaggctccagctacggaaaccaagagtttaagaaaaaggaataattaatggctgtgactgaacacacgcggccctgacggtggtatccagttaactcaaaaccaacacacagagtgcaggaaaagacaattagaaactatttttcttattaactggtgactaatattaacaaaacttgagccaagagtaaagaattcagaaggcctgtcaggtgaagtcttcagcctcccacagcgcagggtcccagcatctccacgcgcgcccgtgggaggtgggtccggccggagaggcctcccgcggacgccgtctctccagaactccgcttccaagagggagcctttggctgctttctctccttaaacttagatcaaattttttggtttttaatcagttatcttgggaacttaacctggcccctcacctcttctgcaccccccgcccccgaaactgtctcgtaatgaatttctgctgtcctcctgggagtggacggccgggtcccgtcccccgggagcatcgctcggctcagcaccttggctcccagtgggggccccgtggagggcgcccgtagtgataagcacaccggcacgaacgtcaggtccattcctcgaagtcggagccctcactctgccctgtcctggggctggctgagggcgaacgccccacctcactttctagagccctgtctgtcctagctcctatctgaccttgtgtgtaaatacgtacatctgtttttaaagtggatgggcccctgagaactcagtgaaatgcagagttctccatgcacctaaagctcctttgtcgctctcatggctgtcagatcctggtccctccacactgggtgctggggagggaggaccctcggggctaccgcgcgcccccccatcccacagatcaggagccaaggagggagaacagggcagcctgtgggactctaggatgcttcagaagaagcgacggcaccgtcaaccctctgttttttaaaggtggttggagactgttaacactgagctcattgacttctagagattttatttttactggttgatctcttggtggttttcaacttcctgctggaaactagaggtggggcaccccccaccccccagcctcgcactgtgtccttggggagggcccgcccccatcctggccggtgtcactgtggcccggccacccctgagcgcccagctccctacctcctggacgtctctgagagtccaggcagagcagagggcagcgctcggccggtcatgctggctcccttggccttgcagcgagcccctggcccacgccgagcgagggatgcttctccctacagcatgtccactcccccggcatggccaggtggggcccctggggcaatggcagtggtagaacgctcaacttggttgcggtaccatcagcccacctgcatttggctttcgacttgcttgttctaagtcacagcgccctcatctttttagcaaggtaaaaaaaccaaaatgggtgttatctctgatatcttgaaaccagcgttctgaatagaggtaggttgagttttctaggggaaaacaaatggagaaaagaggcatgaagaaaagtaaaccgagaacataattaggcatcgggcctaagtgtcctggggagattggaggggacggcagcgttctgcatgatggaggcgctgccgggccccgggtctgtgggggccgtgctctcagggcgtgtgcgggacgccacctgtgcacacctgctcagagcacggctcctcgcaggggtgaaggggcagaccaacgaaaccagatgagaccaacgacaccatgcgagacacgcttgcagacactgttgttttggaaatgtgcttccctccatctgaaatctcatccctccacccgcccactcgggcagctgtgccgtgggcagggcatgcgctcccctggctgagcaccccagagattctcctgcaccttcctcatgccgcacgctgctcatccgtctccatgtgtgtttagatccatgccattcactgactcactaacacctgcaaaatctttaaggaaaaaagctgaagggtacgaccatgcacatatgtgacctggaaaatgcaaatttagatcttttatgatttaattattattgtttcccatagaagttccctccctttgaaattaatatataatgtataaattctgcactgagccatggcggagctgggcagcccctaggttagagtggagacggaggcccaggcgcaggggtcacacctcatctggtttccttcccatctcacagcttagcttgtgcttctcaacaccaagtctttaagagcaataaaaactacaccatga

SEQ ID NO: 372365 - DNA, 3627 bp, Homo sapiens
cggaacggcagggccgcctttaggcttacatccctggaactcccacctccacagacccgtccgggtgctgaaagtccacggatgctatccctggtcaaatcagaggcttgtccagccggaagccctgagggcagctgttcccactggctctgctgaccttgtgccttggacggctgtcctcagcgaggggccgtgcacccgctcctgagcagcgccatgggcctgctggccttcctgaagacccagttcgtgctgcacctgctggtcggctttgtcttcgtggtgagtggtctggtcatcaacttcgtccagctgtgcacgctggcgctctggccggtcagcaagcagctctaccgccgcctcaactgccgcctcgcctactcactctggagccaactggtcatgctgctggagtggtggtcctgcacggagtgtacactgttcacggaccaggccacggtagagcgctttgggaaggagcacgcagtcatcatcctcaaccacaacttcgagatcgacttcctctgtgggtggaccatgtgtgagcgcttcggagtgctggggagctccaaggtcctcgctaagaaggagctgctctacgtgcccctcatcggctggacgtggtactttctggagattgtgttctgcaagcggaagtgggaggaggaccgggacaccgtggtcgaagggctgaggcgcctgtcggactaccccgagtacatgtggtttctcctgtactgcgaggggacgcgcttcacggagaccaagcaccgcgttagcatggaggtggcggctgctaaggggcttcctgtcctcaagtaccacctgctgccgcggaccaagggcttcaccaccgcagtcaagtgcctccgggggacagtcgcagctgtctatgatgtaaccctgaacttcagaggaaacaagaacccgtccctgctggggatcctctacgggaagaagtacgaggcggacatgtgcgtgaggagatttcctctggaagacatcccgctggatgaaaaggaagcagctcagtggcttcataaactgtaccaggagaaggacgcgctccaggagatatataatcagaagggcatgtttccaggggagcagtttaagcctgcccggaggccgtggaccctcctgaacttcctgtcctgggccaccattctcctgtctcccctcttcagttttgtcttgggcgtctttgccagcggatcacctctcctgatcctgactttcttggggtttgtgggagcagcttcctttggagttcgcagactgataggagtaactgagatagaaaaaggctccagctacggaaaccaagagtttaagaaaaaggaataattaatggctgtgactgaacacacgcggccctgacggtggtatccagttaactcaaaaccaacacacagagtgcaggaaaagacaattagaaactatttttcttattaactggtgactaatattaacaaaacttgagccaagagtaaagaattcagaaggcctgtcaggtgaagtcttcagcctcccacagcgcagggtcccagcatctccacgcgcgcccgtgggaggtgggtccggccggagaggcctcccgcggacgccgtctctccagaactccgcttccaagagggagcctttggctgctttctctccttaaacttagatcaaattttttggtttttaatcagttatcttgggaacttaacctggcccctcacctcttctgcaccccccgcccccgaaactgtctcgtaatgaatttctgctgtcctcctgggagtggacggccgggtcccgtcccccgggagcatcgctcggctcagcaccttggctcccagtgggggccccgtggagggcgcccgtagtgataagcacaccggcacgaacgtcaggtccattcctcgaagtcggagccctcactctgccctgtcctggggctggctgagggcgaacgccccacctcactttctagagccctgtctgtcctagctcctatctgaccttgtgtgtaaatacgtacatctgtttttaaagtggatgggcccctgagaactcagtgaaatgcagagttctccatgcacctaaagctcctttgtcgctctcatggctgtcagatcctggtccctccacactgggtgctggggagggaggaccctcggggctaccgcgcgcccccccatcccacagatcaggagccaaggagggagaacagggcagcctgtgggactctaggatgcttcagaagaagcgacggcaccgtcaaccctctgttttttaaaggtggttggagactgttaacactgagctcattgacttctagagattttatttttactggttgatctcttggtggttttcaacttcctgctggaaactagaggtggggcaccccccaccccccagcctcgcactgtgtccttggggagggcccgcccccatcctggccggtgtcactgtggcccggccacccctgagcgcccagctccctacctcctggacgtctctgagagtccaggcagagcagagggcagcgctcggccggtcatgctggctcccttggccttgcagcgagcccctggcccacgccgagcgagggatgcttctccctacagcatgtccactcccccggcatggccaggtggggcccctggggcaatggcagtggtagaacgctcaacttggttgcggtaccatcagcccacctgcatttggctttcgacttgcttgttctaagtcacagcgccctcatctttttagcaaggtaaaaaaaccaaaatgggtgttatctctgatatcttgaaaccagcgttctgaatagaggtaggttgagttttctaggggaaaacaaatggagaaaagaggcatgaagaaaagtaaaccgagaacataattaggcatcgggcctaagtgtcctggggagattggaggggacggcagcgttctgcatgatggaggcgctgccgggccccgggtctgtgggggccgtgctctcagggcgtgtgcgggacgccacctgtgcacacctgctcagagcacggctcctcgcaggggtgaaggggcagaccaacgaaaccagatgagaccaacgacaccatgcgagacacgcttgcagacactgttgttttggaaatgtgcttccctccatctgaaatctcatccctccacccgcccactcgggcagctgtgccgtgggcagggcatgcgctcccctggctgagcaccccagagattctcctgcaccttcctcatgccgcacgctgctcatccgtctccatgtgtgtttagatccatgccattcactgactcactaacacctgcaaaatctttaaggaaaaaagctgaagggtacgaccatgcacatatgtgacctggaaaatgcaaatttagatcttttatgatttaattattattgtttcccatagaagttccctccctttgaaattaatatataatgtataaattctgcactgagccatggcggagctgggcagcccctaggttagagtggagacggaggcccaggcgcaggggtcacacctcatctggtttccttcccatctcacagcttagcttgtgcttctcaacaccaagtctttaagagcaataaaaactacaccatga

SEQ ID NO: 372366 - DNA, 3523 bp, Homo sapiens
atttggtcacacggcgtctctccagtcctgcgcaagcacgttgacatgtgtgcctttcactttcaggcttgtccagccggaagccctgagggcagctgttcccactggctctgctgaccttgtgccttggacggctgtcctcagcgaggggccgtgcacccgctcctgagcagcgccatgggcctgctggccttcctgaagacccagttcgtgctgcacctgctggtcggctttgtcttcgtggtgagtggtctggtcatcaacttcgtccagctgtgcacgctggcgctctggccggtcagcaagcagctctaccgccgcctcaactgccgcctcgcctactcactctggagccaactggtcatgctgctggagtggtggtcctgcacggagtgtacactgttcacggaccaggccacggtagagcgctttgggaaggagcacgcagtcatcatcctcaaccacaacttcgagatcgacttcctctgtgggtggaccatgtgtgagcgcttcggagtgctggggagctccaaggtcctcgctaagaaggagctgctctacgtgcccctcatcggctggacgtggtactttctggagattgtgttctgcaagcggaagtgggaggaggaccgggacaccgtggtcgaagggctgaggcgcctgtcggactaccccgagtacatgtggtttctcctgtactgcgaggggacgcgcttcacggagaccaagcaccgcgttagcatggaggtggcggctgctaaggggcttcctgtcctcaagtaccacctgctgccgcggaccaagggcttcaccaccgcagtcaagtgcctccgggggacagtcgcagctgtctatgatgtaaccctgaacttcagaggaaacaagaacccgtccctgctggggatcctctacgggaagaagtacgaggcggacatgtgcgtgaggagatttcctctggaagacatcccgctggatgaaaaggaagcagctcagtggcttcataaactgtaccaggagaaggacgcgctccaggagatatataatcagaagggcatgtttccaggggagcagtttaagcctgcccggaggccgtggaccctcctgaacttcctgtcctgggccaccattctcctgtctcccctcttcagttttgtcttgggcgtctttgccagcggatcacctctcctgatcctgactttcttggggtttgtgggagcagcttcctttggagttcgcagactgataggagtaactgagatagaaaaaggctccagctacggaaaccaagagtttaagaaaaaggaataattaatggctgtgactgaacacacgcggccctgacggtggtatccagttaactcaaaaccaacacacagagtgcaggaaaagacaattagaaactatttttcttattaactggtgactaatattaacaaaacttgagccaagagtaaagaattcagaaggcctgtgggtccggccggagaggcctcccgcggacgccgtctctccagaactccgcttccaagagggagcctttggctgctttctctccttaaacttagatcaaattttttggtttttaatcagttatcttgggaacttaacctggcccctcacctcttctgcaccccccgcccccgaaactgtctcgtaatgaatttctgctgtcctcctgggagtggacggccgggtcccgtcccccgggagcatcgctcggctcagcaccttggctcccagtgggggccccgtggagggcgcccgtagtgataagcacaccggcacgaacgtcaggtccattcctcgaagtcggagccctcactctgccctgtcctggggctggctgagggcgaacgccccacctcactttctagagccctgtctgtcctagctcctatctgaccttgtgtgtaaatacgtacatctgtttttaaagtggatgggcccctgagaactcagtgaaatgcagagttctccatgcacctaaagctcctttgtcgctctcatggctgtcagatcctggtccctccacactgggtgctggggagggaggaccctcggggctaccgcgcgcccccccatcccacagatcaggagccaaggagggagaacagggcagcctgtgggactctaggatgcttcagaagaagcgacggcaccgtcaaccctctgttttttaaaggtggttggagactgttaacactgagctcattgacttctagagattttatttttactggttgatctcttggtggttttcaacttcctgctggaaactagaggtggggcaccccccaccccccagcctcgcactgtgtccttggggagggcccgcccccatcctggccggtgtcactgtggcccggccacccctgagcgcccagctccctacctcctggacgtctctgagagtccaggcagagcagagggcagcgctcggccggtcatgctggctcccttggccttgcagcgagcccctggcccacgccgagcgagggatgcttctccctacagcatgtccactcccccggcatggccaggtggggcccctggggcaatggcagtggtagaacgctcaacttggttgcggtaccatcagcccacctgcatttggctttcgacttgcttgttctaagtcacagcgccctcatctttttagcaaggtaaaaaaaccaaaatgggtgttatctctgatatcttgaaaccagcgttctgaatagaggtaggttgagttttctaggggaaaacaaatggagaaaagaggcatgaagaaaagtaaaccgagaacataattaggcatcgggcctaagtgtcctggggagattggaggggacggcagcgttctgcatgatggaggcgctgccgggccccgggtctgtgggggccgtgctctcagggcgtgtgcgggacgccacctgtgcacacctgctcagagcacggctcctcgcaggggtgaaggggcagaccaacgaaaccagatgagaccaacgacaccatgcgagacacgcttgcagacactgttgttttggaaatgtgcttccctccatctgaaatctcatccctccacccgcccactcgggcagctgtgccgtgggcagggcatgcgctcccctggctgagcaccccagagattctcctgcaccttcctcatgccgcacgctgctcatccgtctccatgtgtgtttagatccatgccattcactgactcactaacacctgcaaaatctttaaggaaaaaagctgaagggtacgaccatgcacatatgtgacctggaaaatgcaaatttagatcttttatgatttaattattattgtttcccatagaagttccctccctttgaaattaatatataatgtataaattctgcactgagccatggcggagctgggcagcccctaggttagagtggagacggaggcccaggcgcaggggtcacacctcatctggtttccttcccatctcacagcttagcttgtgcttctcaacaccaagtctttaagagcaataaaaactacaccatga

SEQ ID NO: 372367 - DNA, 3295 bp, Homo sapiens
gctccctgaccatcccaggaggaggggtcctaccagtgccaacgccctccccctgtccgcagaactggtcatgctgctggagtggtggtcctgcacggagtgtacactgttcacggaccaggccacggtagagcgctttgggaaggagcacgcagtcatcatcctcaaccacaacttcgagatcgacttcctctgtgggtggaccatgtgtgagcgcttcggagtgctggggagctccaaggtcctcgctaagaaggagctgctctacgtgcccctcatcggctggacgtggtactttctggagattgtgttctgcaagcggaagtgggaggaggaccgggacaccgtggtcgaagggctgaggcgcctgtcggactaccccgagtacatgtggtttctcctgtactgcgaggggacgcgcttcacggagaccaagcaccgcgttagcatggaggtggcggctgctaaggggcttcctgtcctcaagtaccacctgctgccgcggaccaagggcttcaccaccgcagtcaagtgcctccgggggacagtcgcagctgtctatgatgtaaccctgaacttcagaggaaacaagaacccgtccctgctggggatcctctacgggaagaagtacgaggcggacatgtgcgtgaggagatttcctctggaagacatcccgctggatgaaaaggaagcagctcagtggcttcataaactgtaccaggagaaggacgcgctccaggagatatataatcagaagggcatgtttccaggggagcagtttaagcctgcccggaggccgtggaccctcctgaacttcctgtcctgggccaccattctcctgtctcccctcttcagttttgtcttgggcgtctttgccagcggatcacctctcctgatcctgactttcttggggtttgtgggagcagcttcctttggagttcgcagactgataggagtaactgagatagaaaaaggctccagctacggaaaccaagagtttaagaaaaaggaataattaatggctgtgactgaacacacgcggccctgacggtggtatccagttaactcaaaaccaacacacagagtgcaggaaaagacaattagaaactatttttcttattaactggtgactaatattaacaaaacttgagccaagagtaaagaattcagaaggcctgtcaggtgaagtcttcagcctcccacagcgcagggtcccagcatctccacgcgcgcccgtgggaggtgggtccggccggagaggcctcccgcggacgccgtctctccagaactccgcttccaagagggagcctttggctgctttctctccttaaacttagatcaaattttttggtttttaatcagttatcttgggaacttaacctggcccctcacctcttctgcaccccccgcccccgaaactgtctcgtaatgaatttctgctgtcctcctgggagtggacggccgggtcccgtcccccgggagcatcgctcggctcagcaccttggctcccagtgggggccccgtggagggcgcccgtagtgataagcacaccggcacgaacgtcaggtccattcctcgaagtcggagccctcactctgccctgtcctggggctggctgagggcgaacgccccacctcactttctagagccctgtctgtcctagctcctatctgaccttgtgtgtaaatacgtacatctgtttttaaagtggatgggcccctgagaactcagtgaaatgcagagttctccatgcacctaaagctcctttgtcgctctcatggctgtcagatcctggtccctccacactgggtgctggggagggaggaccctcggggctaccgcgcgcccccccatcccacagatcaggagccaaggagggagaacagggcagcctgtgggactctaggatgcttcagaagaagcgacggcaccgtcaaccctctgttttttaaaggtggttggagactgttaacactgagctcattgacttctagagattttatttttactggttgatctcttggtggttttcaacttcctgctggaaactagaggtggggcaccccccaccccccagcctcgcactgtgtccttggggagggcccgcccccatcctggccggtgtcactgtggcccggccacccctgagcgcccagctccctacctcctggacgtctctgagagtccaggcagagcagagggcagcgctcggccggtcatgctggctcccttggccttgcagcgagcccctggcccacgccgagcgagggatgcttctccctacagcatgtccactcccccggcatggccaggtggggcccctggggcaatggcagtggtagaacgctcaacttggttgcggtaccatcagcccacctgcatttggctttcgacttgcttgttctaagtcacagcgccctcatctttttagcaaggtaaaaaaaccaaaatgggtgttatctctgatatcttgaaaccagcgttctgaatagaggtaggttgagttttctaggggaaaacaaatggagaaaagaggcatgaagaaaagtaaaccgagaacataattaggcatcgggcctaagtgtcctggggagattggaggggacggcagcgttctgcatgatggaggcgctgccgggccccgggtctgtgggggccgtgctctcagggcgtgtgcgggacgccacctgtgcacacctgctcagagcacggctcctcgcaggggtgaaggggcagaccaacgaaaccagatgagaccaacgacaccatgcgagacacgcttgcagacactgttgttttggaaatgtgcttccctccatctgaaatctcatccctccacccgcccactcgggcagctgtgccgtgggcagggcatgcgctcccctggctgagcaccccagagattctcctgcaccttcctcatgccgcacgctgctcatccgtctccatgtgtgtttagatccatgccattcactgactcactaacacctgcaaaatctttaaggaaaaaagctgaagggtacgaccatgcacatatgtgacctggaaaatgcaaatttagatcttttatgatttaattattattgtttcccatagaagttccctccctttgaaattaatatataatgtataaattctgcactgagccatggcggagctgggcagcccctaggttagagtggagacggaggcccaggcgcaggggtcacacctcatctggtttccttcccatctcacagcttagcttgtgcttctcaacaccaagtctttaagagcaataaaaactacaccatga

SEQ ID NO: 372368 - DNA, 3705 bp, Homo sapiens
tctatgaaaccaacatacatggcgtttgcatcacagttggagtcagatgtgagcccggagggcaggtgtctggcttgtccagccggaagccctgagggcagctgttcccactggctctgctgaccttgtgccttggacggctgtcctcagcgaggggccgtgcacccgctcctgagcagcgccatgggcctgctggccttcctgaagacccagttcgtgctgcacctgctggtcggctttgtcttcgtggtgagtggtctggtcatcaacttcgtccagctgtgcacgctggcgctctggccggtcagcaagcagctctaccgccgcctcaactgccgcctcgcctactcactctggagccaactggtcatgctgctggagtggtggtcctgcacggagtgtacactgttcacggaccaggccacggtagagcgctttgggaaggagcacgcagtcatcatcctcaaccacaacttcgagatcgacttcctctgtgggtggaccatgtgtgagcgcttcggagtgctggggagctccaaggtcctcgctaagaaggagctgctctacgtgcccctcatcggctggacgtggtactttctggagattgtgttctgcaagcggaagtgggaggaggaccgggacaccgtggtcgaagggctgaggcgcctgtcggactaccccgagtacatgtggtttctcctgtactgcgaggggacgcgcttcacggagaccaagcaccgcgttagcatggaggtggcggctgctaaggggcttcctgtcctcaagtaccacctgctgccgcggaccaagggcttcaccaccgcagtcaagtgcctccgggggacagtcgcagctgtctatgatgtaaccctgaacttcagaggaaacaagaacccgtccctgctggggatcctctacgggaagaagtacgaggcggacatgtgcgtgaggagatttcctctggaagacatcccgctggatgaaaaggaagcagctcagtggcttcataaactgtaccaggagaaggacgcgctccaggagatatataatcagaagggcatgtttccaggggagcagtttaagcctgcccggaggccgtggaccctcctgaacttcctgtcctgggccaccattctcctgtctcccctcttcagttttgtcttgggcgtctttgccagcggatcacctctcctgatcctgactttcttggggtttgtgggagcagcttcctttggagttcgcagactgataggagtaactgagatagaaaaaggctccagctacggaaaccaagagtttaagaaaaaggaataattaatggctgtgactgaacacacgcggccctgacggtggtatccagttaactcaaaaccaacacacagagtgcaggaaaagacaattagaaactatttttcttattaactggtgactaatattaacaaaacttgagccaagagtaaagaattcagaaggcctgtcaggtgaagtcttcagcctcccacagcgcagggtcccagcatctccacgcgcgcccgtgggaggtgggtccggccggagaggcctcccgcggacgccgtctctccagaactccgcttccaagagggagcctttggctgctttctctccttaaacttagatcaaattttttggtttttaatcagttatcttgggaacttaacctggcccctcacctcttctgcaccccccgcccccgaaactgtctcgtaatgaatttctgctgtcctcctgggagtggacggccgggtcccgtcccccgggagcatcgctcggctcagcaccttggctcccagtgggggccccgtggagggcgcccgtagtgataagcacaccggcacgaacgtcaggtccattcctcgaagtcggagccctcactctgccctgtcctggggctggctgagggcgaacgccccacctcactttctagagccctgtctgtcctagctcctatctgaccttgtgtgtaaatacgtacatctgtttttaaagtggatgggcccctgagaactcagtgaaatgcagagttctccatgcacctaaagctcctttgtcgctctcatggctgtcagatcctggtccctccacactgggtgctggggagggaggaccctcggggctaccgcgcgcccccccatcccacagatcaggagccaaggagggagaacagggcagcctgtgggactctaggatgcttcagaagaagcgacggcaccgtcaaccctctgttttttaaaggtggttggagactgttaacactgagctcattgacttctagagattttatttttactggttgatctcttggtggttttcaacttcctgctggaaactagaggtggggcaccccccaccccccagcctcgcactgtgtccttggggagggcccgcccccatcctggccggtgtcactgtggcccggccacccctgagcgcccagctccctacctcctggacgtctctgagagtccaggcagagcagagggcagcgctcggccggtcatgctggctcccttggccttgcagcgagcccctggcccacgccgagcgagggatgcttctccctacagcatgtccactcccccggcatggccaggtggggcccctggggcaatggcagtggtagaacgctcaacttggttgcggtaccatcagcccacctgcatttggctttcgacttgcttgttctaagtcacagcgccctcatctttttagcaaggtaaaaaaaccaaaatgggtgttatctctgatatcttgaaaccagcgttctgaatagaggtaggttgagttttctaggggaaaacaaatggagaaaagaggcatgaagaaaagtaaaccgagaacataattaggcatcgggcctaagtgtcctggggagattggaggggacggcagcgttctgcatgatggaggcgctgccgggccccgggtctgtgggggccgtgctctcagggcgtgtgcgggacgccacctgtgcacacctgctcagagcacggctcctcgcaggggtgaaggggcagaccaacgaaaccagatgagaccaacgacaccatgcgagacacgcttgcagacactgttgttttggaaatgtgcttccctccatctgaaatctcatccctccacccgcccactcgggcagctgtgccgtgggcagggcatgcgctcccctggctgagcaccccagagattctcctgcaccttcctcatgccgcacgctgctcatccgtctccatgtgtgtttagatccatgccattcactgactcactaacacctgcaaaatctttaaggaaaaaagctgaagggtacgaccatgcacatatgtgacctggaaaatgcaaatttagatcttttatgatttaattattattgtttcccatagaagttccctccctttgaaattaatatataatgtataaattctgcactgagccatggcggagctgggcagcccctaggttagagtggagacggaggcccaggcgcaggggtcacacctcatctggtttccttcccatctcacagcttagcttgtgcttctcaacaccaagtctttaagagcaataaaaactacaccatgaatgtttgaattttttttttttgggggggggagggtggattttgcttttcatccagaaggaaaaggggaggagagctcctttacattttttaaattaaattcataaatccca

SEQ ID NO: 372369 - DNA, 4161 bp, Homo sapiens
tctatgaaaccaacatacatggcgtttgcatcacagttggagtcagatgtgagcccggagggcaggtgtctggcttgtccagccggaagccctgagggcagctgttcccactggctctgctgaccttgtgccttggacggctgtcctcagcgaggggccgtgcacccgctcctgagcagcgccatgggcctgctggccttcctgaagacccagttcgtgctgcacctgctggtcggctttgtcttcgtggtgagtggtctggtcatcaacttcgtccagctgtgcacgctggcgctctggccggtcagcaagcagctctaccgccgcctcaactgccgcctcgcctactcactctggagccaactggtcatgctgctggagtggtggtcctgcacggagtgtacactgttcacggaccaggccacggtagagcgctttgggaaggagcacgcagtcatcatcctcaaccacaacttcgagatcgacttcctctgtgggtggaccatgtgtgagcgcttcggagtgctggggagctccaaggtcctcgctaagaaggagctgctctacgtgcccctcatcggctggacgtggtactttctggagattgtgttctgcaagcggaagtgggaggaggaccgggacaccgtggtcgaagggctgaggcgcctgtcggactaccccgagtacatgtggtttctcctgtactgcgaggggacgcgcttcacggagaccaagcaccgcgttagcatggaggtggcggctgctaaggggcttcctgtcctcaagtaccacctgctgccgcggaccaagggcttcaccaccgcagtcaagtgcctccgggggacagtcgcagctgtctatgatgtaaccctgaacttcagaggaaacaagaacccgtccctgctggggatcctctacgggaagaagtacgaggcggacatgtgcgtgaggagatttcctctggaagacatcccgctggatgaaaaggaagcagctcagtggcttcataaactgtaccaggagaaggacgcgctccaggagatatataatcagaagggcatgtttccaggggagcagtttaagcctgcccggaggccgtggaccctcctgaacttcctgtcctgggccaccattctcctgtctcccctcttcagttttgtcttgggcgtctttgccagcggatcacctctcctgatcctgactttcttggggtttgtgggagcagcttcctttggagttcgcagactgataggagtaactgagatagaaaaaggctccagctacggaaaccaagagtttaagaaaaaggaataattaatggctgtgactgaacacacgcggccctgacggtggtatccagttaactcaaaaccaacacacagagtgcaggaaaagacaattagaaactatttttcttattaactggtgactaatattaacaaaacttgagccaagagtaaagaattcagaaggcctgtcaggtgaagtcttcagcctcccacagcgcagggtcccagcatctccacgcgcgcccgtgggaggtgggtccggccggagaggcctcccgcggacgccgtctctccagaactccgcttccaagagggagcctttggctgctttctctccttaaacttagatcaaattttttggtttttaatcagttatcttgggaacttaacctggcccctcacctcttctgcaccccccgcccccgaaactgtctcgtaatgaatttctgctgtcctcctgggagtggacggccgggtcccgtcccccgggagcatcgctcggctcagcaccttggctcccagtgggggccccgtggagggcgcccgtagtgataagcacaccggcacgaacgtcaggtccattcctcgaagtcggagccctcactctgccctgtcctggggctggctgagggcgaacgccccacctcactttctagagccctgtctgtcctagctcctatctgaccttgtgtgtaaatacgtacatctgtttttaaagtggatgggcccctgagaactcagtgaaatgcagagttctccatgcacctaaagctcctttgtcgctctcatggctgtcagatcctggtccctccacactgggtgctggggagggaggaccctcggggctaccgcgcgcccccccatcccacagatcaggagccaaggagggagaacagggcagcctgtgggactctaggatgcttcagaagaagcgacggcaccgtcaaccctctgttttttaaaggtggttggagactgttaacactgagctcattgacttctagagattttatttttactggttgatctcttggtggttttcaacttcctgctggaaactagaggtggggcaccccccaccccccagcctcgcactgtgtccttggggagggcccgcccccatcctggccggtgtcactgtggcccggccacccctgagcgcccagctccctacctcctggacgtctctgagagtccaggcagagcagagggcagcgctcggccggtcatgctggctcccttggccttgcagcgagcccctggcccacgccgagcgagggatgcttctccctacagcatgtccactcccccggcatggccaggtggggcccctggggcaatggcagtggtagaacgctcaacttggttgcggtaccatcagcccacctgcatttggctttcgacttgcttgttctaagtcacagcgccctcatctttttagcaaggtaaaaaaaccaaaatgggtgttatctctgatatcttgaaaccagcgttctgaatagaggtaggttgagttttctaggggaaaacaaatggagaaaagaggcatgaagaaaagtaaaccgagaacataattaggcatcgggcctaagtgtcctggggagattggaggggacggcagcgttctgcatgatggaggcgctgccgggccccgggtctgtgggggccgtgctctcagggcgtgtgcgggacgccacctgtgcacacctgctcagagcacggctcctcgcaggggtgaaggggcagaccaacgaaaccagatgagaccaacgacaccatgcgagacacgcttgcagacactgttgttttggaaatgtgcttccctccatctgaaatctcatccctccacccgcccactcgggcagctgtgccgtgggcagggcatgcgctcccctggctgagcaccccagagattctcctgcaccttcctcatgccgcacgctgctcatccgtctccatgtgtgtttagatccatgccattcactgactcactaacacctgcaaaatctttaaggaaaaaagctgaagggtacgaccatgcacatatgtgacctggaaaatgcaaatttagatcttttatgatttaattattattgtttcccatagaagttccctccctttgaaattaatatataatgtataaattctgcactgagccatggcggagctgggcagcccctaggttagagtggagacggaggcccaggcgcaggggtcacacctcatctggtttccttcccatctcacagcttagcttgtgcttctcaacaccaagtctttaagagcaataaaaactacaccatgaatgtttgaattttttttttttgggggggggagggtggattttgcttttcatccagaaggaaaaggggaggagagctcctttacattttttaaattaaattcataaatcccagaacagtcttttttttttctttttcctttacaccctacttctgagcttaattcagttgatgttatgtccaaattcaggctgagtgctcaggctgaagcaactctgtagcccacagtccgtgctggccactgtcggggtgaggcacattctaggcctggcatcgctgatgccctctgcacccagtccttgagccaggccgaggacaggaagggcattgctggcctgtagctcctgttacccacccagagccaggcgccacactggaggctcccaggcgggagggcccaggcccacccacgggcgtctggccggtcaagctcccagcctgggccgggtctcctggggacgccgtctggcctcccagcttaggcccaggtgccaggtgtcatggggtctcctgcccatttcccaaggatgccattgctgtcttcatcgcttcccccgtgtgagacactg

SEQ ID NO: 372370 - DNA, 1725 bp, Homo sapiens
cgccgacacatggtcgttcgacttctggcttggcctcttttgtgagtgtggggcctggtcatatcctcttggtcagtgtctctgtgatgatgagaacgggaagacggccacggtgcccaccctggcaggactctctcccctcgctggcgctggctcagctgccgtgagcggccgtaggcactgtcccgggccctcctgtggttgctcccagccatgctgctggctgcttctgccgtcctggcttgcagagactctgggtcatgcggggaagagggcagagtcctcctccctgctcaggcaagagaggatccagcaagatttcttcctccccaccctcctgcccctcccagtctgggcagcagataaaagccagggccccacacttctgccacctcctgctgctcacacactccagccagggacctgcccccggggtccaacaaggacggctgtcctcagcgaggggccgtgcacccgctcctgagcagcgccatgggcctgctggccttcctgaagacccagttcgtgctgcacctgctggtcggctttgtcttcgtggtgagtggtctggtcatcaacttcgtccagctgtgcacgctggcgctctggccggtcagcaagcagctctaccgccgcctcaactgccgcctcgcctactcactctggagccaactggtcatgctgctggagtggtggtcctgcacggagtgtacactgttcacggaccaggccacggtagagcgctttgggaaggagcacgcagtcatcatcctcaaccacaacttcgagatcgacttcctctgtgggtggaccatgtgtgagcgcttcggagtgctggggagctccaaggtcctcgctaagaaggagctgctctacgtgcccctcatcggctggacgtggtactttctggagattgtgttctgcaagcggaagtgggaggaggaccgggacaccgtggtcgaagggctgaggcgcctgtcggactaccccgagtacatgtggtttctcctgtactgcgaggggacgcgcttcacggagaccaagcaccgcgttagcatggaggtggcggctgctaaggggcttcctgtcctcaagtaccacctgctgccgcggaccaagggcttcaccaccgcagtcaagtgcctccgggggacagtcgcagctgtctatgatgtaaccctgaacttcagaggaaacaagaacccgtccctgctggggatcctctacgggaagaagtacgaggcggacatgtgcgtgaggagatttcctctggaagacatcccgctggatgaaaaggaagcagctcagtggcttcataaactgtaccaggagaaggacgcgctccaggagatatataatcagaagggcatgtttccaggggagcagtttaagcctgcccggaggccgtggaccctcctgaacttcctgtcctgggccaccattctcctgtctcccctcttcagttttgtcttgggcgtctttgccagcggatcacctctcctgatcctgactttcttggggtttgtgggagcaggtaatggacactgtcgctaacagctcacactctgacgggcctcacagtatcagccacagggtccgggacctggtgactcatcacagtggctgtgggaggcaggggcctggctgttatggaccctggagccaggatccccccacggcctgcgggcctcagagcctggattcttgcactgagctgagggtcgc

SEQ ID NO: 372371 - DNA, 1219 bp, Homo sapiens
cgccgacacatggtcgttcgacttctggcttggcctcttttgtgagtgtggggcctggtcatatcctcttggtcagtgtctctgtgatgatgagaacgggaagacggccacggtgcccaccctggcaggactctctcccctcgctggcgctggctcagctgccgtgagcggccgtaggcactgtcccgggccctcctgtggttgctcccagccatgctgctggctgcttctgccgtcctggcttgcagagactctgggtcatgcggggaagagggcagagtcctcctccctgctcaggcaagagaggatccagcaagatttcttcctccccaccctcctgcccctcccagtctgggcagcagataaaagccagggccccacacttctgccacctcctgctgctcacacactccagccagggacctgcccccggggtccaacaaggacggctgtcctcagcgaggggccgtgcacccgctcctgagcagcgccatgggcctgctggccttcctgaagacccagttcgtgctgcacctgctggtcggctttgtcttcgtggtgagtggtctggtcatcaacttcgtccagctgtgcacgctggcgctctggccggtcagcaagcagctctaccgccgcctcaactgccgcctcgcctactcactctggagccaactggtcatgctgctggagtggtggtcctgcacggagtgtacactgttcacggaccaggccacggtagagcgctttgggaaggagcacgcagtcatcatcctcaaccacaacttcgagatcgacttcctctgtgggtggaccatgtgtgagcgcttcggagtgctggggagctccaaggtcctcgctaagaaggagctgctctacgtgcccctcatcggctggacgtggtactttctggagattgtgttctgcaagcggaagtgggaggaggaccgggacaccgtggtcgaagggctgaggcgcctgtcggactaccccgagtacatgtggtttctcctgtactgcgaggggacgcgcttcacggagaccaagcaccgcgttagcatggaggtggcggctgctaaggggcttcctgtcctcaagtaccacctgctgccgcggaccaagggcttcaccaccgcagtcaagtgcctccgggggacaggtaggccccagactgcccgagccggggccaccgctatgctcacggaaaatagtgatttcttta

SEQ ID NO: 372372 - DNA, 930 bp, Homo sapiens
aggtccattgtgcagtcatcaggccctgggagctttccacatccctccacctcccacccaacatcaccactctccggccagtgagaccgtcacagcaccccagaggagacaaattctggagctcagagagctgggagggcagctgctggtgtgacctcagctgctccccagaccctaaggggatctgggaccttccaccttctaccaacggtgttggtcttctgtcctcacgcctatggtttcacgctcccacagtggctcctgcaccttcagacactgcctcctcaccgagggagggaagaacgacaaaggtgatggacctccaggacgtagaggttgatgatccgggcaggtggccttcagcgagggagcacgtcaaaaggctgtgggccgtgcagacagctgggggacaccgtcccgggtgtgaccttgggccacacggcagggtggtggacttgctcctagaattgggctccagggctgaagccagcccctctgatctggcactggccggctccattcaccctttttggggcttactgccgcagagacttcctttgaggagagctggacccaagacgccagagttccgggggcactgagtgctgtgtggcacccgggccaggagaaacatgtgccagagggcaggcgtgggctctccggggagtctctgcgtagactttctagcccagaggttcaggtgatggaccagagactggccgctttgtgacaccgaggacggttgataaagtggattctcgaggggaagctgcatccacacagaggctgggacgtgaatgtgcatcacggctctatctgtggcccccaaaggctgggtgccagctgcctgtcggcagggagcgtatcaccgtggcacgtccatgccgtgggggtcactcagcagccacggatgcgccctgggtgctgtcc

SEQ ID NO: 372373 - DNA, 812 bp, Homo sapiens
aggtccattgtgcagtcatcaggccctgggagctttccacatccctccacctcccacccaacatcaccactctccggccagtgagaccgtcacagcaccccagaggagacaaattctggagctcagagagctgggagtggctcctgcaccttcagacactgcctcctcaccgagggagggaagaacgacaaaggtgatggacctccaggacgtagaggttgatgatccgggcaggtggccttcagcgagggagcacgtcaaaaggctgtgggccgtgcagacagctgggggacaccgtcccgggtgtgaccttgggccacacggcagggtggtggacttgctcctagaattgggctccagggctgaagccagcccctctgatctggcactggccggctccattcaccctttttggggcttactgccgcagagacttcctttgaggagagctggacccaagacgccagagttccgggggcactgagtgctgtgtggcacccgggccaggagaaacatgtgccagagggcaggcgtgggctctccggggagtctctgcgtagactttctagcccagaggttcaggtgatggaccagagactggccgctttgtgacaccgaggacggttgataaagtggattctcgaggggaagctgcatccacacagaggctgggacgtgaatgtgcatcacggctctatctgtggcccccaaaggctgggtgccagctgcctgtcggcagggagcgtatcaccgtggcacgtccatgccgtgggggtcactcagcagccacggatgcgccctgggtgctgtcc

SEQ ID NO: 372374 - DNA, 3755 bp, Homo sapiens
gggccgaggagcgcggcggccagagcggggccgcggaggcgacgccggggacgcccgcgcgacgagcaggtggcggcggctgcaggcttgtccagccggaagccctgagggcagctgttcccactggctctgctgaccttgtgccttggacggctgtcctcagcgaggggccgtgcacccgctcctgagcagcgccatgggcctgctggccttcctgaagacccagttcgtgctgcacctgctggtcggctttgtcttcgtggtgagtggtctggtcatcaacttcgtccagctgtgcacgctggcgctctggccggtcagcaagcagctctaccgccgcctcaactgccgcctcgcctactcactctggagcctagcacaaaactagaagcaacccaagcacctgtcactggagactaattatgcggcacccatacagggaccctctgcggccatcatggagagccttcatcttgcccgtacagttttaagcgaaaaaggaagtatacaacaaagtccataaactggtcatgctgctggagtggtggtcctgcacggagtgtacactgttcacggaccaggccacggtagagcgctttgggaaggagcacgcagtcatcatcctcaaccacaacttcgagatcgacttcctctgtgggtggaccatgtgtgagcgcttcggagtgctggggagctccaaggtcctcgctaagaaggagctgctctacgtgcccctcatcggctggacgtggtactttctggagattgtgttctgcaagcggaagtgggaggaggaccgggacaccgtggtcgaagggctgaggcgcctgtcggactaccccgagtacatgtggtttctcctgtactgcgaggggacgcgcttcacggagaccaagcaccgcgttagcatggaggtggcggctgctaaggggcttcctgtcctcaagtaccacctgctgccgcggaccaagggcttcaccaccgcagtcaagtgcctccgggggacagtcgcagctgtctatgatgtaaccctgaacttcagaggaaacaagaacccgtccctgctggggatcctctacgggaagaagtacgaggcggacatgtgcgtgaggagatttcctctggaagacatcccgctggatgaaaaggaagcagctcagtggcttcataaactgtaccaggagaaggacgcgctccaggagatatataatcagaagggcatgtttccaggggagcagtttaagcctgcccggaggccgtggaccctcctgaacttcctgtcctgggccaccattctcctgtctcccctcttcagttttgtcttgggcgtctttgccagcggatcacctctcctgatcctgactttcttggggtttgtgggagcagcttcctttggagttcgcagactgataggagtaactgagatagaaaaaggctccagctacggaaaccaagagtttaagaaaaaggaataattaatggctgtgactgaacacacgcggccctgacggtggtatccagttaactcaaaaccaacacacagagtgcaggaaaagacaattagaaactatttttcttattaactggtgactaatattaacaaaacttgagccaagagtaaagaattcagaaggcctgtcaggtgaagtcttcagcctcccacagcgcagggtcccagcatctccacgcgcgcccgtgggaggtgggtccggccggagaggcctcccgcggacgccgtctctccagaactccgcttccaagagggagcctttggctgctttctctccttaaacttagatcaaattttttggtttttaatcagttatcttgggaacttaacctggcccctcacctcttctgcaccccccgcccccgaaactgtctcgtaatgaatttctgctgtcctcctgggagtggacggccgggtcccgtcccccgggagcatcgctcggctcagcaccttggctcccagtgggggccccgtggagggcgcccgtagtgataagcacaccggcacgaacgtcaggtccattcctcgaagtcggagccctcactctgccctgtcctggggctggctgagggcgaacgccccacctcactttctagagccctgtctgtcctagctcctatctgaccttgtgtgtaaatacgtacatctgtttttaaagtggatgggcccctgagaactcagtgaaatgcagagttctccatgcacctaaagctcctttgtcgctctcatggctgtcagatcctggtccctccacactgggtgctggggagggaggaccctcggggctaccgcgcgcccccccatcccacagatcaggagccaaggagggagaacagggcagcctgtgggactctaggatgcttcagaagaagcgacggcaccgtcaaccctctgttttttaaaggtggttggagactgttaacactgagctcattgacttctagagattttatttttactggttgatctcttggtggttttcaacttcctgctggaaactagaggtggggcaccccccaccccccagcctcgcactgtgtccttggggagggcccgcccccatcctggccggtgtcactgtggcccggccacccctgagcgcccagctccctacctcctggacgtctctgagagtccaggcagagcagagggcagcgctcggccggtcatgctggctcccttggccttgcagcgagcccctggcccacgccgagcgagggatgcttctccctacagcatgtccactcccccggcatggccaggtggggcccctggggcaatggcagtggtagaacgctcaacttggttgcggtaccatcagcccacctgcatttggctttcgacttgcttgttctaagtcacagcgccctcatctttttagcaaggtaaaaaaaccaaaatgggtgttatctctgatatcttgaaaccagcgttctgaatagaggtaggttgagttttctaggggaaaacaaatggagaaaagaggcatgaagaaaagtaaaccgagaacataattaggcatcgggcctaagtgtcctggggagattggaggggacggcagcgttctgcatgatggaggcgctgccgggccccgggtctgtgggggccgtgctctcagggcgtgtgcgggacgccacctgtgcacacctgctcagagcacggctcctcgcaggggtgaaggggcagaccaacgaaaccagatgagaccaacgacaccatgcgagacacgcttgcagacactgttgttttggaaatgtgcttccctccatctgaaatctcatccctccacccgcccactcgggcagctgtgccgtgggcagggcatgcgctcccctggctgagcaccccagagattctcctgcaccttcctcatgccgcacgctgctcatccgtctccatgtgtgtttagatccatgccattcactgactcactaacacctgcaaaatctttaaggaaaaaagctgaagggtacgaccatgcacatatgtgacctggaaaatgcaaatttagatcttttatgatttaattattattgtttcccatagaagttccctccctttgaaattaatatataatgtataaattctgcactgagccatggcggagctgggcagcccctaggttagagtggagacggaggcccaggcgcaggggtcacacctcatctggtttccttcccatctcacagcttagcttgtgcttctcaacaccaagtctttaagagcaataaaaactacaccatga

SEQ ID NO: 372375 - DNA, 3588 bp, Homo sapiens
atttggtcacacggcgtctctccagtcctgcgcaagcacgttgacatgtgtgcctttcactttcaggcttgtccagccggaagccctgagggcagctgttcccactggctctgctgaccttgtgccttggacggctgtcctcagcgaggggccgtgcacccgctcctgagcagcgccatgggcctgctggccttcctgaagacccagttcgtgctgcacctgctggtcggctttgtcttcgtggtgagtggtctggtcatcaacttcgtccagctgtgcacgctggcgctctggccggtcagcaagcagctctaccgccgcctcaactgccgcctcgcctactcactctggagccaactggtcatgctgctggagtggtggtcctgcacggagtgtacactgttcacggaccaggccacggtagagcgctttgggaaggagcacgcagtcatcatcctcaaccacaacttcgagatcgacttcctctgtgggtggaccatgtgtgagcgcttcggagtgctggggagctccaaggtcctcgctaagaaggagctgctctacgtgcccctcatcggctggacgtggtactttctggagattgtgttctgcaagcggaagtgggaggaggaccgggacaccgtggtcgaagggctgaggcgcctgtcggactaccccgagtacatgtggtttctcctgtactgcgaggggacgcgcttcacggagaccaagcaccgcgttagcatggaggtggcggctgctaaggggcttcctgtcctcaagtaccacctgctgccgcggaccaagggcttcaccaccgcagtcaagtgcctccgggggacagtcgcagctgtctatgatgtaaccctgaacttcagaggaaacaagaacccgtccctgctggggatcctctacgggaagaagtacgaggcggacatgtgcgtgaggagatttcctctggaagacatcccgctggatgaaaaggaagcagctcagtggcttcataaactgtaccaggagaaggacgcgctccaggagatatataatcagaagggcatgtttccaggggagcagtttaagcctgcccggaggccgtggaccctcctgaacttcctgtcctgggccaccattctcctgtctcccctcttcagttttgtcttgggcgtctttgccagcggatcacctctcctgatcctgactttcttggggtttgtgggagcagcttcctttggagttcgcagactgataggagtaactgagatagaaaaaggctccagctacggaaaccaagagtttaagaaaaaggaataattaatggctgtgactgaacacacgcggccctgacggtggtatccagttaactcaaaaccaacacacagagtgcaggaaaagacaattagaaactatttttcttattaactggtgactaatattaacaaaacttgagccaagagtaaagaattcagaaggcctgtcaggtgaagtcttcagcctcccacagcgcagggtcccagcatctccacgcgcgcccgtgggaggtgggtccggccggagaggcctcccgcggacgccgtctctccagaactccgcttccaagagggagcctttggctgctttctctccttaaacttagatcaaattttttggtttttaatcagttatcttgggaacttaacctggcccctcacctcttctgcaccccccgcccccgaaactgtctcgtaatgaatttctgctgtcctcctgggagtggacggccgggtcccgtcccccgggagcatcgctcggctcagcaccttggctcccagtgggggccccgtggagggcgcccgtagtgataagcacaccggcacgaacgtcaggtccattcctcgaagtcggagccctcactctgccctgtcctggggctggctgagggcgaacgccccacctcactttctagagccctgtctgtcctagctcctatctgaccttgtgtgtaaatacgtacatctgtttttaaagtggatgggcccctgagaactcagtgaaatgcagagttctccatgcacctaaagctcctttgtcgctctcatggctgtcagatcctggtccctccacactgggtgctggggagggaggaccctcggggctaccgcgcgcccccccatcccacagatcaggagccaaggagggagaacagggcagcctgtgggactctaggatgcttcagaagaagcgacggcaccgtcaaccctctgttttttaaaggtggttggagactgttaacactgagctcattgacttctagagattttatttttactggttgatctcttggtggttttcaacttcctgctggaaactagaggtggggcaccccccaccccccagcctcgcactgtgtccttggggagggcccgcccccatcctggccggtgtcactgtggcccggccacccctgagcgcccagctccctacctcctggacgtctctgagagtccaggcagagcagagggcagcgctcggccggtcatgctggctcccttggccttgcagcgagcccctggcccacgccgagcgagggatgcttctccctacagcatgtccactcccccggcatggccaggtggggcccctggggcaatggcagtggtagaacgctcaacttggttgcggtaccatcagcccacctgcatttggctttcgacttgcttgttctaagtcacagcgccctcatctttttagcaaggtaaaaaaaccaaaatgggtgttatctctgatatcttgaaaccagcgttctgaatagaggtaggttgagttttctaggggaaaacaaatggagaaaagaggcatgaagaaaagtaaaccgagaacataattaggcatcgggcctaagtgtcctggggagattggaggggacggcagcgttctgcatgatggaggcgctgccgggccccgggtctgtgggggccgtgctctcagggcgtgtgcgggacgccacctgtgcacacctgctcagagcacggctcctcgcaggggtgaaggggcagaccaacgaaaccagatgagaccaacgacaccatgcgagacacgcttgcagacactgttgttttggaaatgtgcttccctccatctgaaatctcatccctccacccgcccactcgggcagctgtgccgtgggcagggcatgcgctcccctggctgagcaccccagagattctcctgcaccttcctcatgccgcacgctgctcatccgtctccatgtgtgtttagatccatgccattcactgactcactaacacctgcaaaatctttaaggaaaaaagctgaagggtacgaccatgcacatatgtgacctggaaaatgcaaatttagatcttttatgatttaattattattgtttcccatagaagttccctccctttgaaattaatatataatgtataaattctgcactgagccatggcggagctgggcagcccctaggttagagtggagacggaggcccaggcgcaggggtcacacctcatctggtttccttcccatctcacagcttagcttgtgcttctcaacaccaagtctttaagagcaataaaaactacaccatga

SEQ ID NO: 372376 - DNA, 3831 bp, Homo sapiens
  misc_feature (3782)..(3782): n is a, c, g, or t
tctatgaaaccaacatacatggcgtttgcatcacagttggagtcagatgtgagcccggagggcaggtgtctggcttgtccagccggaagccctgagggcagctgttcccactggctctgctgaccttgtgccttggacggctgtcctcagcgaggggccgtgcacccgctcctgagcagcgccatgggcctgctggccttcctgaagacccagttcgtgctgcacctgctggtcggctttgtcttcgtggtgagtggtctggtcatcaacttcgtccagctgtgcacgctggcgctctggccggtcagcaagcagctctaccgccgcctcaactgccgcctcgcctactcactctggagccaactggtcatgctgctggagtggtggtcctgcacggagtgtacactgttcacggaccaggccacggtagagcgctttgggaaggagcacgcagtcatcatcctcaaccacaacttcgagatcgacttcctctgtgggtggaccatgtgtgagcgcttcggagtgctggggagctccaaggtcctcgctaagaaggagctgctctacgtgcccctcatcggctggacgtggtactttctggagattgtgttctgcaagcggaagtgggaggaggaccgggacaccgtggtcgaagggctgaggcgcctgtcggactaccccgagtacatgtggtttctcctgtactgcgaggggacgcgcttcacggagaccaagcaccgcgttagcatggaggtggcggctgctaaggggcttcctgtcctcaagtaccacctgctgccgcggaccaagggcttcaccaccgcagtcaagtgcctccgggggacagtcgcagctgtctatgatgtaaccctgaacttcagaggaaacaagaacccgtccctgctggggatcctctacgggaagaagtacgaggcggacatgtgcgtgaggagatttcctctggaagacatcccgctggatgaaaaggaagcagctcagtggcttcataaactgtaccaggagaaggacgcgctccaggagatatataatcagaagggcatgtttccaggggagcagtttaagcctgcccggaggccgtggaccctcctgaacttcctgtcctgggccaccattctcctgtctcccctcttcagttttgtcttgggcgtctttgccagcggatcacctctcctgatcctgactttcttggggtttgtgggagcagcttcctttggagttcgcagactgataggagtaactgagatagaaaaaggctccagctacggaaaccaagagtttaagaaaaaggaataattaatggctgtgactgaacacacgcggccctgacggtggtatccagttaactcaaaaccaacacacagagtgcaggaaaagacaattagaaactatttttcttattaactggtgactaatattaacaaaacttgagccaagagtaaagaattcagaaggcctgtcaggtgaagtcttcagcctcccacagcgcagggtcccagcatctccacgcgcgcccgtgggaggtgggtccggccggagaggcctcccgcggacgccgtctctccagaactccgcttccaagagggagcctttggctgctttctctccttaaacttagatcaaattttttggtttttaatcagttatcttgggaacttaacctggcccctcacctcttctgcaccccccgcccccgaaactgtctcgtaatgaatttctgctgtcctcctgggagtggacggccgggtcccgtcccccgggagcatcgctcggctcagcaccttggctcccagtgggggccccgtggagggcgcccgtagtgataagcacaccggcacgaacgtcaggtccattcctcgaagtcggagccctcactctgccctgtcctggggctggctgagggcgaacgccccacctcactttctagagccctgtctgtcctagctcctatctgaccttgtgtgtaaatacgtacatctgtttttaaagtggatgggcccctgagaactcagtgaaatgcagagttctccatgcacctaaagctcctttgtcgctctcatggctgtcagatcctggtccctccacactgggtgctggggagggaggaccctcggggctaccgcgcgcccccccatcccacagatcaggagccaaggagggagaacagggcagcctgtgggactctaggatgcttcagaagaagcgacggcaccgtcaaccctctgttttttaaaggtggttggagactgttaacactgagctcattgacttctagagattttatttttactggttgatctcttggtggttttcaacttcctgctggaaactagaggtggggcaccccccaccccccagcctcgcactgtgtccttggggagggcccgcccccatcctggccggtgtcactgtggcccggccacccctgagcgcccagctccctacctcctggacgtctctgagagtccaggcagagcagagggcagcgctcggccggtcatgctggctcccttggccttgcagcgagcccctggcccacgccgagcgagggatgcttctccctacagcatgtccactcccccggcatggccaggtggggcccctggggcaatggcagtggtagaacgctcaacttggttgcggtaccatcagcccacctgcatttggctttcgacttgcttgttctaagtcacagcgccctcatctttttagcaaggtaaaaaaaccaaaatgggtgttatctctgatatcttgaaaccagcgttctgaatagaggtaggttgagttttctaggggaaaacaaatggagaaaagaggcatgaagaaaagtaaaccgagaacataattaggcatcgggcctaagtgtcctggggagattggaggggacggcagcgttctgcatgatggaggcgctgccgggccccgggtctgtgggggccgtgctctcagggcgtgtgcgggacgccacctgtgcacacctgctcagagcacggctcctcgcaggggtgaaggggcagaccaacgaaaccagatgagaccaacgacaccatgcgagacacgcttgcagacactgttgttttggaaatgtgcttccctccatctgaaatctcatccctccacccgcccactcgggcagctgtgccgtgggcagggcatgcgctcccctggctgagcaccccagagattctcctgcaccttcctcatgccgcacgctgctcatccgtctccatgtgtgtttagatccatgccattcactgactcactaacacctgcaaaatctttaaggaaaaaagctgaagggtacgaccatgcacatatgtgacctggaaaatgcaaatttagatcttttatgatttaattattattgtttcccatagaagttccctccctttgaaattaatatataatgtataaattctgcactgagccatggcggagctgggcagcccctaggttagagtggagacggaggcccaggcgcaggggtcacacctcatctggtttccttcccatctcacagcttagcttgtgcttctcaacaccaagtctttaagagcaataaaaactacaccatgaatgtttgaattttttttttttgggggggggagggtggattttgcttttcatccagaaggaaaaggggaggagagctcctttacattttttaaattaaattcataaatcccagaacagtcttttttttttctttttcctttacaccctacttctgagcttaattcagttgatgttatgtccaatcggcnaggcaagtgagcatcgtgccagccggtggcagggggagcaatagcggat

SEQ ID NO: 372377 - DNA, 2710 bp, Homo sapiens
tctatgaaaccaacatacatggcgtttgcatcacagttggagtcagatgtgagcccggagggcaggtgtctggcttgtccagccggaagccctgagggcagctgttcccactggctctgctgaccttgtgccttggacggctgtcctcagcgaggggccgtgcacccgctcctgagcagcgccatgggcctgctggccttcctgaagacccagttcgtgctgcacctgctggtcggctttgtcttcgtggtgagtggtctggtcatcaacttcgtccagctgtgcacgctggcgctctggccggtcagcaagcagctctaccgccgcctcaactgccgcctcgcctactcactctggagccaactggtcatgctgctggagtggtggtcctgcacggagtgtacactgttcacggaccaggccacggtagagcgctttgggaaggagcacgcagtcatcatcctcaaccacaacttcgagatcgacttcctctgtgggtggaccatgtgtgagcgcttcggagtgctggggagctccaaggtcctcgctaagaaggagctgctctacgtgcccctcatcggctggacgtggtactttctggagattgtgttctgcaagcggaagtgggaggaggaccgggacaccgtggtcgaagggctgaggcgcctgtcggactaccccgagtacatgtggtttctcctgtactgcgaggggacgcgcttcacggagaccaagcaccgcgttagcatggaggtggcggctgctaaggggcttcctgtcctcaagtaccacctgctgccgcggaccaagggcttcaccaccgcagtcaagtgcctccgggggacagtcgcagctgtctatgatgtaaccctgaacttcagaggaaacaagaacccgtccctgctggggatcctctacgggaagaagtacgaggcggacatgtgcgtgaggagatttcctctggaagacatcccgctggatgaaaaggaagcagctcagtggcttcataaactgtaccaggagaaggacgcgctccaggagatatataatcagaagggcatgtttccaggggagcagtttaagcctgcccggaggccgtggaccctcctgaacttcctgtcctgggccaccattctcctgtctcccctcttcagttttgtcttgggcgtctttgccagcggatcacctctcctgatcctgactttcttggggtttgtgggagcagcttcctttggagttcgcagactgataggagtaactgagatagaaaaaggctccagctacggaaaccaagagtttaagaaaaaggaataattaatggctgtgactgaacacacgcggccctgacggtggtatccagttaactcaaaaccaacacacagagtgcaggaaaagacaattagaaactatttttcttattaactggtgactaatattaacaaaacttgagccaagagtaaagaattcagaaggcctgtcaggtgaagtcttcagcctcccacagcgcagggtcccagcatctccacgcgcgcccgtgggaggtgggtccggccggagaggcctcccgcggacgccgtctctccagaactccgcttccaagagggagcctttggctgctttctctccttaaacttagatcaaattttttggtttttaatcagttatcttgggaacttaacctggcccctcacctcttctgcaccccccgcccccgaaactgtctcgtaatgaatttctgctgtcctcctgggagtggacggccgggtcccgtcccccgggagcatcgctcggctcagcaccttggctcccagtgggggccccgtggagggcgcccgtagtgataagcacaccggcacgaacgtcaggtccattcctcgaagtcggagccctcactctgccctgtcctggggctggctgagggcgaacgccccacctcactttctagagccctgtctgtcctagctcctatctgaccttgtgtgtaaatacgtacatctgtttttaaagtggatgggcccctgagaactcagtgaaatgcagagttctccatgcacctaaagctcctttgtcgctctcatggctgtcagatcctggtccctccacactgggtgctggggagggaggaccctcggggctaccgcgcgcccccccatcccacagatcaggagccaaggagggagaacagggcagcctgtgggactctaggatgcttcagaagaagcgacggcaccgtcaaccctctgttttttaaaggtggttggagactgttaacactgagctcattgacttctagagattttatttttactggttgatctcttggtggttttcaacttcctgctggaaactagaggtggggcaccccccaccccccagcctcgcactgtgtccttggggagggcccgcccccatcctggccggtgtcactgtggcccggccacccctgagcgcccagctccctacctcctggacgtctctgagagtccaggcagagcagagggcagcgctcggccggtcatgctggctcccttggccttgcagcgagcccctggcccacgccgagcgagggatgcttctccctacagcatgtccactcccccggcatggccaggcgcaggggtcacacctcatctggtttccttcccatctcacagcttagcttgtgcttctcaacaccaagtctttaagagcaataaaaactacaccatga

SEQ ID NO: 372378 - DNA, 432 bp, Homo sapiens
gacagctatcttcatcactatctacagtactcaagaggtctcagctactgctcattctccatggctttgcaggtgcaggtggggctgcaggccagggaggaagcccccccaggacagggaagggctggggtgaagaggggcaccctgcacatgggtgagggaaggccaggcccttctgcagcttggcagacgcagacgtgtggctcccacgtgaacctgcggaccagtggctctcaccctccctgcttttgacatacttggcacttgcttgaagtaatttttgccttcgaagtagtgaccacatgtaaatgagctccaaattttcctggcaagcccaatttcacacatcactgtatttatgaaggcaggttaatggatctttaactaaatgtgatttaactttatgtttatataggactttataaacacact

SEQ ID NO: 372379 - DNA, 2039 bp, Homo sapiens
gtgcagggaagagacgcgtcagcgccagggccaggcccgcccgggggcagcccggcagccgaatcttgggctactctgtcccaacagccggagcagatcagaccgaccggccctgcccgctcggtcccgcgccctccagaccctacggtctccgtttctaggggcacatggttagcggcaggcgcccacagccaatccactttgccagcctgccccttcctctgccaagagcagcttcttcagccgcgctccagttccgcagacgcctgccccaccctgctcttcccttccagggaagacggatcacgcggccaagaacgagactcgcaaactgggcatttctccgagccgggctagagcaagtagcgagactccgcgtgagagtgggaaagagccttaacaggcaaccatgttgcccagtgggttttctgtgcctttgggtgcggaccaatgaggcgcgtggggcgggacttccgcttcgcctaggtgttgtcgtccctgctagtactccgggctgtgggggtcggtgcggatattcagtcatgaaatcagggtagggacttctcccgcagcgacgcggctggcaagactgtttgtgttgcgggggccggacttcaaggtgattttacaacgagatgctgctctccatagggatgctcatgctgtcagccacacaagtctacaccatcttgactgtccagctctttgcattcttaaacctactgcctgtagaagcagacattttagcatataactttgaaaatgcatctcagacatttgatgacctccctgcaagatttggttatagacttccagctgaaggtttaaagggttttttgattaactcaaaaccagagaatgcctgtgaacccatagtgcctccaccagtaaaagacaattcatctggcactttcatcgtgttaattagaagacttgattgtaattttgatataaaggttttaaatgcacagagagcaggatacaaggcagccatagttcacaatgttgattctgatgacctcattagcatgggatccaacgacattgaggtactaaagaaaattgacattccatctgtctttattggtgaatcatcagctaattctctgaaagatgaattcacatatgaaaaagggggccaccttatcttagttccagaatttagtcttcctttggaatactacctaattcccttccttatcatagtgggcatctgtctcatcttgatagtcattttcatgatcacaaaatttgtccaggatagacatagagctagaagaaacagacttcgtaaagatcaacttaagaaacttcctgtacataaattcaagaaaggagatgagtatgatgtatgtgccatttgtttggatgagtatgaagatggagacaaactcagaatccttccctgttcccatgcttatcattgcaagtgtgtagacccttggctaactaaaaccaaaaaaacctgtccagtgtgcaagcaaaaagttgttccttctcaaggcgattcagactctgacacagacagtagtcaagaagaaaatgaagtgacagaacatacccctttactgagacctttagcttctgtcagtgcccagtcatttggggctttatcggaatcccgctcacatcagaacatgacagaatcttcagactatgaggaagacgacaatgaagatactgacagtagtgatgcagaaaatgaaattaatgaacatgatgtcgtggtccagttgcagcctaatggtgaacgggattacaacatagcaaatactgtttgactttcagaagatgattggtttatttccctttaaaatgattaggtatatactgtaatttgattttttgctcccttcaaagatttctgtagaaataacttattttttagtattctacagtttaatcaaattactgaaacaggacttttgatctggtatttatctgccaagaatatacttcattcactaataatagactggtgctgtaactcaagcatcaattcagctcttcttttggaatgaaagtatagccaaaacata

SEQ ID NO: 372380 - DNA, 2905 bp, Homo sapiens
gtgcagggaagagacgcgtcagcgccagggccaggcccgcccgggggcagcccggcagccgaatcttgggctactctgtcccaacagccggagcagatcagaccgaccggccctgcccgctcggtcccgcgccctccagaccctacggtctccgtttctaggggcacatggttagcggcaggcgcccacagccaatccactttgccagcctgccccttcctctgccaagagcagcttcttcagccgcgctccagttccgcagacgcctgccccaccctgctcttcccttccagggaagacggatcacgcggccaagaacgagactcgcaaactgggcatttctccgagccgggctagagcaagtagcgagactccgcgtgagagtgggaaagagccttaacaggcaaccatgttgcccagtgggttttctgtgcctttgggtgcggaccaatgaggcgcgtggggcgggacttccgcttcgcctaggtgttgtcgtccctgctagtactccgggctgtgggggtcggtgcggatattcagtcatgaaatcagggtagggacttctcccgcagcgacgcggctggcaagactgtttgtgttgcgggggccggacttcaagagagaaagagagagtgggcagacatcgaagccaaacagcagtatcccggaagcactcatgcaactttggtggcggccactcagttttctctgccagtgtctggtgattttacaacgagatgctgctctccatagggatgctcatgctgtcagccacacaagtctacaccatcttgactgtccagctctttgcattcttaaacctactgcctgtagaagcagacattttagcatataactttgaaaatgcatctcagacatttgatgacctccctgcaagatttggttatagacttccagctgaaggtttaaagggttttttgattaactcaaaaccagagaatgcctgtgaacccatagtgcctccaccagtaaaagacaattcatctggcactttcatcgtgttaattagaagacttgattgtaattttgatataaaggttttaaatgcacagagagcaggatacaaggcagccatagttcacaatgttgattctgatgacctcattagcatgggatccaacgacattgaggtactaaagaaaattgacattccatctgtctttattggtgaatcatcagctaattctctgaaagatgaattcacatatgaaaaagggggccaccttatcttagttccagaatttagtcttcctttggaatactacctaattcccttccttatcatagtgggcatctgtctcatcttgatagtcattttcatgatcacaaaatttgtccaggatagacatagagctagaagaaacagacttcgtaaagatcaacttaagaaacttcctgtacataaattcaagaaaggagatgagtatgatgtatgtgccatttgtttggatgagtatgaagatggagacaaactcagaatccttccctgttcccatgcttatcattgcaagtgtgtagacccttggctaactaaaaccaaaaaaacctgtccagtgtgcaagcaaaaagttgttccttctcaaggcgattcagactctgacacagacagtagtcaagaagaaaatgaagtgacagaacatacccctttactgagacctttagcttctgtcagtgcccagtcatttggggctttatcggaatcccgctcacatcagaacatgacagaatcttcagactatgaggaagacgacaatgaagatactgacagtagtgatgcagaaaatgaaattaatgaacatgatgtcgtggtccagttgcagcctaatggtgaacgggattacaacatagcaaatactgtttgactttcagaagatgattggtttatttccctttaaaatgattaggtatatactgtaatttgattttttgctcccttcaaagatttctgtagaaataacttattttttagtattctacagtttaatcaaattactgaaacaggacttttgatctggtatttatctgccaagaatatacttcattcactaataatagactggtgctgtaactcaagcatcaattcagctcttcttttggaatgaaagtatagccaaaacataaaaaaaaaaaaatcctcagtatagcttgcaattaagacctagatcacagtatttaagtgttttgcgttttatacatgaggtcagtgctacagccacctagcatgaactaacccagcttccacctccataaagttacctagagttgttgagttggaatatgttctggcatttacctgacctgccaatcattagggagaggcaacaaggtaattcagcctttcctcctatcagcacaaagaaactcaaagctgttttttccctttctgttccaaagcagtcttatcctgacaggagcggtctatactagtgcagatttcaacacttttttttaacgttttaattactatagtgttatgtagagatttgattgagcagctaatgtttctgaactttacttactaattttcagtgtccttaagggttctgtagtgttatcaaagcaaaaagaaaatgctgcataaaaataccaaacttcagcaactgttaatactcagatcatatacctcttaataaatagcatcttatgctaattagccctgctaaactatgtacagaggaaactgttcaagtattggatttgaaagtaagtgacttatgtttaacagaactaatgatgtattgaaacactgtattatgaaaagctaaattatacatcattgtaactatgtagaaagtgtagactaatgtataatcaaaatgctaaggatttttatatggccttgtatgaggggagtttgaatgttaataaacatgttttccacttt

SEQ ID NO: 372381 - DNA, 2757 bp, Homo sapiens
gtgcagggaagagacgcgtcagcgccagggccaggcccgcccgggggcagcccggcagccgaatcttgggctactctgtcccaacagccggagcagatcagaccgaccggccctgcccgctcggtcccgcgccctccagaccctacggtctccgtttctaggggcacatggttagcggcaggcgcccacagccaatccactttgccagcctgccccttcctctgccaagagcagcttcttcagccgcgctccagttccgcagacgcctgccccaccctgctcttcccttccagggaagacggatcacgcggccaagaacgagactcgcaaactgggcatttctccgagccgggctagagcaagtagcgagactccgcgtgagagtgggaaagagccttaacaggcaaccatgttgcccagtgggttttctgtgcctttgggtgcggaccaatgaggcgcgtggggcgggacttccgcttcgcctaggtgttgtcgtccctgctagtactccgggctgtgggggtcggtgcggatattcagtcatgaaatcagggtagggacttctcccgcagcgacgcggctggcaagactgtttgtgttgcgggggccggacttcaaggtgattttacaacgagatgctgctctccatagggatgctcatgctgtcagccacacaagtctacaccatcttgactgtccagctctttgcattcttaaacctactgcctgtagaagcagacattttagcatataactttgaaaatgcatctcagacatttgatgacctccctgcaagatttggttatagacttccagctgaaggtttaaagggttttttgattaactcaaaaccagagaatgcctgtgaacccatagtgcctccaccagtaaaagacaattcatctggcactttcatcgtgttaattagaagacttgattgtaattttgatataaaggttttaaatgcacagagagcaggatacaaggcagccatagttcacaatgttgattctgatgacctcattagcatgggatccaacgacattgaggtactaaagaaaattgacattccatctgtctttattggtgaatcatcagctaattctctgaaagatgaattcacatatgaaaaaggtacctaattcccttccttatcatagtgggcatctgtctcatcttgatagtcattttcatgatcacaaaatttgtccaggatagacatagagctagaagaaacagacttcgtaaagatcaacttaagaaacttcctgtacataaattcaagaaaggagatgagtatgatgtatgtgccatttgtttggatgagtatgaagatggagacaaactcagaatccttccctgttcccatgcttatcattgcaagtgtgtagacccttggctaactaaaaccaaaaaaacctgtccagtgtgcaagcaaaaagttgttccttctcaaggcgattcagactctgacacagacagtagtcaagaagaaaatgaagtgacagaacatacccctttactgagacctttagcttctgtcagtgcccagtcatttggggctttatcggaatcccgctcacatcagaacatgacagaatcttcagactatgaggaagacgacaatgaagatactgacagtagtgatgcagaaaatgaaattaatgaacatgatgtcgtggtccagttgcagcctaatggtgaacgggattacaacatagcaaatactgtttgactttcagaagatgattggtttatttccctttaaaatgattaggtatatactgtaatttgattttttgctcccttcaaagatttctgtagaaataacttattttttagtattctacagtttaatcaaattactgaaacaggacttttgatctggtatttatctgccaagaatatacttcattcactaataatagactggtgctgtaactcaagcatcaattcagctcttcttttggaatgaaagtatagccaaaacataaaaaaaaaaaaatcctcagtatagcttgcaattaagacctagatcacagtatttaagtgttttgcgttttatacatgaggtcagtgctacagccacctagcatgaactaacccagcttccacctccataaagttacctagagttgttgagttggaatatgttctggcatttacctgacctgccaatcattagggagaggcaacaaggtaattcagcctttcctcctatcagcacaaagaaactcaaagctgttttttccctttctgttccaaagcagtcttatcctgacaggagcggtctatactagtgcagatttcaacacttttttttaacgttttaattactatagtgttatgtagagatttgattgagcagctaatgtttctgaactttacttactaattttcagtgtccttaagggttctgtagtgttatcaaagcaaaaagaaaatgctgcataaaaataccaaacttcagcaactgttaatactcagatcatatacctcttaataaatagcatcttatgctaattagccctgctaaactatgtacagaggaaactgttcaagtattggatttgaaagtaagtgacttatgtttaacagaactaatgatgtattgaaacactgtattatgaaaagctaaattatacatcattgtaactatgtagaaagtgtagactaatgtataatcaaaatgctaaggatttttatatggccttgtatgaggggagtttgaatgttaataaacatgttttccacttt

SEQ ID NO: 372382 - DNA, 2592 bp, Homo sapiens
gtgcagggaagagacgcgtcagcgccagggccaggcccgcccgggggcagcccggcagccgaatcttgggctactctgtcccaacagccggagcagatcagaccgaccggccctgcccgctcggtcccgcgccctccagaccctacggtctccgtttctaggggcacatggttagcggcaggcgcccacagccaatccactttgccagcctgccccttcctctgccaagagcagcttcttcagccgcgctccagttccgcagacgcctgccccaccctgctcttcccttccagggaagacggatcacgcggccaagaacgagactcgcaaactgggcatttctccgagccgggctagagcaagtagcgagactccgcgtgagagtgggaaagagccttaacaggcaaccatgttgcccagtgggttttctgtgcctttgggtgcggaccaatgaggcgcgtggggcgggacttccgcttcgcctaggtgttgtcgtccctgctagtactccgggctgtgggggtcggtgcggatattcagtcatgaaatcagggtagggacttctcccgcagcgacgcggctggcaagactgtttgtgttgcgggggccggacttcaagggttttttgattaactcaaaaccagagaatgcctgtgaacccatagtgcctccaccagtaaaagacaattcatctggcactttcatcgtgttaattagaagacttgattgtaattttgatataaaggttttaaatgcacagagagcaggatacaaggcagccatagttcacaatgttgattctgatgacctcattagcatgggatccaacgacattgaggtactaaagaaaattgacattccatctgtctttattggtgaatcatcagctaattctctgaaagatgaattcacatatgaaaaagggggccaccttatcttagttccagaatttagtcttcctttggaatactacctaattcccttccttatcatagtgggcatctgtctcatcttgatagtcattttcatgatcacaaaatttgtccaggatagacatagagctagaagaaacagacttcgtaaagatcaacttaagaaacttcctgtacataaattcaagaaaggagatgagtatgatgtatgtgccatttgtttggatgagtatgaagatggagacaaactcagaatccttccctgttcccatgcttatcattgcaagtgtgtagacccttggctaactaaaaccaaaaaaacctgtccagtgtgcaagcaaaaagttgttccttctcaaggcgattcagactctgacacagacagtagtcaagaagaaaatgaagtgacagaacatacccctttactgagacctttagcttctgtcagtgcccagtcatttggggctttatcggaatcccgctcacatcagaacatgacagaatcttcagactatgaggaagacgacaatgaagatactgacagtagtgatgcagaaaatgaaattaatgaacatgatgtcgtggtccagttgcagcctaatggtgaacgggattacaacatagcaaatactgtttgactttcagaagatgattggtttatttccctttaaaatgattaggtatatactgtaatttgattttttgctcccttcaaagatttctgtagaaataacttattttttagtattctacagtttaatcaaattactgaaacaggacttttgatctggtatttatctgccaagaatatacttcattcactaataatagactggtgctgtaactcaagcatcaattcagctcttcttttggaatgaaagtatagccaaaacataaaaaaaaaaaaatcctcagtatagcttgcaattaagacctagatcacagtatttaagtgttttgcgttttatacatgaggtcagtgctacagccacctagcatgaactaacccagcttccacctccataaagttacctagagttgttgagttggaatatgttctggcatttacctgacctgccaatcattagggagaggcaacaaggtaattcagcctttcctcctatcagcacaaagaaactcaaagctgttttttccctttctgttccaaagcagtcttatcctgacaggagcggtctatactagtgcagatttcaacacttttttttaacgttttaattactatagtgttatgtagagatttgattgagcagctaatgtttctgaactttacttactaattttcagtgtccttaagggttctgtagtgttatcaaagcaaaaagaaaatgctgcataaaaataccaaacttcagcaactgttaatactcagatcatatacctcttaataaatagcatcttatgctaattagccctgctaaactatgtacagaggaaactgttcaagtattggatttgaaagtaagtgacttatgtttaacagaactaatgatgtattgaaacactgtattatgaaaagctaaattatacatcattgtaactatgtagaaagtgtagactaatgtataatcaaaatgctaaggatttttatatggccttgtatgaggggagtttgaatgttaataaacatgttttccacttt

SEQ ID NO: 372383 - DNA, 1702 bp, Homo sapiens
gtggtacggcccggaagttaagggatgaaaaagggggccaccttatcttagttccagaatttagtcttcctttggaatactacctaattcccttccttatcatagtgggcatctgtctcatcttgatagtcattttcatgatcacaaaatttgtccaggatagacatagagctagaagaaacagacttcgtaaagatcaacttaagaaacttcctgtacataaattcaagaaaggagatgagtatgatgtatgtgccatttgtttggatgagtatgaagatggagacaaactcagaatccttccctgttcccatgcttatcattgcaagtgtgtagacccttggctaactaaaaccaaaaaaacctgtccagtgtgcaagcaaaaagttgttccttctcaaggcgattcagactctgacacagacagtagtcaagaagaaaatgaagtgacagaacatacccctttactgagacctttagcttctgtcagtgcccagtcatttggggctttatcggaatcccgctcacatcagaacatgacagaatcttcagactatgaggaagacgacaatgaagatactgacagtagtgatgcagaaaatgaaattaatgaacatgatgtcgtggtccagttgcagcctaatggtgaacgggattacaacatagcaaatactgtttgactttcagaagatgattggtttatttccctttaaaatgattaggtatatactgtaatttgattttttgctcccttcaaagatttctgtagaaataacttattttttagtattctacagtttaatcaaattactgaaacaggacttttgatctggtatttatctgccaagaatatacttcattcactaataatagactggtgctgtaactcaagcatcaattcagctcttcttttggaatgaaagtatagccaaaacataaaaaaaaaaaaatcctcagtatagcttgcaattaagacctagatcacagtatttaagtgttttgcgttttatacatgaggtcagtgctacagccacctagcatgaactaacccagcttccacctccataaagttacctagagttgttgagttggaatatgttctggcatttacctgacctgccaatcattagggagaggcaacaaggtaattcagcctttcctcctatcagcacaaagaaactcaaagctgttttttccctttctgttccaaagcagtcttatcctgacaggagcggtctatactagtgcagatttcaacacttttttttaacgttttaattactatagtgttatgtagagatttgattgagcagctaatgtttctgaactttacttactaattttcagtgtccttaagggttctgtagtgttatcaaagcaaaaagaaaatgctgcataaaaataccaaacttcagcaactgttaatactcagatcatatacctcttaataaatagcatcttatgctaattagccctgctaaactatgtacagaggaaactgttcaagtattggatttgaaagtaagtgacttatgtttaacagaactaatgatgtattgaaacactgtattatgaaaagctaaattatacatcattgtaactatgtagaaagtgtagactaatgtataatcaaaatgctaaggatttttatatggccttgtatgaggggagtttgaatgttaataaacatgttttccacttt

SEQ ID NO: 372384 - DNA, 1139 bp, Homo sapiens
aattcatggctttggcgcttcctggtgtgaaaactaaggacaattaatgaacatgatgtcgtggtccagttgcagcctaatggtgaacgggattacaacatagcaaatactgtttgactttcagaagatgattggtttatttccctttaaaatgattaggtatatactgtaatttgattttttgctcccttcaaagatttctgtagaaataacttattttttagtattctacagtttaatcaaattactgaaacaggacttttgatctggtatttatctgccaagaatatacttcattcactaataatagactggtgctgtaactcaagcatcaattcagctcttcttttggaatgaaagtatagccaaaacataaaaaaaaaaaaatcctcagtatagcttgcaattaagacctagatcacagtatttaagtgttttgcgttttatacatgaggtcagtgctacagccacctagcatgaactaacccagcttccacctccataaagttacctagagttgttgagttggaatatgttctggcatttacctgacctgccaatcattagggagaggcaacaaggtaattcagcctttcctcctatcagcacaaagaaactcaaagctgttttttccctttctgttccaaagcagtcttatcctgacaggagcggtctatactagtgcagatttcaacacttttttttaacgttttaattactatagtgttatgtagagatttgattgagcagctaatgtttctgaactttacttactaattttcagtgtccttaagggttctgtagtgttatcaaagcaaaaagaaaatgctgcataaaaataccaaacttcagcaactgttaatactcagatcatatacctcttaataaatagcatcttatgctaattagccctgctaaactatgtacagaggaaactgttcaagtattggatttgaaagtaagtgacttatgtttaacagaactaatgatgtattgaaacactgtattatgaaaagctaaattatacatcattgtaactatgtagaaagtgtagactaatgtataatcaaaatgctaaggatttttatatggccttgtatgaggggagtttgaatgttaataaacatgttttccacttt

SEQ ID NO: 372385 - DNA, 297 bp, Homo sapiens
ctttcttcccgtccctacatgatacatacagaacactgaataaatatggcaagagattaaatataaaagtatcaaccgcagcatactaactaaagatgtatattttgcttcaacagcttatcattgcaagtgtgtagacccttggctaactaaaaccaaaaaaacctgtccagtgtgcaagcaaaaagttgttccttctcaaggcgattcagactctgacacagacagtagtcaagaagaaaatgaagtgacagaacatacccctttactgagacctttagcttctgtcagtgccca

SEQ ID NO: 372386 - DNA, 647 bp, Homo sapiens
cttcgcctaggtgttgtcgtccctgctagtactccgggctgtgggggtcggtgcggatattcagtcatgaaatcagggtagggacttctcccgcagcgacgcggctggcaagactgtttgtgttgcgggggccggacttcaaggtaagaccctgtccggcttcgcggcagccgggcagctcgttatcgagcggcccagagaacataccccgcttgttggccctcgagctcggagtcggccctgctgctgaggtctttgctgctcctctagagctgggtgagaagtcaattaggctttttgcaaaaggaataaaatagccttgccctcgggggaccgagtctcccctgcactctcattccgcgagtttgtgtgtgtccaaagttgagttaccggttttgcttctctcattcccttcttgaggctgcaagagcctgcctggaaaacatgtttggaaggcttttcttggtcaagtacctgccgcaacgtcctcgggcacatcgcttgactttagttgagggggctgttttgtctctgaatagaaggagggcagtcacttcctctcttttacccccaccccctttttctttccctggaagctcagattgcaggtttgggacttaacccctgctagggccagatactacggt

SEQ ID NO: 372387 - DNA, 2803 bp, Homo sapiens
gtgcagggaagagacgcgtcagcgccagggccaggcccgcccgggggcagcccggcagccgaatcttgggctactctgtcccaacagccggagcagatcagaccgaccggccctgcccgctcggtcccgcgccctccagaccctacggtctccgtttctaggggcacatggttagcggcaggcgcccacagccaatccactttgccagcctgccccttcctctgccaagagcagcttcttcagccgcgctccagttccgcagacgcctgccccaccctgctcttcccttccagggaagacggatcacgcggccaagaacgagactcgcaaactgggcatttctccgagccgggctagagcaagtagcgagactccgcgtgagagtgggaaagagccttaacaggcaaccatgttgcccagtgggttttctgtgcctttgggtgcggaccaatgaggcgcgtggggcgggacttccgcttcgcctaggtgttgtcgtccctgctagtactccgggctgtgggggtcggtgcggatattcagtcatgaaatcagggtagggacttctcccgcagcgacgcggctggcaagactgtttgtgttgcgggggccggacttcaaggtgattttacaacgagatgctgctctccatagggatgctcatgctgtcagccacacaagtctacaccatcttgactgtccagctctttgcattcttaaacctactgcctgtagaagcagacattttagcatataactttgaaaatgcatctcagacatttgatgacctccctgcaagatttggttatagacttccagctgaaggtttaaagggttttttgattaactcaaaaccagagaatgcctgtgaacccatagtgcctccaccagtaaaagacaattcatctggcactttcatcgtgttaattagaagacttgattgtaattttgatataaaggttttaaatgcacagagagcaggatacaaggcagccatagttcacaatgttgattctgatgacctcattagcatgggatccaacgacattgaggtactaaagaaaattgacattccatctgtctttattggtgaatcatcagctaattctctgaaagatgaattcacatatgaaaaagggggccaccttatcttagttccagaatttagtcttcctttggaatactacctaattcccttccttatcatagtgggcatctgtctcatcttgatagtcattttcatgatcacaaaatttgtccaggatagacatagagctagaagaaacagacttcgtaaagatcaacttaagaaacttcctgtacataaattcaagaaaggagatgagtatgatgtatgtgccatttgtttggatgagtatgaagatggagacaaactcagaatccttccctgttcccatgcttatcattgcaagtgtgtagacccttggctaactaaaaccaaaaaaacctgtccagtgtgcaagcaaaaagttgttccttctcaaggcgattcagactctgacacagacagtagtcaagaagaaaatgaagtgacagaacatacccctttactgagacctttagcttctgtcagtgcccagtcatttggggctttatcggaatcccgctcacatcagaacatgacagaatcttcagactatgaggaagacgacaatgaagatactgacagtagtgatgcagaaaatgaaattaatgaacatgatgtcgtggtccagttgcagcctaatggtgaacgggattacaacatagcaaatactgtttgactttcagaagatgattggtttatttccctttaaaatgattaggtatatactgtaatttgattttttgctcccttcaaagatttctgtagaaataacttattttttagtattctacagtttaatcaaattactgaaacaggacttttgatctggtatttatctgccaagaatatacttcattcactaataatagactggtgctgtaactcaagcatcaattcagctcttcttttggaatgaaagtatagccaaaacataaaaaaaaaaaaatcctcagtatagcttgcaattaagacctagatcacagtatttaagtgttttgcgttttatacatgaggtcagtgctacagccacctagcatgaactaacccagcttccacctccataaagttacctagagttgttgagttggaatatgttctggcatttacctgacctgccaatcattagggagaggcaacaaggtaattcagcctttcctcctatcagcacaaagaaactcaaagctgttttttccctttctgttccaaagcagtcttatcctgacaggagcggtctatactagtgcagatttcaacacttttttttaacgttttaattactatagtgttatgtagagatttgattgagcagctaatgtttctgaactttacttactaattttcagtgtccttaagggttctgtagtgttatcaaagcaaaaagaaaatgctgcataaaaataccaaacttcagcaactgttaatactcagatcatatacctcttaataaatagcatcttatgctaattagccctgctaaactatgtacagaggaaactgttcaagtattggatttgaaagtaagtgacttatgtttaacagaactaatgatgtattgaaacactgtattatgaaaagctaaattatacatcattgtaactatgtagaaagtgtagactaatgtataatcaaaatgctaaggatttttatatggccttgtatgaggggagtttgaatgttaataaacatgttttccacttt

SEQ ID NO: 372388 - DNA, 2775 bp, Homo sapiens
  misc_feature (2774)..(2775): n is a, c, g, or t
gtgcagggaagagacgcgtcagcgccagggccaggcccgcccgggggcagcccggcagccgaatcttgggctactctgtcccaacagccggagcagatcagaccgaccggccctgcccgctcggtcccgcgccctccagaccctacggtctccgtttctaggggcacatggttagcggcaggcgcccacagccaatccactttgccagcctgccccttcctctgccaagagcagcttcttcagccgcgctccagttccgcagacgcctgccccaccctgctcttcccttccagggaagacggatcacgcggccaagaacgagactcgcaaactgggcatttctccgagccgggctagagcaagtagcgagactccgcgtgagagtgggaaagagccttaacaggcaaccatgttgcccagtgggttttctgtgcctttgggtgcggaccaatgaggcgcgtggggcgggacttccgcttcgcctaggtgttgtcgtccctgctagtactccgggctgtgggggtcggtgcggatattcagtcatgaaatcagggtagggacttctcccgcagcgacgcggctggcaagactgtttgtgttgcgggggccggacttcaaggtgattttacaacgagatgctgctctccatagggatgctcatgctgtcagccacacaagtctacaccatcttgactgtccagctctttgcattcttaaacctactgcctgtagaagcagacattttagcatataactttgaaaatgcatctcagacatttgatgacctccctgcaagatttggttatagacttccagctgaaggtttaaagggttttttgattaactcaaaaccagagaatgcctgtgaacccatagtgcctccaccagtaaaagacaattcatctggcactttcatcgtgttaattagaagacttgattgtaattttgatataaaggttttaaatgcacagagagcaggatacaaggcagccatagttcacaatgttgattctgatgacctcattagcatgggatccaacgacattgaggtactaaagaaaattgacattccatctgtctttattggtgaatcatcagctaattctctgaaagatgaattcacatatgaaaaagggggccaccttatcttagttccagaatttagtcttcctttggaatactacctaattcccttccttatcatagtgggcatctgtctcatcttgatagtcattttcatgatcacaaaatttgtccaggatagacatagagctagaagaaacagacttcgtaaagatcaacttaagaaacttcctgtacataaattcaagaaaggagatgagtatgatgtatgtgccatttgtttggatgagtatgaagatggagacaaactcagaatccttccctgttcccatgcttatcattgcaagtgtgtagacccttggctaactaaaaccaaaaaaacctgtccagtgtgcaagcaaaaagttgttccttctcaaggcgattcagactctgacacagacagtagtcaagaagaaaatgaagtgacagaacatacccctttactgagacctttagcttctgtcagtgcccagtcatttggggctttatcggaatcccgctcacatcagaacatgacagaatcttcagactatgaggaagacgacaatgaagatactgacagtagtgatgcagaaaatgaaattaatgaacatgatgtcgtggtccagttgcagcctaatggtgaacgggattacaacatagcaaatactgtttgactttcagaagatgattggtttatttccctttaaaatgattaggtatatactgtaatttgattttttgctcccttcaaagatttctgtagaaataacttattttttagtattctacagtttaatcaaattactgaaacaggacttttgatctggtatttatctgccaagaatatacttcattcactaataatagactggtgctgtaactcaagcatcaattcagctcttcttttggaatgaaagtatagccaaaacataaaaaaaaaaaaatcctcagtatagcttgcaattaagacctagatcacagtatttaagtgttttgcgttttatacatgaggtcagtgctacagccacctagcatgaactaacccagcttccacctccataaagttacctagagttgttgagttggaatatgttctggcatttacctgacctgccaatcattagggagaggcaacaaggtaattcagcctttcctcctatcagcacaaagaaactcaaagctgttttttccctttctgttccaaagcagtcttatcctgacaggagcggtctatactagtgcagatttcaacacttttttttaacgttttaattactatagtgttatgtagagatttgattgagcagctaatgtttctgaactttacttactaattttcagtgtccttaagggttctgtagtgttatcaaagcaaaaagaaaatgctgcataaaaataccaaacttcagcaactgttaatactcagatcatatacctcttaataaatagcatcttatgctaattagccctgctaaactatgtacagaggaaactgttcaagtattggatttgaaagtaagtgacttatgtttaacagaactaatgatgtattgaaacactgtattatgaaaagctaaattatacatcattgtaactatgtagagtgtagactataatgtataatccaaatgctaacgacacccggaaataagggggatgctcgacann

SEQ ID NO: 372389 - DNA, 2734 bp, Homo sapiens
gtgcagggaagagacgcgtcagcgccagggccaggcccgcccgggggcagcccggcagccgaatcttgggctactctgtcccaacagccggagcagatcagaccgaccggccctgcccgctcggtcccgcgccctccagaccctacggtctccgtttctaggggcacatggttagcggcaggcgcccacagccaatccactttgccagcctgccccttcctctgccaagagcagcttcttcagccgcgctccagttccgcagacgcctgccccaccctgctcttcccttccagggaagacggatcacgcggccaagaacgagactcgcaaactgggcatttctccgagccgggctagagcaagtagcgagactccgcgtgagagtgggaaagagccttaacaggcaaccatgttgcccagtgggttttctgtgcctttgggtgcggaccaatgaggcgcgtggggcgggacttccgcttcgcctaggtgttgtcgtccctgctagtactccgggctgtgggggtcggtgcggatattcagtcatgaaatcagggtagggacttctcccgcagcgacgcggctggcaagactgtttgtgttgcgggggccggacttcaaggtgattttacaacgagatgctgctctccatagggatgctcatgctgtcagccacacaagtctacaccatcttgactgtccagctctttgcattcttaaacctactgcctgtagaagcagacattttagcatataactttgaaaatgcatctcagacatttgatgacctccctgcaagatttggttatagacttccagctgaaggtttaaagggttttttgattaactcaaaaccagagaatgcctgtgaacccatagtgcctccaccagttttaaatgcacagagagcaggatacaaggcagccatagttcacaatgttgattctgatgacctcattagcatgggatccaacgacattgaggtactaaagaaaattgacattccatctgtctttattggtgaatcatcagctaattctctgaaagatgaattcacatatgaaaaagggggccaccttatcttagttccagaatttagtcttcctttggaatactacctaattcccttccttatcatagtgggcatctgtctcatcttgatagtcattttcatgatcacaaaatttgtccaggatagacatagagctagaagaaacagacttcgtaaagatcaacttaagaaacttcctgtacataaattcaagaaaggagatgagtatgatgtatgtgccatttgtttggatgagtatgaagatggagacaaactcagaatccttccctgttcccatgcttatcattgcaagtgtgtagacccttggctaactaaaaccaaaaaaacctgtccagtgtgcaagcaaaaagttgttccttctcaaggcgattcagactctgacacagacagtagtcaagaagaaaatgaagtgacagaacatacccctttactgagacctttagcttctgtcagtgcccagtcatttggggctttatcggaatcccgctcacatcagaacatgacagaatcttcagactatgaggaagacgacaatgaagatactgacagtagtgatgcagaaaatgaaattaatgaacatgatgtcgtggtccagttgcagcctaatggtgaacgggattacaacatagcaaatactgtttgactttcagaagatgattggtttatttccctttaaaatgattaggtatatactgtaatttgattttttgctcccttcaaagatttctgtagaaataacttattttttagtattctacagtttaatcaaattactgaaacaggacttttgatctggtatttatctgccaagaatatacttcattcactaataatagactggtgctgtaactcaagcatcaattcagctcttcttttggaatgaaagtatagccaaaacataaaaaaaaaaaaatcctcagtatagcttgcaattaagacctagatcacagtatttaagtgttttgcgttttatacatgaggtcagtgctacagccacctagcatgaactaacccagcttccacctccataaagttacctagagttgttgagttggaatatgttctggcatttacctgacctgccaatcattagggagaggcaacaaggtaattcagcctttcctcctatcagcacaaagaaactcaaagctgttttttccctttctgttccaaagcagtcttatcctgacaggagcggtctatactagtgcagatttcaacacttttttttaacgttttaattactatagtgttatgtagagatttgattgagcagctaatgtttctgaactttacttactaattttcagtgtccttaagggttctgtagtgttatcaaagcaaaaagaaaatgctgcataaaaataccaaacttcagcaactgttaatactcagatcatatacctcttaataaatagcatcttatgctaattagccctgctaaactatgtacagaggaaactgttcaagtattggatttgaaagtaagtgacttatgtttaacagaactaatgatgtattgaaacactgtattatgaaaagctaaattatacatcattgtaactatgtagaaagtgtagactaatgtataatcaaaatgctaaggatttttatatggccttgtatgaggggagtttgaatgttaataaacatgttttccacttt

SEQ ID NO: 372390 - DNA, 1267 bp, Homo sapiens
gtgcagggaagagacgcgtcagcgccagggccaggcccgcccgggggcagcccggcagccgaatcttgggctactctgtcccaacagccggagcagatcagaccgaccggccctgcccgctcggtcccgcgccctccagaccctacggtctccgtttctaggggcacatggttagcggcaggcgcccacagccaatccactttgccagcctgccccttcctctgccaagagcagcttcttcagccgcgctccagttccgcagacgcctgccccaccctgctcttcccttccagggaagacggatcacgcggccaagaacgagactcgcaaactgggcatttctccgagccgggctagagcaagtagcgagactccgcgtgagagtgggaaagagccttaacaggcaaccatgttgcccagtgggttttctgtgcctttgggtgcggaccaatgaggcgcgtggggcgggacttccgcttcgcctaggtgttgtcgtccctgctagtactccgggctgtgggggtcggtgcggatattcagtcatgaaatcagggtagggacttctcccgcagcgacgcggctggcaagactgtttgtgttgcgggggccggacttcaagagagaaagagagagtgggcagacatcgaagccaaacagcagtatcccggaagcactcatgcaactttggtggcggccactcagttttctctgccagtgtctggtaaattcctctattttgtcctaatctgacaatagtaaatagtaaatttccaaaactgtcgtttcatcatcagtttcagcaccgtgggcagctgctcgggtcctctcttgttgccccaaacctgcccggctattactgttcgtcagtgatgcagcagaaacagtgaaaactgatgcattcctttcaacaatgatgtgtttgttctccaaggagaacatctgcagtttttgatacaatataaataagtaaggtggctgtgcctccaaagagttcttctggagaaacagatcaattcaagatttaaggtagggctttcaagagtttatgctatttaagcacagttttttaatgggtggacattagctccatctcgaagtaacaaaactggacagtgatagcaattaaaaagaactttaaacaggaggtaagaagtgtagtgcagtgctgtagtgcaggaagtgtagtgcagtgctgtagtgcagggcccataaggattcattaatagattttagaatcaatttagtacattgacataagctttataaa

SEQ ID NO: 372391 - DNA, 544 bp, Homo sapiens
gtcatagcctgctgtgaagaaataaactaggtaggggtcagtatatggaggctatcagcctattgatataccagtgctaaagagtcttttacttatatgacttcgggaattttcaagaaagataattttattgcagaaatataactggaattctccaaatggaatgaactgttttgacagtattatagaagtggttaaagagagattgcattaaatgtaatacaaaaccggtttgaggtcactcttgttgccatatttaatttgtatcatagcttagggttttaagccaaccaatctatctgtaatgaacagtaagcataaatatataaacacaatttgaatacttaagtggtattaaaaaaaccttaaaactgtattttgagtcaaaaattcagcagtagcagttcctagttctgtataaatacagaactgcatgtgtatatgtacctgtatacgtgtgtgtgtggtgaatttttataaaagttgaccaaatttattggaacatttgattgtaatatcacctgtttgaataaaatctaaaagc

SEQ ID NO: 372392 - DNA, 2841 bp, Homo sapiens
aggtcacaggcctttccagtgccgctactgtccctacagtgcctctcagaaggggaacctgaagacccatgtcctctgcgtccatcgcatgccttttgacaacagccagtatcccgaccgcaggttcaagcgctccagggtcgactcagaggcttctgggaatttcgaggagcctacagctgtcaaggcggggagctctgcagacctcacggaagagggcggcaagggccaggaggagaccaactgagcagaccaacctgtatattgcaatagtattttacacagttttaacattatgcatctggtaaaagtttgctaactgcattccaaggggaaaaaatcatgtacaaccccccaatagtgtatagaacatttaaaaaattttaaaagatatctatatatatattaaaaaaaaaaaattccccagcccttgaaaatggctgctaaactgttacccggcaacaagtacttccaaaacaatgcaggtgggagaaaagtgatttcaaaaattcttggtgccctctgagctggagagagctgggggcccttccaactcgaaagtcgtctttgtccaaaaataatgctcttaactgaaaaacgataccatctaaacgatttagtgttgcgttgaagatggaggggctgtgttttcgttgttgaaaacacctctataatctgacaccagctgctgtaattcgcctagaaccctaatgagatgtgtcgggaggcagctgcggtgccagttcagactggagcggtcactgcagagaaaatcaattcacgtggtgttgtaactgcactcttggagaaaccttagacggcccgcagccagcgccggggctgaccggcactgcagaggattgagatcttaaatgcgcatttttacaaaatacacagccaaatgaaatcaatgatcaggaagtgtctgcagacaaatgtccattgcaggtttgatgagtaattcctttttttagatcaaattgttctcggtagccttttcttcttttttaaaaaaaaattttggatgaagaaggaagttgctattaaaaaaaagtagggtacattatataaaatgttgttagaaaaactagctaaccccatccatagaagatgctggtgagcaattaaaatttaggtaataatagaaagatttttttactatgatttttaaaattttacttgaatgaaggctgctccggtccttattatcggattttttttcatgtgttggtttttataagtgtcacagacatgaagcaagattttcttctccagcaagctcttatgaaatagcttgtattaaaatatgaatctaaacatcgtgctctctatctctaatgacgaaaactgtttgagttaaaaatgtctgtttttgtaaaacaaatgtgttctatatttttgtagattttagattttctactgattggatactccaaatttatcaagttctgcaccacacagaaggagattttgagtgtcaataatgaaacacttaactcattaaaaaaatgatttaagaagactagttaaaggtttattcttgaatctgctagcatggtgtaaagttgagccttttaacatacttcctttgagtgacatgaaattggtgctgttgcttgtggtggtagagaagtatgaaagtattaacttcttctaaaacaaaatcattcagacttaaaaaaaaaaaaaaggtcaatatttccttgcaggctgggagcacagattaaaccccagggccttaaaaacttcagctctgcctacagcagtttacaaaaatactaaactgcaatcaatgtaaataaaattcttagtgctatcctgagacccagaaagaatctcaggcctaataaggaatccggtttgcatatgctgtcaaaagggtgtcatcctaaccgaggtttcagtgtaaatgaggtcgctgtgcaacttggacccatctggcatagagcaagctgctttccttgtttttcctagtatagttcctcactgccttacttaaatcgagttgataaacttaatgcaactgtttctatgatcctagagaaaggactgaaatgttattgaaaactttccgactgtagtaagctttaggattttgactgcactactgtgtttggtgactgtgccagtcccttgctttctgtgtttgctctgcctttggtatcttagcaaagaaaaataaaaaaagaaaaaaaaacataaaaaaaaaagaaaaaagaaaaaaaagaggaaaaaaaagtgggggaaaaaatgagagccacattccatttctagcactttgggagctctttcagtatttttttgtgtcttttcagcatcctcagatgcgacaggcaataattctgtttgtgacactgggaacatcccctcttctttgtggtgtgtgttgattccattttgtccagtgctgctgtccttcctccccctctgacacaggccttctttccagaacatttgtaacttgtaatacaaacaagtgacagccacagtgatgcagcgtcagtttctgaatgtcatcaggttctcatatctaaacatgtcaagttttttccctgtaacttctgtagtctgtgatgctggtcataatactgtctacattcctacgcaaagaaaaaaaaatctatcttggaggaaatctgagatcaataggagtagaggattttgttgctatgcttgtaacaagtagaaaactttgtatttaaagtttattcttggtcattatttattattataatacatcagttgacagaactttattctggtatagaaagtattaaaagttgttttttcagcaatgactgttttctttctgctgttagaataaaatgtctttgaagcagc

SEQ ID NO: 372393 - DNA, 757 bp, Homo sapiens
attaccattctaatgtttctaatggctttcagagctgtcagcatgaaatacaagtaattcctccaggtagactgactggatgagatagaaaaatggagggcttgaggagattcgggtgtgtttgatgtttcctatcatttcatcacttcccagggaactggggctttagagagtgaatagagtattgtttgccatattggtagcacatggaatttggattccatgatttatttctttggatctcaattgataacatcatcacagcctggcgcagaggctcacgcctgtaatcccagcactttgggaggccgaggcggttggatcatttgaggtcaggtgttcgagaccagcctgaccaacatggtgaaaccccgtctctactaaaaatacagaaaaagtagcccggcgtgctggtgcatgcctgtagtcccagctactcgggaggctgaggcaggagaatcgcttgaacccgggaggcggtggttgcagtgagtttagatcaaaccactgcactccagcctgggtgacagactctcaaaacaaaaaaacaaaaaaacaaaaaaaccaaccataatcacagagaagtgagagtgattaaaaggagcacttattggggtttattctccaattctccattcttatttgggctatctacaagccatctgaatttacttcttcaaagctttcgaaaggtgatccgcctcattatatttttacccttttcctatgttgatgactcaggatttaaatacagtgt

SEQ ID NO: 372394 - DNA, 2228 bp, Homo sapiens
tgtttaatcaaaggaagagtcaaaataagctacacccagattactgagaaaggtgaaatgaaaacaagctcaaaaccaaattccaggaagatgctgtctttgtattgacttaccatttcatgttttcacacatgtcaaagtcttgaagcttcggtcattagtcttccgcttcctaaagcaagaaactaaatgctgacttgtgtcgtttgccccagatgccaccggaaatgtcatcttctccccagacgctggcttgcaagcacagcagcacccagaggctaacctatttcccctatagcccaagctctgagatctcccgtctggtcacaatgatctacaggagaggaagaaagctatctagggacgagatctagaatcaactgagagagatgcttaaaaatcaccagttactttaatgacaagaaactagaatgtgtttaatgctaaaaagaaggatccaggccaaggagggtaaagaaaatgcagaatgcaaattatcccctcactgggggatatccgggagcgaagtccctgagctgctgaggaagctttacgcctaaggagccatccgcagagccatcctgtgcaaaggaaggagctaggctgtgcgccctgggcgtcatgatccttctgcgggcctccgaagtgcggcagctgcttcacaataagttcgtggtcatcctgggggactctgtgcatagggcagtatacaaggacctggtgcttctgctgcagaaggaccgcctgctcactcccgggcagcttagagcaaggggggagctgaacttcgaacaagatgagctggtggacggaggccagcggggccacatgcacaacggccttaactaccgtgaggtccgcgagttccgctccgaccaccatctggtacgtttttacttcctcacccgcgtgtactccgattacctccagaccatcttgaaagagctgcagtcgggcgagcacgcccccgacctggtcatcatgaattcctgcctctgggacatctccaggtatggtccgaactcctggagaagctacctggagaacctggagaacctgttccagtgcctgggccaggtgctgcccgagtcttgcctcctggtgtggaacacggccatgcctgtgggcgaggaagtcaccgggggttttcttccgcccaagctccggcggcagaaggccaccttcctgaaaaacgaagtggtcaaagccaacttccacagcgccaccgaggcacgtaaacataacttcgatgtactggacttgcatttccacttccgccacgcgagggagaacctgcactgggacggggtgcactggaatggacgtgtgcaccgctgcctctcccagctgctgctggcccacgtggccgacgcctggggtgtggagctgccccaccgccaccccgtgggcgagtggatcaagaagaaaaaacctggcccgagagtcgaagggccgccccaggccaacagaaatcacccggccttacctctgtccccacccttaccttcccccacataccgccccctgcttgggttcccaccccagcgcttgccgctgctcccgctcctgtccccacagcctcctcctcccattctccatcaccagggaatgccccggttcccacagggtcccccagatgcctgtttttcctcagaccatactttccagtcggatcaattctattgccattcagatgtcccctcatcagcccatgcaggtttcttcgtcgaagacaattttatggttggtcctcagctgcctatgcccttcttccccacaccccgttatcagcggcctgccccagtggtacataggggttttggcaggtatcgtccccgtggcccctatacgccctggggacagcggcctcgaccttcaaagagaagggccccagccaatcctgagccaaggcctcaatagacggacctaggccttatttcctctttatgaacatggattggacagatctgacacttcctttccattgcttggcctgaacagactgaccttgttaacttaagcctggagtccatgcctcgtcttccttttgttcattgctgttaccaagaaagccaaggaagagcagcctgactcattcttcttggctgcagcctcttccccacttcctgggagtgacccagcgttattcctgcctcctcactcctattctctttgcctttgtgtaaaaataaaatggaaataaacaagttgcacagaaaaaaaaaagg

SEQ ID NO: 372395 - DNA, 1836 bp, Homo sapiens
caaagatgtttcctttctttttcaaagcaagaaactagaatgtgtttaatgctaaaaagaaggatccaggccaaggagggtaaagaaaatgcagaatgcaaattatcccctcactgggggatatccgggagcgaagtccctgagctgctgaggaagctttacgcctaaggagccatccgcagagccatcctgtgcaaaggaaggagctaggctgtgcgccctgggcgtcatgatccttctgcgggcctccgaagtgcggcagctgcttcacaataagttcgtggtcatcctgggggactctgtgcatagggcagtatacaaggacctggtgcttctgctgcagaaggaccgcctgctcactcccgggcagcttagagcaaggggggagctgaacttcgaacaagatgagctggtggacggaggccagcggggccacatgcacaacggccttaactaccgtgaggtccgcgagttccgctccgaccaccatctggtacgtttttacttcctcacccgcgtgtactccgattacctccagaccatcttgaaagagctgcagtcgggcgagcacgcccccgacctggtcatcatgaattcctgcctctgggacatctccaggtatggtccgaactcctggagaagctacctggagaacctggagaacctgttccagtgcctgggccaggtgctgcccgagtcttgcctcctggtgtggaacacggccatgcctgtgggcgaggaagtcaccgggggttttcttccgcccaagctccggcggcagaaggccaccttcctgaaaaacgaagtggtcaaagccaacttccacagcgccaccgaggcacgtaaacataacttcgatgtactggacttgcatttccacttccgccacgcgagggagaacctgcactgggacggggtgcactggaatggacgtgtgcaccgctgcctctcccagctgctgctggcccacgtggccgacgcctggggtgtggagctgccccaccgccaccccgtgggcgagtggatcaagaagaaaaaacctggcccgagagtcgaagggccgccccaggccaacagaaatcacccggccttacctctgtccccacccttaccttcccccacataccgccccctgcttgggttcccaccccagcgcttgccgctgctcccgctcctgtccccacagcctcctcctcccattctccatcaccagggaatgccccggttcccacagggtcccccagatgcctgtttttcctcagaccatactttccagtcggatcaattctattgccattcagatgtcccctcatcagcccatgcaggtttcttcgtcgaagacaattttatggttggtcctcagctgcctatgcccttcttccccacaccccgttatcagcggcctgccccagtggtacataggggttttggcaggtatcgtccccgtggcccctatacgccctggggacagcggcctcgaccttcaaagagaagggccccagccaatcctgagccaaggcctcaatagacggacctaggccttatttcctctttatgaacatggattggacagatctgacacttcctttccattgcttggcctgaacagactgaccttgttaacttaagcctggagtccatgcctcgtcttccttttgttcattgctgttaccaagaaagccaaggaagagcagcctgactcattcttcttggctgcagcctcttccccacttcctgggagtgacccagcgttattcctgcctcctcactcctattctctttgcctttgtgtaaaaataaaatggaaataaacaagttgcacagaaaaaaaaaagg

SEQ ID NO: 372396 - DNA, 718 bp, Homo sapiens
caccaggtggaacctgagcctccaacagcagcctcaggtcattcataggtcaagccccaggcctgaactgccactagacaaggcttttggctcccttcctgccctctcgccaatctcccaggtccgggcttggtggagcctgttatgcgggcactccaggtccactccctcagggcagaggccacagcgccatccccttccccatggtctccctacccccaacctgcactgggcgctccgcccagaggtgagtccctcccagcccttctctccttctgtcctagccatccgcagagccatcctgtgcaaaggaaggagctaggctgtgcgccctgggcgtcatgatccttctgcgggcctccgaagtgcggcagctgcttcacaataagttcgtggtcatcctgggggactctgtgcatagggcagtatacaaggacctggtgcttctgctgcagaaggaccgcctgctcactcccgggcagcttagagcaaggggggagctgaacttcgaacaagatgagctggtggacggaggccagcggggccacatgcacaacggccttaactaccgtgaggtccgcgagttccgctccgaccaccatctggtacgtttttacttcctcacccgcgtgtactccgattacctccagaccatcttgaaagagctgcagtcgggcgagcacgcccccgacctggtcatcatgaattcctgcctctg

SEQ ID NO: 372397 - DNA, 2083 bp, Homo sapiens
tgtttaatcaaaggaagagtcaaaataagctacacccagattactgagaaaggtgaaatgaaaacaagctcaaaaccaaattccaggaagatgctgtctttgtattgacttaccatttcatgttttcacacatgtcaaagtcttgaagcttcggtcattagtcttccgcttcctaaagcaagaaactaaatgctgacttgtgtcgtttgccccagatgccaccggaaatgtcatcttctccccagacgctggcttgcaagcacagcagcacccagaggctaacctatttcccctatagcccaagctctgagatctcccgtctggtcacaatgatctacaggagaggaagaaagctatctagggacgagatctagaatcaactgagagagatgcttaaaaatcaccagttactttaatgaccatccgcagagccatcctgtgcaaaggaaggagctaggctgtgcgccctgggcgtcatgatccttctgcgggcctccgaagtgcggcagctgcttcacaataagttcgtggtcatcctgggggactctgtgcatagggcagtatacaaggacctggtgcttctgctgcagaaggaccgcctgctcactcccgggcagcttagagcaaggggggagctgaacttcgaacaagatgagctggtggacggaggccagcggggccacatgcacaacggccttaactaccgtgaggtccgcgagttccgctccgaccaccatctggtacgtttttacttcctcacccgcgtgtactccgattacctccagaccatcttgaaagagctgcagtcgggcgagcacgcccccgacctggtcatcatgaattcctgcctctgggacatctccaggtatggtccgaactcctggagaagctacctggagaacctggagaacctgttccagtgcctgggccaggtgctgcccgagtcttgcctcctggtgtggaacacggccatgcctgtgggcgaggaagtcaccgggggttttcttccgcccaagctccggcggcagaaggccaccttcctgaaaaacgaagtggtcaaagccaacttccacagcgccaccgaggcacgtaaacataacttcgatgtactggacttgcatttccacttccgccacgcgagggagaacctgcactgggacggggtgcactggaatggacgtgtgcaccgctgcctctcccagctgctgctggcccacgtggccgacgcctggggtgtggagctgccccaccgccaccccgtgggcgagtggatcaagaagaaaaaacctggcccgagagtcgaagggccgccccaggccaacagaaatcacccggccttacctctgtccccacccttaccttcccccacataccgccccctgcttgggttcccaccccagcgcttgccgctgctcccgctcctgtccccacagcctcctcctcccattctccatcaccagggaatgccccggttcccacagggtcccccagatgcctgtttttcctcagaccatactttccagtcggatcaattctattgccattcagatgtcccctcatcagcccatgcaggtttcttcgtcgaagacaattttatggttggtcctcagctgcctatgcccttcttccccacaccccgttatcagcggcctgccccagtggtacataggggttttggcaggtatcgtccccgtggcccctatacgccctggggacagcggcctcgaccttcaaagagaagggccccagccaatcctgagccaaggcctcaatagacggacctaggccttatttcctctttatgaacatggattggacagatctgacacttcctttccattgcttggcctgaacagactgaccttgttaacttaagcctggagtccatgcctcgtcttccttttgttcattgctgttaccaagaaagccaaggaagagcagcctgactcattcttcttggctgcagcctcttccccacttcctgggagtgacccagcgttattcctgcctcctcactcctattctctttgcctttgtgtaaaaataaaatggaaataaacaagttgcacagaaaaaaaaaagg

SEQ ID NO: 372398 - DNA, 1717 bp, Homo sapiens
tgtttaatcaaaggaagagtcaaaataagctacacccagattactgagaaaggtgaaatgaaaacaagctcaaaaccaaattccaggaagatgctgtctttgtattgacttaccatttcatgttttcacacatgtcaaagtcttgaagcttcggtcattagtcttccgcttcctaaagcaagaaactaaatgctgacttgtgtcgtttgccccagatgccaccggaaatgtcatcttctccccagacgctggcttgcaagcacagcagcacccagaggctaacctatttcccctatagcccaagctctgagatctcccgtctggtcacaatgatctacaggagaggaagaaagctatctagggacgagatctagaatcaactgagagagatgcttaaaaatcaccagttactttaatgaaccatcttgaaagagctgcagtcgggcgagcacgcccccgacctggtcatcatgaattcctgcctctgggacatctccaggtatggtccgaactcctggagaagctacctggagaacctggagaacctgttccagtgcctgggccaggtgctgcccgagtcttgcctcctggtgtggaacacggccatgcctgtgggcgaggaagtcaccgggggttttcttccgcccaagctccggcggcagaaggccaccttcctgaaaaacgaagtggtcaaagccaacttccacagcgccaccgaggcacgtaaacataacttcgatgtactggacttgcatttccacttccgccacgcgagggagaacctgcactgggacggggtgcactggaatggacgtgtgcaccgctgcctctcccagctgctgctggcccacgtggccgacgcctggggtgtggagctgccccaccgccaccccgtgggcgagtggatcaagaagaaaaaacctggcccgagagtcgaagggccgccccaggccaacagaaatcacccggccttacctctgtccccacccttaccttcccccacataccgccccctgcttgggttcccaccccagcgcttgccgctgctcccgctcctgtccccacagcctcctcctcccattctccatcaccagggaatgccccggttcccacagggtcccccagatgcctgtttttcctcagaccatactttccagtcggatcaattctattgccattcagatgtcccctcatcagcccatgcaggtttcttcgtcgaagacaattttatggttggtcctcagctgcctatgcccttcttccccacaccccgttatcagcggcctgccccagtggtacataggggttttggcaggtatcgtccccgtggcccctatacgccctggggacagcggcctcgaccttcaaagagaagggccccagccaatcctgagccaaggcctcaatagacggacctaggccttatttcctctttatgaacatggattggacagatctgacacttcctttccattgcttggcctgaacagactgaccttgttaacttaagcctggagtccatgcctcgtcttccttttgttcattgctgttaccaagaaagccaaggaagagcagcctgactcattcttcttggctgcagcctcttccccacttcctgggagtgacccagcgttattcctgcctcctcactcctattctctttgcctttgtgtaaaaataaaatggaaataaacaagttgcacagaaaaaaaaaagg

SEQ ID NO: 372399 - DNA, 432 bp, Homo sapiens
ataggctgaagaacttaatggagaaattaataagattaaaaatgaattatcatcccttaaagaaactcatattaagttacaagaacattataacaaattatgcaatcaaaaaacatttgaggaagacaaaaagtttcaggtgaaaacaaagcctctgatatcaactccactacaaagccatttgcaggcaatcaagacgactaaaaatacttctggtgatgatgactggcagagcctcattacgaatcaactaaataaaagtgaaaatttactaagtttagaaaatgacaaccagccaaagaaaagaaaagcagaagagacgttggaaaaaaacaacagattaaaataatgtagataagtgctttcagtagtgaaattatgtaactgaaattctggtatagtttttactagaataaaatgactgttgtattt

SEQ ID NO: 372400 - DNA, 262 bp, Homo sapiens
ttgaaaacatgccaacttccaaatatctcactgcccttcctgtttcttcaacaatggtgttctgaagcatgggaggaaacatgaagtagtaaaaggcagtttttgtacactttacttcagttatatattagagattttgaagatctactacataagcctacacattcacattgtatacttttctggtgccagaactactaaggtagtggaaatcagccaagagatggtggttttaccacatactcataactgcagaggcttt

SEQ ID NO: 372401 - DNA, 672 bp, Homo sapiens
ataggctgaagaacttaatggagaaattaataagattaaaaatgaattatcatcccttaaagaaactcatattaagttacaagaacattataacaaattatgcaatcaaaaaacatttgaggaagacaaaaagtttcaggtgaaaacaaagcctctgatatcaactccactacaaagccatttgcaggcaatcaagacgactaaaaatacttctggtgatgatgactggcagagcctcattacgaatcaactaaataaaagtgaaaatttactaagtttagaaaatgacaaccagccaaagaaaagaaaagcagaagagacgttggaaaaaaacaacagattaaaataatgtagataagtgctttcagtagtgaaattatgtaactgaaattctggtatagtttttactagaataaaatgactgttgtatttaaagctctacagtttgtctttgcttttccaagtttttctaatgtgaagaaattgtattactctacttctgtcttctctctgtatattatcctttctttaaagtgctcattgcttcttcaatatccttttttaaagaacagaacttatgtattgtatgacagacattgtgaccccttgtaatttattacttcatatcctctggagtttgtgattttagtataaatttgagacaataactgt

SEQ ID NO: 372402 - DNA, 531 bp, Homo sapiens
taaaattacccaatacagtgtcttgaaaacatgccaacttccaaatatctcactgcccttcctgtttcttcaacaatggtgttctgaagcatgggaggaaacatgaagtagtaaaaggcagtttttgtacactttacttcagttatatattagagattttgaagatctactacataagcctacacattcacattgtatacttttctggtgccagaactactaaggtagtggaaatcagccaagagatggtggttttaccacatactcataactgcagaggctttacagactctttaaaatcttttgtataataatttcgaaggtaaaattagtttatctttcccaggtgaaaacaaagcctctgatatcaactccactacaaagccatttgcaggcaatcaagacgactaaaaatacttctggtgatgatgactggcagagcctcattacgaatcaactaaataaaagtgaaaatttactaagtttagaaaatgacaaccagccaaagaaaagaaaagcagaagagacgtt

SEQ ID NO: 372403 - DNA, 371 bp, Homo sapiens
ccataaagtaagtaaaattttatagggattggcctggtcatgaaaggaaaagaattgcctggaaaggagacccctgtcacatggtcttgataaaagatgaaaaaggcttgatgtgtcaaaaaaaaaaaaaaaaaactccagctctcctggtacccacaagttcccctgcatttccacctggccacagcaagcagtgatgctgagctgatagccctgggtggggcagggacacagccttgcaggcctgggcatcaagtgagagagcagctggcctgattgtggctcctgcctgctgcccgcgggggatttgacctagatgctctgtttatcttagtccccggcctgcagcatcagcagcggaggagaaatga

SEQ ID NO: 372404 - DNA, 414 bp, Homo sapiens
tagggctgacagaaagctagaaactattatatactcgtaactttgttaagacaccttggcagagaaataatactaaaccagtacctccagatttcaccccaacatatattcatattaggaacaactactctcttaacagcaaatggatgctttatatttacaaaatatatttaaatgtggtcaaataagaataattcttaataaaaaaagaccctagtaaaaaaaaatcctacgaaacaggtctcagcagtgcttattaattggctttccaaggtcttttctttaaaaaaaaaaaatgtaaaattaggcagcagcacctgaaccagttcaaaaaacattaatgcccaaaccaatttgcagattaatcttacaatattcattttgtaatctcttgtgcctgcacagtgcctggcc

SEQ ID NO: 372405 - DNA, 472 bp, Homo sapiens
taaaaaggagagaggtagatgataattgcattattgagagcagataattcttctgagtgaaatacatagttcatatcaaaagcatctactgagtgtgtggtgttatatatatatgtaggtttttcatccagggttctttggctcataactcccacagcccttacacagtcttgttataatgttggatgtgttaggcctcaggtaggcctctggtgttctgccctccttccactctaatattctcccacctttctgattgtgggtcttaagactcaaaattccaagaggacagggttcagagagcttcccaatagctgaacatgtggaggttccgggagagtggtgtgcccaggtagggcatggaagcttcaagcctcttcccccataccttgccctagcgtttcttcgtctgtattttttccagtatagagcaataaactggtgaactaagtgtttccctgagttgtatgaa

SEQ ID NO: 372406 - DNA, 362 bp, Homo sapiens
gactgcatgtccatttataggttgtctgcaaggggaagcacatcacacgctgttgggtcattctggcagtccaacctggcattgtctttacacaatcctgcgtgtaattttgtatttacaataatcaggagcatttcatcttttattctgtagcaatagtttcaggtggtctccctacaatcatccagataattgtttcatcttctgctttggtttcaagttatcactaaattaccaaacccttctttgctaagttcacgggaacagtgtcctgaagtgaaaaaggctgcaggccaggcgaggtggcttacccttgtaatcccagtgctttaggaggccgaggtgggcagatcacttgaggc

SEQ ID NO: 372407 - DNA, 1500 bp, Homo sapiens
ccggcagcccccacgcccacggttggtttgttcagggagagaaaacggctttcccagctctactcacctcacttcaccctcagagagtcggggcggagtgagggtgaggagcctggtccagggtccccacctcggaagcatttagagatgtaaactttgatcctttgatcatttaacctgctcagcacagcaggaagtgggaacttggtccctaccccagtccccagggcctttggagggaagggttggacagtttggaggccagcagaccccttggggacagcttaatgtatctgaagattcctgagtgggaatgttgctggagggcaagctgcttctcttttttaaaaattcattttctctagcagctgttttggcccctttggtgtccctgagctccccatggcactgtttcctgccgtgactttctcctcctggacactggagcccaggtggtgcccgcgcacctctcacacactgggggatagggtcaaggcctcatccaagtctgttaacagcttcccactcaaccagtctccccaaaatacactgtgagttcaatgattctgcttataaaggagtgctatgaaactgacctattttcctaattggttaactgacttcatctcacataaccttgagtaaccaaagccttcatcagagcggacgatccaacccaacatgctgtttcccatcctcaaaaggcacggggaccaatggccacccaactccttcccaaccctcccctccagggacgagagatggccccctctttccctttccccactctgcaagcactcccccaccaacgggtgcatcacagcccctcactgggaccagggggcctccctctccggtggaaccagtgtcacatgcctgtgcatctctgtgattctcagagggtctgaggtccgagcaccctgctgtggcctgtgggaagacgctacaaagtcccactggatctaaaccagaggcctgttctggcgagcagggaaactgtgtcctggcagagatcgtggtcctgggcacacaggacccctcagcacactgaggtggagctggggcgaggggagggggtgcgctctgggtaactgaaggtgtgaagggcccagggcctgtttctgggcagtgcaggaagtcccagccccatgcctgtggtgagatcccctgtagggccccccccaccatggacacttcggggcctctacggtcttccaaagctgtgtcctcatttccactgcagcagaggggcgtccccagctccgtcaaacagccctttctgtttctggagtcctacaagtggaggcccaaatccgttcccatgttgaggcaaggccctggctgttccttcctctctggaaaccgccttgaactcttcctttgggacatgcctcctcgaccagccttgaaggggtgctcctctctcactacctggaaccaaacacccccttcctttgtgtacaagggcaataaagagtagaccttcatcttctttatttt

SEQ ID NO: 372408 - DNA, 1111 bp, Homo sapiens
gcggtcacgtgacgtgcgtggcgacgtgtcggccatcttgtgttgttgaggctgaggactgactggggttctgagactccctgtcccggaccgcagattatagtgggaccagtctcattaggttgaatctacagcctatgttggtgttaacccaggtctcttagagcgttaaaaggatctgaacaaagtctgctcaaatctcctgctgtgaaccagcagaatttttgaacaggtttcttcacatataaaaatctattgtaaaaatacggaaaagaatggcagcggaaacgcagacactgaactttgggcctgaatgatgtgtttggaccccgaatatggaattctcatggaattttgagatccatcacattgtagtgtggcttccccccctcccctccttcctttttccccaaagttggtgattgaagatcctctcttcagtggcatcaataataataattactttttctattcaaacctcgggcaacccctttggtaatatcagaagtagtatctaaaatagataaattggatttgtgtcttaaactcttggttgttcaggtgggagtggttcaataaatgatgcagacttcctgtagtaactctatttgaggagtcttattaacttatcctattagaaatatttctttttattaatatatgtaatctcgaagttttcttaacctttatagccagcatttggagactgaggagaaatcactatttgaagttctaagaaccgatggaactcctgtattttgagagtttatttagaacatgttaacctaagtaatgctgtacttgttttagttattcctttatatttttaaaatgattttcttagtatcaaattaatatgtttctaaaaaaattagaaataactagtaagccagaaataatttcaacatccatggtacacactgtaaataccttggtgtatctttccaggtggttttatgtatgcttatttgtgtatatatacacttattttttacaaaaatgggatcatactgtaccttcagttttgtagcctgcttaaagaaataaccaaatcagaaacatctttttttaatcaataaatattttctgttgtattaaatggttgcattgt

SEQ ID NO: 372409 - DNA, 1041 bp, Homo sapiens
gcggtcacgtgacgtgcgtggcgacgtgtcggccatcttgtgttgttgaggctgaggactgactggggttctgagactccctgtcccggaccgcagcgttaaaaggatctgaacaaagtctgctcaaatctcctgctgtgaaccagcagaatttttgaacaggtttcttcacatataaaaatctattgtaaaaatacggaaaagaatggcagcggaaacgcagacactgaactttgggcctgaatgatgtgtttggaccccgaatatggaattctcatggaattttgagatccatcacattgtagtgtggcttccccccctcccctccttcctttttccccaaagttggtgattgaagatcctctcttcagtggcatcaataataataattactttttctattcaaacctcgggcaacccctttggtaatatcagaagtagtatctaaaatagataaattggatttgtgtcttaaactcttggttgttcaggtgggagtggttcaataaatgatgcagacttcctgtagtaactctatttgaggagtcttattaacttatcctattagaaatatttctttttattaatatatgtaatctcgaagttttcttaacctttatagccagcatttggagactgaggagaaatcactatttgaagttctaagaaccgatggaactcctgtattttgagagtttatttagaacatgttaacctaagtaatgctgtacttgttttagttattcctttatatttttaaaatgattttcttagtatcaaattaatatgtttctaaaaaaattagaaataactagtaagccagaaataatttcaacatccatggtacacactgtaaataccttggtgtatctttccaggtggttttatgtatgcttatttgtgtatatatacacttattttttacaaaaatgggatcatactgtaccttcagttttgtagcctgcttaaagaaataaccaaatcagaaacatctttttttaatcaataaatattttctgttgtattaaatggttgcattgt

SEQ ID NO: 372410 - DNA, 1150 bp, Homo sapiens
gcggtcacgtgacgtgcgtggcgacgtgtcggccatcttgtgttgttgaggctgaggactgactggggttctgagactccctgtcccggaccgcagtcaaagcacttaaacacacgtagtctctctgtaagaaagcgttaaaaggatctgaacaaagtctgctcaaatctcctgctgtgaaccagcagaatttttgaacagagaccacgtctccacctcctgggctccaacgattctcccatcttggcctcccaaagcgctggatttacaggtttcttcacatataaaaatctattgtaaaaatacggaaaagaatggcagcggaaacgcagacactgaactttgggcctgaatgatgtgtttggaccccgaatatggaattctcatggaattttgagatccatcacattgtagtgtggcttccccccctcccctccttcctttttccccaaagttggtgattgaagatcctctcttcagtggcatcaataataataattactttttctattcaaacctcgggcaacccctttggtaatatcagaagtagtatctaaaatagataaattggatttgtgtcttaaactcttggttgttcaggtgggagtggttcaataaatgatgcagacttcctgtagtaactctatttgaggagtcttattaacttatcctattagaaatatttctttttattaatatatgtaatctcgaagttttcttaacctttatagccagcatttggagactgaggagaaatcactatttgaagttctaagaaccgatggaactcctgtattttgagagtttatttagaacatgttaacctaagtaatgctgtacttgttttagttattcctttatatttttaaaatgattttcttagtatcaaattaatatgtttctaaaaaaattagaaataactagtaagccagaaataatttcaacatccatggtacacactgtaaataccttggtgtatctttccaggtggttttatgtatgcttatttgtgtatatatacacttattttttacaaaaatgggatcatactgtaccttcagttttgtagcctgcttaaagaaataaccaaatcagaaacatctttttttaatcaataaatattttctgttgtattaaatggttgcattgt

SEQ ID NO: 372411 - DNA, 1111 bp, Homo sapiens
gcggtcacgtgacgtgcgtggcgacgtgtcggccatcttgtgttgttgaggctgaggactgactggggttctgagactccctgtcccggaccgcagcgttaaaaggatctgaacaaagtctgctcaaatctcctgctgtgaaccagcagaatttttgaacagagaccacgtctccacctcctgggctccaacgattctcccatcttggcctcccaaagcgctggatttacaggtttcttcacatataaaaatctattgtaaaaatacggaaaagaatggcagcggaaacgcagacactgaactttgggcctgaatgatgtgtttggaccccgaatatggaattctcatggaattttgagatccatcacattgtagtgtggcttccccccctcccctccttcctttttccccaaagttggtgattgaagatcctctcttcagtggcatcaataataataattactttttctattcaaacctcgggcaacccctttggtaatatcagaagtagtatctaaaatagataaattggatttgtgtcttaaactcttggttgttcaggtgggagtggttcaataaatgatgcagacttcctgtagtaactctatttgaggagtcttattaacttatcctattagaaatatttctttttattaatatatgtaatctcgaagttttcttaacctttatagccagcatttggagactgaggagaaatcactatttgaagttctaagaaccgatggaactcctgtattttgagagtttatttagaacatgttaacctaagtaatgctgtacttgttttagttattcctttatatttttaaaatgattttcttagtatcaaattaatatgtttctaaaaaaattagaaataactagtaagccagaaataatttcaacatccatggtacacactgtaaataccttggtgtatctttccaggtggttttatgtatgcttatttgtgtatatatacacttattttttacaaaaatgggatcatactgtaccttcagttttgtagcctgcttaaagaaataaccaaatcagaaacatctttttttaatcaataaatattttctgttgtattaaatggttgcattgt

SEQ ID NO: 372412 - DNA, 930 bp, Homo sapiens
gcggtcacgtgacgtgcgtggcgacgtgtcggccatcttgtgttgttgaggctgaggactgactggggttctgagactccctgtcccggaccgcagattatagtgggaccagtctcattaggttgaatctacagcctatgttggtgttaacccaggtctcttagagcgttaaaaggatctgaacaaagtctgctcaaatctcctgctgtgaaccagcagaatttttgaacagagaccacgtctccacctcctgggctccaacgattctcccatcttggcctcccaaagcgctggatttacaggtttcttcacatataaaaatctattgtaaaaatacggaaaagaatggcagcggaaacgcagacactgaactttgggcctgaatgatgtgtttggaccccgaatatggaattctcatggaattttgagatccatcacattgtagtgtggcttccccccctcccctccttcctttttccccaaagttggtgattgaagatcctctcttcagtggcatcaataataataattactttttctattcaaacctcgggcaacccctttggtaatatcagaagtagtatctaaaatagataaattggatttgtgtcttaaactcttggttgttcaggtgggagtggttcaataaatgatgcagacttcctgtagtaactctatttgaggagtcttattaacttatcctattagaaatatttctttttattaatatatgtaatctcgaagttttcttaacctttatagccagcatttggagactgaggagaaatcactatttgaactagacgtgacccgtttggcgtcttgcatgtccggatgcgctggtgtccaattaaggtgccgtaccatgttaaagacatccaatcccgggcacggtcagggggtttacaaggcgggaaatattgtgggcaa

SEQ ID NO: 372413 - DNA, 723 bp, Homo sapiens
  misc_feature (355)..(355): n is a, c, g, or t
  misc_feature (381)..(381): n is a, c, g, or t
aaattgtatatagttattacaattttgtagcagtctctgtatagttattacacatgtttagaagggagggaggcaagaagggatagggagaatggtgatccaaaattgtatatagtttttggatcaaatagcatgaggggagaggaaaccattaaaaattggggctcctactctcctttgctttgtaaattcaaaagttgggggtgggtaagagggatagttaaaatgtttacaaaactttaggctccctcggaacttttgccagtgtggaggaaaataaaaaagaacttaaataaaatctgattgtattctaaaaaaaaaaaaaaaaaaaaaaaaaaaaaaaaaaaaaaaaaanaaaaaaaaaaaaaaaaaaaaaaaaanaaaaaaaaaaaaaaagaggaggggcggccggccgccgcacagaccacccgcgccggggaacgcgccgccgctctttgcccctcgacccccccacctgtcgtgatcttagtagtgcggtcgcgcgcccccccaggtgagtggtgcgcggtcgtattatttcctcaccacgcgcgcgcgcgcctcgcttcgccttctcacttctccgcgtctttcgtggtgcgggtaaacagctaccgctgcctcgtggtggctcgtcttgtcgtgctgcagcacgcccctccctttctgcggcgtgggctgctatcttacttgccggccccccccccgcgcctggaggttgtc

SEQ ID NO: 372414 - DNA, 860 bp, Homo sapiens
gcggtcacgtgacgtgcgtggcgacgtgtcggccatcttgtgttgttgaggctgaggactgactggggttctgagactccctgtcccggaccgcagattatagtgggaccagtctcattaggttgaatctacagcctatgttggtgttaacccaggtctcttagagcgttaaaaggatctgaacaaagtctgctcaaatctcctgctgtgaaccagcagaatttttgaacagagactgtctcgctctgtcacccaggctagagtgcagtggtgctatcgtaactcactggagccctgatctaggctcaaaccatcctcccacctcagcctcccaagtagctgggactaagatgctgcttgaatctggggcttcgtttatatttcaagactgctgcctgtaggagctccatctgtatcatttgtgttaatagtgaccctggagttttgtacttccagaacctatgtgagcatatgtgatggccttgtagtaagttaaaggggaaaaaattaaatcactaacaatgaatttagtattttcacaaatagcaaatactttgaattttagttgagatttacctgctttataaattcagtctgatttaaatcctgacttgctttataaatgcagagccattattcaatgctctaaaatcctctacgggtttgagtttaaaacatttggctagatggggcttaaaatggtggtaaaaccgctccttcaggatgtttagtattaaagaaaaaccttacaattgatgtggtctctacagctctagttgatgtagtctcttcatctctgtttgtcatccaagtaggtccacatacttttagaaaacacactgaattgatttatgttacaa

SEQ ID NO: 372415 - DNA, 678 bp, Homo sapiens
gcggtcacgtgacgtgcgtggcgacgtgtcggccatcttgtgttgttgaggctgaggactgactggggttctgagactccctgtcccggaccgcagcgttaaaaggatctgaacaaagtctgctcaaatctcctgctgtgaaccagcagaatttttgaacagagttgcactcttgctgccgaggctggagcacaatggcgtgatctcggctcaccacatcctctgcctcctgggctcaagcagttctgcctcagcctcccgagtagctgggattacaggcatgcgccaccacaccccgctaattttgtatttgtagtagagacagggtttctccatgttggtcaggcaggtctcaaattcccgacctcaggttatccgcccgccttggcctcccaaagtactgggattacaggcgtgagccaccgtgtgtggcctttatttttattttttgagatggagtttcactcttgttgcccaggctggagtgcaatggcacgatcttggctcactgcaacctccgtttcctgggttcaagcgattctcctgcctcagactcccgagtagctgggattgcaggtgtgtgctaccacacccggctaattttttgtatttttagtagagacagggtttcaccatgttggccaggctggtctggaactcccgacctcaggtgatcca

SEQ ID NO: 372416 - DNA, 297 bp, Homo sapiens
agatgtaagatgtcttgtaagatgtaagaagcttgcataacccctgtgaacaaccataggagaatgtgaagtttccaaaggaacgtttaaagttagttccgaagtagtcttcctgatcatgtgtgcaagacttcatgaccaagctcccagatgatccaggtcagtcctgtttgggcttttagaaaccagaggagttggaaattcagggacagtcttgtcaaaattctccatcttgatttgatattcacctttggaacctcgggtcaacagagatgcaaaacagtgatgtaacatgat

SEQ ID NO: 372417 - DNA, 151 bp, Homo sapiens
ggatttgctggtgcagtacaactaggcttaatagggacatgcctcctcgaccagccttgaaggggtgctcctctctcactacctggaaccaaacacccccttcctttgtgtacaagggcaataaagagtagaccttcatcttctttatttt

SEQ ID NO: 372418 - DNA, 5939 bp, Homo sapiens
gcggtcacgtgacgtgcgtggcgacgtgtcggccatcttgtgttgttgaggctgaggactgactggggttctgagactccctgtcccggaccgcagcgttaaaaggatctgaacaaagtctgctcaaatctcctgctgtgaaccagcagaatttttgaacagagaccacgtctccacctcctgggctccaacgattctcccatcttggcctcccaaagcgctggatttacaggtttcttcacatataaaaatctattgtaaaaatacggaaaagaatggcagcggaaacgcagacactgaactttgggcctgaatggctccgagctctgtccagtggtgggagtattacatcccctcctctttctccagcattgccgaagtataaattagcagattatcgttacggcagagaagaaatgttagcacttttccttaaagacaacaagataccttcagaccttctggataaagaatttctgcctatcctccaggaggaaccccttccaccattggctctggtaccctttacagaagaagaacagagaaacttttccatgtctgtaaatagtgctgctgtcctgcgattgacaggacgaggaggaggaggaacagtggtgggggctcctagaggtcgaagttcttcaagagggcgaggcagaggcagaggtgaatgtggtttctaccaaagaagttttgatgaagtagagggtgtttttggtcgaggaggtggcagagaaatgcatagatcgcagagctgggaggaaaggggtgacagacgttttgaaaaaccaggacgaaaagatgtagggagaccaaattttgaggaaggtggaccaacatcagtagggagaaagcatgaatttatacgctcagaaagtgaaaattggcgcatctttagagaggaacaaaatggagaagatgaagatggaggttggcgactagctggatcaaggagggatggagagaggtggcgacctcacagtcctgatggccctcgttctgcaggctggcgggaacacatggaacgacgtcggaggtttgagtttgattttcgagatagagatgatgaacggggttaccgaagggttcgctctggcagtgggagcatagatgatgacagggatagcttgcccgaatggtgcttagaggatgctgaagaagaaatgggtacatttgactcatctggagcattcctttctctaaaaaaagtacagaaagagcctattccagaagagcaggagatggacttccggcctgtggacgaaggggaggagtgctctgactctgagggtagccataatgaagaggccaaagaacccgataagacaaataagaaagaaggagagaaaacagatagagtaggagttgaagctagtgaggaaactccccagacctcatcatcatctgctagaccaggtactccttcagaccatcagtctcaggaagcatcacagtttgagaggaaagatgaaccaaaaactgagcaaacggaaaaagctgaagaggagactcggatggaaaatagtctaccagccaaagtgcccagcagaggggatgaaatggttgctgatgtccagcagcccctgtcgcagattccttcagatacagcctctcctcttctcatacttccacctcctgttcccaatcctagtcctactctccggccagttgaaacaccagttgtaggtgctcctggtatgggcagtgtttccacagaacctgatgatgaagaaggtctcaaacatttggagcagcaagctgagaaaatggtggcttatctccaagacagtgcactagatgatgaaagattggcatcaaaactgcaagagcacagagctaaaggagtgtcgattccattgatgcatgaagcaatgcagaagtggtattacaaagatcctcagggagaaattcaaggtcccttcaataatcaggagatggcagaatggtttcaggcgggctattttactatgtctttattggtgaagagagcgtgtgatgaaagcttccaacctcttggcgatatcatgaaaatgtggggaagggttcccttttctccaggtccagctccccctcctcatatgggagagctggaccaggaacgactgaccaggcagcaagaactcacagccttataccagatgcagcacctgcagtaccagcagtttttaatacaacaacaatatgcacaggttttggcccaacagcagaaagcagcactgtcttcccagcagcagcagcagttggcacttcttcttcaacagtttcagaccttgaagatgagaatatctgatcagaacatcattccctcagtaactaggtctgtgtccgtgccagatactggctctatctgggagcttcagccaacagcttcacagcctacagtttgggaaggtggtagtgtatgggatcttcctctggacaccacgacaccaggccctgccctggaacagcttcagcagctagagaaggccaaagctgcaaagctagagcaagagagaagagaggcagaaatgagggcaaaacgggaagaggaagagcgaaagaggcaggaagaactccgaagacaacaggaggaaattcttcggcgacagcaggaagaagaaaggaaaaggcgagaggaagaagaacttgcccgaaggaaacaggaagaggctctgcgtcgccagcgggagcaagaaattgcattaaggcgacagcgagaagaggaagaaagacagcagcaagaagaagctcttagaagactggaagagaggagaagagaagaggaagaaaggcggaagcaggaagaattgttacgcaaacaggaagaggaggctgcaaaatgggcccgggaagaagaagaagcccagcgtcgattagaggagaaccggctgcggatggaagaggaggcagccagactccggcatgaggaagaagaacggaagagaaaggagctggaggtccagcggcagaaggagttaatgcgccagaggcagcagcagcaagaggctctccggaggttgcagcagcagcagcagcaacaacagctggcgcagatgaagcttccttcttcttcaacgtggggccagcagtccaatacaacagcatgtcagtcccaggccacgctgtcgttggctgaaatccaaaaactagaggaagaacgagaacggcagcttcgagaagagcaaaggcgccagcagagggagttgatgaaagctcttcagcagcagcagcagcagcaacagcagaaactctcaggttgggggaatgtcagcaaaccttcaggtaccacgaaatctcttctggagatccagcaggaagaggccaggcaaatgcaaaagcagcagcagcagcagcagcaacaccagcaaccaaacagagctcgtaacaatacgcattccaacctgcacaccagcattgggaattctgtttggggctctataaatactggtcctcctaaccagtgggcatctgacctagtcagtagtatttggagtaatgctgacactaaaaactccaacatgggattctgggatgatgcagtgaaagaggtgggacctaggaattcaacaaataaaaataaaaacaacgccagtctcagtaaatctgtaggtgtgtctaaccggcagaataagaaagtagaagaagaagaaaagttgctgaagctctttcagggagtaaataaagcccaagatggatttacgcagtggtgtgaacagatgcttcatgcccttaatacggcaaataacttggatgttcccacatttgtttctttcctgaaagaagtagaatctccttatgaggtccatgattatatcagggcctatttaggagatacttctgaggccaaggagtttgccaagcagttccttgagcgccgtgccaaacagaaagccaaccagcagcgtcagcagcagcagctgccgcagcagcagcagcagccaccacagcagccgccacagcagccacaacagcaggactctgtgtgggggatgaaccacagtacactccattcagtatttcagaccaatcaaagcaacaaccaacaatccaattttgaggctgtgcagagtggcaagaagaagaaaaagcagaagatggtccgagcagatcccagtttattaggattttcagtcaatgcatcatcggagcgactcaacatgggtgaaatcgagacgttggatgactactgagcacctgccagtggactggccatccctctcctgtctgccgactatggagtctccacctttggacacaacacttactcaccatttactctttatcactctgcaacaaatcacagaaccgatcatctcaggctttttcttctggccctttgtgtccaagattctttaatccatttttgttggtgaacatctcagactatagataagtggactggaccctgtgtcttgggggtggcagttgggattactccccaacaaggctgattttaggcagcatgtgttcactgtgctgtgatttcatctactgtctcccagaaagtgtgttgggatcggccattagcagcttgctttctcttgtcactttttttcttctattttgttttttcttcttctttttccccccatcagggcaaatggtctaactggtgcaatcatgaagagagttaatggttaacagacattggccaataacaaaacaccccatggactgtgactcgagtatccaacaggcagtcagagctctcccggtctgaaagttgcattgccactgctaactttgggattgcatcagagaggccctgagtggggttgagatgaggttggtttggtttgatgttacacactcctcacctgttctttctgagtgtcctttctctgaaaggatttatgtttttcttcgttagatagtgacttctgagcaagctgatctcccctggcatgctccaacctgattggacaaaggaagctctatggcctgggagagagactattcttaatttttctttcttacaaaaactgatttttcccataaatatttttacttcagaggactaggaccattttgttttgggcccttctgctgaaaatttgtctcgtttaagaggcagctagaatctttaccatatgtatgaatttgtataatttcatttttggatagggataaacttttgcttctgataaaagcctggaatttcatctggtcctcagagcattgcgtgtgtgtcttgctgtagcccggaaaaggttttgtgtaaagattctgggatggcaagttgtttgccttttctgaaaagagaacatacagaacctgtccatctttaagaccttcatccatggaatctactatacaggaggatgcagtgggctggaggggatgggcgaaaatgggagcaggaagcctggcctggcttctggtcatggcctcctaaaaccttaaacttcaagtagaaatgtactcaagccctatttataaacaaatacttttcctgcctccaccaaacccctacagaacatcacctggaattgccactcacactgggttggagtcattgggcagctgtgcctgtgcgagaggtgctgtggtctgggcagcccctggaaaagcacctttgctgcctgtcattgttgcctgaagaaggctggagttgctctgagagcagtttgggtttggagtattatatttggcttctatttttattattttggatcaccattctccctatcccttcttgcctccctcccttctaaacatgtgtaataactatacagagactgctacaaaattgtatatagtttttggatcaaatagcatgaggggagaggaaaccattaaaaattggggctcctactctcctttgctttgtaaattcaaaagttgggggtgggtaagagggatagttaaaatgtttacaaaactttaggctccctcggaacttttgccagtgtggaggaaaataaaaaagaacttaaataaaatctgattgtattcta

SEQ ID NO: 372419 - DNA, 5870 bp, Homo sapiens
ctttctgttttattctatttcttatagattatagtgggaccagtctcattaggttgaatctacagcctatgttggtgttaacccaggtctcttagagcgttaaaaggatctgaacaaagtctgctcaaatctcctgctgtgaaccagcagaatttttgaacaggtttcttcacatataaaaatctattgtaaaaatacggaaaagaatggcagcggaaacgcagacactgaactttgggcctgaatggctccgagctctgtccagtggtgggagtattacatcccctcctctttctccagcattgccgaagtataaattagcagattatcgttacggcagagaagaaatgttagcacttttccttaaagacaacaagataccttcagaccttctggataaagaatttctgcctatcctccaggaggaaccccttccaccattggctctggtaccctttacagaagaagaacagagaaacttttccatgtctgtaaatagtgctgctgtcctgcgattgacaggacgaggaggaggaggaacagtggtgggggctcctagaggtcgaagttcttcaagagggcgaggcagaggcagaggtgaatgtggtttctaccaaagaagttttgatgaagtagagggtgtttttggtcgaggaggtggcagagaaatgcatagatcgcagagctgggaggaaaggggtgacagacgttttgaaaaaccaggacgaaaagatgtagggagaccaaattttgaggaaggtggaccaacatcagtagggagaaagcatgaatttatacgctcagaaagtgaaaattggcgcatctttagagaggaacaaaatggagaagatgaagatggaggttggcgactagctggatcaaggagggatggagagaggtggcgacctcacagtcctgatggccctcgttctgcaggctggcgggaacacatggaacgacgtcggaggtttgagtttgattttcgagatagagatgatgaacggggttaccgaagggttcgctctggcagtgggagcatagatgatgacagggatagcttgcccgaatggtgcttagaggatgctgaagaagaaatgggtacatttgactcatctggagcattcctttctctaaaaaaagtacagaaagagcctattccagaagagcaggagatggacttccggcctgtggacgaaggggaggagtgctctgactctgagggtagccataatgaagaggccaaagaacccgataagacaaataagaaagaaggagagaaaacagatagagtaggagttgaagctagtgaggaaactccccagacctcatcatcatctgctagaccaggtactccttcagaccatcagtctcaggaagcatcacagtttgagaggaaagatgaaccaaaaactgagcaaacggaaaaagctgaagaggagactcggatggaaaatagtctaccagccaaagtgcccagcagaggggatgaaatggttgctgatgtccagcagcccctgtcgcagattccttcagatacagcctctcctcttctcatacttccacctcctgttcccaatcctagtcctactctccggccagttgaaacaccagttgtaggtgctcctggtatgggcagtgtttccacagaacctgatgatgaagaaggtctcaaacatttggagcagcaagctgagaaaatggtggcttatctccaagacagtgcactagatgatgaaagattggcatcaaaactgcaagagcacagagctaaaggagtgtcgattccattgatgcatgaagcaatgcagaagtggtattacaaagatcctcagggagaaattcaaggtcccttcaataatcaggagatggcagaatggtttcaggcgggctattttactatgtctttattggtgaagagagcgtgtgatgaaagcttccaacctcttggcgatatcatgaaaatgtggggaagggttcccttttctccaggtccagctccccctcctcatatgggagagctggaccaggaacgactgaccaggcagcaagaactcacagccttataccagatgcagcacctgcagtaccagcagtttttaatacaacaacaatatgcacaggttttggcccaacagcagaaagcagcactgtcttcccagcagcagcagcagttggcacttcttcttcaacagtttcagaccttgaagatgagaatatctgatcagaacatcattccctcagtaactaggtctgtgtccgtgccagatactggctctatctgggagcttcagccaacagcttcacagcctacagtttgggaaggtggtagtgtatgggatcttcctctggacaccacgacaccaggccctgccctggaacagcttcagcagctagagaaggccaaagctgcaaagctagagcaagagagaagagaggcagaaatgagggcaaaacgggaagaggaagagcgaaagaggcaggaagaactccgaagacaacaggaggaaattcttcggcgacagcaggaagaagaaaggaaaaggcgagaggaagaagaacttgcccgaaggaaacaggaagaggctctgcgtcgccagcgggagcaagaaattgcattaaggcgacagcgagaagaggaagaaagacagcagcaagaagaagctcttagaagactggaagagaggagaagagaagaggaagaaaggcggaagcaggaagaattgttacgcaaacaggaagaggaggctgcaaaatgggcccgggaagaagaagaagcccagcgtcgattagaggagaaccggctgcggatggaagaggaggcagccagactccggcatgaggaagaagaacggaagagaaaggagctggaggtccagcggcagaaggagttaatgcgccagaggcagcagcagcaagaggctctccggaggttgcagcagcagcagcagcaacaacagctggcgcagatgaagcttccttcttcttcaacgtggggccagcagtccaatacaacagcatgtcagtcccaggccacgctgtcgttggctgaaatccaaaaactagaggaagaacgagaacggcagcttcgagaagagcaaaggcgccagcagagggagttgatgaaagctcttcagcagcagcagcagcagcaacagcagaaactctcaggttgggggaatgtcagcaaaccttcaggtaccacgaaatctcttctggagatccagcaggaagaggccaggcaaatgcaaaagcagcagcagcagcagcagcaacaccagcaaccaaacagagctcgtaacaatacgcattccaacctgcacaccagcattgggaattctgtttggggctctataaatactggtcctcctaaccagtgggcatctgacctagtcagtagtatttggagtaatgctgacactaaaaactccaacatgggattctgggatgatgcagtgaaagaggtgggacctaggaattcaacaaataaaaataaaaacaacgccagtctcagtaaatctgtaggtgtgtctaaccggcagaataagaaagtagaagaagaagaaaagttgctgaagctctttcagggagtaaataaagcccaagatggatttacgcagtggtgtgaacagatgcttcatgcccttaatacggcaaataacttggatgttcccacatttgtttctttcctgaaagaagtagaatctccttatgaggtccatgattatatcagggcctatttaggagatacttctgaggccaaggagtttgccaagcagttccttgagcgccgtgccaaacagaaagccaaccagcagcgtcagcagcagcagctgccgcagcagcagcagcagccaccacagcagccgccacagcagccacaacagcaggactctgtgtgggggatgaaccacagtacactccattcagtatttcagaccaatcaaagcaacaaccaacaatccaattttgaggctgtgcagagtggcaagaagaagaaaaagcagaagatggtccgagcagatcccagtttattaggattttcagtcaatgcatcatcggagcgactcaacatgggtgaaatcgagacgttggatgactactgagcacctgccagtggactggccatccctctcctgtctgccgactatggagtctccacctttggacacaacacttactcaccatttactctttatcactctgcaacaaatcacagaaccgatcatctcaggctttttcttctggccctttgtgtccaagattctttaatccatttttgttggtgaacatctcagactatagataagtggactggaccctgtgtcttgggggtggcagttgggattactccccaacaaggctgattttaggcagcatgtgttcactgtgctgtgatttcatctactgtctcccagaaagtgtgttgggatcggccattagcagcttgctttctcttgtcactttttttcttctattttgttttttcttcttctttttccccccatcagggcaaatggtctaactggtgcaatcatgaagagagttaatggttaacagacattggccaataacaaaacaccccatggactgtgactcgagtatccaacaggcagtcagagctctcccggtctgaaagttgcattgccactgctaactttgggattgcatcagagaggccctgagtggggttgagatgaggttggtttggtttgatgttacacactcctcacctgttctttctgagtgtcctttctctgaaaggatttatgtttttcttcgttagatagtgacttctgagcaagctgatctcccctggcatgctccaacctgattggacaaaggaagctctatggcctgggagagagactattcttaatttttctttcttacaaaaactgatttttcccataaatatttttacttcagaggactaggaccattttgttttgggcccttctgctgaaaatttgtctcgtttaagaggcagctagaatctttaccatatgtatgaatttgtataatttcatttttggatagggataaacttttgcttctgataaaagcctggaatttcatctggtcctcagagcattgcgtgtgtgtcttgctgtagcccggaaaaggttttgtgtaaagattctgggatggcaagttgtttgccttttctgaaaagagaacatacagaacctgtccatctttaagaccttcatccatggaatctactatacaggaggatgcagtgggctggaggggatgggcgaaaatgggagcaggaagcctggcctggcttctggtcatggcctcctaaaaccttaaacttcaagtagaaatgtactcaagccctatttataaacaaatacttttcctgcctccaccaaacccctacagaacatcacctggaattgccactcacactgggttggagtcattgggcagctgtgcctgtgcgagaggtgctgtggtctgggcagcccctggaaaagcacctttgctgcctgtcattgttgcctgaagaaggctggagttgctctgagagcagtttgggtttggagtattatatttggcttctatttttattattttggatcaccattctccctatcccttcttgcctccctcccttctaaacatgtgtaataactatacagagactgctacaaaattgtatatagtttttggatcaaatagcatgaggggagaggaaaccattaaaaattggggctcctactctcctttgctttgtaaattcaaaagttgggggtgggtaagagggatagttaaaatgtttacaaaactttaggctccctcggaacttttgccagtgtggaggaaaataaaaaagaacttaaataaaatctgattgtattcta

SEQ ID NO: 372420 - DNA, 5621 bp, Homo sapiens
tatttaatctacggtagtgttttattgaacttcttagaatttcactattcaactgttcgttaaagaacttaaagttgatactttcttgttcaggactgggtctattgcattatattatgttagtttttttaacttgtttctttcagcctcttgtggtccagctacttcaatgccattgttggtctcataagtcaagatcatcaggcctcgttcagtatttaaatgtagatgtcctgccttgtatagagatagaactttagatattaatttatggtggtgaatgtgtgccacatgttgacatctgactatcatttttttctgttttcttattttcaggcagaggcagaggtgaatgtggtttctaccaaagaagttttgatgaagtagagggtgtttttggtcgaggaggtggcagagaaatgcatagatcgcagagctgggaggaaaggggtgacagacgttttgaaaaaccaggacgaaaagatgtagggagaccaaattttgaggaaggtggaccaacatcagtagggagaaagcatgaatttatacgctcagaaagtgaaaattggcgcatctttagagaggaacaaaatggagaagatgaagatggaggttggcgactagctggatcaaggagggatggagagaggtggcgacctcacagtcctgatggccctcgttctgcaggctggcgggaacacatggaacgacgtcggaggtttgagtttgattttcgagatagagatgatgaacggggttaccgaagggttcgctctggcagtgggagcatagatgatgacagggatagcttgcccgaatggtgcttagaggatgctgaagaagaaatgggtacatttgactcatctggagcattcctttctctaaaaaaagtacagaaagagcctattccagaagagcaggagatggacttccggcctgtggacgaaggggaggagtgctctgactctgagggtagccataatgaagaggccaaagaacccgataagacaaataagaaagaaggagagaaaacagatagagtaggagttgaagctagtgaggaaactccccagacctcatcatcatctgctagaccaggtactccttcagaccatcagtctcaggaagcatcacagtttgagaggaaagatgaaccaaaaactgagcaaacggaaaaagctgaagaggagactcggatggaaaatagtctaccagccaaagtgcccagcagaggggatgaaatggttgctgatgtccagcagcccctgtcgcagattccttcagatacagcctctcctcttctcatacttccacctcctgttcccaatcctagtcctactctccggccagttgaaacaccagttgtaggtgctcctggtatgggcagtgtttccacagaacctgatgatgaagaaggtctcaaacatttggagcagcaagctgagaaaatggtggcttatctccaagacagtgcactagatgatgaaagattggcatcaaaactgcaagagcacagagctaaaggagtgtcgattccattgatgcatgaagcaatgcagaagtggtattacaaagatcctcagggagaaattcaaggtcccttcaataatcaggagatggcagaatggtttcaggcgggctattttactatgtctttattggtgaagagagcgtgtgatgaaagcttccaacctcttggcgatatcatgaaaatgtggggaagggttcccttttctccaggtccagctccccctcctcatatgggagagctggaccaggaacgactgaccaggcagcaagaactcacagccttataccagatgcagcacctgcagtaccagcagtttttaatacaacaacaatatgcacaggttttggcccaacagcagaaagcagcactgtcttcccagcagcagcagcagttggcacttcttcttcaacagtttcagaccttgaagatgagaatatctgatcagaacatcattccctcagtaactaggtctgtgtccgtgccagatactggctctatctgggagcttcagccaacagcttcacagcctacagtttgggaaggtggtagtgtatgggatcttcctctggacaccacgacaccaggccctgccctggaacagcttcagcagctagagaaggccaaagctgcaaagctagagcaagagagaagagaggcagaaatgagggcaaaacgggaagaggaagagcgaaagaggcaggaagaactccgaagacaacaggaggaaattcttcggcgacagcaggaagaagaaaggaaaaggcgagaggaagaagaacttgcccgaaggaaacaggaagaggctctgcgtcgccagcgggagcaagaaattgcattaaggcgacagcgagaagaggaagaaagacagcagcaagaagaagctcttagaagactggaagagaggagaagagaagaggaagaaaggcggaagcaggaagaattgttacgcaaacaggaagaggaggctgcaaaatgggcccgggaagaagaagaagcccagcgtcgattagaggagaaccggctgcggatggaagaggaggcagccagactccggcatgaggaagaagaacggaagagaaaggagctggaggtccagcggcagaaggagttaatgcgccagaggcagcagcagcaagaggctctccggaggttgcagcagcagcagcagcaacaacagctggcgcagatgaagcttccttcttcttcaacgtggggccagcagtccaatacaacagcatgtcagtcccaggccacgctgtcgttggctgaaatccaaaaactagaggaagaacgagaacggcagcttcgagaagagcaaaggcgccagcagagggagttgatgaaagctcttcagcagcagcagcagcagcaacagcagaaactctcaggttgggggaatgtcagcaaaccttcaggtaccacgaaatctcttctggagatccagcaggaagaggccaggcaaatgcaaaagcagcagcagcagcagcagcaacaccagcaaccaaacagagctcgtaacaatacgcattccaacctgcacaccagcattgggaattctgtttggggctctataaatactggtcctcctaaccagtgggcatctgacctagtcagtagtatttggagtaatgctgacactaaaaactccaacatgggattctgggatgatgcagtgaaagaggtgggacctaggaattcaacaaataaaaataaaaacaacgccagtctcagtaaatctgtaggtgtgtctaaccggcagaataagaaagtagaagaagaagaaaagttgctgaagctctttcagggagtaaataaagcccaagatggatttacgcagtggtgtgaacagatgcttcatgcccttaatacggcaaataacttggatgttcccacatttgtttctttcctgaaagaagtagaatctccttatgaggtccatgattatatcagggcctatttaggagatacttctgaggccaaggagtttgccaagcagttccttgagcgccgtgccaaacagaaagccaaccagcagcgtcagcagcagcagctgccgcagcagcagcagcagccaccacagcagccgccacagcagccacaacagcaggactctgtgtgggggatgaaccacagtacactccattcagtatttcagaccaatcaaagcaacaaccaacaatccaattttgaggctgtgcagagtggcaagaagaagaaaaagcagaagatggtccgagcagatcccagtttattaggattttcagtcaatgcatcatcggagcgactcaacatgggtgaaatcgagacgttggatgactactgagcacctgccagtggactggccatccctctcctgtctgccgactatggagtctccacctttggacacaacacttactcaccatttactctttatcactctgcaacaaatcacagaaccgatcatctcaggctttttcttctggccctttgtgtccaagattctttaatccatttttgttggtgaacatctcagactatagataagtggactggaccctgtgtcttgggggtggcagttgggattactccccaacaaggctgattttaggcagcatgtgttcactgtgctgtgatttcatctactgtctcccagaaagtgtgttgggatcggccattagcagcttgctttctcttgtcactttttttcttctattttgttttttcttcttctttttccccccatcagggcaaatggtctaactggtgcaatcatgaagagagttaatggttaacagacattggccaataacaaaacaccccatggactgtgactcgagtatccaacaggcagtcagagctctcccggtctgaaagttgcattgccactgctaactttgggattgcatcagagaggccctgagtggggttgagatgaggttggtttggtttgatgttacacactcctcacctgttctttctgagtgtcctttctctgaaaggatttatgtttttcttcgttagatagtgacttctgagcaagctgatctcccctggcatgctccaacctgattggacaaaggaagctctatggcctgggagagagactattcttaatttttctttcttacaaaaactgatttttcccataaatatttttacttcagaggactaggaccattttgttttgggcccttctgctgaaaatttgtctcgtttaagaggcagctagaatctttaccatatgtatgaatttgtataatttcatttttggatagggataaacttttgcttctgataaaagcctggaatttcatctggtcctcagagcattgcgtgtgtgtcttgctgtagcccggaaaaggttttgtgtaaagattctgggatggcaagttgtttgccttttctgaaaagagaacatacagaacctgtccatctttaagaccttcatccatggaatctactatacaggaggatgcagtgggctggaggggatgggcgaaaatgggagcaggaagcctggcctggcttctggtcatggcctcctaaaaccttaaacttcaagtagaaatgtactcaagccctatttataaacaaatacttttcctgcctccaccaaacccctacagaacatcacctggaattgccactcacactgggttggagtcattgggcagctgtgcctgtgcgagaggtgctgtggtctgggcagcccctggaaaagcacctttgctgcctgtcattgttgcctgaagaaggctggagttgctctgagagcagtttgggtttggagtattatatttggcttctatttttattattttggatcaccattctccctatcccttcttgcctccctcccttctaaacatgtgtaataactatacagagactgctacaaaattgtatatagtttttggatcaaatagcatgaggggagaggaaaccattaaaaattggggctcctactctcctttgctttgtaaattcaaaagttgggggtgggtaagagggatagttaaaatgtttacaaaactttaggctccctcggaacttttgccagtgtggaggaaaataaaaaagaacttaaataaaatctgattgtattcta

SEQ ID NO: 372421 - DNA, 5226 bp, Homo sapiens
gcggtcacgtgacgtgcgtggcgacgtgtcggccatcttgtgttgttgaggctgaggactgactggggttctgagactccctgtcccggaccgcagattatagtgggaccagtctcattaggttgaatctacagcctatgttggtgttaacccaggtctcttagagcgttaaaaggatctgaacaaagtctgctcaaatctcctgctgtgaaccagcagaatttttgaacagagaccacgtctccacctcctgggctccaacgattctcccatcttggcctcccaaagcgctggatttacaggtttcttcacatataaaaatctattgtaaaaatacggaaaagaatggcagcggaaacgcagacactgaactttgggcctgaatggctccgagctctgtccagtggtgggagtattacatcccctcctctttctccagcattgccgaagtataaattagcagattatcgttacggcagagaagaaatgttagcacttttccttaaagacaacaagataccttcagaccttctggataaagaatttctgcctatcctccaggaggaaccccttccaccattggctctggtaccctttacagaagaagaacagagaaacttttccatgtctgtaaatagtgctgctgtcctgcgattgacaggacgaggaggaggaggaacagtggtgggggctcctagaggtcgaagttcttcaagagggcgaggcagaggcagaggtgaatgtggtttctaccaaagaagttttgatgaagtagagggtgtttttggtcgaggaggtggcagagaaatgcatagatcgcagagctgggaggaaaggggtgacagacgttttgaaaaaccaggacgaaaagatgtagggagaccaaattttgaggaaggtggaccaacatcagtagggagaaagcatgaatttatacgctcagaaagtgaaaattggcgcatctttagagaggaacaaaatggagaagatgaagatggaggttggcgactagctggatcaaggagggatggagagaggtggcgacctcacagtcctgatggccctcgttctgcaggctggcgggaacacatggaacgacgtcggaggtttgagtttgattttcgagatagagatgatgaacggggttaccgaagggttcgctctggcagtgggagcatagatgatgacagggatagcttgcccgaatggtgcttagaggatgctgaagaagaaatgggtacatttgactcatctggagcattcctttctctaaaaaaagtacagaaagagcctattccagaagagcaggagatggacttccggcctgtggacgaaggggaggagtgctctgactctgagggtagccataatgaagaggccaaagaacccgataagacaaataagaaagaaggagagaaaacagatagagtaggagttgaagctagtgaggaaactccccagacctcatcatcatctgctagaccaggtactccttcagaccatcagtctcaggaagcatcacagtttgagaggaaagatgaaccaaaaactgagcaaacggaaaaagctgaagaggagactcggatggaaaatagtctaccagccaaagtgcccagcagaggggatgaaatggttgctgatgtccagcagcccctgtcgcagattccttcagatacagcctctcctcttctcatacttccacctcctgttcccaatcctagtcctactctccggccagttgaaacaccagttgtaggtgctcctggtatgggcagtgtttccacagaacctgatgatgaagaaggtctcaaacatttggagcagcaagctgagaaaatggtggcttatctccaagacagtgcactagatgatgaaagattggcatcaaaactgcaagagcacagagctaaaggagtgtcgattccattgatgcatgaagcaatgcagaagtggtattacaaagatcctcagggagaaattcaaggtcccttcaataatcaggagatggcagaatggtttcaggcgggctattttactatgtctttattggtgaagagagcgtgtgatgaaagcttccaacctcttggcgatatcatgaaaatgtggggaagggttcccttttctccaggtccagctccccctcctcatatgggagagctggaccaggaacgactgaccaggcagcaagaactcacagccttataccagatgcagcacctgcagtaccagcagtttttaatacaacaacaatatgcacaggttttggcccaacagcagaaagcagcactgtcttcccagcagcagcagcagttggcacttcttcttcaacagtttcagaccttgaagatgagaatatctgatcagaacatcattccctcagtaactaggtctgtgtccgtgccagatactggctctatctgggagcttcagccaacagcttcacagcctacagtttgggaaggtggtagtgtatgggatcttcctctggacaccacgacaccaggccctgccctggaacagcttcagcagctagagaaggccaaagctgcaaagctagagcaagagagaagagaggcagaaatgagggcaaaacgggaagaggaagagcgaaagaggcaggaagaactccgaagacaacaggaggaaattcttcggcgacagcaggaagaagaaaggaaaaggcgagaggaagaagaacttgcccgaaggaaacaggaagaggctctgcgtcgccagcgggagcaagaaattgcattaaggcgacagcgagaagaggaagaaagacagcagcaagaagaagctcttagaagactggaagagaggagaagagaagaggaagaaaggcggaagcaggaagaattgttacgcaaacaggaagaggaggctgcaaaatgggcccgggaagaagaagaagcccagcgtcgattagaggagaaccggctgcggatggaagaggaggcagccagactccggcatgaggaagaagaacggaagagaaaggagctggaggtccagcggcagaaggagttaatgcgccagaggcagcagcagcaagaggctctccggaggttgcagcagcagcagcagcaacaacagctggcgcagatgaagcttccttcttcttcaacgtggggccagcagtccaatacaacagcatgtcagtcccaggccacgctgtcgttggctgaaatccaaaaactagaggaagaacgagaacggcagcttcgagaagagcaaaggcgccagcagagggagttgatgaaagctcttcagcagcagcagcagcagcaacagcagaaactctcaggttgggggaatgtcagcaaaccttcaggtaccacgaaatctcttctggagatccagcaggaagaggccaggcaaatgcaaaagcagcagcagcagcagcagcaacaccagcaaccaaacagagctcgtaacaatacgcattccaacctgcacaccagcattgggaattctgtttggggctctataaatactggtcctcctaaccagtgggcatctgacctagtcagtagtatttggagtaatgctgacactaaaaactccaacatgggattctgggatgatgcagtgaaagaggtgggacctaggaattcaacaaataaaaataaaaacaacgccagtctcagtaaatctgtaggtgtgtctaaccggcagaataagaaagtagaagaagaagaaaagttgctgaagctctttcagggagtaaataaagcccaagatggatttacgcagtggtgtgaacagatgcttcatgcccttaatacggcaaataacttggatgttcccacatttgtttctttcctgaaagaagtagaatctccttatgaggtccatgattatatcagggcctatttaggagatacttctgaggccaaggagtttgccaagcagttccttgagcgccgtgccaaacagaaagccaaccagcagcgtcagcagcagcagctgccgcagcagcagcagcagccaccacagcagccgccacagcagccacaacagcaggactctgtgtgggggatgaaccacagtacactccattcagtatttcagaccaatcaaagcaacaaccaacaatccaattttgaggctgtgcagagtggcaagaagaagaaaaagcagaagatggtccgagcagatcccagtttattaggattttcagtcaatgcatcatcggagcgactcaacatgggtgaaatcgagacgttggatgactactgagcacctgccagtggactggccatccctctcctgtctgccgactatggagtctccacctttggacacaacacttactcaccatttactctttatcactctgcaacaaatcacagaaccgatcatctcaggctttttcttctggccctttgtgtccaagattctttaatccatttttgttggtgaacatctcagactatagataagtggactggaccctgtgtcttgggggtggcagttgggattactccccaacaaggctgattttaggcagcatgtgttcactgtgctgtgatttcatctactgtctcccagaaagtgtgttgggatcggccattagcagcttgctttctcttgtcactttttttcttctattttgttttttcttcttctttttccccccatcagggcaaatggtctaactggtgcaatcatgaagagagttaatggttaacagacattggccaataacaaaacaccccatggactgtgactcgagtatccaacaggcagtcagagctctcccggtctgaaagttgcattgccactgctaactttgggattgcatcagagaggccctgagtggggttgagatgaggttggtttggtttgatgttacacactcctcacctgttctttctgagtgtcctttctctgaaaggatttatgtttttcttcgttagatagtgacttctgagcaagctgatctcccctggcatgctccaacctgattggacaaaggaagctctatggcctgggagagagactattcttaatttttctttcttacaaaaactgatttttcccataaatatttttacttcagaggactaggaccattttgttttgggcccttctgctgaaaatttgtctcgtttaagaggcagctagaatctttaccatatgtatgaatttgtataatttcatttttggatagggataaacttttgcttctgataaaagcctggaatttcatctggtcctcag

SEQ ID NO: 372422 - DNA, 4915 bp, Homo sapiens
acggatagcggatctgctagcggatctgttttctctccttctttcttatttgtcttatcgggttcgctctggcagtgggagcatagatgatgacagggatagcttgcccgaatggtgcttagaggatgctgaagaagaaatgggtacatttgactcatctggagcattcctttctctaaaaaaagtacagaaagagcctattccagaagagcaggagatggacttccggcctgtggacgaaggggaggagtgctctgactctgagggtagccataatgaagaggccaaagaacccgataagacaaataagaaagaaggagagaaaacagatagagtaggagttgaagctagtgaggaaactccccagacctcatcatcatctgctagaccaggtactccttcagaccatcagtctcaggaagcatcacagtttgagaggaaagatgaaccaaaaactgagcaaacggaaaaagctgaagaggagactcggatggaaaatagtctaccagccaaagtgcccagcagaggggatgaaatggttgctgatgtccagcagcccctgtcgcagattccttcagatacagcctctcctcttctcatacttccacctcctgttcccaatcctagtcctactctccggccagttgaaacaccagttgtaggtgctcctggtatgggcagtgtttccacagaacctgatgatgaagaaggtctcaaacatttggagcagcaagctgagaaaatggtggcttatctccaagacagtgcactagatgatgaaagattggcatcaaaactgcaagagcacagagctaaaggagtgtcgattccattgatgcatgaagcaatgcagaagtggtattacaaagatcctcagggagaaattcaaggtcccttcaataatcaggagatggcagaatggtttcaggcgggctattttactatgtctttattggtgaagagagcgtgtgatgaaagcttccaacctcttggcgatatcatgaaaatgtggggaagggttcccttttctccaggtccagctccccctcctcatatgggagagctggaccaggaacgactgaccaggcagcaagaactcacagccttataccagatgcagcacctgcagtaccagcagtttttaatacaacaacaatatgcacaggttttggcccaacagcagaaagcagcactgtcttcccagcagcagcagcagttggcacttcttcttcaacagtttcagaccttgaagatgagaatatctgatcagaacatcattccctcagtaactaggtctgtgtccgtgccagatactggctctatctgggagcttcagccaacagcttcacagcctacagtttgggaaggtggtagtgtatgggatcttcctctggacaccacgacaccaggccctgccctggaacagcttcagcagctagagaaggccaaagctgcaaagctagagcaagagagaagagaggcagaaatgagggcaaaacgggaagaggaagagcgaaagaggcaggaagaactccgaagacaacaggaggaaattcttcggcgacagcaggaagaagaaaggaaaaggcgagaggaagaagaacttgcccgaaggaaacaggaagaggctctgcgtcgccagcgggagcaagaaattgcattaaggcgacagcgagaagaggaagaaagacagcagcaagaagaagctcttagaagactggaagagaggagaagagaagaggaagaaaggcggaagcaggaagaattgttacgcaaacaggaagaggaggctgcaaaatgggcccgggaagaagaagaagcccagcgtcgattagaggagaaccggctgcggatggaagaggaggcagccagactccggcatgaggaagaagaacggaagagaaaggagctggaggtccagcggcagaaggagttaatgcgccagaggcagcagcagcaagaggctctccggaggttgcagcagcagcagcagcaacaacagctggcgcagatgaagcttccttcttcttcaacgtggggccagcagtccaatacaacagcatgtcagtcccaggccacgctgtcgttggctgaaatccaaaaactagaggaagaacgagaacggcagcttcgagaagagcaaaggcgccagcagagggagttgatgaaagctcttcagcagcagcagcagcagcaacagcagaaactctcaggttgggggaatgtcagcaaaccttcaggtaccacgaaatctcttctggagatccagcaggaagaggccaggcaaatgcaaaagcagcagcagcagcagcagcaacaccagcaaccaaacagagctcgtaacaatacgcattccaacctgcacaccagcattgggaattctgtttggggctctataaatactggtcctcctaaccagtgggcatctgacctagtcagtagtatttggagtaatgctgacactaaaaactccaacatgggattctgggatgatgcagtgaaagaggtgggacctaggaattcaacaaataaaaataaaaacaacgccagtctcagtaaatctgtaggtgtgtctaaccggcagaataagaaagtagaagaagaagaaaagttgctgaagctctttcagggagtaaataaagcccaagatggatttacgcagtggtgtgaacagatgcttcatgcccttaatacggcaaataacttggatgttcccacatttgtttctttcctgaaagaagtagaatctccttatgaggtccatgattatatcagggcctatttaggagatacttctgaggccaaggagtttgccaagcagttccttgagcgccgtgccaaacagaaagccaaccagcagcgtcagcagcagcagctgccgcagcagcagcagcagccaccacagcagccgccacagcagccacaacagcaggactctgtgtgggggatgaaccacagtacactccattcagtatttcagaccaatcaaagcaacaaccaacaatccaattttgaggctgtgcagagtggcaagaagaagaaaaagcagaagatggtccgagcagatcccagtttattaggattttcagtcaatgcatcatcggagcgactcaacatgggtgaaatcgagacgttggatgactactgagcacctgccagtggactggccatccctctcctgtctgccgactatggagtctccacctttggacacaacacttactcaccatttactctttatcactctgcaacaaatcacagaaccgatcatctcaggctttttcttctggccctttgtgtccaagattctttaatccatttttgttggtgaacatctcagactatagataagtggactggaccctgtgtcttgggggtggcagttgggattactccccaacaaggctgattttaggcagcatgtgttcactgtgctgtgatttcatctactgtctcccagaaagtgtgttgggatcggccattagcagcttgctttctcttgtcactttttttcttctattttgttttttcttcttctttttccccccatcagggcaaatggtctaactggtgcaatcatgaagagagttaatggttaacagacattggccaataacaaaacaccccatggactgtgactcgagtatccaacaggcagtcagagctctcccggtctgaaagttgcattgccactgctaactttgggattgcatcagagaggccctgagtggggttgagatgaggttggtttggtttgatgttacacactcctcacctgttctttctgagtgtcctttctctgaaaggatttatgtttttcttcgttagatagtgacttctgagcaagctgatctcccctggcatgctccaacctgattggacaaaggaagctctatggcctgggagagagactattcttaatttttctttcttacaaaaactgatttttcccataaatatttttacttcagaggactaggaccattttgttttgggcccttctgctgaaaatttgtctcgtttaagaggcagctagaatctttaccatatgtatgaatttgtataatttcatttttggatagggataaacttttgcttctgataaaagcctggaatttcatctggtcctcagagcattgcgtgtgtgtcttgctgtagcccggaaaaggttttgtgtaaagattctgggatggcaagttgtttgccttttctgaaaagagaacatacagaacctgtccatctttaagaccttcatccatggaatctactatacaggaggatgcagtgggctggaggggatgggcgaaaatgggagcaggaagcctggcctggcttctggtcatggcctcctaaaaccttaaacttcaagtagaaatgtactcaagccctatttataaacaaatacttttcctgcctccaccaaacccctacagaacatcacctggaattgccactcacactgggttggagtcattgggcagctgtgcctgtgcgagaggtgctgtggtctgggcagcccctggaaaagcacctttgctgcctgtcattgttgcctgaagaaggctggagttgctctgagagcagtttgggtttggagtattatatttggcttctatttttattattttggatcaccattctccctatcccttcttgcctccctcccttctaaacatgtgtaataactatacagagactgctacaaaattgtatatagtttttggatcaaatagcatgaggggagaggaaaccattaaaaattggggctcctactctcctttgctttgtaaattcaaaagttgggggtgggtaagagggatagttaaaatgtttacaaaactttaggctccctcggaacttttgccagtgtggaggaaaataaaaaagaacttaaataaaatctgattgtattcta

SEQ ID NO: 372423 - DNA, 6006 bp, Homo sapiens
gcggtcacgtgacgtgcgtggcgacgtgtcggccatcttgtgttgttgaggctgaggactgactggggttctgagactccctgtcccggaccgcagattatagtgggaccagtctcattaggttgaatctacagcctatgttggtgttaacccaggtctcttagagcgttaaaaggatctgaacaaagtctgctcaaatctcctgctgtgaaccagcagaatttttgaacagagaccacgtctccacctcctgggctccaacgattctcccatcttggcctcccaaagcgctggatttacaggtttcttcacatataaaaatctattgtaaaaatacggaaaagaatggcagcggaaacgcagacactgaactttgggcctgaatggctccgagctctgtccagtggtgggagtattacatcccctcctctttctccagcattgccgaagtataaattagcagattatcgttacggcagagaagaaatgttagcacttttccttaaagacaacaagataccttcagaccttctggataaagaatttctgcctatcctccaggaggaaccccttccaccattggctctggtaccctttacagaagaagaacagagaaacttttccatgtctgtaaatagtgctgctgtcctgcgattgacaggacgaggaggaggaggaacagtggtgggggctcctagaggtcgaagttcttcaagagggcgaggcagaggcagaggtgaatgtggtttctaccaaagaagttttgatgaagtagagggtgtttttggtcgaggaggtggcagagaaatgcatagatcgcagagctgggaggaaaggggtgacagacgttttgaaaaaccaggacgaaaagatgtagggagaccaaattttgaggaaggtggaccaacatcagtagggagaaagcatgaatttatacgctcagaaagtgaaaattggcgcatctttagagaggaacaaaatggagaagatgaagatggaggttggcgactagctggatcaaggagggatggagagaggtggcgacctcacagtcctgatggccctcgttctgcaggctggcgggaacacatggaacgacgtcggaggtttgagtttgattttcgagatagagatgatgaacggggttaccgaagggttcgctctggcagtgggagcatagatgatgacagggatagcttgcccgaatggtgcttagaggatgctgaagaagaaatgggtacatttgactcatctggagcattcctttctctaaaaaaagtacagaaagagcctattccagaagagcaggagatggacttccggcctgtggacgaaggggaggagtgctctgactctgagggtagccataatgaagaggccaaagaacccgataagacaaataagaaagaaggagagaaaacagatagagtaggagttgaagctagtgaggaaactccccagacctcatcatcatctgctagaccaggtactccttcagaccatcagtctcaggaagcatcacagtttgagaggaaagatgaaccaaaaactgagcaaacggaaaaagctgaagaggagactcggatggaaaatagtctaccagccaaagtgcccagcagaggggatgaaatggttgctgatgtccagcagcccctgtcgcagattccttcagatacagcctctcctcttctcatacttccacctcctgttcccaatcctagtcctactctccggccagttgaaacaccagttgtaggtgctcctggtatgggcagtgtttccacagaacctgatgatgaagaaggtctcaaacatttggagcagcaagctgagaaaatggtggcttatctccaagacagtgcactagatgatgaaagattggcatcaaaactgcaagagcacagagctaaaggagtgtcgattccattgatgcatgaagcaatgcagaagtggtattacaaagatcctcagggagaaattcaaggtcccttcaataatcaggagatggcagaatggtttcaggcgggctattttactatgtctttattggtgaagagagcgtgtgatgaaagcttccaacctcttggcgatatcatgaaaatgtggggaagggttcccttttctccaggtccagctccccctcctcatatgggagagctggaccaggaacgactgaccaggcagcaagaactcacagccttataccagatgcagcacctgcagtaccagcagtttttaatacaacaacaatatgcacaggttttggcccaacagcagaaagcagcactgtcttcccagcagcagcagcagttggcacttcttcttcaacagtttcagaccttgaagatgagaatatctgatcagaacatcattccctcagtaactaggtctgtgtccgtgccagatactggctctatctgggagcttcagccaacagcttcacagcctacagtttgggaaggtggtagtgtatgggatcttcctctggacaccacgacaccaggccctgccctggaacagcttcagcagctagagaaggccaaagctgcaaagctagagcaagagagaagagaggcagaaatgagggcaaaacgggaagaggaagagcgaaagaggcaggaagaactccgaagacaacaggaggaaattcttcggcgacagcaggaagaagaaaggaaaaggcgagaggaagaagaacttgcccgaaggaaacaggaagaggctctgcgtcgccagcgggagcaagaaattgcattaaggcgacagcgagaagaggaagaaagacagcagcaagaagaagctcttagaagactggaagagaggagaagagaagaggaagaaaggcggaagcaggaagaattgttacgcaaacaggaagaggaggctgcaaaatgggcccgggaagaagaagaagcccagcgtcgattagaggagaaccggctgcggatggaagaggaggcagccagactccggcatgaggaagaagaacggaagagaaaggagctggaggtccagcggcagaaggagttaatgcgccagaggcagcagcagcaagaggctctccggaggttgcagcagcagcagcagcaacaacagctggcgcagatgaagcttccttcttcttcaacgtggggccagcagtccaatacaacagcatgtcagtcccaggccacgctgtcgttggctgaaatccaaaaactagaggaagaacgagaacggcagcttcgagaagagcaaaggcgccagcagagggagttgatgaaagctcttcagcagcagcagcagcagcaacagcagaaactctcaggttgggggaatgtcagcaaaccttcaggtaccacgaaatctcttctggagatccagcaggaagaggccaggcaaatgcaaaagcagcagcagcagcagcagcaacaccagcaaccaaacagagctcgtaacaatacgcattccaacctgcacaccagcattgggaattctgtttggggctctataaatactggtcctcctaaccagtgggcatctgacctagtcagtagtatttggagtaatgctgacactaaaaactccaacatgggattctgggatgatgcagtgaaagaggtgggacctaggaattcaacaaataaaaataaaaacaacgccagtctcagtaaatctgtaggtgtgtctaaccggcagaataagaaagtagaagaagaagaaaagttgctgaagctctttcagggagtaaataaagcccaagatggatttacgcagtggtgtgaacagatgcttcatgcccttaatacggcaaataacttggatgttcccacatttgtttctttcctgaaagaagtagaatctccttatgaggtccatgattatatcagggcctatttaggagatacttctgaggccaaggagtttgccaagcagttccttgagcgccgtgccaaacagaaagccaaccagcagcgtcagcagcagcagctgccgcagcagcagcagcagccaccacagcagccgccacagcagccacaacagcaggactctgtgtgggggatgaaccacagtacactccattcagtatttcagaccaatcaaagcaacaaccaacaatccaattttgaggctgtgcagagtggcaagaagaagaaaaagcagaagatggtccgagcagatcccagtttattaggattttcagtcaatgcatcatcggagcgactcaacatgggtgaaatcgagacgttggatgactactgagcacctgccagtggactggccatccctctcctgtctgccgactatggagtctccacctttggacacaacacttactcaccatttactctttatcactctgcaacaaatcacagaaccgatcatctcaggctttttcttctggccctttgtgtccaagattctttaatccatttttgttggtgaacatctcagactatagataagtggactggaccctgtgtcttgggggtggcagttgggattactccccaacaaggctgattttaggcagcatgtgttcactgtgctgtgatttcatctactgtctcccagaaagtgtgttgggatcggccattagcagcttgctttctcttgtcactttttttcttctattttgttttttcttcttctttttccccccatcagggcaaatggtctaactggtgcaatcatgaagagagttaatggttaacagacattggccaataacaaaacaccccatggactgtgactcgagtatccaacaggcagtcagagctctcccggtctgaaagttgcattgccactgctaactttgggattgcatcagagaggccctgagtggggttgagatgaggttggtttggtttgatgttacacactcctcacctgttctttctgagtgtcctttctctgaaaggatttatgtttttcttcgttagatagtgacttctgagcaagctgatctcccctggcatgctccaacctgattggacaaaggaagctctatggcctgggagagagactattcttaatttttctttcttacaaaaactgatttttcccataaatatttttacttcagaggactaggaccattttgttttgggcccttctgctgaaaatttgtctcgtttaagaggcagctagaatctttaccatatgtatgaatttgtataatttcatttttggatagggataaacttttgcttctgataaaagcctggaatttcatctggtcctcagagcattgcgtgtgtgtcttgctgtagcccggaaaaggttttgtgtaaagattctgggatggcaagttgtttgccttttctgaaaagagaacatacagaacctgtccatctttaagaccttcatccatggaatctactatacaggaggatgcagtgggctggaggggatgggcgaaaatgggagcaggaagcctggcctggcttctggtcatggcctcctaaaaccttaaacttcaagtagaaatgtactcaagccctatttataaacaaatacttttcctgcctccaccaaacccctacagaacatcacctggaattgccactcacactgggttggagtcattgggcagctgtgcctgtgcgagaggtgctgtggtctgggcagcccctggaaaagcacctttgctgcctgtcattgttgcctgaagaaggctggagttgctctgagagcagtttgggtttggagtattatatttggcttctatttttattattttggatcaccattctccctatcccttcttgcctccctcccttctaaacatgtgtaataactatacagagactgctacaaaattgtatatagtttttggatcaaatagcatgaggggagaggaaaccattaaaaattggggctcctaaaaaaaaataaaataaaaagggggggggcaaaaaatttcctggaaggggcagtaagcgatcccgttttggaaaggggccctaaaggggcataaataaacagagggggggttaaacgcttgggtggacaggtatgggcttg

SEQ ID NO: 372424 - DNA, 4954 bp, Homo sapiens
gcggtcacgtgacgtgcgtggcgacgtgtcggccatcttgtgttgttgaggctgaggactgactggggttctgagactccctgtcccggaccgcagattatagtgggaccagtctcattaggttgaatctacagcctatgttggtgttaacccaggtctcttagagcgttaaaaggatctgaacaaagtctgctcaaatctcctgctgtgaaccagcagaatttttgaacagagaccacgtctccacctcctgggctccaacgattctcccatcttggcctcccaaagcgctggatttacaggtttcttcacatataaaaatctattgtaaaaatacggaaaagaatggcagcggaaacgcagacactgaactttgggcctgaatggctccgagctctgtccagtggtgggagtattacatcccctcctctttctccagcattgccgaagtataaattagcagattatcgttacggcagagaagaaatgttagcacttttccttaaagacaacaagataccttcagaccttctggataaagaatttctgcctatcctccaggaggaaccccttccaccattggctctggtaccctttacagaagaagaacagagaaacttttccatgtctgtaaatagtgctgctgtcctgcgattgacaggacgaggaggaggaggaacagtggtgggggctcctagaggtcgaagttcttcaagagggcgaggcagaggcagaggtgaatgtggtttctaccaaagaagttttgatgaagtagagggtgtttttggtcgaggaggtggcagagaaatgcatagatcgcagagctgggaggaaaggggtgacagacgttttgaaaaaccaggacgaaaagatgtagggagaccaaattttgaggaaggtggaccaacatcagtagggagaaagcatgaatttatacgctcagaaagtgaaaattggcgcatctttagagaggaacaaaatggagaagatgaagatggaggttggcgactagctggatcaaggagggatggagagaggtggcgacctcacagtcctgatggccctcgttctgcaggctggcgggaacacatggaacgacgtcggaggtttgagtttgattttcgagatagagatgatgaacggggttaccgaagggttcgctctggcagtgggagcatagatgatgacagggatagcttgcccgaatggtgcttagaggatgctgaagaagaaatgggtacatttgactcatctggagcattcctttctctaaaaaaagtacagaaagagcctattccagaagagcaggagatggacttccggcctgtggacgaaggggaggagtgctctgactctgagggtagccataatgaagaggccaaagaacccgataagacaaataagaaagaaggagagaaaacagatagagtaggagttgaagctagtgaggaaactccccagacctcatcatcatctgctagaccaggtactccttcagaccatcagtctcaggaagcatcacagtttgagaggaaagatgaaccaaaaactgagcaaacggaaaaagctgaagaggagactcggatggaaaatagtctaccagccaaagtgcccagcagaggggatgaaatggttgctgatgtccagcagcccctgtcgcagattccttcagatacagcctctcctcttctcatacttccacctcctgttcccaatcctagtcctactctccggccagttgaaacaccagttgtaggtgctcctggtatgggcagtgtttccacagaacctgatgatgaagaaggtctcaaacatttggagcagcaagctgagaaaatggtggcttatctccaagacagtgcactagatgatgaaagattggcatcaaaactgcaagagcacagagctaaaggagtgtcgattccattgatgcatgaagcaatgcagaagtggtattacaaagatcctcagggagaaattcaaggtcccttcaataatcaggagatggcagaatggtttcaggcgggctattttactatgtctttattggtgaagagagcgtgtgatgaaagcttccaacctcttggcgatatcatgaaaatgtggggaagggttcccttttctccaggtccagctccccctcctcatatgggagagctggaccaggaacgactgaccaggcagcaagaactcacagccttataccagatgcagcacctgcagtaccagcagtttttaatacaacaacaatatgcacaggttttggcccaacagcagaaagcagcactgtcttcccagcagcagcagcagttggcacttcttcttcaacagtttcagaccttgaagatgagaatatctgatcagaacatcattccctcagtaactaggtctgtgtccgtgccagatactggctctatctgggagcttcagccaacagcttcacagcctacagtttgggaaggtggtagtgtatgggatcttcctctggacaccacgacaccaggccctgccctggaacagcttcagcagctagagaaggccaaagctgcaaagctagagcaagagagaagagaggcagaaatgagggcaaaacgggaagaggaagagcgaaagaggcaggaagaactccgaagacaacaggaggaaattcttcggcgacagcaggaagaagaaaggaaaaggcgagaggaagaagaacttgcccgaaggaaacaggaagaggctctgcgtcgccagcgggagcaagaaattgcattaaggcgacagcgagaagaggaagaaagacagcagcaagaagaagctcttagaagactggaagagaggagaagagaagaggaagaaaggcggaagcaggaagaattgttacgcaaacaggaagaggaggctgcaaaatgggcccgggaagaagaagaagcccagcgtcgattagaggagaaccggctgcggatggaagaggaggcagccagactccggcatgaggaagaagaacggaagagaaaggagctggaggtccagcggcagaaggagttaatgcgccagaggcagcagcagcaagaggctctccggaggttgcagcagcagcagcagcaacaacagctggcgcagatgaagcttccttcttcttcaacgtggggccagcagtccaatacaacagcatgtcagtcccaggccacgctgtcgttggctgaaatccaaaaactagaggaagaacgagaacggcagcttcgagaagagcaaaggcgccagcagagggagttgatgaaagctcttcagcagcagcagcagcagcaacagcagaaactctcaggttgggggaatgtcagcaaaccttcaggtaccacgaaatctcttctggagatccagcaggaagaggccaggcaaatgcaaaagcagcagcagcagcagcagcaacaccagcaaccaaacagagctcgtaacaatacgcattccaacctgcacaccagcattgggaattctgtttggggctctataaatactggtcctcctaaccagtgggcatctgacctagtcagtagtatttggagtaatgctgacactaaaaactccaacatgggattctgggatgatgcagtgaaagaggtgggacctaggaattcaacaaataaaaataaaaacaacgccagtctcagtaaatctgtaggtgtgtctaaccggcagaataagaaagtagaagaagaagaaaagttgctgaagctctttcagggagtaaataaagcccaagatggatttacgcagtggtgtgaacagatgcttcatgcccttaatacggcaaataacttggatgttcccacatttgtttctttcctgaaagaagtagaatctccttatgaggtccatgattatatcagggcctatttaggagatacttctgaggccaaggagtttgccaagcagttccttgagcgccgtgccaaacagaaagccaaccagcagcgtcagcagcagcagctgccgcagcagcagcagcagccaccacagcagccgccacagcagccacaacagcaggactctgtgtgggggatgaaccacagtacactccattcagtatttcagaccaatcaaagcaacaaccaacaatccaattttgaggctgtgcagagtggcaagaagaagaaaaagcagaagatggtccgagcagatcccagtttattaggattttcagtcaatgcatcatcggagcgactcaacatgggtgaaatcgagacgttggatgactactgagcacctgccagtggactggccatccctctcctgtctgccgactatggagtctccacctttggacacaacacttactcaccatttactctttatcactctgcaacaaatcacagaaccgatcatctcaggctttttcttctggccctttgtgtccaagattctttaatccatttttgttggtgaacatctcagactatagataagtggactggaccctgtgtcttgggggtggcagttgggattactccccaacaaggctgattttaggcagcatgtgttcactgtgctgtgatttcatctactgtctcccagaaagtgtgttgggatcggccattagcagcttgctttctcttgtcactttttttcttctattttgttttttcttcttctttttccccccatcagggcaaatggtctaactggtgcaatcatgaagagagttaatggttaacagacattggccaataacaaaacaccccatggactgtgactcgagtatccaacaggcagtcagagctctcccggtctgaaagttgcattgccactgctaactttgggattgcatcagagaggccctgagtggggttgagatgaggttggtttggtttgatgttacacactcctcacctgttctttctgagtgtcctttctctgaaaggatttatgtttttcttcgttagataatgtatagccaagatcctcgagagcaact

SEQ ID NO: 372425 - DNA, 4680 bp, Homo sapiens
  misc_feature (4300)..(4300): n is a, c, g, or t
  misc_feature (4364)..(4364): n is a, c, g, or t
gcggtcacgtgacgtgcgtggcgacgtgtcggccatcttgtgttgttgaggctgaggactgactggggttctgagactccctgtcccggaccgcagattatagtgggaccagtctcattaggttgaatctacagcctatgttggtgttaacccaggtctcttagagcgttaaaaggatctgaacaaagtctgctcaaatctcctgctgtgaaccagcagaatttttgaacagagaccacgtctccacctcctgggctccaacgattctcccatcttggcctcccaaagcgctggatttacaggtttcttcacatataaaaatctattgtaaaaatacggaaaagaatggcagcggaaacgcagacactgaactttgggcctgaatggctccgagctctgtccagtggtgggagtattacatcccctcctctttctccagcattgccgaagtataaattagcagattatcgttacggcagagaagaaatgttagcacttttccttaaagacaacaagataccttcagaccttctggataaagaatttctgcctatcctccaggaggaaccccttccaccattggctctggtaccctttacagaagaagaacagagaaacttttccatgtctgtaaatagtgctgctgtcctgcgattgacaggacgaggaggaggaggaacagtggtgggggctcctagaggtcgaagttcttcaagagggcgaggcagaggcagaggtgaatgtggtttctaccaaagaagttttgatgaagtagagggtgtttttggtcgaggaggtggcagagaaatgcatagatcgcagagctgggaggaaaggggtgacagacgttttgaaaaaccaggacgaaaagatgtagggagaccaaattttgaggaaggtggaccaacatcagtagggagaaagcatgaatttatacgctcagaaagtgaaaattggcgcatctttagagaggaacaaaatggagaagatgaagatggaggttggcgactagctggatcaaggagggatggagagaggtggcgacctcacagtcctgatggccctcgttctgcaggctggcgggaacacatggaacgacgtcggaggtttgagtttgattttcgagatagagatgatgaacggggttaccgaagggttcgctctggcagtgggagcatagatgatgacagggatagcttgcccgaatggtgcttagaggatgctgaagaagaaatgggtacatttgactcatctggagcattcctttctctaaaaaaagtacagaaagagcctattccagaagagcaggagatggacttccggcctgtggacgaaggggaggagtgctctgactctgagggtagccataatgaagaggccaaagaacccgataagacaaataagaaagaaggagagaaaacagatagagtaggagttgaagctagtgaggaaactccccagacctcatcatcatctgctagaccaggtactccttcagaccatcagtctcaggaagcatcacagtttgagaggaaagatgaaccaaaaactgagcaaacggaaaaagctgaagaggagactcggatggaaaatagtctaccagccaaagtgcccagcagaggggatgaaatggttgctgatgtccagcagcccctgtcgcagattccttcagatacagcctctcctcttctcatacttccacctcctgttcccaatcctagtcctactctccggccagttgaaacaccagttgtaggtgctcctggtatgggcagtgtttccacagaacctgatgatgaagaaggtctcaaacatttggagcagcaagctgagaaaatggtggcttatctccaagacagtgcactagatgatgaaagattggcatcaaaactgcaagagcacagagctaaaggagtgtcgattccattgatgcatgaagcaatgcagaagtggtattacaaagatcctcagggagaaattcaaggtcccttcaataatcaggagatggcagaatggtttcaggcgggctattttactatgtctttattggtgaagagagcgtgtgatgaaagcttccaacctcttggcgatatcatgaaaatgtggggaagggttcccttttctccaggtccagctccccctcctcatatgggagagctggaccaggaacgactgaccaggcagcaagaactcacagccttataccagatgcagcacctgcagtaccagcagtttttaatacaacaacaatatgcacaggttttggcccaacagcagaaagcagcactgtcttcccagcagcagcagcagttggcacttcttcttcaacagtttcagaccttgaagatgagaatatctgatcagaacatcattccctcagtaactaggtctgtgtccgtgccagatactggctctatctgggagcttcagccaacagcttcacagcctacagtttgggaaggtggtagtgtatgggatcttcctctggacaccacgacaccaggccctgccctggaacagcttcagcagctagagaaggccaaagctgcaaagctagagcaagagagaagagaggcagaaatgagggcaaaacgggaagaggaagagcgaaagaggcaggaagaactccgaagacaacaggaggaaattcttcggcgacagcaggaagaagaaaggaaaaggcgagaggaagaagaacttgcccgaaggaaacaggaagaggctctgcgtcgccagcgggagcaagaaattgcattaaggcgacagcgagaagaggaagaaagacagcagcaagaagaagctcttagaagactggaagagaggagaagagaagaggaagaaaggcggaagcaggaagaattgttacgcaaacaggaagaggaggctgcaaaatgggcccgggaagaagaagaagcccagcgtcgattagaggagaaccggctgcggatggaagaggaggcagccagactccggcatgaggaagaagaacggaagagaaaggagctggaggtccagcggcagaaggagttaatgcgccagaggcagcagcagcaagaggctctccggaggttgcagcagcagcagcagcaacaacagctggcgcagatgaagcttccttcttcttcaacgtggggccagcagtccaatacaacagcatgtcagtcccaggccacgctgtcgttggctgaaatccaaaaactagaggaagaacgagaacggcagcttcgagaagagcaaaggcgccagcagagggagttgatgaaagctcttcagcagcagcagcagcagcaacagcagaaactctcaggttgggggaatgtcagcaaaccttcaggtaccacgaaatctcttctggagatccagcaggaagaggccaggcaaatgcaaaagcagcagcagcagcagcagcaacaccagcaaccaaacagagctcgtaacaatacgcattccaacctgcacaccagcattgggaattctgtttggggctctataaatactggtcctcctaaccagtgggcatctgacctagtcagtagtatttggagtaatgctgacactaaaaactccaacatgggattctgggatgatgcagtgaaagaggtgggacctaggaattcaacaaataaaaataaaaacaacgccagtctcagtaaatctgtaggtgtgtctaaccggcagaataagaaagtagaagaagaagaaaagttgctgaagctctttcagggagtaaataaagcccaagatggatttacgcagtggtgtgaacagatgcttcatgcccttaatacggcaaataacttggatgttcccacatttgtttctttcctgaaagaagtagaatctccttatgaggtccatgattatatcagggcctatttaggagatacttctgaggccaaggagtttgccaagcagttccttgagcgccgtgccaaacagaaagccaaccagcagcgtcagcagcagcagctgccgcagcagcagcagcagccaccacagcagccgccacagcagccacaacagcaggactctgtgtgggggatgaaccacagtacactccattcagtatttcagcagctagagaaggccaaagctgcaaagctagagcaagagagaagagaggcagaaatgagggcaaaacgggaagaggaagagcgaaagaggcaggaagatctccgaagacaacaggaggaaattcttcggcgacagcaggaagaagaaaggaaatggcgagaggaagaagaacttgcccgaaggaaacaggaagaggctcttcgtcgccagcgggagcaagaaattncattaaggcgacagcgagaagaggaagaaagacagcagcaagaagaagctcttagaagactggnagagaggagaagagaagaggaagaaaggcggaagcaggaagaattgttacgcaaacaggaagaggggcgtccccagctccgtcaaacagccctttctgtttctggagtcctacaagtggaggcccaaatccgttcccatgttgaggcaaggccctggctgttccttcctctctggaaaccgccttgaactcttcctttgggacatgcctcctcgaccagccttgaaggggtgctcctctctcactacctggaaccaaacacccccttcctttgtgtacaagggcaataaagagtagaccttcatcttctttatttt

SEQ ID NO: 372426 - DNA, 2438 bp, Homo sapiens
  misc_feature (43)..(44): n is a, c, g, or t
ccgctgagatgacagtcggcattagctctagactggatcagcnntgttgccacaaaataagctaatacaggctcagtactaaatctgtaggtgtgtctaaccggcagaataagaaagtagaagaagaagaaaagttgctgaagctctttcagggagtaaataaagcccaagatggatttacgcagtggtgtgaacagatgcttcatgcccttaatacggcaaataacttggatgttcccacatttgtttctttcctgaaagaagtagaatctccttatgaggtccatgattatatcagggcctatttaggagatacttctgaggccaaggagtttgccaagcagttccttgagcgccgtgccaaacagaaagccaaccagcagcgtcagcagcagcagctgccgcagcagcagcagcagccaccacagcagccgccacagcagccacaacagcaggactctgtgtgggggatgaaccacagtacactccattcagtatttcagaccaatcaaagcaacaaccaacaatccaattttgaggctgtgcagagtggcaagaagaagaaaaagcagaagatggtccgagcagatcccagtttattaggattttcagtcaatgcatcatcggagcgactcaacatgggtgaaatcgagacgttggatgactactgagcacctgccagtggactggccatccctctcctgtctgccgactatggagtctccacctttggacacaacacttactcaccatttactctttatcactctgcaacaaatcacagaaccgatcatctcaggctttttcttctggccctttgtgtccaagattctttaatccatttttgttggtgaacatctcagactatagataagtggactggaccctgtgtcttgggggtggcagttgggattactccccaacaaggctgattttaggcagcatgtgttcactgtgctgtgatttcatctactgtctcccagaaagtgtgttgggatcggccattagcagcttgctttctcttgtcactttttttcttctattttgttttttcttcttctttttccccccatcagggcaaatggtctaactggtgcaatcatgaagagagttaatggttaacagacattggccaataacaaaacaccccatggactgtgactcgagtatccaacaggcagtcagagctctcccggtctgaaagttgcattgccactgctaactttgggattgcatcagagaggccctgagtggggttgagatgaggttggtttggtttgatgttacacactcctcacctgttctttctgagtgtcctttctctgaaaggatttatgtttttcttcgttagatagtgacttctgagcaagctgatctcccctggcatgctccaacctgattggacaaaggaagctctatggcctgggagagagactattcttaatttttctttcttacaaaaactgatttttcccataaatatttttacttcagaggactaggaccattttgttttgggcccttctgctgaaaatttgtctcgtttaagaggcagctagaatctttaccatatgtatgaatttgtataatttcatttttggatagggataaacttttgcttctgataaaagcctggaatttcatctggtcctcagagcattgcgtgtgtgtcttgctgtagcccggaaaaggttttgtgtaaagattctgggatggcaagttgtttgccttttctgaaaagagaacatacagaacctgtccatctttaagaccttcatccatggaatctactatacaggaggatgcagtgggctggaggggatgggcgaaaatgggagcaggaagcctggcctggcttctggtcatggcctcctaaaaccttaaacttcaagtagaaatgtactcaagccctatttataaacaaatacttttcctgcctccaccaaacccctacagaacatcacctggaattgccactcacactgggttggagtcattgggcagctgtgcctgtgcgagaggtgctgtggtctgggcagcccctggaaaagcacctttgctgcctgtcattgttgcctgaagaaggctggagttgctctgagagcagtttgggtttggagtattatatttggcttctatttttattattttggatcaccattctccctatcccttcttgcctccctcccttctaaacatgtgtaataactatacagagactgctacaaaattgtatatagtttttggatcaaatagcatgaggggagaggaaaccattaaaaattggggctcctactctcctttgctttgtaaattcaaaagttgggggtgggtaagagggatagttaaaatgtttacaaaactttaggctccctcggaacttttgccagtgtggaggaaaataaaaaagaacttaaataaaatctgattgtattcta

SEQ ID NO: 372427 - DNA, 1842 bp, Homo sapiens
caacgtctcgatttcacccatgttgagtcgctccgatgatgcatgggtgaaatcgagacgttggatgactactgagcacctgccagtggactggccatccctctcctgtctgccgactatggagtctccacctttggacacaacacttactcaccatttactctttatcactctgcaacaaatcacagaaccgatcatctcaggctttttcttctggccctttgtgtccaagattctttaatccatttttgttggtgaacatctcagactatagataagtggactggaccctgtgtcttgggggtggcagttgggattactccccaacaaggctgattttaggcagcatgtgttcactgtgctgtgatttcatctactgtctcccagaaagtgtgttgggatcggccattagcagcttgctttctcttgtcactttttttcttctattttgttttttcttcttctttttccccccatcagggcaaatggtctaactggtgcaatcatgaagagagttaatggttaacagacattggccaataacaaaacaccccatggactgtgactcgagtatccaacaggcagtcagagctctcccggtctgaaagttgcattgccactgctaactttgggattgcatcagagaggccctgagtggggttgagatgaggttggtttggtttgatgttacacactcctcacctgttctttctgagtgtcctttctctgaaaggatttatgtttttcttcgttagatagtgacttctgagcaagctgatctcccctggcatgctccaacctgattggacaaaggaagctctatggcctgggagagagactattcttaatttttctttcttacaaaaactgatttttcccataaatatttttacttcagaggactaggaccattttgttttgggcccttctgctgaaaatttgtctcgtttaagaggcagctagaatctttaccatatgtatgaatttgtataatttcatttttggatagggataaacttttgcttctgataaaagcctggaatttcatctggtcctcagagcattgcgtgtgtgtcttgctgtagcccggaaaaggttttgtgtaaagattctgggatggcaagttgtttgccttttctgaaaagagaacatacagaacctgtccatctttaagaccttcatccatggaatctactatacaggaggatgcagtgggctggaggggatgggcgaaaatgggagcaggaagcctggcctggcttctggtcatggcctcctaaaaccttaaacttcaagtagaaatgtactcaagccctatttataaacaaatacttttcctgcctccaccaaacccctacagaacatcacctggaattgccactcacactgggttggagtcattgggcagctgtgcctgtgcgagaggtgctgtggtctgggcagcccctggaaaagcacctttgctgcctgtcattgttgcctgaagaaggctggagttgctctgagagcagtttgggtttggagtattatatttggcttctatttttattattttggatcaccattctccctatcccttcttgcctccctcccttctaaacatgtgtaataactatacagagactgctacaaaattgtatatagtttttggatcaaatagcatgaggggagaggaaaccattaaaaattggggctcctactctcctttgctttgtaaattcaaaagttgggggtgggtaagagggatagttaaaatgtttacaaaactttaggctccctcggaacttttgccagtgtggaggaaaataaaaaagaacttaaataaaatctgattgtattcta

SEQ ID NO: 372428 - DNA, 1155 bp, Homo sapiens
tcgcgacgtgtatctctccggcttgcctctgtcctttctctgaaaggatttatgtttttcttcgttagatagtgacttctgagcaagctgatctcccctggcatgctccaacctgattggacaaaggaagctctatggcctgggagagagactattcttaatttttctttcttacaaaaactgatttttcccataaatatttttacttcagaggactaggaccattttgttttgggcccttctgctgaaaatttgtctcgtttaagaggcagctagaatctttaccatatgtatgaatttgtataatttcatttttggatagggataaacttttgcttctgataaaagcctggaatttcatctggtcctcagagcattgcgtgtgtgtcttgctgtagcccggaaaaggttttgtgtaaagattctgggatggcaagttgtttgccttttctgaaaagagaacatacagaacctgtccatctttaagaccttcatccatggaatctactatacaggaggatgcagtgggctggaggggatgggcgaaaatgggagcaggaagcctggcctggcttctggtcatggcctcctaaaaccttaaacttcaagtagaaatgtactcaagccctatttataaacaaatacttttcctgcctccaccaaacccctacagaacatcacctggaattgccactcacactgggttggagtcattgggcagctgtgcctgtgcgagaggtgctgtggtctgggcagcccctggaaaagcacctttgctgcctgtcattgttgcctgaagaaggctggagttgctctgagagcagtttgggtttggagtattatatttggcttctatttttattattttggatcaccattctccctatcccttcttgcctccctcccttctaaacatgtgtaataactatacagagactgctacaaaattgtatatagtttttggatcaaatagcatgaggggagaggaaaccattaaaaattggggctcctactctcctttgctttgtaaattcaaaagttgggggtgggtaagagggatagttaaaatgtttacaaaactttaggctccctcggaacttttgccagtgtggaggaaaataaaaaagaacttaaataaaatctgattgtattcta

SEQ ID NO: 372429 - DNA, 1132 bp, Homo sapiens
gcggtcacgtgacgtgcgtggcgacgtgtcggccatcttgtgttgttgaggctgaggactgactggggttctgagactccctgtcccggaccgcagcgttaaaaggatctgaacaaagtctgctcaaatctcctgctgtgaaccagcagaatttttgaacaggctggagcacagtggcgtgatctcggctcactgcaaactctgccttcgagcaattcttctgcctcagcctcccgagtagatgggattacaggtttcttcacatataaaaatctattgtaaaaatacggaaaagaatggcagcggaaacgcagacactgaactttgggcctgaatgatgtgtttggaccccgaatatggaattctcatggaattttgagatccatcacattgtagtgtggcttccccccctcccctccttcctttttccccaaagttggtgattgaagatcctctcttcagtggcatcaataataataattactttttctattcaaacctcgggcaacccctttggtaatatcagaagtagtatctaaaatagataaattggatttgtgtcttaaactcttggttgttcaggtgggagtggttcaataaatgatgcagacttcctgtagtaactctatttgaggagtcttattaacttatcctattagaaatatttctttttattaatatatgtaatctcgaagttttcttaacctttatagccagcatttggagactgaggagaaatcactatttgaagttctaagaaccgatggaactcctgtattttgagagtttatttagaacatgttaacctaagtaatgctgtacttgttttagttattcctttatatttttaaaatgattttcttagtatcaaattaatatgtttctaaaaaaattagaaataactagtaagccagaaataatttcaacatccatggtacacactgtaaataccttggtgtatctttccaggtggttttatgtatgcttatttgtgtatatatacacttattttttacaaaaatgggatcatactgtaccttcagttttgtagcctgcttaaagaaataaccaaatcagaaacatctttttttaatcaataaatattttctgttgtattaaatggttgcattgt

SEQ ID NO: 372430 - DNA, 1739 bp, Homo sapiens
gcggtcacgtgacgtgcgtggcgacgtgtcggccatcttgtgttgttgaggctgaggactgactggggttctgagactccctgtcccggaccgcagattatagtgggaccagtctcattaggttgaatctacagcctatgttggtgttaacccaggtctcttagagcgttaaaaggatctgaacaaagtctgctcaaatctcctgctgtgaaccagcagaatttttgaacagagaccacgtctccacctcctgggctccaacgattctcccatcttggcctcccaaagcgctggatttacaggtttcttcacatataaaaatctattgtaaaaatacggaaaagaatggcagcggaaacgcagacactgaactttgggcctgaatggctccgagctctgtccagtggtgggagtattacatcccctcctctttctccagcattgccgaagtataaattagcagattatcgttacggcagagaagaaatgttagcacttttccttaaagacaacaagataccttcagaccttctggataaagaatttctgcctatcctccaggaggaaccccttccaccattggctctggtaccctttacagaagaagaacagagaaacttttccatgtctgtaaatagtgctgctgtcctgcgattgacaggacgaggaggaggaggaacagtggtgggggctcctagaggtcgaagttcttcaagagggcgaggcagaggcagaggtgaatgtggtttctaccaaagaagttttgatgaagtagagggtgtttttggtcgaggaggtggcagagaaatgcatagatcgcagagctgggaggaaaggggtgacagacgttttgaaaaaccaggacgaaaagatgtagggagaccaaattttgaggaaggtggaccaacatcagtagggagaaagcatgaatttatacgctcagaaagtgaaaattggcgcatctttagagaggaacaaaatggagaagatgaagatggaggttggcgactagctggatcaaggagggatggagagaggtggcgacctcacagtcctgatggccctcgttctgcaggctggcgggaacacatggaacgacgtcggaggtttgagtttgattttcgagatagagatgatgaacggggttaccgaagggttcgctctggcagtgggagcatagatgatgacagggatagcttgcccgaatggtgcttagaggatgctgaagaagaaatgggtacatttgactcatctggagcattcctttctctaaaaaaagtacagaaagagcctattccagaagagcaggagatggacttccggcctgtggacgaaggggaggagtgctctgactctgagggtagccataatgaagaggccaaagatgcagataaactcgcaaacatgggaaaataacagagcagaaaaagtgaaaactaaaaatcagagtgcctctcctcctccaaaggaacgcagctcctcaccagcaacagaacaaagctggacggagaatgactttgattagttgagagaggaaggcttcagacaatcaaactactctgagctacaggaggaaatacgaaacaatagcaaagaagtaaaaagctttgaaaaaaattagacgaatggataactagaataactaatgcagacaagtccttaaaggacctgatggagctgaaaaccaaggcatgagagagaaacgtgacaaatgcagaagactcaggagccaatgtgat

SEQ ID NO: 372431 - DNA, 654 bp, Homo sapiens
gcggtcacgtgacgtgcgtggcgacgtgtcggccatcttgtgttgttgaggctgaggactgactggggttctgagactccctgtcccggaccgcagtcaaagcacttaaacacacgtagtctctctgtaagaaagcgttaaaaggatctgaacaaagtctgctcaaatctcctgctgtgaaccagcagaatttttgaacagagactgtctcgctctgtcacccaggctagagtgcagtggtgctatcgtaactcactggagccctgatctaggctcaaaccatcctcccacctcagcctcccaagtagctgggactaaggtttcttcacatataaaaatctattgtaaaaatacggaaaagaatggcagcggaaacgcagacactgaactttgggcctgaatggtgagttttcaaaatctcatcttctttgatattggatgactaatacagtagtaaagtatttgacaggtgctaggtggtttataaatgtgcatgtttttgaaacttttgctttatgtgcctcgctgaaaacaatgtgttagttcaggaataaattatatttggtaaatgagtgtattctatacttaattaaaattttttttctttgtctggttatatatgtaatgatggcgggagtcccacccgccctagaa

SEQ ID NO: 372432 - DNA, 218 bp, Homo sapiens
gccgcttggttgcctgggtgtggtcactcatagccagttttttttctgcaggattttcagtcaatgcatcatcggagcgactcaacatgggtgaaatcgagacgttggatgactactgagcacctgccagtggactggccatccctctcctgtctgccgactatggagtctccacctttggacacaacacttactcaccatttactctttatcactct

SEQ ID NO: 372433 - DNA, 151 bp, Homo sapiens
tagccataatgaagaggccaaagaacccgataagacaaataagaaagaaggagagaaaacagatagagtaggagttggtaaggcctcttcttgccctttgccttttttttcctccatcaaaccaaaactttcgtaagttcaactaagatta

SEQ ID NO: 372434 - DNA, 463 bp, Homo sapiens
gtcaacctgtaactgggtagatgctctggtgacacaggtaagccctggagaagcaccttttagataccttttaactcttaccttttgtcattctgtgtaggtaattttgtcactctaggaaggaatattacgtttctccatagaagtagcttcactgttcatgacagggctcacgttttctgtttggcccatttagcaggctgtgcgacttgataatgtagttagccttcacagaagtctctgtatttcaaaggattttcatctgattttttccccctagaaatggttgctgatgtccagcagcccctgtcgcagattccttcagatacagcctctcctcttctcatacttccacctcctgttcccaatcctagtcctactctccggccagttgaaacaccagttgtaggtgctcctggtatgggcagtgtttccacagaacctgatgatgaagaaggtctca

SEQ ID NO: 372435 - DNA, 439 bp, Homo sapiens
aaagagatggagtctcactatgttgcccaatccagtcttgaactcctgggcccaagccgtctgcctggcttggcctcccaaattataaatttatttttatttgtttattttgtagagacagggtctcactccatcgtctaggatggagtgcagtggcaggaccacaactcactgcagccccaaactcctgggctcaagtgatccctccacctcaccctcccaggcagctaagactacaggcatgtaccaccatgcccagttgatctttaacatttcttttttttagagaccacgtctccacctcctgggctccaacgattctcccatcttggcctcccaaagcgctggatttacaggtatgagccaccttgcctggtggttcctggcctgatccaagataatttttaaaagaagcagtaggctcgagaggctgagacag

SEQ ID NO: 372436 - DNA, 518 bp, Homo sapiens
tctacggtagtgttttattgaacttcttagaatttcactattcaactgttcgttaaagaacttaaagttgatactttcttgttcaggactgggtctattgcattatattatgttagtttttttaacttgtttctttcagcctcttgtggtccagctacttcaatgccattgttggtctcataagtcaagatcatcaggcctcgttcagtatttaaatgtagatgtcctgccttgtatagagatagaactttagatattaatttatggtggtgaatgtgtgccacatgttgacatctgactatcatttttttctgttttcttattttcaggcagaggcagaggtgaatgtggtttctaccaaagaagttttgatgaagtagagggtgtttttggtcgaggaggtggcagagaaatgcatagatcgcagagctgggaggaaaggtaactggatccacatattggcataaaaatttcttggcatataaaacttatattttttgctttctgcggggagaaat

SEQ ID NO: 372437 - DNA, 6009 bp, Homo sapiens
gcggtcacgtgacgtgcgtggcgacgtgtcggccatcttgtgttgttgaggctgaggactgactggggttctgagactccctgtcccggaccgcagattatagtgggaccagtctcattaggttgaatctacagcctatgttggtgttaacccaggtctcttagagcgttaaaaggatctgaacaaagtctgctcaaatctcctgctgtgaaccagcagaatttttgaacagagaccacgtctccacctcctgggctccaacgattctcccatcttggcctcccaaagcgctggatttacaggtttcttcacatataaaaatctattgtaaaaatacggaaaagaatggcagcggaaacgcagacactgaactttgggcctgaatggctccgagctctgtccagtggtgggagtattacatcccctcctctttctccagcattgccgaagtataaattagcagattatcgttacggcagagaagaaatgttagcacttttccttaaagacaacaagataccttcagaccttctggataaagaatttctgcctatcctccaggaggaaccccttccaccattggctctggtaccctttacagaagaagaacagagaaacttttccatgtctgtaaatagtgctgctgtcctgcgattgacaggacgaggaggaggaggaacagtggtgggggctcctagaggtcgaagttcttcaagagggcgaggcagaggcagaggtgaatgtggtttctaccaaagaagttttgatgaagtagagggtgtttttggtcgaggaggtggcagagaaatgcatagatcgcagagctgggaggaaaggggtgacagacgttttgaaaaaccaggacgaaaagatgtagggagaccaaattttgaggaaggtggaccaacatcagtagggagaaagcatgaatttatacgctcagaaagtgaaaattggcgcatctttagagaggaacaaaatggagaagatgaagatggaggttggcgactagctggatcaaggagggatggagagaggtggcgacctcacagtcctgatggccctcgttctgcaggctggcgggaacacatggaacgacgtcggaggtttgagtttgattttcgagatagagatgatgaacggggttaccgaagggttcgctctggcagtgggagcatagatgatgacagggatagcttgcccgaatggtgcttagaggatgctgaagaagaaatgggtacatttgactcatctggagcattcctttctctaaaaaaagtacagaaagagcctattccagaagagcaggagatggacttccggcctgtggacgaaggggaggagtgctctgactctgagggtagccataatgaagaggccaaagaacccgataagacaaataagaaagaaggagagaaaacagatagagtaggagttgaagctagtgaggaaactccccagacctcatcatcatctgctagaccaggtactccttcagaccatcagtctcaggaagcatcacagtttgagaggaaagatgaaccaaaaactgagcaaacggaaaaagctgaagaggagactcggatggaaaatagtctaccagccaaagtgcccagcagaggggatgaaatggttgctgatgtccagcagcccctgtcgcagattccttcagatacagcctctcctcttctcatacttccacctcctgttcccaatcctagtcctactctccggccagttgaaacaccagttgtaggtgctcctggtatgggcagtgtttccacagaacctgatgatgaagaaggtctcaaacatttggagcagcaagctgagaaaatggtggcttatctccaagacagtgcactagatgatgaaagattggcatcaaaactgcaagagcacagagctaaaggagtgtcgattccattgatgcatgaagcaatgcagaagtggtattacaaagatcctcagggagaaattcaaggtcccttcaataatcaggagatggcagaatggtttcaggcgggctattttactatgtctttattggtgaagagagcgtgtgatgaaagcttccaacctcttggcgatatcatgaaaatgtggggaagggttcccttttctccaggtccagctccccctcctcatatgggagagctggaccaggaacgactgaccaggcagcaagaactcacagccttataccagatgcagcacctgcagtaccagcagtttttaatacaacaacaatatgcacaggttttggcccaacagcagaaagcagcactgtcttcccagcagcagcagcagttggcacttcttcttcaacagtttcagaccttgaagatgagaatatctgatcagaacatcattccctcagtaactaggtctgtgtccgtgccagatactggctctatctgggagcttcagccaacagcttcacagcctacagtttgggaaggtggtagtgtatgggatcttcctctggacaccacgacaccaggccctgccctggaacagcttcagcagctagagaaggccaaagctgcaaagctagagcaagagagaagagaggcagaaatgagggcaaaacgggaagaggaagagcgaaagaggcaggaagaactccgaagacaacaggaggaaattcttcggcgacagcaggaagaagaaaggaaaaggcgagaggaagaagaacttgcccgaaggaaacaggaagaggctctgcgtcgccagcgggagcaagaaattgcattaaggcgacagcgagaagaggaagaaagacagcagcaagaagaagctcttagaagactggaagagaggagaagagaagaggaagaaaggcggaagcaggaagaattgttacgcaaacaggaagaggaggctgcaaaatgggcccgggaagaagaagaagcccagcgtcgattagaggagaaccggctgcggatggaagaggaggcagccagactccggcatgaggaagaagaacggaagagaaaggagctggaggtccagcggcagaaggagttaatgcgccagaggcagcagcagcaagaggctctccggaggttgcagcagcagcagcagcaacaacagctggcgcagatgaagcttccttcttcttcaacgtggggccagcagtccaatacaacagcatgtcagtcccaggccacgctgtcgttggctgaaatccaaaaactagaggaagaacgagaacggcagcttcgagaagagcaaaggcgccagcagagggagttgatgaaagctcttcagcagcagcagcagcagcaacagcagaaactctcaggttgggggaatgtcagcaaaccttcaggtaccacgaaatctcttctggagatccagcaggaagaggccaggcaaatgcaaaagcagcagcagcagcagcagcaacaccagcaaccaaacagagctcgtaacaatacgcattccaacctgcacaccagcattgggaattctgtttggggctctataaatactggtcctcctaaccagtgggcatctgacctagtcagtagtatttggagtaatgctgacactaaaaactccaacatgggattctgggatgatgcagtgaaagaggtgggacctaggaattcaacaaataaaaataaaaacaacgccagtctcagtaaatctgtaggtgtgtctaaccggcagaataagaaagtagaagaagaagaaaagttgctgaagctctttcagggagtaaataaagcccaagatggatttacgcagtggtgtgaacagatgcttcatgcccttaatacggcaaataacttggatgttcccacatttgtttctttcctgaaagaagtagaatctccttatgaggtccatgattatatcagggcctatttaggagatacttctgaggccaaggagtttgccaagcagttccttgagcgccgtgccaaacagaaagccaaccagcagcgtcagcagcagcagctgccgcagcagcagcagcagccaccacagcagccgccacagcagccacaacagcaggactctgtgtgggggatgaaccacagtacactccattcagtatttcagaccaatcaaagcaacaaccaacaatccaattttgaggctgtgcagagtggcaagaagaagaaaaagcagaagatggtccgagcagatcccagtttattaggattttcagtcaatgcatcatcggagcgactcaacatgggtgaaatcgagacgttggatgactactgagcacctgccagtggactggccatccctctcctgtctgccgactatggagtctccacctttggacacaacacttactcaccatttactctttatcactctgcaacaaatcacagaaccgatcatctcaggctttttcttctggccctttgtgtccaagattctttaatccatttttgttggtgaacatctcagactatagataagtggactggaccctgtgtcttgggggtggcagttgggattactccccaacaaggctgattttaggcagcatgtgttcactgtgctgtgatttcatctactgtctcccagaaagtgtgttgggatcggccattagcagcttgctttctcttgtcactttttttcttctattttgttttttcttcttctttttccccccatcagggcaaatggtctaactggtgcaatcatgaagagagttaatggttaacagacattggccaataacaaaacaccccatggactgtgactcgagtatccaacaggcagtcagagctctcccggtctgaaagttgcattgccactgctaactttgggattgcatcagagaggccctgagtggggttgagatgaggttggtttggtttgatgttacacactcctcacctgttctttctgagtgtcctttctctgaaaggatttatgtttttcttcgttagatagtgacttctgagcaagctgatctcccctggcatgctccaacctgattggacaaaggaagctctatggcctgggagagagactattcttaatttttctttcttacaaaaactgatttttcccataaatatttttacttcagaggactaggaccattttgttttgggcccttctgctgaaaatttgtctcgtttaagaggcagctagaatctttaccatatgtatgaatttgtataatttcatttttggatagggataaacttttgcttctgataaaagcctggaatttcatctggtcctcagagcattgcgtgtgtgtcttgctgtagcccggaaaaggttttgtgtaaagattctgggatggcaagttgtttgccttttctgaaaagagaacatacagaacctgtccatctttaagaccttcatccatggaatctactatacaggaggatgcagtgggctggaggggatgggcgaaaatgggagcaggaagcctggcctggcttctggtcatggcctcctaaaaccttaaacttcaagtagaaatgtactcaagccctatttataaacaaatacttttcctgcctccaccaaacccctacagaacatcacctggaattgccactcacactgggttggagtcattgggcagctgtgcctgtgcgagaggtgctgtggtctgggcagcccctggaaaagcacctttgctgcctgtcattgttgcctgaagaaggctggagttgctctgagagcagtttgggtttggagtattatatttggcttctatttttattattttggatcaccattctccctatcccttcttgcctccctcccttctaaacatgtgtaataactatacagagactgctacaaaattgtatatagtttttggatcaaatagcatgaggggagaggaaaccattaaaaattggggctcctactctcctttgctttgtaaattcaaaagttgggggtgggtaagagggatagttaaaatgtttacaaaactttaggctccctcggaacttttgccagtgtggaggaaaataaaaaagaacttaaataaaatctgattgtattcta

SEQ ID NO: 372438 - DNA, 5869 bp, Homo sapiens
gcggtcacgtgacgtgcgtggcgacgtgtcggccatcttgtgttgttgaggctgaggactgactggggttctgagactccctgtcccggaccgcagcgttaaaaggatctgaacaaagtctgctcaaatctcctgctgtgaaccagcagaatttttgaacaggtttcttcacatataaaaatctattgtaaaaatacggaaaagaatggcagcggaaacgcagacactgaactttgggcctgaatggctccgagctctgtccagtggtgggagtattacatcccctcctctttctccagcattgccgaagtataaattagcagattatcgttacggcagagaagaaatgttagcacttttccttaaagacaacaagataccttcagaccttctggataaagaatttctgcctatcctccaggaggaaccccttccaccattggctctggtaccctttacagaagaagaacagagaaacttttccatgtctgtaaatagtgctgctgtcctgcgattgacaggacgaggaggaggaggaacagtggtgggggctcctagaggtcgaagttcttcaagagggcgaggcagaggcagaggtgaatgtggtttctaccaaagaagttttgatgaagtagagggtgtttttggtcgaggaggtggcagagaaatgcatagatcgcagagctgggaggaaaggggtgacagacgttttgaaaaaccaggacgaaaagatgtagggagaccaaattttgaggaaggtggaccaacatcagtagggagaaagcatgaatttatacgctcagaaagtgaaaattggcgcatctttagagaggaacaaaatggagaagatgaagatggaggttggcgactagctggatcaaggagggatggagagaggtggcgacctcacagtcctgatggccctcgttctgcaggctggcgggaacacatggaacgacgtcggaggtttgagtttgattttcgagatagagatgatgaacggggttaccgaagggttcgctctggcagtgggagcatagatgatgacagggatagcttgcccgaatggtgcttagaggatgctgaagaagaaatgggtacatttgactcatctggagcattcctttctctaaaaaaagtacagaaagagcctattccagaagagcaggagatggacttccggcctgtggacgaaggggaggagtgctctgactctgagggtagccataatgaagaggccaaagaacccgataagacaaataagaaagaaggagagaaaacagatagagtaggagttgaagctagtgaggaaactccccagacctcatcatcatctgctagaccaggtactccttcagaccatcagtctcaggaagcatcacagtttgagaggaaagatgaaccaaaaactgagcaaacggaaaaagctgaagaggagactcggatggaaaatagtctaccagccaaagtgcccagcagaggggatgaaatggttgctgatgtccagcagcccctgtcgcagattccttcagatacagcctctcctcttctcatacttccacctcctgttcccaatcctagtcctactctccggccagttgaaacaccagttgtaggtgctcctggtatgggcagtgtttccacagaacctgatgatgaagaaggtctcaaacatttggagcagcaagctgagaaaatggtggcttatctccaagacagtgcactagatgatgaaagattggcatcaaaactgcaagagcacagagctaaaggagtgtcgattccattgatgcatgaagcaatgcagaagtggtattacaaagatcctcagggagaaattcaaggtcccttcaataatcaggagatggcagaatggtttcaggcgggctattttactatgtctttattggtgaagagagcgtgtgatgaaagcttccaacctcttggcgatatcatgaaaatgtggggaagggttcccttttctccaggtccagctccccctcctcatatgggagagctggaccaggaacgactgaccaggcagcaagaactcacagccttataccagatgcagcacctgcagtaccagcagtttttaatacaacaacaatatgcacaggttttggcccaacagcagaaagcagcactgtcttcccagcagcagcagcagttggcacttcttcttcaacagtttcagaccttgaagatgagaatatctgatcagaacatcattccctcagtaactaggtctgtgtccgtgccagatactggctctatctgggagcttcagccaacagcttcacagcctacagtttgggaaggtggtagtgtatgggatcttcctctggacaccacgacaccaggccctgccctggaacagcttcagcagctagagaaggccaaagctgcaaagctagagcaagagagaagagaggcagaaatgagggcaaaacgggaagaggaagagcgaaagaggcaggaagaactccgaagacaacaggaggaaattcttcggcgacagcaggaagaagaaaggaaaaggcgagaggaagaagaacttgcccgaaggaaacaggaagaggctctgcgtcgccagcgggagcaagaaattgcattaaggcgacagcgagaagaggaagaaagacagcagcaagaagaagctcttagaagactggaagagaggagaagagaagaggaagaaaggcggaagcaggaagaattgttacgcaaacaggaagaggaggctgcaaaatgggcccgggaagaagaagaagcccagcgtcgattagaggagaaccggctgcggatggaagaggaggcagccagactccggcatgaggaagaagaacggaagagaaaggagctggaggtccagcggcagaaggagttaatgcgccagaggcagcagcagcaagaggctctccggaggttgcagcagcagcagcagcaacaacagctggcgcagatgaagcttccttcttcttcaacgtggggccagcagtccaatacaacagcatgtcagtcccaggccacgctgtcgttggctgaaatccaaaaactagaggaagaacgagaacggcagcttcgagaagagcaaaggcgccagcagagggagttgatgaaagctcttcagcagcagcagcagcagcaacagcagaaactctcaggttgggggaatgtcagcaaaccttcaggtaccacgaaatctcttctggagatccagcaggaagaggccaggcaaatgcaaaagcagcagcagcagcagcagcaacaccagcaaccaaacagagctcgtaacaatacgcattccaacctgcacaccagcattgggaattctgtttggggctctataaatactggtcctcctaaccagtgggcatctgacctagtcagtagtatttggagtaatgctgacactaaaaactccaacatgggattctgggatgatgcagtgaaagaggtgggacctaggaattcaacaaataaaaataaaaacaacgccagtctcagtaaatctgtaggtgtgtctaaccggcagaataagaaagtagaagaagaagaaaagttgctgaagctctttcagggagtaaataaagcccaagatggatttacgcagtggtgtgaacagatgcttcatgcccttaatacggcaaataacttggatgttcccacatttgtttctttcctgaaagaagtagaatctccttatgaggtccatgattatatcagggcctatttaggagatacttctgaggccaaggagtttgccaagcagttccttgagcgccgtgccaaacagaaagccaaccagcagcgtcagcagcagcagctgccgcagcagcagcagcagccaccacagcagccgccacagcagccacaacagcaggactctgtgtgggggatgaaccacagtacactccattcagtatttcagaccaatcaaagcaacaaccaacaatccaattttgaggctgtgcagagtggcaagaagaagaaaaagcagaagatggtccgagcagatcccagtttattaggattttcagtcaatgcatcatcggagcgactcaacatgggtgaaatcgagacgttggatgactactgagcacctgccagtggactggccatccctctcctgtctgccgactatggagtctccacctttggacacaacacttactcaccatttactctttatcactctgcaacaaatcacagaaccgatcatctcaggctttttcttctggccctttgtgtccaagattctttaatccatttttgttggtgaacatctcagactatagataagtggactggaccctgtgtcttgggggtggcagttgggattactccccaacaaggctgattttaggcagcatgtgttcactgtgctgtgatttcatctactgtctcccagaaagtgtgttgggatcggccattagcagcttgctttctcttgtcactttttttcttctattttgttttttcttcttctttttccccccatcagggcaaatggtctaactggtgcaatcatgaagagagttaatggttaacagacattggccaataacaaaacaccccatggactgtgactcgagtatccaacaggcagtcagagctctcccggtctgaaagttgcattgccactgctaactttgggattgcatcagagaggccctgagtggggttgagatgaggttggtttggtttgatgttacacactcctcacctgttctttctgagtgtcctttctctgaaaggatttatgtttttcttcgttagatagtgacttctgagcaagctgatctcccctggcatgctccaacctgattggacaaaggaagctctatggcctgggagagagactattcttaatttttctttcttacaaaaactgatttttcccataaatatttttacttcagaggactaggaccattttgttttgggcccttctgctgaaaatttgtctcgtttaagaggcagctagaatctttaccatatgtatgaatttgtataatttcatttttggatagggataaacttttgcttctgataaaagcctggaatttcatctggtcctcagagcattgcgtgtgtgtcttgctgtagcccggaaaaggttttgtgtaaagattctgggatggcaagttgtttgccttttctgaaaagagaacatacagaacctgtccatctttaagaccttcatccatggaatctactatacaggaggatgcagtgggctggaggggatgggcgaaaatgggagcaggaagcctggcctggcttctggtcatggcctcctaaaaccttaaacttcaagtagaaatgtactcaagccctatttataaacaaatacttttcctgcctccaccaaacccctacagaacatcacctggaattgccactcacactgggttggagtcattgggcagctgtgcctgtgcgagaggtgctgtggtctgggcagcccctggaaaagcacctttgctgcctgtcattgttgcctgaagaaggctggagttgctctgagagcagtttgggtttggagtattatatttggcttctatttttattattttggatcaccattctccctatcccttcttgcctccctcccttctaaacatgtgtaataactatacagagactgctacaaaattgtatatagtttttggatcaaatagcatgaggggagaggaaaccattaaaaattggggctcctactctcctttgctttgtaaattcaaaagttgggggtgggtaagagggatagttaaaatgtttacaaaactttaggctccctcggaacttttgccagtgtggaggaaaataaaaaagaacttaaataaaatctgattgtattcta

SEQ ID NO: 372439 - DNA, 6055 bp, Homo sapiens
ggagtctcactatgttgcccaatccagtcttgaactcctgggcccaagccgtctgcctggcttggcctcccaaattataaatttatttttatttgtttattttgtagagacagggtctcactccatcgtctaggatggagtgcagtggcaggaccacaactcactgcagccccaaactcctgggctcaagtgatccctccacctcaccctcccaggcagctaagactacaggcatgtaccaccatgcccagttgatctttaacatttcttttttttagagaccacgtctccacctcctgggctccaacgattctcccatcttggcctcccaaagcgctggatttacaggtttcttcacatataaaaatctattgtaaaaatacggaaaagaatggcagcggaaacgcagacactgaactttgggcctgaatggctccgagctctgtccagtggtgggagtattacatcccctcctctttctccagcattgccgaagtataaattagcagattatcgttacggcagagaagaaatgttagcacttttccttaaagacaacaagataccttcagaccttctggataaagaatttctgcctatcctccaggaggaaccccttccaccattggctctggtaccctttacagaagaagaacagagaaacttttccatgtctgtaaatagtgctgctgtcctgcgattgacaggacgaggaggaggaggaacagtggtgggggctcctagaggtcgaagttcttcaagagggcgaggcagaggcagaggtgaatgtggtttctaccaaagaagttttgatgaagtagagggtgtttttggtcgaggaggtggcagagaaatgcatagatcgcagagctgggaggaaaggggtgacagacgttttgaaaaaccaggacgaaaagatgtagggagaccaaattttgaggaaggtggaccaacatcagtagggagaaagcatgaatttatacgctcagaaagtgaaaattggcgcatctttagagaggaacaaaatggagaagatgaagatggaggttggcgactagctggatcaaggagggatggagagaggtggcgacctcacagtcctgatggccctcgttctgcaggctggcgggaacacatggaacgacgtcggaggtttgagtttgattttcgagatagagatgatgaacggggttaccgaagggttcgctctggcagtgggagcatagatgatgacagggatagcttgcccgaatggtgcttagaggatgctgaagaagaaatgggtacatttgactcatctggagcattcctttctctaaaaaaagtacagaaagagcctattccagaagagcaggagatggacttccggcctgtggacgaaggggaggagtgctctgactctgagggtagccataatgaagaggccaaagaacccgataagacaaataagaaagaaggagagaaaacagatagagtaggagttgaagctagtgaggaaactccccagacctcatcatcatctgctagaccaggtactccttcagaccatcagtctcaggaagcatcacagtttgagaggaaagatgaaccaaaaactgagcaaacggaaaaagctgaagaggagactcggatggaaaatagtctaccagccaaagtgcccagcagaggggatgaaatggttgctgatgtccagcagcccctgtcgcagattccttcagatacagcctctcctcttctcatacttccacctcctgttcccaatcctagtcctactctccggccagttgaaacaccagttgtaggtgctcctggtatgggcagtgtttccacagaacctgatgatgaagaaggtctcaaacatttggagcagcaagctgagaaaatggtggcttatctccaagacagtgcactagatgatgaaagattggcatcaaaactgcaagagcacagagctaaaggagtgtcgattccattgatgcatgaagcaatgcagaagtggtattacaaagatcctcagggagaaattcaaggtcccttcaataatcaggagatggcagaatggtttcaggcgggctattttactatgtctttattggtgaagagagcgtgtgatgaaagcttccaacctcttggcgatatcatgaaaatgtggggaagggttcccttttctccaggtccagctccccctcctcatatgggagagctggaccaggaacgactgaccaggcagcaagaactcacagccttataccagatgcagcacctgcagtaccagcagtttttaatacaacaacaatatgcacaggttttggcccaacagcagaaagcagcactgtcttcccagcagcagcagcagttggcacttcttcttcaacagtttcagaccttgaagatgagaatatctgatcagaacatcattccctcagtaactaggtctgtgtccgtgccagatactggctctatctgggagcttcagccaacagcttcacagcctacagtttgggaaggtggtagtgtatgggatcttcctctggacaccacgacaccaggccctgccctggaacagcttcagcagctagagaaggccaaagctgcaaagctagagcaagagagaagagaggcagaaatgagggcaaaacgggaagaggaagagcgaaagaggcaggaagaactccgaagacaacaggaggaaattcttcggcgacagcaggaagaagaaaggaaaaggcgagaggaagaagaacttgcccgaaggaaacaggaagaggctctgcgtcgccagcgggagcaagaaattgcattaaggcgacagcgagaagaggaagaaagacagcagcaagaagaagctcttagaagactggaagagaggagaagagaagaggaagaaaggcggaagcaggaagaattgttacgcaaacaggaagaggaggctgcaaaatgggcccgggaagaagaagaagcccagcgtcgattagaggagaaccggctgcggatggaagaggaggcagccagactccggcatgaggaagaagaacggaagagaaaggagctggaggtccagcggcagaaggagttaatgcgccagaggcagcagcagcaagaggctctccggaggttgcagcagcagcagcagcaacaacagctggcgcagatgaagcttccttcttcttcaacgtggggccagcagtccaatacaacagcatgtcagtcccaggccacgctgtcgttggctgaaatccaaaaactagaggaagaacgagaacggcagcttcgagaagagcaaaggcgccagcagagggagttgatgaaagctcttcagcagcagcagcagcagcaacagcagaaactctcaggttgggggaatgtcagcaaaccttcaggtaccacgaaatctcttctggagatccagcaggaagaggccaggcaaatgcaaaagcagcagcagcagcagcagcaacaccagcaaccaaacagagctcgtaacaatacgcattccaacctgcacaccagcattgggaattctgtttggggctctataaatactggtcctcctaaccagtgggcatctgacctagtcagtagtatttggagtaatgctgacactaaaaactccaacatgggattctgggatgatgcagtgaaagaggtgggacctaggaattcaacaaataaaaataaaaacaacgccagtctcagtaaatctgtaggtgtgtctaaccggcagaataagaaagtagaagaagaagaaaagttgctgaagctctttcagggagtaaataaagcccaagatggatttacgcagtggtgtgaacagatgcttcatgcccttaatacggcaaataacttggatgttcccacatttgtttctttcctgaaagaagtagaatctccttatgaggtccatgattatatcagggcctatttaggagatacttctgaggccaaggagtttgccaagcagttccttgagcgccgtgccaaacagaaagccaaccagcagcgtcagcagcagcagctgccgcagcagcagcagcagccaccacagcagccgccacagcagccacaacagcaggactctgtgtgggggatgaaccacagtacactccattcagtatttcagaccaatcaaagcaacaaccaacaatccaattttgaggctgtgcagagtggcaagaagaagaaaaagcagaagatggtccgagcagatcccagtttattaggattttcagtcaatgcatcatcggagcgactcaacatgggtgaaatcgagacgttggatgactactgagcacctgccagtggactggccatccctctcctgtctgccgactatggagtctccacctttggacacaacacttactcaccatttactctttatcactctgcaacaaatcacagaaccgatcatctcaggctttttcttctggccctttgtgtccaagattctttaatccatttttgttggtgaacatctcagactatagataagtggactggaccctgtgtcttgggggtggcagttgggattactccccaacaaggctgattttaggcagcatgtgttcactgtgctgtgatttcatctactgtctcccagaaagtgtgttgggatcggccattagcagcttgctttctcttgtcactttttttcttctattttgttttttcttcttctttttccccccatcagggcaaatggtctaactggtgcaatcatgaagagagttaatggttaacagacattggccaataacaaaacaccccatggactgtgactcgagtatccaacaggcagtcagagctctcccggtctgaaagttgcattgccactgctaactttgggattgcatcagagaggccctgagtggggttgagatgaggttggtttggtttgatgttacacactcctcacctgttctttctgagtgtcctttctctgaaaggatttatgtttttcttcgttagatagtgacttctgagcaagctgatctcccctggcatgctccaacctgattggacaaaggaagctctatggcctgggagagagactattcttaatttttctttcttacaaaaactgatttttcccataaatatttttacttcagaggactaggaccattttgttttgggcccttctgctgaaaatttgtctcgtttaagaggcagctagaatctttaccatatgtatgaatttgtataatttcatttttggatagggataaacttttgcttctgataaaagcctggaatttcatctggtcctcagagcattgcgtgtgtgtcttgctgtagcccggaaaaggttttgtgtaaagattctgggatggcaagttgtttgccttttctgaaaagagaacatacagaacctgtccatctttaagaccttcatccatggaatctactatacaggaggatgcagtgggctggaggggatgggcgaaaatgggagcaggaagcctggcctggcttctggtcatggcctcctaaaaccttaaacttcaagtagaaatgtactcaagccctatttataaacaaatacttttcctgcctccaccaaacccctacagaacatcacctggaattgccactcacactgggttggagtcattgggcagctgtgcctgtgcgagaggtgctgtggtctgggcagcccctggaaaagcacctttgctgcctgtcattgttgcctgaagaaggctggagttgctctgagagcagtttgggtttggagtattatatttggcttctatttttattattttggatcaccattctccctatcccttcttgcctccctcccttctaaacatgtgtaataactatacagagactgctacaaaattgtatatagtttttggatcaaatagcatgaggggagaggaaaccattaaaaattggggctcctactctcctttgctttgtaaattcaaaagttgggggtgggtaagagggatagttaaaatgtttacaaaactttaggctccctcggaacttttgccagtgtggaggaaaataaaaaagaacttaaataaaatctgattgtattcta

SEQ ID NO: 372440 - DNA, 5399 bp, Homo sapiens
gaaagggtccacacatttgagtaggagggctggggcatttgaagccttgcgatgggaactgtgtgaaggaaatggagctgtttagataggagacaagattgtggacagggcagagtggggaggagggcttatagggtcactctctatcaatacctgcctactaatcatgatcatgtgagtttccaaaggaacgtttaaagttagttccgaagtagtcttcctgatcatgtgtgcaagacttcatgaccaagctcccagatgatccagggagaccaaattttgaggaaggtggaccaacatcagtagggagaaagcatgaatttatacgctcagaaagtgaaaattggcgcatctttagagaggaacaaaatggagaagatgaagatggaggttggcgactagctggatcaaggagggatggagagaggtggcgacctcacagtcctgatggccctcgttctgcaggctggcgggaacacatggaacgacgtcggaggtttgagtttgattttcgagatagagatgatgaacggggttaccgaagggttcgctctggcagtgggagcatagatgatgacagggatagcttgcccgaatggtgcttagaggatgctgaagaagaaatgggtacatttgactcatctggagcattcctttctctaaaaaaagtacagaaagagcctattccagaagagcaggagatggacttccggcctgtggacgaaggggaggagtgctctgactctgagggtagccataatgaagaggccaaagaacccgataagacaaataagaaagaaggagagaaaacagatagagtaggagttgaagctagtgaggaaactccccagacctcatcatcatctgctagaccaggtactccttcagaccatcagtctcaggaagcatcacagtttgagaggaaagatgaaccaaaaactgagcaaacggaaaaagctgaagaggagactcggatggaaaatagtctaccagccaaagtgcccagcagaggggatgaaatggttgctgatgtccagcagcccctgtcgcagattccttcagatacagcctctcctcttctcatacttccacctcctgttcccaatcctagtcctactctccggccagttgaaacaccagttgtaggtgctcctggtatgggcagtgtttccacagaacctgatgatgaagaaggtctcaaacatttggagcagcaagctgagaaaatggtggcttatctccaagacagtgcactagatgatgaaagattggcatcaaaactgcaagagcacagagctaaaggagtgtcgattccattgatgcatgaagcaatgcagaagtggtattacaaagatcctcagggagaaattcaaggtcccttcaataatcaggagatggcagaatggtttcaggcgggctattttactatgtctttattggtgaagagagcgtgtgatgaaagcttccaacctcttggcgatatcatgaaaatgtggggaagggttcccttttctccaggtccagctccccctcctcatatgggagagctggaccaggaacgactgaccaggcagcaagaactcacagccttataccagatgcagcacctgcagtaccagcagtttttaatacaacaacaatatgcacaggttttggcccaacagcagaaagcagcactgtcttcccagcagcagcagcagttggcacttcttcttcaacagtttcagaccttgaagatgagaatatctgatcagaacatcattccctcagtaactaggtctgtgtccgtgccagatactggctctatctgggagcttcagccaacagcttcacagcctacagtttgggaaggtggtagtgtatgggatcttcctctggacaccacgacaccaggccctgccctggaacagcttcagcagctagagaaggccaaagctgcaaagctagagcaagagagaagagaggcagaaatgagggcaaaacgggaagaggaagagcgaaagaggcaggaagaactccgaagacaacaggaggaaattcttcggcgacagcaggaagaagaaaggaaaaggcgagaggaagaagaacttgcccgaaggaaacaggaagaggctctgcgtcgccagcgggagcaagaaattgcattaaggcgacagcgagaagaggaagaaagacagcagcaagaagaagctcttagaagactggaagagaggagaagagaagaggaagaaaggcggaagcaggaagaattgttacgcaaacaggaagaggaggctgcaaaatgggcccgggaagaagaagaagcccagcgtcgattagaggagaaccggctgcggatggaagaggaggcagccagactccggcatgaggaagaagaacggaagagaaaggagctggaggtccagcggcagaaggagttaatgcgccagaggcagcagcagcaagaggctctccggaggttgcagcagcagcagcagcaacaacagctggcgcagatgaagcttccttcttcttcaacgtggggccagcagtccaatacaacagcatgtcagtcccaggccacgctgtcgttggctgaaatccaaaaactagaggaagaacgagaacggcagcttcgagaagagcaaaggcgccagcagagggagttgatgaaagctcttcagcagcagcagcagcagcaacagcagaaactctcaggttgggggaatgtcagcaaaccttcaggtaccacgaaatctcttctggagatccagcaggaagaggccaggcaaatgcaaaagcagcagcagcagcagcagcaacaccagcaaccaaacagagctcgtaacaatacgcattccaacctgcacaccagcattgggaattctgtttggggctctataaatactggtcctcctaaccagtgggcatctgacctagtcagtagtatttggagtaatgctgacactaaaaactccaacatgggattctgggatgatgcagtgaaagaggtgggacctaggaattcaacaaataaaaataaaaacaacgccagtctcagtaaatctgtaggtgtgtctaaccggcagaataagaaagtagaagaagaagaaaagttgctgaagctctttcagggagtaaataaagcccaagatggatttacgcagtggtgtgaacagatgcttcatgcccttaatacggcaaataacttggatgttcccacatttgtttctttcctgaaagaagtagaatctccttatgaggtccatgattatatcagggcctatttaggagatacttctgaggccaaggagtttgccaagcagttccttgagcgccgtgccaaacagaaagccaaccagcagcgtcagcagcagcagctgccgcagcagcagcagcagccaccacagcagccgccacagcagccacaacagcaggactctgtgtgggggatgaaccacagtacactccattcagtatttcagaccaatcaaagcaacaaccaacaatccaattttgaggctgtgcagagtggcaagaagaagaaaaagcagaagatggtccgagcagatcccagtttattaggattttcagtcaatgcatcatcggagcgactcaacatgggtgaaatcgagacgttggatgactactgagcacctgccagtggactggccatccctctcctgtctgccgactatggagtctccacctttggacacaacacttactcaccatttactctttatcactctgcaacaaatcacagaaccgatcatctcaggctttttcttctggccctttgtgtccaagattctttaatccatttttgttggtgaacatctcagactatagataagtggactggaccctgtgtcttgggggtggcagttgggattactccccaacaaggctgattttaggcagcatgtgttcactgtgctgtgatttcatctactgtctcccagaaagtgtgttgggatcggccattagcagcttgctttctcttgtcactttttttcttctattttgttttttcttcttctttttccccccatcagggcaaatggtctaactggtgcaatcatgaagagagttaatggttaacagacattggccaataacaaaacaccccatggactgtgactcgagtatccaacaggcagtcagagctctcccggtctgaaagttgcattgccactgctaactttgggattgcatcagagaggccctgagtggggttgagatgaggttggtttggtttgatgttacacactcctcacctgttctttctgagtgtcctttctctgaaaggatttatgtttttcttcgttagatagtgacttctgagcaagctgatctcccctggcatgctccaacctgattggacaaaggaagctctatggcctgggagagagactattcttaatttttctttcttacaaaaactgatttttcccataaatatttttacttcagaggactaggaccattttgttttgggcccttctgctgaaaatttgtctcgtttaagaggcagctagaatctttaccatatgtatgaatttgtataatttcatttttggatagggataaacttttgcttctgataaaagcctggaatttcatctggtcctcagagcattgcgtgtgtgtcttgctgtagcccggaaaaggttttgtgtaaagattctgggatggcaagttgtttgccttttctgaaaagagaacatacagaacctgtccatctttaagaccttcatccatggaatctactatacaggaggatgcagtgggctggaggggatgggcgaaaatgggagcaggaagcctggcctggcttctggtcatggcctcctaaaaccttaaacttcaagtagaaatgtactcaagccctatttataaacaaatacttttcctgcctccaccaaacccctacagaacatcacctggaattgccactcacactgggttggagtcattgggcagctgtgcctgtgcgagaggtgctgtggtctgggcagcccctggaaaagcacctttgctgcctgtcattgttgcctgaagaaggctggagttgctctgagagcagtttgggtttggagtattatatttggcttctatttttattattttggatcaccattctccctatcccttcttgcctccctcccttctaaacatgtgtaataactatacagagactgctacaaaattgtatatagtttttggatcaaatagcatgaggggagaggaaaccattaaaaattggggctcctactctcctttgctttgtaaattcaaaagttgggggtgggtaagagggatagttaaaatgtttacaaaactttaggctccctcggaacttttgccagtgtggaggaaaataaaaaagaacttaaataaaatctgattgtattcta

SEQ ID NO: 372441 - DNA, 5955 bp, Homo sapiens
gcggtcacgtgacgtgcgtggcgacgtgtcggccatcttgtgttgttgaggctgaggactgactggggttctgagactccctgtcccggaccgcagattatagtgggaccagtctcattaggttgaatctacagcctatgttggtgttaacccaggtctcttagagcgttaaaaggatctgaacaaagtctgctcaaatctcctgctgtgaaccagcagaatttttgaacagagaccacgtctccacctcctgggctccaacgattctcccatcttggcctcccaaagcgctggatttacaggtttcttcacatataaaaatctattgtaaaaatacggaaaagaatggcagcggaaacgcagacactgaactttgggcctgaatggctccgagctctgtccagtggtgggagtattacatcccctcctctttctccagcattgccgaagtataaattagcagattatcgttacggcagagaagaaatgttagcacttttccttaaagacaacaagataccttcagaccttctggataaagaatttctgcctatcctccaggaggaaccccttccaccattggctctggtaccctttacagaagaagaacagagaaacttttccatgtctgtaaatagtgctgctgtcctgcgattgacaggacgaggaggaggaggaacagtggtgggggctcctagaggtcgaagttcttcaagagggcgaggcagaggcagaggtgaatgtggtttctaccaaagaagttttgatgaagtagagggtgtttttggtcgaggaggtggcagagaaatgcatagatcgcagagctgggaggaaaggggtgacagacgttttgaaaaaccaggacgaaaagatgtagggagaccaaattttgaggaaggtggaccaacatcagtagggagaaagcatgaatttatacgctcagaaagtgaaaattggcgcatctttagagaggaacaaaatggagaagatgaagatggaggttggcgactagctggatcaaggagggatggagagaggtggcgacctcacagtcctgatggccctcgttctgcaggctggcgggaacacatggaacgacgtcggaggtttgagtttgattttcgagatagagatgatgaacggggttaccgaagggttcgctctggcagtgggagcatagatgatgacagggatagcttgcccgaatggtgcttagaggatgctgaagaagaaatgggtacatttgactcatctggagcattcctttctctaaaaaaagtacagaaagagcctattccagaagagcaggagatggacttccggcctgtggacgaaggggaggagtgctctgactctgagggtagccataatgaagaggccaaagaacccgataagacaaataagaaagaaggagagaaaacagatagagtaggagttgaagctagtgaggaaactccccagacctcatcatcatctgctagaccaggtactccttcagaccatcagtctcaggaagcatcacagtttgagaggaaagatgaaccaaaaactgagcaaacggaaaaagctgaagaggagactcggatggaaaatagtctaccagccaaagtgcccagcagaggggatgaaatggttgctgatgtccagcagcccctgtcgcagattccttcagatacagcctctcctcttctcatacttccacctcctgttcccaatcctagtcctactctccggccagttgaaacaccagttgtaggtgctcctggtatgggcagtgtttccacagaacctgatgatgaagaaggtctcaaacatttggagcagcaagctgagaaaatggtggcttatctccaagacagtgcactagatgatgaaagattggcatcaaaactgcaagagcacagagctaaaggagtgtcgattccattgatgcatgaagcaatgcagaagtggtattacaaagatcctcagggagaaattcaaggtcccttcaataatcaggagatggcagaatggtttcaggcgggctattttactatgtctttattggtgaagagagcgtgtgatgaaagcttccaacctcttggcgatatcatgaaaatgtggggaagggttcccttttctccaggtccagctccccctcctcatatgggagagctggaccaggaacgactgaccaggcagcaagaactcacagccttataccagatgcagcacctgcagtaccagcagtttttaatacaacaacaatatgcacaggttttggcccaacagcagaaagcagcactgtcttcccagcagcagcagcagttggcacttcttcttcaacagtttcagaccttgaagatgagaatatctgatcagaacatcattccctcagtaactaggtctgtgtccgtgccagatactggctctatctgggagcttcagccaacagcttcacagcctacagtttgggaaggtggtagtgtatgggatcttcctctggacaccacgacaccaggccctgccctggaacagcttcagcagctagagaaggccaaagctgcaaagctagagcaagagagaagagaggcagaaatgagggcaaaacgggaagaggaagagcgaaagaggcaggaagaactccgaagacaacaggaggaaattcttcggcgacagcaggaagaagaaaggaaaaggcgagaggaagaagaacttgcccgaaggaaacaggaagaggctctgcgtcgccagcgggagcaagaaattgcattaaggcgacagcgagaagaggaagaaagacagcagcaagaagaagctcttagaagactggaagagaggagaagagaagaggaagaaaggcggaagcaggaagaattgttacgcaaacaggaagaggaggctgcaaaatgggcccgggaagaagaagaagcccagcgtcgattagaggagaaccggctgcggatggaagaggaggcagccagactccggcatgaggaagaagaacggaagagaaaggagctggaggtccagcggcagaaggagttaatgcgccagaggcagcagcagcaagaggctctccggaggttgcagcagcagcagcagcaacaacagctggcgcagatgaagcttccttcttcttcaacgtggggccagcagtccaatacaacagcatgtcagtcccaggccacgctgtcgttggctgaaatccaaaaactagaggaagaacgagaacggcagcttcgagaagagcaaaggcgccagcagagggagttgatgaaagctcttcagcagcagcagcagcagcaacagcagaaactctcaggttgggggaatgtcagcaaaccttcaggtaccacgaaatctcttctggagatccagcaggaagaggccaggcaaatgcaaaagcagcagcagcagcagcagcaacaccagcaaccaaacagagctcgtaacaatacgcattccaacctgcacaccagcattgggaattctgtttggggctctataaatactggtcctcctaaccagtgggcatctgacctagtcagtagtatttggagtaatgctgacactaaaaactccaacatgggattctgggatgatgcagtgaaagaggtgggacctaggaattcaacaaataaaaataaaaacaacgccagtctcagtaaatctgtaggtgtgtctaaccggcagaataagaaagtagaagaagaagagtggtgtgaacagatgcttcatgcccttaatacggcaaataacttggatgttcccacatttgtttctttcctgaaagaagtagaatctccttatgaggtccatgattatatcagggcctatttaggagatacttctgaggccaaggagtttgccaagcagttccttgagcgccgtgccaaacagaaagccaaccagcagcgtcagcagcagcagctgccgcagcagcagcagcagccaccacagcagccgccacagcagccacaacagcaggactctgtgtgggggatgaaccacagtacactccattcagtatttcagaccaatcaaagcaacaaccaacaatccaattttgaggctgtgcagagtggcaagaagaagaaaaagcagaagatggtccgagcagatcccagtttattaggattttcagtcaatgcatcatcggagcgactcaacatgggtgaaatcgagacgttggatgactactgagcacctgccagtggactggccatccctctcctgtctgccgactatggagtctccacctttggacacaacacttactcaccatttactctttatcactctgcaacaaatcacagaaccgatcatctcaggctttttcttctggccctttgtgtccaagattctttaatccatttttgttggtgaacatctcagactatagataagtggactggaccctgtgtcttgggggtggcagttgggattactccccaacaaggctgattttaggcagcatgtgttcactgtgctgtgatttcatctactgtctcccagaaagtgtgttgggatcggccattagcagcttgctttctcttgtcactttttttcttctattttgttttttcttcttctttttccccccatcagggcaaatggtctaactggtgcaatcatgaagagagttaatggttaacagacattggccaataacaaaacaccccatggactgtgactcgagtatccaacaggcagtcagagctctcccggtctgaaagttgcattgccactgctaactttgggattgcatcagagaggccctgagtggggttgagatgaggttggtttggtttgatgttacacactcctcacctgttctttctgagtgtcctttctctgaaaggatttatgtttttcttcgttagatagtgacttctgagcaagctgatctcccctggcatgctccaacctgattggacaaaggaagctctatggcctgggagagagactattcttaatttttctttcttacaaaaactgatttttcccataaatatttttacttcagaggactaggaccattttgttttgggcccttctgctgaaaatttgtctcgtttaagaggcagctagaatctttaccatatgtatgaatttgtataatttcatttttggatagggataaacttttgcttctgataaaagcctggaatttcatctggtcctcagagcattgcgtgtgtgtcttgctgtagcccggaaaaggttttgtgtaaagattctgggatggcaagttgtttgccttttctgaaaagagaacatacagaacctgtccatctttaagaccttcatccatggaatctactatacaggaggatgcagtgggctggaggggatgggcgaaaatgggagcaggaagcctggcctggcttctggtcatggcctcctaaaaccttaaacttcaagtagaaatgtactcaagccctatttataaacaaatacttttcctgcctccaccaaacccctacagaacatcacctggaattgccactcacactgggttggagtcattgggcagctgtgcctgtgcgagaggtgctgtggtctgggcagcccctggaaaagcacctttgctgcctgtcattgttgcctgaagaaggctggagttgctctgagagcagtttgggtttggagtattatatttggcttctatttttattattttggatcaccattctccctatcccttcttgcctccctcccttctaaacatgtgtaataactatacagagactgctacaaaattgtatatagtttttggatcaaatagcatgaggggagaggaaaccattaaaaattggggctcctactctcctttgctttgtaaattcaaaagttgggggtgggtaagagggatagttaaaatgtttacaaaactttaggctccctcggaacttttgccagtgtggaggaaaataaaaaagaacttaaataaaatctgattgtattcta

SEQ ID NO: 372442 - DNA, 3197 bp, Homo sapiens
caacagtttcctgaagcaactattccgctcagaaacacaaacgtccgatccagacccccaacgaagaggaggctgcaaaatgggcccgggaagaagaagaagcccagcgtcgattagaggagaaccggctgcggatggaagaggaggcagccagactccggcatgaggaagaagaacggaagagaaaggagctggaggtccagcggcagaaggagttaatgcgccagaggcagcagcagcaagaggctctccggaggttgcagcagcagcagcagcaacaacagctggcgcagatgaagcttccttcttcttcaacgtggggccagcagtccaatacaacagcatgtcagtcccaggccacgctgtcgttggctgaaatccaaaaactagaggaagaacgagaacggcagcttcgagaagagcaaaggcgccagcagagggagttgatgaaagctcttcagcagcagcagcagcagcaacagcagaaactctcaggttgggggaatgtcagcaaaccttcaggtaccacgaaatctcttctggagatccagcaggaagaggccaggcaaatgcaaaagcagcagcagcagcagcagcaacaccagcaaccaaacagagctcgtaacaatacgcattccaacctgcacaccagcattgggaattctgtttggggctctataaatactggtcctcctaaccagtgggcatctgacctagtcagtagtatttggagtaatgctgacactaaaaactccaacatgggattctgggatgatgcagtgaaagaggtgggacctaggaattcaacaaataaaaataaaaacaacgccagtctcagtaaatctgtaggtgtgtctaaccggcagaataagaaagtagaagaagaagaaaagttgctgaagctctttcagggagtaaataaagcccaagatggatttacgcagtggtgtgaacagatgcttcatgcccttaatacggcaaataacttggatgttcccacatttgtttctttcctgaaagaagtagaatctccttatgaggtccatgattatatcagggcctatttaggagatacttctgaggccaaggagtttgccaagcagttccttgagcgccgtgccaaacagaaagccaaccagcagcgtcagcagcagcagctgccgcagcagcagcagcagccaccacagcagccgccacagcagccacaacagcaggactctgtgtgggggatgaaccacagtacactccattcagtatttcagaccaatcaaagcaacaaccaacaatccaattttgaggctgtgcagagtggcaagaagaagaaaaagcagaagatggtccgagcagatcccagtttattaggattttcagtcaatgcatcatcggagcgactcaacatgggtgaaatcgagacgttggatgactactgagcacctgccagtggactggccatccctctcctgtctgccgactatggagtctccacctttggacacaacacttactcaccatttactctttatcactctgcaacaaatcacagaaccgatcatctcaggctttttcttctggccctttgtgtccaagattctttaatccatttttgttggtgaacatctcagactatagataagtggactggaccctgtgtcttgggggtggcagttgggattactccccaacaaggctgattttaggcagcatgtgttcactgtgctgtgatttcatctactgtctcccagaaagtgtgttgggatcggccattagcagcttgctttctcttgtcactttttttcttctattttgttttttcttcttctttttccccccatcagggcaaatggtctaactggtgcaatcatgaagagagttaatggttaacagacattggccaataacaaaacaccccatggactgtgactcgagtatccaacaggcagtcagagctctcccggtctgaaagttgcattgccactgctaactttgggattgcatcagagaggccctgagtggggttgagatgaggttggtttggtttgatgttacacactcctcacctgttctttctgagtgtcctttctctgaaaggatttatgtttttcttcgttagatagtgacttctgagcaagctgatctcccctggcatgctccaacctgattggacaaaggaagctctatggcctgggagagagactattcttaatttttctttcttacaaaaactgatttttcccataaatatttttacttcagaggactaggaccattttgttttgggcccttctgctgaaaatttgtctcgtttaagaggcagctagaatctttaccatatgtatgaatttgtataatttcatttttggatagggataaacttttgcttctgataaaagcctggaatttcatctggtcctcagagcattgcgtgtgtgtcttgctgtagcccggaaaaggttttgtgtaaagattctgggatggcaagttgtttgccttttctgaaaagagaacatacagaacctgtccatctttaagaccttcatccatggaatctactatacaggaggatgcagtgggctggaggggatgggcgaaaatgggagcaggaagcctggcctggcttctggtcatggcctcctaaaaccttaaacttcaagtagaaatgtactcaagccctatttataaacaaatacttttcctgcctccaccaaacccctacagaacatcacctggaattgccactcacactgggttggagtcattgggcagctgtgcctgtgcgagaggtgctgtggtctgggcagcccctggaaaagcacctttgctgcctgtcattgttgcctgaagaaggctggagttgctctgagagcagtttgggtttggagtattatatttggcttctatttttattattttggatcaccattctccctatcccttcttgcctccctcccttctaaacatgtgtaataactatacagagactgctacaaaattgtatatagtttttggatcaaatagcatgaggggagaggaaaccattaaaaattggggctcctactctcctttgctttgtaaattcaaaagttgggggtgggtaagagggatagttaaaatgtttacaaaactttaggctccctcggaacttttgccagtgtggaggaaaataaaaaagaacttaaataaaatctgattgtattcta

SEQ ID NO: 372443 - DNA, 4595 bp, Homo sapiens
gcggtcacgtgacgtgcgtggcgacgtgtcggccatcttgtgttgttgaggctgaggactgactggggttctgagactccctgtcccggaccgcagattatagtgggaccagtctcattaggttgaatctacagcctatgttggtgttaacccaggtctcttagagcgttaaaaggatctgaacaaagtctgctcaaatctcctgctgtgaaccagcagaatttttgaacagagaccacgtctccacctcctgggctccaacgattctcccatcttggcctcccaaagcgctggatttacaggtttcttcacatataaaaatctattgtaaaaatacggaaaagaatggcagcggaaacgcagacactgaactttgggcctgaatggctccgagctctgtccagtggtgggagtattacatcccctcctctttctccagcattgccgaagtataaattagcagattatcgttacggcagagaagaaatgttagcacttttccttaaagacaacaagataccttcagaccttctggataaagaatttctgcctatcctccaggaggaaccccttccaccattggctctggtaccctttacagaagaagaacagagaaacttttccatgtctgtaaatagtgctgctgtcctgcgattgacaggacgaggaggaggaggaacagtggtgggggctcctagaggtcgaagttcttcaagagggcgaggcagaggcagaggtgaatgtggtttctaccaaagaagttttgatgaagtagagggtgtttttggtcgaggaggtggcagagaaatgcatagatcgcagagctgggaggaaaggggtgacagacgttttgaaaaaccaggacgaaaagatgtagggagaccaaattttgaggaaggtggaccaacatcagtagggagaaagcatgaatttatacgctcagaaagtgaaaattggcgcatctttagagaggaacaaaatggagaagatgaagatggaggttggcgactagctggatcaaggagggatggagagaggtggcgacctcacagtcctgatggccctcgttctgcaggctggcgggaacacatggaacgacgtcggaggtttgagtttgattttcgagatagagatgatgaacggggttaccgaagggttcgctctggcagtgggagcatagatgatgacagggatagcttgcccgaatggtgcttagaggatgctgaagaagaaatgggtacatttgactcatctggagcattcctttctctaaaaaaagtacagaaagagcctattccagaagagcaggagatggacttccggcctgtggacgaaggggaggagtgctctgactctgagggtagccataatgaagaggccaaagaacccgataagacaaataagaaagaaggagagaaaacagatagagtaggagttgaagctagtgaggaaactccccagacctcatcatcatctgctagaccaggtactccttcagaccatcagtctcaggaagcatcacagtttgagaggaaagatgaaccaaaaactgagcaaacggaaaaagctgaagaggagactcggatggaaaatagtctaccagccaaagtgcccagcagaggggatgaaatggttgctgatgtccagcagcccctgtcgcagattccttcagatacagcctctcctcttctcatacttccacctcctgttcccaatcctagtcctactctccggccagttgaaacaccagttgtaggtgctcctggtatgggcagtgtttccacagaacctgatgatgaagaaggtctcaaacatttggagcagcaagctgagaaaatggtggcttatctccaagacagtgcactagatgatgaaagattggcatcaaaactgcaagagcacagagctaaaggagtgtcgattccattgatgcatgaagcaatgcagaagtggtattacaaagatcctcagggagaaattcaaggtcccttcaataatcaggagatggcagaatggtttcaggcgggctattttactatgtctttattggtgaagagagcgtgtgatgaaagcttccaacctcttggcgatatcatgaaaatgtggggaagggttcccttttctccaggtccagctccccctcctcatatgggagagctggaccaggaacgactgaccaggcagcaagaactcacagccttataccagatgcagcacctgcagtaccagcagtttttaatacaacaacaatatgcacaggttttggcccaacagcagaaagcagcactgtcttcccagcagcagcagcagttggcacttcttcttcaacagtttcagaccttgaagatgagaatatctgatcagaacatcattccctcagtaactaggtctgtgtccgtgccagatactggctctatctgggagcttcagccaacagcttcacagcctacagtttgggaaggtggtagtgtatgggatcttcctctggacaccacgacaccaggccctgccctggaacagcttcagcagctagagaaggccaaagctgcaaagctagagcaagagagaagagaggcagaaatgagggcaaaacgggaagaggaagagcgaaagaggcaggaagaactccgaagacaacaggaggaaattcttcggcgacagcaggaagaagaaaggaaaaggcgagaggaagaagaacttgcccgaaggaaacaggaagaggctctgcgtcgccagcgggagcaagaaattgcattaaggcgacagcgagaagaggaagaaagacagcagcaagaagaagctcttagaagactggaagagaggagaagagaagaggaagaaaggcggaagcaggaagaattgttacgcaaacaggaagaggaggctgcaaaatgggcccgggaagaagaagaagcccagcgtcgattagaggagaaccggctgcggatggaagaggaggcagccagactccggcatgaggaagaagaacggaagagaaaggagctggaggtccagcggcagaaggagttaatgcgccagaggcagcagcagcaagaggctctccggaggttgcagcagcagcagcagcaacaacagctggcgcagatgaagcttccttcttcttcaacgtggggccagcagtccaatacaacagcatgtcagtcccaggccacgctgtcgttggctgaaatccaaaaactagaggaagaacgagaacggcagcttcgagaagagcaaaggcgccagcagagggagttgatgaaagctcttcagcagcagcagcagcagcaacagcagaaactctcaggttgggggaatgtcagcaaaccttcaggtaccacgaaatctcttctggagatccagcaggaagaggccaggcaaatgcaaaagcagcagcagcagcagcagcaacaccagcaaccaaacagagctcgtaacaatacgcattccaacctgcacaccagcattgggaattctgtttggggctctataaatactggtcctcctaaccagtgggcatctgacctagtcagtagtatttggagtaatgctgacactaaaaactccaacatgggattctgggatgatgcagtgaaagaggtgggacctaggaattcaacaaataaaaataaaaacaacgccagtctcagtaaatctgtaggtgtgtctaaccggcagaataagaaagtagaagaagaagaaaagttgctgaagctctttcagggagtaaataaagcccaagatggatttacgcagtggtgtgaacagatgcttcatgcccttaatacggcaaataacttggatgttcccacatttgtttctttcctgaaagaagtagaatctccttatgaggtccatgattatatcagggcctatttaggagatacttctgaggccaaggagtttgccaagcagttccttgagcgccgtgccaaacagaaagccaaccagcagcgtcagcagcagcagctgccgcagcagcagcagcagccaccacagcagccgccacagcagccacaacagcaggactctgtgtgggggatgaaccacagtacactccattcagtatttcagaccaatcaaagcaacaaccaacaatccaattttgaggctgtgcagagtggcaagaagaagaaaaagcagaagatggtccgagcagatcccagtttattaggattttcagtcaatgcatcatcggagcgactcaacatgggtgaaatcgagacgttggatgactactgagcacctgccagtggactggccatccctctcctgtctgccgactatggagtctccacctttggacacaacacttactcaccatttactctttatcactctgcaacaaatcacagaaccgatcatctcaggctttttcttctggccctttgtgtccaagattctttaatccatttttgttggtgaacatctcagactatagataagtggactggaccctgtgtcttgggggtggcagttgggattactccccaacaaggctgattttaggcagcatgtgttcactgtgctgtgatttcatctactgtctcccagaaagtgtgttgggcgataagggatcctcagatcatcacgac

SEQ ID NO: 372444 - DNA, 2535 bp, Homo sapiens
ctaggtagaggccgcgggtaatcggccgaggcctaccagtgggcatctgacctagtcagtagtatttggagtaatgctgacactaaaaactccaacatgggattctgggatgatgcagtgaaagaggtgggacctaggaattcaacaaataaaaataaaaacaacgccagtctcagtaaatctgtaggtgtgtctaaccggcagaataagaaagtagaagaagaagaaaagttgctgaagctctttcagggagtaaataaagcccaagatggatttacgcagtggtgtgaacagatgcttcatgcccttaatacggcaaataacttggatgttcccacatttgtttctttcctgaaagaagtagaatctccttatgaggtccatgattatatcagggcctatttaggagatacttctgaggccaaggagtttgccaagcagttccttgagcgccgtgccaaacagaaagccaaccagcagcgtcagcagcagcagctgccgcagcagcagcagcagccaccacagcagccgccacagcagccacaacagcaggactctgtgtgggggatgaaccacagtacactccattcagtatttcagaccaatcaaagcaacaaccaacaatccaattttgaggctgtgcagagtggcaagaagaagaaaaagcagaagatggtccgagcagatcccagtttattaggattttcagtcaatgcatcatcggagcgactcaacatgggtgaaatcgagacgttggatgactactgagcacctgccagtggactggccatccctctcctgtctgccgactatggagtctccacctttggacacaacacttactcaccatttactctttatcactctgcaacaaatcacagaaccgatcatctcaggctttttcttctggccctttgtgtccaagattctttaatccatttttgttggtgaacatctcagactatagataagtggactggaccctgtgtcttgggggtggcagttgggattactccccaacaaggctgattttaggcagcatgtgttcactgtgctgtgatttcatctactgtctcccagaaagtgtgttgggatcggccattagcagcttgctttctcttgtcactttttttcttctattttgttttttcttcttctttttccccccatcagggcaaatggtctaactggtgcaatcatgaagagagttaatggttaacagacattggccaataacaaaacaccccatggactgtgactcgagtatccaacaggcagtcagagctctcccggtctgaaagttgcattgccactgctaactttgggattgcatcagagaggccctgagtggggttgagatgaggttggtttggtttgatgttacacactcctcacctgttctttctgagtgtcctttctctgaaaggatttatgtttttcttcgttagatagtgacttctgagcaagctgatctcccctggcatgctccaacctgattggacaaaggaagctctatggcctgggagagagactattcttaatttttctttcttacaaaaactgatttttcccataaatatttttacttcagaggactaggaccattttgttttgggcccttctgctgaaaatttgtctcgtttaagaggcagctagaatctttaccatatgtatgaatttgtataatttcatttttggatagggataaacttttgcttctgataaaagcctggaatttcatctggtcctcagagcattgcgtgtgtgtcttgctgtagcccggaaaaggttttgtgtaaagattctgggatggcaagttgtttgccttttctgaaaagagaacatacagaacctgtccatctttaagaccttcatccatggaatctactatacaggaggatgcagtgggctggaggggatgggcgaaaatgggagcaggaagcctggcctggcttctggtcatggcctcctaaaaccttaaacttcaagtagaaatgtactcaagccctatttataaacaaatacttttcctgcctccaccaaacccctacagaacatcacctggaattgccactcacactgggttggagtcattgggcagctgtgcctgtgcgagaggtgctgtggtctgggcagcccctggaaaagcacctttgctgcctgtcattgttgcctgaagaaggctggagttgctctgagagcagtttgggtttggagtattatatttggcttctatttttattattttggatcaccattctccctatcccttcttgcctccctcccttctaaacatgtgtaataactatacagagactgctacaaaattgtatatagtttttggatcaaatagcatgaggggagaggaaaccattaaaaattggggctcctactctcctttgctttgtaaattcaaaagttgggggtgggtaagagggatagttaaaatgtttacaaaactttaggctccctcggaacttttgccagtgtggaggaaaataaaaaagaacttaaataaaatctgattgtattcta

SEQ ID NO: 372445 - DNA, 2725 bp, Homo sapiens
gcggtcacgtgacgtgcgtggcgacgtgtcggccatcttgtgttgttgaggctgaggactgactggggttctgagactccctgtcccggaccgcagattatagtgggaccagtctcattaggttgaatctacagcctatgttggtgttaacccaggtctcttagagcgttaaaaggatctgaacaaagtctgctcaaatctcctgctgtgaaccagcagaatttttgaacagagaccacgtctccacctcctgggctccaacgattctcccatcttggcctcccaaagcgctggatttacaggtttcttcacatataaaaatctattgtaaaaatacggaaaagaatggcagcggaaacgcagacactgaactttgggcctgaatggctccgagctctgtccagtggtgggagtattacatcccctcctctttctccagcattgccgaagtataaattagcagattatcgttacggcagagaagaaatgttagcacttttccttaaagacaacaagataccttcagaccttctggataaagaatttctgcctatcctccaggaggaaccccttccaccattggctctggtaccctttacagaagaagaacagagaaacttttccatgtctgtaaatagtgctgctgtcctgcgattgacaggacgaggaggaggaggaacagtggtgggggctcctagaggtcgaagttcttcaagagggcgaggcagaggcagaggtgaatgtggtttctaccaaagaagttttgatgaagtagagggtgtttttggtcgaggaggtggcagagaaatgcatagatcgcagagctgggaggaaaggggtgacagacgttttgaaaaaccaggacgaaaagatgtagggagaccaaattttgaggaaggtggaccaacatcagtagggagaaagcatgaatttatacgctcagaaagtgaaaattggcgcatctttagagaggaacaaaatggagaagatgaagatggaggttggcgactagctggatcaaggagggatggagagaggtggcgacctcacagtcctgatggccctcgttctgcaggctggcgggaacacatggaacgacgtcggaggtttgagtttgattttcgagatagagatgatgaacggggttaccgaagggttcgctctggcagtgggagcatagatgatgacagggatagcttgcccgaatggtgcttagaggatgctgaagaagaaatgggtacatttgactcatctggagcattcctttctctaaaaaaagtacagaaagagcctattccagaagagcaggagatggacttccggcctgtggacgaaggggaggagtgctctgactctgagggtagccataatgaagaggccaaagaacccgataagacaaataagaaagaaggagagaaaacagatagagtaggagttgaagctagtgaggaaactccccagacctcatcatcatctgctagaccaggtactccttcagaccatcagtctcaggaagcatcacagtttgagaggaaagatgaaccaaaaactgagcaaacggaaaaagctgaagaggagactcggatggaaaatagtctaccagccaaagtgcccagcagaggggatgaaatggttgctgatgtccagcagcccctgtcgcagattccttcagatacagcctctcctcttctcatacttccacctcctgttcccaatcctagtcctactctccggccagttgaaacaccagttgtaggtgctcctggtatgggcagtgtttccacagaacctgatgatgaagaaggtctcaaacatttggagcagcaagctgagaaaatggtggcttatctccaagacagtgcactagatgatgaaagattggcatcaaaactgcaagagcacagagctaaaggagtgtcgattccattgatgcatgaagcaatgcagaagtggtattacaaagatcctcagggagaaattcaaggtcccttcaataatcaggagatggcagaatggtttcaggcgggctattttactatgtctttattggtgaagagagcgtgtgatgaaagcttccaacctcttggcgatatcatgaaaatgtggggaagggttcccttttctccaggtccagctccccctcctcatatgggagagctggaccaggaacgactgaccaggcagcaagaactcacagccttataccagatgcagcacctgcagtaccagcagtttttaatacaacaacaatatgcacaggttttggcccaacagcagaaagcagcactgtcttcccagcagcagcagcagttggcacttcttcttcaacagtttcagaccttgaagatgagaatatctgatcagaacatcattccctcagtaactaggtctgtgtccgtgccagatactggctctatctgggagcttcagccaacagcttcacagcctacagtttgggaaggtggtagtgtatgggatcttcctctggacaccacgacaccaggccctgccctggaacagcttcagcagctagagaaggccaaagctgcaaaggtctgaaactcattcttctgcaacagtgcattgtcatctggctgcaggacataaacattgctgtttattcatctctctagctagctatgctttttactttcagtttactgctgcttagctggtataagtacattcatattgtatctttactgtgctctcttctcccaaaaaa

SEQ ID NO: 372446 - DNA, 842 bp, Homo sapiens
gcggtcacgtgacgtgcgtggcgacgtgtcggccatcttgtgttgttgaggctgaggactgactggggttctgagactccctgtcccggaccgcagattatagtgggaccagtctcattaggttgaatctacagcctatgttggtgttaacccaggtctcttagagcgttaaaaggatctgaacaaagtctgctcaaatctcctgctgtgaaccagcagaatttttgaacagagaccacgtctccacctcctgggctccaacgattctcccatcttggcctcccaaagcgctggatttacaggtttcttcacatataaaaatctattgtaaaaatacggaaaagaatggcagcggaaacgcagacactgaactttgggcctgaatggctccgagctctgtccagtggtgggagtattacatcccctcctctttctccagcattgccgaagtataaattagcagattatcgttacggcagagaagaaatgttagcacttttccttaaagacaacaagataccttcagaccttctggataaagaatttctgcctatcctccaggaggaaccccttccaccattggctctggtaccctttacagaagaagaacagagaaacttttccatgtctgtaaatagtgctgctgtcctgcgattgacaggacgaggaggaggaggaacagtggtgggggctcctagaggtcgaagttcttcaagagggcgaggctaatgaaaagggttctttctcttgggggaaatgtgtgtgtcagttctgtcagctgcaagttcttgtataatgaagtcaatgccatcaggccaaggaaataaaataattgcttacct

SEQ ID NO: 372447 - DNA, 201 bp, Homo sapiens
ggtcctgccattttaaagacaattaaaaggagttttgggtctctgagatgtgtgggctgtggggaatcagattggccatttggctttttttcctgcagtcttaaccacaaaattgagctctaaggattcctacactaaatggggaagcaggaagagcaagtcttaaaagattcaagtccattggctcacccttctcactgg

SEQ ID NO: 372448 - DNA, 456 bp, Homo sapiens
ggtgatgccagacatggtctacaaggcgtggaagagtgccctgggaaaaagcaaatacacatgaatatccagcagagggcgatctaatcaaataaaatgtattaatagttttgacatagtacccagtactcacagcatgccaagatacttacttccaaagaacatgaagagcacgaagagcacgggatagaaaaagctcaagcaaacagccaaggcatattcgtgtactacagcagatacagcaaagacagctaacatggcagcagatttgaatctcttggagaaaaactaaagaaaaaggaaaacactacaaagtaatttttaaaaatttaaagcaagcatggattatataggatgtaaaattatatgccaaaggcacctattgtatttgtacttaattttctaagtctactccttggattaatccaagtctattaaaataactacaaatcatat

SEQ ID NO: 372449 - DNA, 393 bp, Homo sapiens
gtagtattgctacttattttgatagagatacaagaaaagagagaagacgtacatagtacccagtactcacagcatgccaagatacttacttccaaagaacatgaagagcacgaagagcacgggatagaaaaagctcaagcaaacagccaaggcatattcgtgtactacagcagatacagcaaagacagctaacatggcagcagatttgaatctcttggagaaaaactaaagaaaaaggaaaacactacaaagtaatttttaaaaatttaaagcaagcatggattatataggatgtaaaattatatgccaaaggcacctattgtatttgtacttaattttctaagtctactccttggattaatccaagtctattaaaataactacaaatcatat

SEQ ID NO: 372450 - DNA, 1306 bp, Homo sapiens
tgtctctcattgttttttggtgaaagtttgtatatgacgacataggaagaattagtgtacaaaaactggttagaacctgtggcccctctttgtctccaaagtgtttaattctcccctgttggggcccacctgccaagggttccaagctctttaaattgggaaaccctggatttgaggaggaacacccgattgaatctaaagaaacccaatagggtctcgaattaaatgccatgttaatacatcaaaggcattagttgatattttttaaaatatcattggagaatttaatctttctttataaaaatagagcatttttctgctttctggcaaaagttggggataaaaggaaaaaaagttgtcaaaatgtaattttcagtccaattcaccaggaaaacatgcttgtgaattgtgcagtaaaaggtggtaatgactactggaagctaagtcaaaggtgatttcctacctgattttacttacttaaataaaagttacttacaatgggagtgaaaaactgaggtttctgttatttagtagagaaatcaactccacgtttacttaaagagatggtaaggtcaaggttcaaatgctactgtgttttaatttggatatttgaaatttctcttgaggccaaaaaaaaaaaaaattgatgcctctccttaaatctaggatgaagtgtcaacatggagacaggtaaccactgttatagagtcttgtcacctaaagggatgtcttggttaacacgtaacagtgcaagtttggccataggttatttatttgtacttttttagtttgaaggactgaggaaacaatagctacagaaaatacttcttgtgccttattcctaacaaagctgaggtccctgcctggggttagttacaagtataaatacttaacgaggtgcgttcattataaaagcctcagtatagaaaccttaaagtttatctaggaaagtttagtatattttcaggtgttgctaaaaaattactcatcatctgtttgcaaaagtatgacttgacctatagaaatctgtttctttatgctttgtactcatacaagcatctaggtaggatattaataaataatacaggataatagcatcaccagtgtccaataacgggccatcaggaacaggattcacgtttggtggatatgagagaaaataaacacttcaggaaacttgctcaccacagctggagatcaggaatagaacctttccaagatatcataatattttctttataggaacactgagtaatggcaagaatattttgagcttttccatggttaagagcgatagtctcagagg

SEQ ID NO: 372451 - DNA, 672 bp, Homo sapiens
tcgtgccgaattcggcacgagcttaaatctaggatgaagtgtcaacatggagacaggtaaccactgttatagagtcttgtcacctaaagggatgtcttggttaacacgtaacagtgcaagtttggccataggttatttatttgtacttttttagtttgaaggactgaggaaacaatagctacagaaaatacttcttgtgccttattcctaacaaagctgaggtccctgcctggggttagttacaagtataaatacttaacgaggtgcgttcattataaaagcctcagtatagaaaccttaaagtttatctaggaaagtttagtatattttcaggtgttgctaaaaaattactcatcatctgtttgcaaaagtatgacttgacctatagaaatctgtttctttatgctttgtactcatacaagcatctaggtaggatattaataaataatacaggataatagcatcaccagtgtccaataacgggccatcaggaacaggattcacgtttggtggatatgagagaaaataaacacttcaggaaacttgctcaccacagctggagatcaggaatagaacctttccaagatatcataatattttctttataggaacactgagtaatggcaagaatattttgagcttttccatggttaagagcgatagtctcagagg

SEQ ID NO: 372452 - DNA, 2673 bp, Homo sapiens
cggacgcgtgggtcgacccacgcgtcctcgaatgtgtacataactcccgcaggatctcagggcctgccgccccattatgatgatgtcgaggttttcatcctgcagctggagggagagaaacactggcgcctctaccaccccactgtgcccctggcacgagagtacagcgtggaggccgaggaaaggatcggcaggccggtgcatgagtttatgctgaagccgggtgatttgttgtactttcccagaggaaccattcatcaagcggacactcctgcggggctggcccactcgactcacgtgaccatcagcacctaccagaacaattcatggggagatttccttttggataccatctcggggcttgtatttgatactgcaaaggaagacgtggagttacggaccggcataccccggcagctgctcctgcaggtggaatccacaactgttgctacaagacgattaagtggcttcctgaggacacttgcagaccggctggagggcaccaaagaactgctttcctcagacatgaagaaggattttattatgcacagactccccccttactctgcgggagatggggcagagctgtcaacaccaggtggaaagttaccgaggctggacagtgtagtgagactgcagtttaaagaccacattgtcctcacagtactgccggatcaagatcaatctgatgaaactcaagaaaagatggtgtacatctatcattccttaaagaatagtagagagacacacatgatgggaaatgaggaggaaacagagtttcatggacttcgcttccctttgtcacatttggatgcactgaagcaaatttggaatagtccagctatttctgtcaaggacctgaaacttactacagatgaggaaaaggaaagcctggtattatccctctggacagaatgtttaattcaagtagtctagtgcctttgcagaatcaaatgcctactattttatatgcatatattaaaagaaaagcaaagacctgagccgaggagaggatgaattcaagtttccttacctgcgtatctactaacaaacatgagacctccctgttacaggtggtcagttggccaaatgtactaacgggcacatgaaagaaagaacagcaaattaccaagtgtctcagaaaatgacaaaaccatattttgacaagtttatttaatccagtgtggtagaaaaggcacaattccaatgtatcatttagaattgaatgtcattaacctggctttgttctttggaagaaacaacttctttaaagagcttctttggctctagaaaaatttcaaacaattaaaataagaaaaaattttaaactggttttttataatgaaaatatacatacctttgtgtatagacaagcccatgcccattaaaataaagttatcctgtaacataaattttattaaataatacttccccacagatgagaggcacgcaacacctatggacaaaagggagttacagaggctgcttaaaagatggagaaaagcctgagattgaaggaggaaaaaaacccagtatttaaagtctataaaaaatactcaaaatagtgggtcttcgagtttaaaatagtcattgttattttacattctaaagtgcatgtaggttgatattttttaaaatatcattggagaatttaatctttctttataaaaatagagcatttttctgctttctggcaaaagttggggataaaaggaaaaaaagttgtcaaaatgtaattttcagtccaattcaccaggaaaacatgcttgtgaattgtgcagtaaaaggtggtaatgactactggaagctaagtcaaaggtgatttcctacctgattttacttacttaaataaaagttacttacaatgggagtgaaaaactgaggtttctgttatttagtagagaaatcaactccacgtttacttaaagagatggtaaggtcaaggttcaaatgctactgtgttttaatttggatatttgaaatttctcttgaggccaaaaaaaaaaaaaattgatgcctctccttaaatctaggatgaagtgtcaacatggagacaggtaaccactgttatagagtcttgtcacctaaagggatgtcttggttaacacgtaacagtgcaagtttggccataggttatttatttgtacttttttagtttgaaggactgaggaaacaatagctacagaaaatacttcttgtgccttattcctaacaaagctgaggtccctgcctggggttagttacaagtataaatacttaacgaggtgcgttcattataaaagcctcagtatagaaaccttaaagtttatctaggaaagtttagtatattttcaggtgttgctaaaaaattactcatcatctgtttgcaaaagtatgacttgacctatagaaatctgtttctttatgctttgtactcatacaagcatctaggtaggatattaataaataatacaggataatagcatcaccagtgtccaataacgggccatcaggaacaggattcacgtttggtggatatgagagaaaataaacacttcaggaaacttgctcaccacagctggagatcaggaatagaacctttccaagatatcataatattttctttataggaacactgagtaatggcaagaatattttgagcttttccatggttaagagcgatagtctcagagg

SEQ ID NO: 372453 - DNA, 1299 bp, Homo sapiens
atcagccggtccctcgcgacgttatcctgtaacataaattttattaaataatacttccccacagatgagaggcacgcaacacctatggacaaaagggagttacagaggctgcttaaaagatggagaaaagcctgagattgaaggaggaaaaaaacccagtatttaaagtctataaaaaatactcaaaatagtgggtcttcgagtttaaaatagtcattgttattttacattctaaagtgcatgtaggttgatattttttaaaatatcattggagaatttaatctttctttataaaaatagagcatttttctgctttctggcaaaagttggggataaaaggaaaaaaagttgtcaaaatgtaattttcagtccaattcaccaggaaaacatgcttgtgaattgtgcagtaaaaggtggtaatgactactggaagctaagtcaaaggtgatttcctacctgattttacttacttaaataaaagttacttacaatgggagtgaaaaactgaggtttctgttatttagtagagaaatcaactccacgtttacttaaagagatggtaaggtcaaggttcaaatgctactgtgttttaatttggatatttgaaatttctcttgaggccaaaaaaaaaaaaaattgatgcctctccttaaatctaggatgaagtgtcaacatggagacaggtaaccactgttatagagtcttgtcacctaaagggatgtcttggttaacacgtaacagtgcaagtttggccataggttatttatttgtacttttttagtttgaaggactgaggaaacaatagctacagaaaatacttcttgtgccttattcctaacaaagctgaggtccctgcctggggttagttacaagtataaatacttaacgaggtgcgttcattataaaagcctcagtatagaaaccttaaagtttatctaggaaagtttagtatattttcaggtgttgctaaaaaattactcatcatctgtttgcaaaagtatgacttgacctatagaaatctgtttctttatgctttgtactcatacaagcatctaggtaggatattaataaataatacaggataatagcatcaccagtgtccaataacgggccatcaggaacaggattcacgtttggtggatatgagagaaaataaacacttcaggaaacttgctcaccacagctggagatcaggaatagaacctttccaagatatcataatattttctttataggaacactgagtaatggcaagaatattttgagcttttccatggttaagagcgatagtctcagagg

SEQ ID NO: 372454 - DNA, 312 bp, Homo sapiens
gccatgtttggattcacctgtaaattgttagtaaatgtgtttcctatgtgtatgtataagcaagtttgaatctgcctgtttccttttttgaaggtcggctttctctctttggggttttctaggtggaaagttaccgaggctggacagtgtagtgagactgcagtttaaagaccacattgtcctcacagtactgccggatcaagatcaatctgtgagtatccaagaggagatttcctgtcttctcagggtgtttttcatcagaggcctcaggttattagattaaccactggtctctgcccttctttaggaatc

SEQ ID NO: 372455 - DNA, 3229 bp, Homo sapiens
agccgctgcgccgcaacgcagtgggctcgcggccgcgagcaacaggccgtgccgggtttgcatttccttactgctttgtcttgaagacagaacgatgccaaagaaagcaaagcctacagggagtgggaaggaagaggggccggctccctgtaagcagatgaagttagaagcagctggggggccttcagctttaaactttgacagtcccagtagtctctttgaaagtttaatctcgcccatcaagacagagacttttttcaaggaattctgggagcagaagccccttctcattcagagagatgaccctgcactggccacatactatgggtccctgttcaagctaacagatctgaagagtctgtgcagccgggggatgtactatggaagagatgtgaatgtctgccggtgtgtcaatgggaagaagaaggttttaaataaagatggcaaagcacactttcttcagctgagaaaagattttgatcagaaaagggcaacgattcagtttcaccaacctcagagatttaaggatgagctttggaggatccaggagaagctggaatgttactttggctccttggttggctcgaatgtgtacataactcccgcaggatctcagggcctgccgccccattatgatgatgtcgaggttttcatcctgcagctggagggagagaaacactggcgcctctaccaccccactgtgcccctggcacgagagtacagcgtggaggccgaggaaaggatcggcaggccggtgcatgagtttatgctgaagccgggtgatttgttgtactttcccagaggaaccattcatcaagcggacactcctgcggggctggcccactcgactcacgtgaccatcagcacctaccagaacaattcatggggagatttccttttggataccatctcggggcttgtatttgatactgcaaaggaagacgtggagttacggaccggcataccccggcagctgctcctgcaggtggaatccacaactgttgctacaagacgattaagtggcttcctgaggacacttgcagaccggctggagggcaccaaagaactgctttcctcagacatgaagaaggattttattatgcacagactccccccttactctgcgggagatggggcagagctgtcaacaccaggtggaaagttaccgaggctggacagtgtagtgagactgcagtttaaagaccacattgtcctcacagtactgccggatcaagatcaatctgatgaaactcaagaaaagatggtgtacatctatcattccttaaagaatagtagagagacacacatgatgggaaatgaggaggaaacagagtttcatggacttcgcttccctttgtcacatttggatgcactgaagcaaatttggaatagtccagctatttctgtcaaggacctgaaacttactacagatgaggaaaaggaaagcctggtattatccctctggacagaatgtttaattcaagtagtctagtgcctttgcagaatcaaatgcctactattttatatgcatatattaaaagaaaagcaaagacctgagccgaggagaggatgaattcaagtttccttacctgcgtatctactaacaaacatgagacctccctgttacaggtggtcagttggccaaatgtactaacgggcacatgaaagaaagaacagcaaattaccaagtgtctcagaaaatgacaaaaccatattttgacaagtttatttaatccagtgtggtagaaaaggcacaattccaatgtatcatttagaattgaatgtcattaacctggctttgttctttggaagaaacaacttctttaaagagcttctttggctctagaaaaatttcaaacaattaaaataagaaaaaattttaaactggttttttataatgaaaatatacatacctttgtgtatagacaagcccatgcccattaaaataaagttatcctgtaacataaattttattaaataatacttccccacagatgagaggcacgcaacacctatggacaaaagggagttacagaggctgcttaaaagatggagaaaagcctgagattgaaggaggaaaaaaacccagtatttaaagtctataaaaaatactcaaaatagtgggtcttcgagtttaaaatagtcattgttattttacattctaaagtgcatgtaggttgatattttttaaaatatcattggagaatttaatctttctttataaaaatagagcatttttctgctttctggcaaaagttggggataaaaggaaaaaaagttgtcaaaatgtaattttcagtccaattcaccaggaaaacatgcttgtgaattgtgcagtaaaaggtggtaatgactactggaagctaagtcaaaggtgatttcctacctgattttacttacttaaataaaagttacttacaatgggagtgaaaaactgaggtttctgttatttagtagagaaatcaactccacgtttacttaaagagatggtaaggtcaaggttcaaatgctactgtgttttaatttggatatttgaaatttctcttgaggccaaaaaaaaaaaaaattgatgcctctccttaaatctaggatgaagtgtcaacatggagacaggtaaccactgttatagagtcttgtcacctaaagggatgtcttggttaacacgtaacagtgcaagtttggccataggttatttatttgtacttttttagtttgaaggactgaggaaacaatagctacagaaaatacttcttgtgccttattcctaacaaagctgaggtccctgcctggggttagttacaagtataaatacttaacgaggtgcgttcattataaaagcctcagtatagaaaccttaaagtttatctaggaaagtttagtatattttcaggtgttgctaaaaaattactcatcatctgtttgcaaaagtatgacttgacctatagaaatctgtttctttatgctttgtactcatacaagcatctaggtaggatattaataaataatacaggataatagcatcaccagtgtccaataacgggccatcaggaacaggattcacgtttggtggatatgagagaaaataaacacttcaggaaacttgctcaccacagctggagatcaggaatagaacctttccaagatatcataatattttctttataggaacactgagtaatggcaagaatattttgagcttttccatggttaagagcgatagtctcagagg

SEQ ID NO: 372456 - DNA, 3696 bp, Homo sapiens
agccgctgcgccgcaacgcagtgggctcgcggccgcgagcaacaggccgtgccgggtgagtggggcgctctcgtgggcatcccagcgccggggcaggccgggtagtgcccgatcccgcggggcgcgcgctgctgctttaggcacccgggctcgggtgcgggtctgggagacctgtcggtcggcgagaagcctcggtggccggcgctgtggttgcgggacctgggacgcgctcccaggcgtcccacctccccggagactggggcagggtgggtggggcccggatctaggggtagggtcgcggaagccttggttacagagagtcgcacacgtggcctgctaatggtcgcgacaccggtgacgagcgcacggaaagtttggaggcttagcaaggagggtggtgccggcctccgcccggtggtggcagaactgcctgtgcgagcacggcttccacgtgggctgcgccgccgggcgtcatgtcgggcctaagagacacgctctacagctgtgaaatctgaagttcaggtttgcatttccttactgctttgtcttgaagacagaacgatgccaaagaaagcaaagcctacagggagtgggaaggaagaggggccggctccctgtaagcagatgaagttagaagcagctggggggccttcagctttaaactttgacagtcccagtagtctctttgaaagtttaatctcgcccatcaagacagagacttttttcaaggaattctgggagcagaagccccttctcattcagagagatgaccctgcactggccacatactatgggtccctgttcaagctaacagatctgaagagtctgtgcagccgggggatgtactatggaagagatgtgaatgtctgccggtgtgtcaatgggaagaagaaggttttaaataaagatggcaaagcacactttcttcagctgagaaaagattttgatcagaaaagggcaacgattcagtttcaccaacctcagagatttaaggatgagctttggaggatccaggagaagctggaatgttactttggctccttggttggctcgaatgtgtacataactcccgcaggatctcagggcctgccgccccattatgatgatgtcgaggttttcatcctgcagctggagggagagaaacactggcgcctctaccaccccactgtgcccctggcacgagagtacagcgtggaggccgaggaaaggatcggcaggccggtgcatgagtttatgctgaagccgggtgatttgttgtactttcccagaggaaccattcatcaagcggacactcctgcggggctggcccactcgactcacgtgaccatcagcacctaccagaacaattcatggggagatttccttttggataccatctcggggcttgtatttgatactgcaaaggaagacgtggagttacggaccggcataccccggcagctgctcctgcaggtggaatccacaactgttgctacaagacgattaagtggcttcctgaggacacttgcagaccggctggagggcaccaaagaactgctttcctcagacatgaagaaggattttattatgcacagactccccccttactctgcgggagatggggcagagctgtcaacaccaggtggaaagttaccgaggctggacagtgtagtgagactgcagtttaaagaccacattgtcctcacagtactgccggatcaagatcaatctgatgaaactcaagaaaagatggtgtacatctatcattccttaaagaatagtagagagacacacatgatgggaaatgaggaggaaacagagtttcatggacttcgcttccctttgtcacatttggatgcactgaagcaaatttggaatagtccagctatttctgtcaaggacctgaaacttactacagatgaggaaaaggaaagcctggtattatccctctggacagaatgtttaattcaagtagtctagtgcctttgcagaatcaaatgcctactattttatatgcatatattaaaagaaaagcaaagacctgagccgaggagaggatgaattcaagtttccttacctgcgtatctactaacaaacatgagacctccctgttacaggtggtcagttggccaaatgtactaacgggcacatgaaagaaagaacagcaaattaccaagtgtctcagaaaatgacaaaaccatattttgacaagtttatttaatccagtgtggtagaaaaggcacaattccaatgtatcatttagaattgaatgtcattaacctggctttgttctttggaagaaacaacttctttaaagagcttctttggctctagaaaaatttcaaacaattaaaataagaaaaaattttaaactggttttttataatgaaaatatacatacctttgtgtatagacaagcccatgcccattaaaataaagttatcctgtaacataaattttattaaataatacttccccacagatgagaggcacgcaacacctatggacaaaagggagttacagaggctgcttaaaagatggagaaaagcctgagattgaaggaggaaaaaaacccagtatttaaagtctataaaaaatactcaaaatagtgggtcttcgagtttaaaatagtcattgttattttacattctaaagtgcatgtaggttgatattttttaaaatatcattggagaatttaatctttctttataaaaatagagcatttttctgctttctggcaaaagttggggataaaaggaaaaaaagttgtcaaaatgtaattttcagtccaattcaccaggaaaacatgcttgtgaattgtgcagtaaaaggtggtaatgactactggaagctaagtcaaaggtgatttcctacctgattttacttacttaaataaaagttacttacaatgggagtgaaaaactgaggtttctgttatttagtagagaaatcaactccacgtttacttaaagagatggtaaggtcaaggttcaaatgctactgtgttttaatttggatatttgaaatttctcttgaggccaaaaaaaaaaaaaattgatgcctctccttaaatctaggatgaagtgtcaacatggagacaggtaaccactgttatagagtcttgtcacctaaagggatgtcttggttaacacgtaacagtgcaagtttggccataggttatttatttgtacttttttagtttgaaggactgaggaaacaatagctacagaaaatacttcttgtgccttattcctaacaaagctgaggtccctgcctggggttagttacaagtataaatacttaacgaggtgcgttcattataaaagcctcagtatagaaaccttaaagtttatctaggaaagtttagtatattttcaggtgttgctaaaaaattactcatcatctgtttgcaaaagtatgacttgacctatagaaatctgtttctttatgctttgtactcatacaagcatctaggtaggatattaataaataatacaggataatagcatcaccagtgtccaataacgggccatcaggaacaggattcacgtttggtggatatgagagaaaataaacacttcaggaaacttgctcaccacagctggagatcaggaatagaacctttccaagatatcataatattttctttataggaacactgagtaatggcaagaatattttgagcttttccatggttaagagcgatagtctcagagg

SEQ ID NO: 372457 - DNA, 3684 bp, Homo sapiens
agccgctgcgccgcaacgcagtgggctcgcggccgcgagcaacaggccgtgccgggtttgcatttccttactgctttgtcttgaagacagaacgatgccaaagaaagcaaagcctacagggagtgggaaggaagaggggccggctccctgtaagcagatgaagttagaagcagctggggggccttcagctttaaactttgacagtcccagtagtctctttgaaagtttaatctcgcccatcaagacagagacttttttcaaggaattctgggagcagaagccccttctcattcagagagatgaccctgcactggccacatactatgggtccctgttcaagctaacagatctgaagagtctgtgcagccgggggatgtactatggaagagatgtgaatgtctgccggtgtgtcaatgggaagaagaaggttttaaataaagatggcaaagcacactttcttcagctgagaaaagattttgatcagaaaagggcaacgattcagtttcaccaacctcagagatttaaggatgagctttggaggatccaggagaagctggaatgttactttggctccttggttggctcgaatgtgtacataactcccgcaggatctcagggcctgccgccccattatgatgatgtcgaggttttcatcctgcagctggagggagagaaacactggcgcctctaccaccccactgtgcccctggcacgagagtacagcgtggaggccgaggaaaggatcggcaggccggtgcatgagtttatgctgaagccgggtgatttgttgtactttcccagaggaaccattcatcaagcggacactcctgcggggctggcccactcgactcacgtgaccatcagcacctaccagaacaattcatggggagatttccttttggataccatctcggggcttgtatttgatactgcaaaggaagacgtggagttacggaccggcataccccggcagctgctcctgcaggtggaatccacaactgttgctacaagacgattaagtggcttcctgaggacacttgcagaccggctggagggcaccaaagaactgctttcctcagacatgaagaaggattttattatgcacagactccccccttactctgcgggagatggggcagagctgtcaacaccaggtggaaagttaccgaggctggacagtgtagtgagactgcagtttaaagaccacattgtcctcacagtactgccggatcaagatcaatctgatgaaactcaagaaaagatggtgtacatctatcattccttaaagaatagtagagagacacacatgatgggaaatgaggaggaaacagaggtttgtttcaactgaaaacaaatgcctatcctgtgacttgggtggtggttgggaagaattgattatttttgatttacaggtaatatgctttttatggctgcactgtggacttaaccattttgcactactcacagagctcctgcatggggatgattaagtcagacatttctgtgatacatgcacaccagttttaagacatactagctgggacctgtagccttataggaatggtataatgtaaaacatttcaaattactaatatcacttactacataaattaggatgccttttatatagaagttggcatcttttatgttatctaattgtagtgtgtctaaaatactcatgaggggtatcaaaaataatgatgtatggagaataaatttacaggaaaatgctacttcaatgacataagtagtatacatatattttgacaaataaatttatcctttcagtttcatggacttcgcttccctttgtcacatttggatgcactgaagcaaatttggaatagtccagctatttctgtcaaggacctgaaacttactacagatgaggaaaaggaaagcctggtattatccctctggacagaatgtttaattcaagtagtctagtgcctttgcagaatcaaatgcctactattttatatgcatatattaaaagaaaagcaaagacctgagccgaggagaggatgaattcaagtttccttacctgcgtatctactaacaaacatgagacctccctgttacaggtggtcagttggccaaatgtactaacgggcacatgaaagaaagaacagcaaattaccaagtgtctcagaaaatgacaaaaccatattttgacaagtttatttaatccagtgtggtagaaaaggcacaattccaatgtatcatttagaattgaatgtcattaacctggctttgttctttggaagaaacaacttctttaaagagcttctttggctctagaaaaatttcaaacaattaaaataagaaaaaattttaaactggttttttataatgaaaatatacatacctttgtgtatagacaagcccatgcccattaaaataaagttatcctgtaacataaattttattaaataatacttccccacagatgagaggcacgcaacacctatggacaaaagggagttacagaggctgcttaaaagatggagaaaagcctgagattgaaggaggaaaaaaacccagtatttaaagtctataaaaaatactcaaaatagtgggtcttcgagtttaaaatagtcattgttattttacattctaaagtgcatgtaggttgatattttttaaaatatcattggagaatttaatctttctttataaaaatagagcatttttctgctttctggcaaaagttggggataaaaggaaaaaaagttgtcaaaatgtaattttcagtccaattcaccaggaaaacatgcttgtgaattgtgcagtaaaaggtggtaatgactactggaagctaagtcaaaggtgatttcctacctgattttacttacttaaataaaagttacttacaatgggagtgaaaaactgaggtttctgttatttagtagagaaatcaactccacgtttacttaaagagatggtaaggtcaaggttcaaatgctactgtgttttaatttggatatttgaaatttctcttgaggccaaaaaaaaaaaaaattgatgcctctccttaaatctaggatgaagtgtcaacatggagacaggtaaccactgttatagagtcttgtcacctaaagggatgtcttggttaacacgtaacagtgcaagtttggccataggttatttatttgtacttttttagtttgaaggactgaggaaacaatagctacagaaaatacttcttgtgccttattcctaacaaagctgaggtccctgcctggggttagttacaagtataaatacttaacgaggtgcgttcattataaaagcctcagtatagaaaccttaaagtttatctaggaaagtttagtatattttcaggtgttgctaaaaaattactcatcatctgtttgcaaaagtatgacttgacctatagaaatctgtttctttatgctttgtactcatacaagcatctaggtaggatattaataaataatacaggataatagcatcaccagtgtccaataacgggccatcaggaacaggattcacgtttggtggatatgagagaaaataaacacttcaggaaacttgctcaccacagctggagatcaggaatagaacctttccaagatatcataatattttctttataggaacactgagtaatggcaagaatattttgagcttttccatggttaagagcgatagtctcagagg

SEQ ID NO: 372458 - DNA, 2427 bp, Homo sapiens
tccaggctggattttgacctgtgtcttggacagtgatgctggagctagaatgagaagatgtgacttgagggccattgctccccagaaatgatcctgtgttttgagcctaatgctccttcaggtaccatgtaaagttcatggggagatttccttttggataccatctcggggcttgtatttgatactgcaaaggaagacgtggagttacggaccggcataccccggcagctgctcctgcaggtggaatccacaactgttgctacaagacgattaagtggcttcctgaggacacttgcagaccggctggagggcaccaaagaactgctttcctcagacatgaagaaggattttattatgcacagactccccccttactctgcgggagatggggcagagctgtcaacaccaggtggaaagttaccgaggctggacagtgtagtgagactgcagtttaaagaccacattgtcctcacagtactgccggatcaagatcaatctacacacatgatgggaaatgaggaggaaacagagtttcatggacttcgcttccctttgtcacatttggatgcactgaagcaaatttggaatagtccagctatttctgtcaaggacctgaaacttactacagatgaggaaaaggaaagcctggtattatccctctggacagaatgtttaattcaagtagtctagtgcctttgcagaatcaaatgcctactattttatatgcatatattaaaagaaaagcaaagacctgagccgaggagaggatgaattcaagtttccttacctgcgtatctactaacaaacatgagacctccctgttacaggtggtcagttggccaaatgtactaacgggcacatgaaagaaagaacagcaaattaccaagtgtctcagaaaatgacaaaaccatattttgacaagtttatttaatccagtgtggtagaaaaggcacaattccaatgtatcatttagaattgaatgtcattaacctggctttgttctttggaagaaacaacttctttaaagagcttctttggctctagaaaaatttcaaacaattaaaataagaaaaaattttaaactggttttttataatgaaaatatacatacctttgtgtatagacaagcccatgcccattaaaataaagttatcctgtaacataaattttattaaataatacttccccacagatgagaggcacgcaacacctatggacaaaagggagttacagaggctgcttaaaagatggagaaaagcctgagattgaaggaggaaaaaaacccagtatttaaagtctataaaaaatactcaaaatagtgggtcttcgagtttaaaatagtcattgttattttacattctaaagtgcatgtaggttgatattttttaaaatatcattggagaatttaatctttctttataaaaatagagcatttttctgctttctggcaaaagttggggataaaaggaaaaaaagttgtcaaaatgtaattttcagtccaattcaccaggaaaacatgcttgtgaattgtgcagtaaaaggtggtaatgactactggaagctaagtcaaaggtgatttcctacctgattttacttacttaaataaaagttacttacaatgggagtgaaaaactgaggtttctgttatttagtagagaaatcaactccacgtttacttaaagagatggtaaggtcaaggttcaaatgctactgtgttttaatttggatatttgaaatttctcttgaggccaaaaaaaaaaaaaattgatgcctctccttaaatctaggatgaagtgtcaacatggagacaggtaaccactgttatagagtcttgtcacctaaagggatgtcttggttaacacgtaacagtgcaagtttggccataggttatttatttgtacttttttagtttgaaggactgaggaaacaatagctacagaaaatacttcttgtgccttattcctaacaaagctgaggtccctgcctggggttagttacaagtataaatacttaacgaggtgcgttcattataaaagcctcagtatagaaaccttaaagtttatctaggaaagtttagtatattttcaggtgttgctaaaaaattactcatcatctgtttgcaaaagtatgacttgacctatagaaatctgtttctttatgctttgtactcatacaagcatctaggtaggatattaataaataatacaggataatagcatcaccagtgtccaataacgggccatcaggaacaggattcacgtttggtggatatgagagaaaataaacacttcaggaaacttgctcaccacagctggagatcaggaatagaacctttccaagatatcataatattttctttataggaacactgagtaatggcaagaatattttgagcttttccatggttaagagcgatagtctcagagg

SEQ ID NO: 372459 - DNA, 444 bp, Homo sapiens
tcatcacacccaactgtcagtaagtacgaattatctcccattttacattttagaaaactgaggctcagcagtattttataacttactccgaactcccgctgcctgcttgtcagtgacagagtcgatttggtcccacgtggggagagctgtggaattcccaagcccagaccctgcattataacggctatttccagcacttctggagaggatgccaaatgcattcatcagcttttctgagattccttagggaagggagagtggagtgtgtagccctgctttgtgctttttttctctaacagagggttgtgagagagagagccctgttgggcataaggaaatatgtttttagtacaggttctgccacttgctcataggtcatttcactttagcttggtttttcaattatagaaaaaaattattaagcttcattcctagaaaaaaaaa

SEQ ID NO: 372460 - DNA, 508 bp, Homo sapiens
tgcagccataaaaaatgatgagttcatgtcctttgtaaggacgtggatgaagctggaaaccgtcattctcagcaaactatcgcaaggacaaaaaaccaaacactgcatgttctcactcataggtgggaattgaacaatgagaacacatggacacaggaaggggaacatcacatactggggactgttgtggggtgcggggagtggggagggatagcattaggagatatacctaatgctaaatgactagttaatgggtgcagcacaccaacatgacacatgtatacatatgtaacaaacctgcacggtgtgcacatgtaccctaaagcttaaagtataacaataaaaaaaaaaaaaaaaaaaactctcagaataaaacttagatgtattttgtcatgactttggattagcccattttttctgtattatgataccaaaagcccaagcagctaaagagaaaattagataaattgaacttcaatttaattaaaattaaaaactttaaaaaaaa

SEQ ID NO: 372461 - DNA, 399 bp, Homo sapiens
aaaaaaaaaaagaaattattttccacaaagaggtggcagcaccaccacccctacctcatgtacaagtctgttggcctccagatggcacaccccgacttgctcacaatagctcacacctctccctgcctgcccaagtgctgctgtctgccccacaaggcacccacattatgtgggcctgtatttcagctctgtccacatgaggacccctgggagggcaggactcaggcaccactgggctgtttccctgctgttctgtggactccacacaggggtgtgacctcaaactggagtttacacctttctcttaaagcttgccttggcaccttcctgtctggaaacattatcttctgatatctagttgtttgacacagttatggtggttctgttcttctgtagctc

SEQ ID NO: 372462 - DNA, 779 bp, Homo sapiens
tcacaaagtgagagcaatcagattttgtgcctcctaatggaagtacatataccacctatgaagcagttctgccaaaagtcacatctcatcatgatgaagcctcctgatctaactaccccttcattagaaatacaggggacagagggacaaataatatacaagggactcaatcagcaaaatccagactctggaaaactacaagacatatggtcctgcttcaacaacagaaatgcaaagagaaaagacaacgatgggttaaaggagacttaagagctacatctatcaagacaatttatggacttatttggatactgatttgaacaaactgttgagaccattggaaaaatgtgaaaagtggatatttgatattaaggtttttaattatttttaggtgtgataatggtattgttacattttttaaaggaccccttttagagatgcaaattgaaacacttaaaaaatgaaatgatacgatgtataagtttttgcttaaaaataaggattgaagttggctggtgtgtgtggatatagttgaaacaagattggctgtgagttgataattattgaagctgggtgatgggcacttggggatttattatactattttctctacctgtgtttatatttgaaatttttcatagaagttttaaaatgtggccagttgtgatggctcatacctgtaatcccaacactttgggaggccaaggtgggaggatcacttgagctcaggagttagagaccagcctgggcaaaatagtgagactccatctcaaagaaaa

SEQ ID NO: 372463 - DNA, 511 bp, Homo sapiens
  misc_feature (5)..(5): n is a, c, g, or t
  misc_feature (510)..(511): n is a, c, g, or t
gggangctgaggccggccggaggcagcacgcggaggagcgcggccgccgcaaccccaagacggggttgaccctggagcgtgtgggccctgaaagcagcccttacctctcgcggcgccaccgcggccagggccaggagggcgagcactaccacagctgcgtgcagctggccccgacgcgaggcctggaggagctgggccacggccccctgagcttggccggtggccctcgggtgggcggggtggcggccgcggccactgaagcaccgcgcatggagtggaaagtgaaggtgcgcagcgacggaacccgctacgtggccaagcggcccgtgcgagatcggctgctgaaagcccgtgccctgaagatccgggaggagcgcagcggtatgacgaccgacgacgacgcggtgagcgagatgaagatgggccgctactggagcaaggaggagcggaagcagcaccctgcatctcaagaataaagcaagctgcctttgtacttggttgaaaaaaaann

SEQ ID NO: 372464 - DNA, 1911 bp, Homo sapiens
  misc_feature (5)..(5): n is a, c, g, or t
  misc_feature (1910)..(1911): n is a, c, g, or t
gggangctgaggccggccggaggcagcacgcggaggagcgcggccgccgcaaccccaagacggggttgaccctggagcgtgtgggccctgaaagcagcccttacctctcgcggcgccaccgcggccagggccaggagggcgagcactaccacagctgcgtgcagctggccccgacgcgaggcctggaggagctgggccacggccccctgagcttggccggtggccctcgggtgggcggggtggcggccgcggccactgaagcaccgcgcatggagtggaaagtgaaggtgcgcagcgacggaacccgctacgtggccaagcggcccgtgcgagatcggctgctgaaagcccgtgccctgaagatccgggaggagcgcagcggtatgacgaccgacgacgacgcggtgagcgagatgaagatgggccgctactggagcaaggaggagcggaagcagcacctgatccgggcccgtgagcagcggaagcggcgcgagttcatgatgcagagccggctggagtgcctgcgggagcagcagaatggcgacagcaagcccgagctcaacatcattgccctgagccaccgcaaaaccatgaagaagcggaacaagaagatcctggacaactggatcaccatccaggagatgctggcccacggcgcgcgctccgccgatggcaagcgggtctacaaccctcttctctcagtcaccaccgtgtgagctgcccgggcgggtacacggcccaggcccagggaaccccctggggccccggccctcactctcctatagagattgtgtgtgtgtgtgtgtgcgcgcgcgcgtgctcgctgtgcgcacgcacacatctcctcgtctgggtgtgcgcacagggctttgttagcagagagaagcccctgaggagaagggacgcttttcttccttctgcccaagtaaagtgaccatgccagtggccagcactgggggcacacctgtgatgggcaccccttcagctgtgcgtgtgcattccccatcccccatgctcttgcgtgtgcttgcacgtgcacgcacacacacacccagtgctctctccacccgacccgtgtacttgcagacagggaagctgagctgaaaggagcacaagagagtgtccggcttcgctgctgagcgcggcctctccccgccgctgcgcactgcagttatttgtagacaaaggcacccctgatttttgtggtttttctccctttctgtgcttgccaatagttgttttgttttgtggacctgccctgggggctggcagctccttcaggcagcctggcagaagtggaactcccctctccactgatggctgggaagggagttggggaggaagagtgggagggagggctggggatggatgggagggaaggggagggaaaggtgggaggaatgggaagcagctgttctggtggcttccactctgaggtgtgggaacggggagcctctggggggcacctgtttccccagtgactcagagagagcaagactgcaggaacggaggggtcctgcagggtgtccaccaagaagtcacagagcccgttctgcgccccacaccatctggagcaggggcttctcttctgagtgaactgaggaaggtgcttagatggtgagggctctagaaaccaagccccatgagcagcagtggaagacctcgggccatgcggcctggggaggacttggtggcgatccgcaacctggaccccagtgagaggcggtgggctgactgggaaggagaggcccccaacctcctcaggatttgcacgtgtgaactaggctgcctgtggggtgccccttaggcttggagagccccagattggaggcagacagactgcaccaccccttccccccctgcatctcaagaataaagcaagctgcctttgtacttggttgaaaaaaaann

SEQ ID NO: 372465 - DNA, 5589 bp, Homo sapiens
  misc_feature (3)..(3): n is a, c, g, or t
  misc_feature (5)..(5): n is a, c, g, or t
  misc_feature (8)..(10): n is a, c, g, or t
  misc_feature (12)..(14): n is a, c, g, or t
ggncncgnnncnnngcctgggcgcggggcgggaggcggtgaccagcagcaggaggagaaagaacatggcgggcgcatcagagctcgggaccggcccaggagcagcgggtggagatggagatgattcgctatacccgatcgcggttttaatcgacgagctccgcaatgaagacgtgcagctccgactcaacagtattaagaagttatcaacaattgccctagcacttggagtagaaaggacccgaagtgaattgttgccatttcttacagatacaatttatgatgaagatgaggtactattagctcttgctgagcagctgggaaatttcactggcctagtgggaggtcctgactttgcccactgtctgctgcctcctttggaaaatctggcaactgtggaagagactgttgttcgtgacaaggctgtggagtccctgagacagatctcccaggagcatactcctgttgctctggaagcttattttgtacctctggtgaaacgcttagcaagtggggattggttcacctctcgcacatctgcatgtggtttgttcagcgtttgctatcccagggcatcaaatgctgttaaagcagaaatcagacagcaattccgttccttgtgctcagatgacacaccaatggtacgacgtgctgctgcttccaaattgggtgaatttgcaaaagttttggaattagacagtgtgaaaagtgaaattgttccactgttcactagtctagcttcagatgaacaggattcagtgcgcctccttgctgtggaagcttgtgtcagtattgcccagttattgtctcaggatgaccttgagactttggtgatgcctacacttcgacaagcagcagaagataaatcttggcgcgttcgctatatggtggctgacagattttcagagctccagaaagccatgggtcctaaaatcaccctaaatgacctcatccccgcctttcagaacctacttaaagactgtgaagctgaagtccgggcagctgctgcccacaaagtaaaagaacttggtgagaacttgcccattgaagatagagagaccataattatgaatcaaattctgccttatataaaggaattagtatccgataccaatcaacatgtcaaatcggctctagcttctgtaattatgggattgtctactattttgggcaaagaaaataccattgaacatcttctacctcttttcttagctcagttaaaggatgagtgtcctgacgttcgtttgaatatcatctccaatttggattgtgtaaatgaagtgattggaatccgtcagctctctcagtctctccttcctgccatagtggagctggcagaagatgccaaatggagggtccgcctggccatcattgagtatatgccgctgctggcaggccagctgggtgtggaattctttgatgaaaagctgaattctttatgtatggcttggctcgtggaccatgtatacgccatccgagaagctgccaccaacaacctcatgaaactagttcagaagtttggtacagagtgggcccaaaatactattgttcccaaagtgttagtaatggcaaatgatcctaattacttgcatagaatgaccactttattctgcattaatgcactgtctgaggcctgtggtcaggaaataactactaagcaaatgctgcccatcgtattaaaaatggcaggagaccaagtagcaaatgttcgcttcaatgtggccaaatctctacaaaagattggaccaattctagataccaatgctttacagggagaagtgaagccagtactacagaagttaggtcaagatgaagacatggatgtcaaatactttgcacaggaagctataagtgttcttgcattggcataatgaggagcaggagggaaaaggcctttactagattcttgtcacaaatttctagtcaatgtgttcttaactgggtggagaaagaatggaaaaccttcaagatctcatccaagcaaatggcaacaacttagaagaaatcatttagtgacttaattctttctaaagatgaaatgggattgttttttactcgtcttccttgttaaatcattatttaagccgttcttattgaccaattcctgacacttgattgtctcctaatgctttatccatcaccacctgggctcctgcatcctcactgtggaatcaggcaccagccacataatgttccagacaaagcctggaagggtgtggacccagacgtggagtggagtgattctcttgacgtttacatatatctctgtgtctctccatcattccaaagctaaatgtacatgtttagaataacttattttataaactcttcgggagacatgttgagatttgaccgtaatgaaagccacattttcctgaattatgatggtctgcattagtctcatgtgaaaggggaatgtggaagctcagggttaatgtagtggttgttttggtttttatttgctcaattttgtctgtactcatgtcattcagaaacctgaagtgtggctgcatcttgctgctaatgtgtgatgttgacgcctaactgaatttgaacagctcaccactgtgcctacatttaaaaatacttctctctcttttctaaaaagctttaactgtagtgcctcctaataagcagtatgtttgtttcattgtgagattgcagttctgtatttcgaatgagtctaagaaccacagggataatactgtgcagatttcctgttctttacctggctctgcttccagcagtattgacacctagtccttgctgcattgtacagtagcttttcaaactgcagttttattgctaagtttttagtatgggtgatactggagtcttatcatttgaagtgtttgcttttctacttttacagtaaaacctcattaattctgaaatttaagataatgagttaagctgaagagtttactgaagcaaattaatagtgaggaagcctatttgaactacttaaacagtattaaagccctttttaaaaagcacctatttgggatcatttgaggtcaagaattcgagatcagcctgaccaacatggtgaaaccccatctctactaaaaatacaaaaaagttagctgggcgtggtggcacacacctgtagtcccagctactcaggaggctgaggcaggagaattgcttgaacctgggaggtagaggttgcactgagccgagatcgcgccactgcactctagcctgggccatagagcgagagtccatctcaaaaaaaaacaactatttttcacataatcaaactcaccttgtctcatgacttttggttaagggggttttcccatagtttatttttctctcagtgcatcttgctatgaggtttgcttgttacccttttggtttttgaattgttgattttgttcacaacctcttttaaatctaacaagtcctgttctgtttagtgaaggcccaaagactcctctaagactttgtatatttgttacataaaaccaagttttactaaatactttaaaatttgtcctacattcgaaaaatagaaattgtaaatcagaggttatctgtctgcattttaaactgccaaattaccttatagtaagtttctattttatgactttgggccaagaattaagtattttcctaagcacaaatctttttctatattctcattttaatatcttatgctattattctgtaaacattttaattttagtttcatgagtctttattttttgttacctgcaagttatgttcttcttcattgaatttcatatttgagagacatttgtcttcatgaagcagatttgcactggaaccattgctttactctggttggaaatgccattgttttggggacagacttttaaaatgcccttgtgtctcccagtgaggagccctaagcattgacttctctaccctaaaactgtttgagagagggagagtgggccctggctttctcaagcatgggtcgggggttcagcggggcctctgtcttttgtggtgacccctcaggggtttcattgtttccttctgacttaagcaatagagagagaatttgttttggtactcttcagaggaattgtgctttggctcataacttggccatgttctccatgaattagttctcctatttttttttttaactaccttaaacttaagggaaaagttctcctatcttgatttcactggaatataggctttaggagctctgtaaggctggtatttttgtctgttttatcttctactgtatcgccagtgcctggaacagtgtctggtgcacataataggtgctcaataaaaatgtgttcaatggatgaatttctaaaatatcctccaatgtgtgcatggaacaaataatcaaaagaaccagactgtgtcttattctcccactgacagaaagattttcctgctttcaggaaacaagctttatgtggcccttttctggtcccctggcttagactacagttctgtgtggatttgtctgattgcttcagacatgtaatgttgtttttcatccttggcagcttacatcagttgtttgtttgattagaaaaatgaagcagacacacacacacacacacacacacacacacacacacacacacacacaaacatataacctatgccaataaaaatgtctcagcaacagtggaattcaccttggtgtttctctctgtaatttgtgtggggtttacccctcacaggtttaagagaccaggtcttgtttctctctctgtgctaccaagaagatgtgaacctgaggatgcatcttgtttcataagaaggaaggcaggtgaatatgtggtttctaacgaggtcttgttgaaataacgggctgccctcagctcacagaaataccacagctcagccactgtgatgcagagccccaggggtctttgccagacaacttgtcctgactcaacagagacggcagcctgacctttgagctggcttgtccaggcattcaggttgcttgcgtagacttccagggaagcaagcctgtccttcctgacccggcggttaacctggtgcacttttgttcctttgttaactgttgtgttgtcactaaactgaaaggctggggcttgcccttagacgtcacattggctctgtccctgtggcgatggcagggcagggtggccaaacaggtcaggtgcttgttctgtcctcttgccttttacttaaattcctctgacttttaaaaatggtgacactcttatcgtaaagcttcttatttttctccactgcttggatatgaaactgtagagggagaggccctgttgcccagtgttctcctggtttagcagctgaggtgactgcagtctgatgtgatgtaactgtttccctttgattctccagtattcctgtttccatccagttccttactctcctctttcctcttccctcgcatgtctccctccagtcctctgtacctagaatagtctcactgtcccccgtttgcctccacgagcctgctgtttccaggaaattacataacgttcagttgggatggaaatcttccggaggacgaatagagtttaattactcattgcgtcggaaagccaagccatttctgtctccagagttgttctcttaaactgatatgagttct

SEQ ID NO: 372466 - DNA, 395 bp, Homo sapiens
accagccctggcaatgtagtaagaacctgtctctgcaaaaaatgaaaaaaattagccaggcctggtggtgcatgtctgtagacccagctactctggaggctgaagtgcttgagcctgggagggtgaggctgcagtgagccaaggtcatgccactgcactccagcctgggcaacagagcaagactctgtttcccagaataatggtatggaagtttctgttgtcttgtaataaaggcttttaatttcgattttattttaggaattagtatccgataccaatcaacatgtcaaatcggctctagcttctgtaatcccagcactttgggaggctgaggtgagtggattgcttgagaccaggagtttgagaccagcctggtcaacatggtgaagccctgt

SEQ ID NO: 372467 - DNA, 5967 bp, Homo sapiens
  misc_feature (3)..(3): n is a, c, g, or t
  misc_feature (5)..(5): n is a, c, g, or t
  misc_feature (8)..(10): n is a, c, g, or t
  misc_feature (12)..(14): n is a, c, g, or t
ggncncgnnncnnngcctgggcgcggggcgggaggcggtgaccagcagcaggaggagaaagaacatggcgggcgcatcagagctcgggaccggcccaggagcagcgggtggagatggagatgattcgctatacccgatcgcggttttaatcgacgagctccgcaatgaagacgtgcagctccgactcaacagtattaagaagttatcaacaattgccctagcacttggagtagaaaggacccgaagtgaattgttgccatttcttacagatacaatttatgatgaagatgaggtactattagctcttgctgagcagctgggaaatttcactggcctagtgggaggtcctgactttgcccactgtctgctgcctcctttggaaaatctggcaactgtggaagagactgttgttcgtgacaaggctgtggagtccctgagacagatctcccaggagcatactcctgttgctctggaagcttattttgtacctctggtgaaacgcttagcaagtggggattggttcacctctcgcacatctgcatgtggtttgttcagcgtttgctatcccagggcatcaaatgctgttaaagcagaaatcagacagcaattccgttccttgtgctcagatgacacaccaatggtacgacgtgctgctgcttccaaattgggtgaatttgcaaaagttttggaattagacagtgtgaaaagtgaaattgttccactgttcactagtctagcttcagatgaacaggattcagtgcgcctccttgctgtggaagcttgtgtcagtattgcccagttattgtctcaggatgaccttgagactttggtgatgcctacacttcgacaagcagcagaagataaatcttggcgcgttcgctatatggtggctgacagattttcagagctccagaaagccatgggtcctaaaatcaccctaaatgacctcatccccgcctttcagaacctacttaaagactgtgaagctgaagtccgggcagctgctgcccacaaagtaaaagaacttggtgagaacttgcccattgaagatagagagaccataattatgaatcaaattctgccttatataaaggaattagtatccgataccaatcaacatgtcaaatcggctctagcttctgtaattatgggattgtctactattttgggcaaagaaaataccattgaacatcttctacctcttttcttagctcagttaaaggatgagtgtcctgacgttcgtttgaatatcatctccaatttggattgtgtaaatgaagtgattggaatccgtcagctctctcagtctctccttcctgccatagtggagctggcagaagatgccaaatggagggtccgcctggccatcattgagtatatgccgctgctggcaggccagctgggtgtggaattctttgatgaaaagctgaattctttatgtatggcttggctcgtggaccatgtatacgccatccgagaagctgccaccaacaacctcatgaaactagttcagaagtttggtacagagtgggcccaaaatactattgttcccaaagtgttagtaatggcaaatgatcctaattacttgcatagaatgaccactttattctgcattaatgcactgtctgaggcctgtggtcaggaaataactactaagcaaatgctgcccatcgtattaaaaatggcaggagaccaagtagcaaatgttcgcttcaatgtggccaaatctctacaaaagattggaccaattctagataccaagtaagattttagtgtttagtcttgttttaaaagtgtactttaaattttaccttatagtggggagtaattagctaaaattaagttcagggattttcactttacttaagatctgggtttgcttaaagaaaataatttagcaactatttttgaggatgtccactatgacttttatatttaagctctgtaaatgtgtagatccttgtctgaagctgattttgctgagaatttctttagacattattttgtgtatttgtcaagtttataaatgtctttatttttttactttaaattttaacaattaccattaaccatatacaccaaaaaggatttctatggcccattagactgtctttcacagataatacttttgaatgtcagtgctttacagggagaagtgaagccagtactacagaagttaggtcaagatgaagacatggatgtcaaatactttgcacaggaagctataagtgttcttgcattggcataatgaggagcaggagggaaaaggcctttactagattcttgtcacaaatttctagtcaatgtgttcttaactgggtggagaaagaatggaaaaccttcaagatctcatccaagcaaatggcaacaacttagaagaaatcatttagtgacttaattctttctaaagatgaaatgggattgttttttactcgtcttccttgttaaatcattatttaagccgttcttattgaccaattcctgacacttgattgtctcctaatgctttatccatcaccacctgggctcctgcatcctcactgtggaatcaggcaccagccacataatgttccagacaaagcctggaagggtgtggacccagacgtggagtggagtgattctcttgacgtttacatatatctctgtgtctctccatcattccaaagctaaatgtacatgtttagaataacttattttataaactcttcgggagacatgttgagatttgaccgtaatgaaagccacattttcctgaattatgatggtctgcattagtctcatgtgaaaggggaatgtggaagctcagggttaatgtagtggttgttttggtttttatttgctcaattttgtctgtactcatgtcattcagaaacctgaagtgtggctgcatcttgctgctaatgtgtgatgttgacgcctaactgaatttgaacagctcaccactgtgcctacatttaaaaatacttctctctcttttctaaaaagctttaactgtagtgcctcctaataagcagtatgtttgtttcattgtgagattgcagttctgtatttcgaatgagtctaagaaccacagggataatactgtgcagatttcctgttctttacctggctctgcttccagcagtattgacacctagtccttgctgcattgtacagtagcttttcaaactgcagttttattgctaagtttttagtatgggtgatactggagtcttatcatttgaagtgtttgcttttctacttttacagtaaaacctcattaattctgaaatttaagataatgagttaagctgaagagtttactgaagcaaattaatagtgaggaagcctatttgaactacttaaacagtattaaagccctttttaaaaagcacctatttgggatcatttgaggtcaagaattcgagatcagcctgaccaacatggtgaaaccccatctctactaaaaatacaaaaaagttagctgggcgtggtggcacacacctgtagtcccagctactcaggaggctgaggcaggagaattgcttgaacctgggaggtagaggttgcactgagccgagatcgcgccactgcactctagcctgggccatagagcgagagtccatctcaaaaaaaaacaactatttttcacataatcaaactcaccttgtctcatgacttttggttaagggggttttcccatagtttatttttctctcagtgcatcttgctatgaggtttgcttgttacccttttggtttttgaattgttgattttgttcacaacctcttttaaatctaacaagtcctgttctgtttagtgaaggcccaaagactcctctaagactttgtatatttgttacataaaaccaagttttactaaatactttaaaatttgtcctacattcgaaaaatagaaattgtaaatcagaggttatctgtctgcattttaaactgccaaattaccttatagtaagtttctattttatgactttgggccaagaattaagtattttcctaagcacaaatctttttctatattctcattttaatatcttatgctattattctgtaaacattttaattttagtttcatgagtctttattttttgttacctgcaagttatgttcttcttcattgaatttcatatttgagagacatttgtcttcatgaagcagatttgcactggaaccattgctttactctggttggaaatgccattgttttggggacagacttttaaaatgcccttgtgtctcccagtgaggagccctaagcattgacttctctaccctaaaactgtttgagagagggagagtgggccctggctttctcaagcatgggtcgggggttcagcggggcctctgtcttttgtggtgacccctcaggggtttcattgtttccttctgacttaagcaatagagagagaatttgttttggtactcttcagaggaattgtgctttggctcataacttggccatgttctccatgaattagttctcctatttttttttttaactaccttaaacttaagggaaaagttctcctatcttgatttcactggaatataggctttaggagctctgtaaggctggtatttttgtctgttttatcttctactgtatcgccagtgcctggaacagtgtctggtgcacataataggtgctcaataaaaatgtgttcaatggatgaatttctaaaatatcctccaatgtgtgcatggaacaaataatcaaaagaaccagactgtgtcttattctcccactgacagaaagattttcctgctttcaggaaacaagctttatgtggcccttttctggtcccctggcttagactacagttctgtgtggatttgtctgattgcttcagacatgtaatgttgtttttcatccttggcagcttacatcagttgtttgtttgattagaaaaatgaagcagacacacacacacacacacacacacacacacacacacacacacacacaaacatataacctatgccaataaaaatgtctcagcaacagtggaattcaccttggtgtttctctctgtaatttgtgtggggtttacccctcacaggtttaagagaccaggtcttgtttctctctctgtgctaccaagaagatgtgaacctgaggatgcatcttgtttcataagaaggaaggcaggtgaatatgtggtttctaacgaggtcttgttgaaataacgggctgccctcagctcacagaaataccacagctcagccactgtgatgcagagccccaggggtctttgccagacaacttgtcctgactcaacagagacggcagcctgacctttgagctggcttgtccaggcattcaggttgcttgcgtagacttccagggaagcaagcctgtccttcctgacccggcggttaacctggtgcacttttgttcctttgttaactgttgtgttgtcactaaactgaaaggctggggcttgcccttagacgtcacattggctctgtccctgtggcgatggcagggcagggtggccaaacaggtcaggtgcttgttctgtcctcttgccttttacttaaattcctctgacttttaaaaatggtgacactcttatcgtaaagcttcttatttttctccactgcttggatatgaaactgtagagggagaggccctgttgcccagtgttctcctggtttagcagctgaggtgactgcagtctgatgtgatgtaactgtttccctttgattctccagtattcctgtttccatccagttccttactctcctctttcctcttccctcgcatgtctccctccagtcctctgtacctagaatagtctcactgtcccccgtttgcctccacgagcctgctgtttccaggaaattacataacgttcagttgggatggaaatcttccggaggacgaatagagtttaattactcattgcgtcggaaagccaagccatttctgtctccagagttgttctcttaaactgatatgagttct

SEQ ID NO: 372468 - DNA, 2377 bp, Homo sapiens
  misc_feature (3)..(3): n is a, c, g, or t
  misc_feature (5)..(5): n is a, c, g, or t
  misc_feature (8)..(10): n is a, c, g, or t
  misc_feature (12)..(14): n is a, c, g, or t
ggncncgnnncnnngcctgggcgcggggcgggaggcggtgaccagcagcaggaggagaaagaacatggcgggcgcatcagagctcgggaccggcccaggagcagcgggtggagatggagatgattcgctatacccgatcgcggttttaatcgacgagctccgcaatgaagacgtgcagctccgactcaacagtattaagaagttatcaacaattgccctagcacttggagtagaaaggacccgaagtgaattgttgccatttcttacagatacaatttatgatgaagatgaggtactattagctcttgctgagcagctgggaaatttcactggcctagtgggaggtcctgactttgcccactgtctgctgcctcctttggaaaatctggcaactgtggaagagactgttgttcgtgacaaggctgtggagtccctgagacagatctcccaggagcatactcctgttgctctggaagcttattttgtacctctggtgaaacgcttagcaagtggggattggttcacctctcgcacatctgcatgtggtttgttcagcgtttgctatcccagggcatcaaatgctgttaaagcagaaatcagacagcaattccgttccttgtgctcagatgacacaccaatggtacgacgtgctgctgcttccaaattgggtgaatttgcaaaagttttggaattagacagtgtgaaaagtgaaattgttccactgttcactagtctagcttcagatgaacaggattcagtgcgcctccttgctgtggaagcttgtgtcagtattgcccagttattgtctcaggatgaccttgagactttggtgatgcctacacttcgacaagcagcagaagataaatcttggcgcgttcgctatatggtggctgacagattttcagagctccagaaagccatgggtcctaaaatcaccctaaatgacctcatccccgcctttcagaacctacttaaagactgtgaagctgaagtccgggcagctgctgcccacaaagtaaaagaacttggtgagaacttgcccattgaagatagagagaccataattatgaatcaaattctgccttatataaaggaattagtatccgataccaatcaacatgtcaaatcggctctagcttctgtaattatgggattgtctactattttgggcaaagaaaataccattgaacatcttctacctcttttcttagctcagttaaaggatgagtgtcctgacgttcgtttgaatatcatctccaatttggattgtgtaaatgaagtgattggaatccgtcagctctctcagtctctccttcctgccatagtggagctggcagaagatgccaaatggagggtccgcctggccatcattgagtatatgccgctgctggcaggccagctgggtgtggaattctttgatgaaaagctgaattctttatgtatggcttggctcgtggaccatgtatacgccatccgagaagctgccaccaacaacctcatgaaactagttcagaagtttggtacagagtgggcccaaaatactattgttcccaaagtgttagtaatggcaaatgatcctaattacttgcatagaatgaccactttattctgcattaatgcactgtctgaggcctgtggtcaggaaataactactaagcaaatgctgcccatcgtattaaaaatggcaggagaccaagtagcaaatgttcgcttcaatgtggccaaatctctacaaaagattggaccaattctagataccaatgctttacagggagaagtgaagccagtactacagaagttaggtcaagatgaagacatggatgtcaaatactttgcacaggaagctataagtgttcttgcattggcataatgaggagcaggagggaaaaggcctttactagattcttgtcacaaatttctagtcaatgtgttcttaactgggtggagaaagaatggaaaaccttcaagatctcatccaagcaaatggcaacaacttagaagaaatcatttagtgacttaattctttctaaagatgaaatgggattgttttttactcgtcttccttgttaaatcattatttaagccgttcttattgaccaattcctgacacttgattgtctcctaatgctttatccatcaccacctgggctcctgcatcctcactgtggaatcaggcaccagccacataatgttccagacaaagcctggaagggtgtggacccagacgtggagtggagtgattctcttgacgtttacatatatctctgtgtctctccatcattccaaagctaaatgtacatgtttagaataacttattttataaactcttcgggagacatgttgagatttgaccgtaatgaaagccacattttcctga

SEQ ID NO: 372469 - DNA, 1502 bp, Homo sapiens
  misc_feature (3)..(3): n is a, c, g, or t
  misc_feature (5)..(5): n is a, c, g, or t
  misc_feature (8)..(10): n is a, c, g, or t
  misc_feature (12)..(14): n is a, c, g, or t
ggncncgnnncnnngcctgggcgcggggcgggaggcggtgaccagcagcaggaggagaaagaacatggcgggcgcatcagagctcgggaccggcccaggagcagcgggtggagatggagatgattcgctatacccgatcgcggttttaatcgacgagctccgcaatgaagacgtgcagctccgactcaacagtattaagaagttatcaacaattgccctagcacttggagtagaaaggacccgaagtgaattgttgccatttcttacagatacaatttatgatgaagatgaggtactattagctcttgctgagcagctgggaaatttcactggcctagtgggaggtcctgactttgcccactgtctgctgcctcctttggaaaatctggcaactgtggaagagactgttgttcgtgacaaggctgtggagtccctgagacagatctcccaggagcatactcctgttgctctggaagcttattttgtacctctggtgaaacgcttagcaagtggggattggttcacctctcgcacatctgcatgtggtttgttcagcgtttgctatcccagggcatcaaatgctgttaaagcagaaatcagacagcaattccgttccttgtgctcagatgacacaccaatggtacgacgtgctgctgcttccaaattgggtgaatttgcaaaagttttggaattagacagtgtgaaaagtgaaattgttccactgttcactagtctagcttcagatgaacaggattcagtgcgcctccttgctgtggaagcttgtgtcagtattgcccagttattgtctcaggatgaccttgagactttggtgatgcctacacttcgacaagcagcagaagataaatcttggcgcgttcgctatatggtggctgacagattttcagagctccagaaagccatgggtcctaaaatcaccctaaatgacctcatccccgcctttcagaacctacttaaagactgtgaagctgaagtccgggcagctgctgcccacaaagtaaaagaacttggtgagaacttgcccattgaagatagagagaccataattatgaatcaaattctgccttatataaaggaattagtatccgataccaatcaacatgtcaaatcggctctagcttctgtaattatgggattgtctactattttgggcaaagaaaataccattgaacatcttctacctcttttcttagctcagttaaaggatgagtgtcctgacgttcgtttgaatatcatctccaatttggattgtgtaaatgaagtgattggaatccgtcagctctctcagtctctccttcctgccatagtggagctggcagaagatgccaaatggagggtccgcctggccatcattgagtatatgccgctgctggcaggccagctgctgggaattgcagagctagtgcatttctcccaaagcacagactaataccccagatttaaaaaaagaacataaaaaataaagtaccacacatattgcactt

SEQ ID NO: 372470 - DNA, 1684 bp, Homo sapiens
  misc_feature (3)..(3): n is a, c, g, or t
  misc_feature (5)..(5): n is a, c, g, or t
  misc_feature (8)..(10): n is a, c, g, or t
  misc_feature (12)..(14): n is a, c, g, or t
ggncncgnnncnnngcctgggcgcggggcgggaggcggtgaccagcagcaggaggagaaagaacatggcgggcgcatcagagctcgggaccggcccaggagcagcgggtggagatggagatgattcgctatacccgatcgcggttttaatcgacgagctccgcaatgaagacgtgcagctccgactcaacagtattaagaagttatcaacaattgccctagcacttggagtagaaaggacccgaagtgaattgttgccatttcttacagatacaatttatgatgaagatgaggtactattagctcttgctgagcagctgggaaatttcactggcctagtgggaggtcctgactttgcccactgtctgctgcctcctttggaaaatctggcaactgtggaagagactgttgttcgtgacaaggctgtggagtccctgagacagatctcccaggagcatactcctgttgctctggaagcttattttgtacctctggtgaaacgcttagcaagtggggattggttcacctctcgcacatctgcatgtggtttgttcagcgtttgctatcccagggcatcaaatgctgttaaagcagaaatcagacagcaattccgttccttgtgctcagatgacacaccaatggtacgacgtgctgctgcttccaaattgggtgaatttgcaaaagttttggaattagacagtgtgaaaagtgaaattgttccactgttcactagtctagcttcagatgaacaggattcagtgcgcctccttgctgtggaagcttgtgtcagtattgcccagttattgtctcaggatgaccttgagactttggtgatgcctacacttcgacaagcagcagaagataaatcttggcgcgttcgctatatggtggctgacagattttcagagctccagaaagccatgggtcctaaaatcaccctaaatgacctcatccccgcctttcagaacctacttaaagactgtgaagctgaagtccgggcagctgctgcccacaaagtaaaaggttaaggagttcaatttatgttggaacatgtgtcattcattttggtgcatttttttgttagtcaattttgcatgttttttgttctagaatatgtttttaaaatacatagggatgtttttagtgtgtggaaatgttacattgtcacttaaagatagtctctttatatttaaaaccaagaaatcattttgtcttgtttttgtaaaaaaaaaaatgcctttcaggttggattggtgtgatatgcaatggcatagagagttcacgaaaaagtttatttagaacaagagctgttttccttatttgcttaaacatataatttaattgaaattattgataaacctggttaaatgtcctcatttggctctttgtaaatggccctgtgaaagcattctttttttctatttatcttttagaacttggtgagaacttgcccattgaagatagagagaccataattatgaatcaaattctgccttatataaaggtaaacctgactttattttgtttcactctcttttatatgaaggtaaaccttaatctcattatttttgtttgtttgtttaccttaaagctctttgagtttaaaggttgacagggaatgaatggggaagatgtgttaatgtgcaacattgttattcatcacttattagcccattgtaattgta

SEQ ID NO: 372471 - DNA, 329 bp, Homo sapiens
tggtgttaatttttttaaacacctgcaccaccccacagcagttccccatgggtctcagtaaatgtctgaattacagaaattttgttcctttaggattcagtgcgcctccttgctgtggaagcttgtgtcagtattgcccagttattgtctcaggatgaccttgagactttggtgatgcctacacttcgacaagcagcagaagataaatcttggcgcgttcgctatatggtggctgacagattttcagaggtaaagtgatcatttttaagtactaaggaaataaacctgaaaacacatagatttgctgttgtacccaaagtttctgaatt

SEQ ID NO: 372472 - DNA, 5373 bp, Homo sapiens
  misc_feature (3)..(3): n is a, c, g, or t
  misc_feature (5)..(5): n is a, c, g, or t
  misc_feature (8)..(10): n is a, c, g, or t
  misc_feature (12)..(14): n is a, c, g, or t
ggncncgnnncnnngcctgggcgcggggcgggaggcggtgaccagcagcaggaggagaaagaacatggcgggcgcatcagagctcgggaccggcccaggagcagcgggtggagatggagatgattcgctatacccgatcgcggttttaatcgacgagctccgcaatgaagacgtgcagctccgactcaacagtattaagaagttatcaacaattgccctagcacttggagtagaaaggacccgaagtgaattgttgccatttcttacagatacaatttatgatgaagatgaggtactattagctcttgctgagcagctgggaaatttcactggcctagtgggaggtcctgactttgcccactgtctgctgcctcctttggaaaatctggcaactgtggaagagactgttgttcgtgacaaggctgtggagtccctgagacagatctcccaggagcatactcctgttgctctggaagcttattttgtacctctggtgaaacgcttagcaagtggggattggttcacctctcgcacatctgcatgtggtttgttcagcgtttgctatcccagggcatcaaatgctgttaaagcagaaatcagacagcaattccgttccttgtgctcagatgacacaccaatggtacgacgtgctgctgcttccaaattgggtgaatttgcaaaagttttggaattagacagtgtgaaaagtgaaattgttccactgttcactagtctagcttcagatgaacaggattcagtgcgcctccttgctgtggaagcttgtgtcagtattgcccagttattgtctcaggatgaccttgagactttggtgatgcctacacttcgacaagcagcagaagataaatcttggcgcgttcgctatatggtggctgacagattttcagagctccagaaagccatgggtcctaaaatcaccctaaatgacctcatccccgcctttcagaacctacttaaagactgtgaagctgaagtccgggcagctgctgcccacaaagtaaaagaacttggtgagaacttgcccattgaagatagagagaccataattatgaatcaaattctgccttatataaaggaattagtatccgataccaatcaacatgtcaaatcggctctagcttctgtaattatgggattgtctactattttgggcaaagaaaataccattgaacatcttctacctcttttcttagctcagttaaaggatgagtgtcctgacgttcgtttgaatatcatctccaatttggattgtgtaaatgaagtgattggaatccgtcagctctctcagtctctccttcctgccatagtggagctggcagaagatgccaaatggagggtccgcctggccatcattgagtatatgccgctgctggcaggccagctggcactgtctgaggcctgtggtcaggaaataactactaagcaaatgctgcccatcgtattaaaaatggcaggagaccaagtagcaaatgttcgcttcaatgtggccaaatctctacaaaagattggaccaattctagataccaatgctttacagggagaagtgaagccagtactacagaagttaggtcaagatgaagacatggatgtcaaatactttgcacaggaagctataagtgttcttgcattggcataatgaggagcaggagggaaaaggcctttactagattcttgtcacaaatttctagtcaatgtgttcttaactgggtggagaaagaatggaaaaccttcaagatctcatccaagcaaatggcaacaacttagaagaaatcatttagtgacttaattctttctaaagatgaaatgggattgttttttactcgtcttccttgttaaatcattatttaagccgttcttattgaccaattcctgacacttgattgtctcctaatgctttatccatcaccacctgggctcctgcatcctcactgtggaatcaggcaccagccacataatgttccagacaaagcctggaagggtgtggacccagacgtggagtggagtgattctcttgacgtttacatatatctctgtgtctctccatcattccaaagctaaatgtacatgtttagaataacttattttataaactcttcgggagacatgttgagatttgaccgtaatgaaagccacattttcctgaattatgatggtctgcattagtctcatgtgaaaggggaatgtggaagctcagggttaatgtagtggttgttttggtttttatttgctcaattttgtctgtactcatgtcattcagaaacctgaagtgtggctgcatcttgctgctaatgtgtgatgttgacgcctaactgaatttgaacagctcaccactgtgcctacatttaaaaatacttctctctcttttctaaaaagctttaactgtagtgcctcctaataagcagtatgtttgtttcattgtgagattgcagttctgtatttcgaatgagtctaagaaccacagggataatactgtgcagatttcctgttctttacctggctctgcttccagcagtattgacacctagtccttgctgcattgtacagtagcttttcaaactgcagttttattgctaagtttttagtatgggtgatactggagtcttatcatttgaagtgtttgcttttctacttttacagtaaaacctcattaattctgaaatttaagataatgagttaagctgaagagtttactgaagcaaattaatagtgaggaagcctatttgaactacttaaacagtattaaagccctttttaaaaagcacctatttgggatcatttgaggtcaagaattcgagatcagcctgaccaacatggtgaaaccccatctctactaaaaatacaaaaaagttagctgggcgtggtggcacacacctgtagtcccagctactcaggaggctgaggcaggagaattgcttgaacctgggaggtagaggttgcactgagccgagatcgcgccactgcactctagcctgggccatagagcgagagtccatctcaaaaaaaaacaactatttttcacataatcaaactcaccttgtctcatgacttttggttaagggggttttcccatagtttatttttctctcagtgcatcttgctatgaggtttgcttgttacccttttggtttttgaattgttgattttgttcacaacctcttttaaatctaacaagtcctgttctgtttagtgaaggcccaaagactcctctaagactttgtatatttgttacataaaaccaagttttactaaatactttaaaatttgtcctacattcgaaaaatagaaattgtaaatcagaggttatctgtctgcattttaaactgccaaattaccttatagtaagtttctattttatgactttgggccaagaattaagtattttcctaagcacaaatctttttctatattctcattttaatatcttatgctattattctgtaaacattttaattttagtttcatgagtctttattttttgttacctgcaagttatgttcttcttcattgaatttcatatttgagagacatttgtcttcatgaagcagatttgcactggaaccattgctttactctggttggaaatgccattgttttggggacagacttttaaaatgcccttgtgtctcccagtgaggagccctaagcattgacttctctaccctaaaactgtttgagagagggagagtgggccctggctttctcaagcatgggtcgggggttcagcggggcctctgtcttttgtggtgacccctcaggggtttcattgtttccttctgacttaagcaatagagagagaatttgttttggtactcttcagaggaattgtgctttggctcataacttggccatgttctccatgaattagttctcctatttttttttttaactaccttaaacttaagggaaaagttctcctatcttgatttcactggaatataggctttaggagctctgtaaggctggtatttttgtctgttttatcttctactgtatcgccagtgcctggaacagtgtctggtgcacataataggtgctcaataaaaatgtgttcaatggatgaatttctaaaatatcctccaatgtgtgcatggaacaaataatcaaaagaaccagactgtgtcttattctcccactgacagaaagattttcctgctttcaggaaacaagctttatgtggcccttttctggtcccctggcttagactacagttctgtgtggatttgtctgattgcttcagacatgtaatgttgtttttcatccttggcagcttacatcagttgtttgtttgattagaaaaatgaagcagacacacacacacacacacacacacacacacacacacacacacacacaaacatataacctatgccaataaaaatgtctcagcaacagtggaattcaccttggtgtttctctctgtaatttgtgtggggtttacccctcacaggtttaagagaccaggtcttgtttctctctctgtgctaccaagaagatgtgaacctgaggatgcatcttgtttcataagaaggaaggcaggtgaatatgtggtttctaacgaggtcttgttgaaataacgggctgccctcagctcacagaaataccacagctcagccactgtgatgcagagccccaggggtctttgccagacaacttgtcctgactcaacagagacggcagcctgacctttgagctggcttgtccaggcattcaggttgcttgcgtagacttccagggaagcaagcctgtccttcctgacccggcggttaacctggtgcacttttgttcctttgttaactgttgtgttgtcactaaactgaaaggctggggcttgcccttagacgtcacattggctctgtccctgtggcgatggcagggcagggtggccaaacaggtcaggtgcttgttctgtcctcttgccttttacttaaattcctctgacttttaaaaatggtgacactcttatcgtaaagcttcttatttttctccactgcttggatatgaaactgtagagggagaggccctgttgcccagtgttctcctggtttagcagctgaggtgactgcagtctgatgtgatgtaactgtttccctttgattctccagtattcctgtttccatccagttccttactctcctctttcctcttccctcgcatgtctccctccagtcctctgtacctagaatagtctcactgtcccccgtttgcctccacgagcctgctgtttccaggaaattacataacgttcagttgggatggaaatcttccggaggacgaatagagtttaattactcattgcgtcggaaagccaagccatttctgtctccagagttgttctcttaaactgatatgagttct

SEQ ID NO: 372473 - DNA, 5232 bp, Homo sapiens
gtacccaaagtttctgaattaattcttttcaatgggaagtgctgtggcaaaaatatgtatttacagattgcacaattttgttttgttcttgttaattcttttgttagtatacattaaaacccgttcaaattcttttatagctccagaaagccatgggtcctaaaatcaccctaaatgacctcatccccgcctttcagaacctacttaaagactgtgaagctgaagtccgggcagctgctgcccacaaagtaaaaggttaaggagttcaatttatgttggaacatgtgtcattcattttggtgcatttttttgttagtcaattttgcatgttttttgttctagaatatgtttttaaaatacatagggatgtttttagtgtgtggaaatgttacattgtcacttaaagatagtctctttatatttaaaaccaagaaatcattttgtcttgtttttgtaaaaaaaaaaatgcctttcaggttggattggtgtgatatgcaatggcatagagagttcacgaaaaagtttatttagaacaagagctgttttccttatttgcttaaacatataatttaattgaaattattgataaacctggttaaatgtcctcatttggctctttgtaaatggccctgtgaaagcattctttttttctatttatcttttagaacttggtgagaacttgcccattgaagatagagagaccataattatgaatcaaattctgccttatataaaggaattagtatccgataccaatcaacatgtcaaatcggctctagcttctgtaattatgggattgtctactattttgggcaaagaaaataccattgaacatcttctacctcttttcttagctcagttaaaggatgagtgtcctgacgttcgtttgaatatcatctccaatttggattgtgtaaatgaagtgattggaatccgtcagctctctcagtctctccttcctgccatagtggagctggcagaagatgccaaatggagggtccgcctggccatcattgagtatatgccgctgctggcaggccagctgggtgtggaattctttgatgaaaagctgaattctttatgtatggcttggctcgtggaccatgtatacgccatccgagaagctgccaccaacaacctcatgaaactagttcagaagtttggtacagagtgggcccaaaatactattgttcccaaagtgttagtaatggcaaatgatcctaattacttgcatagaatgaccactttattctgcattaatgcactgtctgaggcctgtggtcaggaaataactactaagcaaatgctgcccatcgtattaaaaatggcaggagaccaagtagcaaatgttcgcttcaatgtggccaaatctctacaaaagattggaccaattctagataccaatgctttacagggagaagtgaagccagtactacagaagttaggtcaagatgaagacatggatgtcaaatactttgcacaggaagctataagtgttcttgcattggcataatgaggagcaggagggaaaaggcctttactagattcttgtcacaaatttctagtcaatgtgttcttaactgggtggagaaagaatggaaaaccttcaagatctcatccaagcaaatggcaacaacttagaagaaatcatttagtgacttaattctttctaaagatgaaatgggattgttttttactcgtcttccttgttaaatcattatttaagccgttcttattgaccaattcctgacacttgattgtctcctaatgctttatccatcaccacctgggctcctgcatcctcactgtggaatcaggcaccagccacataatgttccagacaaagcctggaagggtgtggacccagacgtggagtggagtgattctcttgacgtttacatatatctctgtgtctctccatcattccaaagctaaatgtacatgtttagaataacttattttataaactcttcgggagacatgttgagatttgaccgtaatgaaagccacattttcctgaattatgatggtctgcattagtctcatgtgaaaggggaatgtggaagctcagggttaatgtagtggttgttttggtttttatttgctcaattttgtctgtactcatgtcattcagaaacctgaagtgtggctgcatcttgctgctaatgtgtgatgttgacgcctaactgaatttgaacagctcaccactgtgcctacatttaaaaatacttctctctcttttctaaaaagctttaactgtagtgcctcctaataagcagtatgtttgtttcattgtgagattgcagttctgtatttcgaatgagtctaagaaccacagggataatactgtgcagatttcctgttctttacctggctctgcttccagcagtattgacacctagtccttgctgcattgtacagtagcttttcaaactgcagttttattgctaagtttttagtatgggtgatactggagtcttatcatttgaagtgtttgcttttctacttttacagtaaaacctcattaattctgaaatttaagataatgagttaagctgaagagtttactgaagcaaattaatagtgaggaagcctatttgaactacttaaacagtattaaagccctttttaaaaagcacctatttgggatcatttgaggtcaagaattcgagatcagcctgaccaacatggtgaaaccccatctctactaaaaatacaaaaaagttagctgggcgtggtggcacacacctgtagtcccagctactcaggaggctgaggcaggagaattgcttgaacctgggaggtagaggttgcactgagccgagatcgcgccactgcactctagcctgggccatagagcgagagtccatctcaaaaaaaaacaactatttttcacataatcaaactcaccttgtctcatgacttttggttaagggggttttcccatagtttatttttctctcagtgcatcttgctatgaggtttgcttgttacccttttggtttttgaattgttgattttgttcacaacctcttttaaatctaacaagtcctgttctgtttagtgaaggcccaaagactcctctaagactttgtatatttgttacataaaaccaagttttactaaatactttaaaatttgtcctacattcgaaaaatagaaattgtaaatcagaggttatctgtctgcattttaaactgccaaattaccttatagtaagtttctattttatgactttgggccaagaattaagtattttcctaagcacaaatctttttctatattctcattttaatatcttatgctattattctgtaaacattttaattttagtttcatgagtctttattttttgttacctgcaagttatgttcttcttcattgaatttcatatttgagagacatttgtcttcatgaagcagatttgcactggaaccattgctttactctggttggaaatgccattgttttggggacagacttttaaaatgcccttgtgtctcccagtgaggagccctaagcattgacttctctaccctaaaactgtttgagagagggagagtgggccctggctttctcaagcatgggtcgggggttcagcggggcctctgtcttttgtggtgacccctcaggggtttcattgtttccttctgacttaagcaatagagagagaatttgttttggtactcttcagaggaattgtgctttggctcataacttggccatgttctccatgaattagttctcctatttttttttttaactaccttaaacttaagggaaaagttctcctatcttgatttcactggaatataggctttaggagctctgtaaggctggtatttttgtctgttttatcttctactgtatcgccagtgcctggaacagtgtctggtgcacataataggtgctcaataaaaatgtgttcaatggatgaatttctaaaatatcctccaatgtgtgcatggaacaaataatcaaaagaaccagactgtgtcttattctcccactgacagaaagattttcctgctttcaggaaacaagctttatgtggcccttttctggtcccctggcttagactacagttctgtgtggatttgtctgattgcttcagacatgtaatgttgtttttcatccttggcagcttacatcagttgtttgtttgattagaaaaatgaagcagacacacacacacacacacacacacacacacacacacacacacacacaaacatataacctatgccaataaaaatgtctcagcaacagtggaattcaccttggtgtttctctctgtaatttgtgtggggtttacccctcacaggtttaagagaccaggtcttgtttctctctctgtgctaccaagaagatgtgaacctgaggatgcatcttgtttcataagaaggaaggcaggtgaatatgtggtttctaacgaggtcttgttgaaataacgggctgccctcagctcacagaaataccacagctcagccactgtgatgcagagccccaggggtctttgccagacaacttgtcctgactcaacagagacggcagcctgacctttgagctggcttgtccaggcattcaggttgcttgcgtagacttccagggaagcaagcctgtccttcctgacccggcggttaacctggtgcacttttgttcctttgttaactgttgtgttgtcactaaactgaaaggctggggcttgcccttagacgtcacattggctctgtccctgtggcgatggcagggcagggtggccaaacaggtcaggtgcttgttctgtcctcttgccttttacttaaattcctctgacttttaaaaatggtgacactcttatcgtaaagcttcttatttttctccactgcttggatatgaaactgtagagggagaggccctgttgcccagtgttctcctggtttagcagctgaggtgactgcagtctgatgtgatgtaactgtttccctttgattctccagtattcctgtttccatccagttccttactctcctctttcctcttccctcgcatgtctccctccagtcctctgtacctagaatagtctcactgtcccccgtttgcctccacgagcctgctgtttccaggaaattacataacgttcagttgggatggaaatcttccggaggacgaatagagtttaattactcattgcgtcggaaagccaagccatttctgtctccagagttgttctcttaaactgatatgagttct

SEQ ID NO: 372474 - DNA, 2123 bp, Homo sapiens
  misc_feature (3)..(3): n is a, c, g, or t
  misc_feature (5)..(5): n is a, c, g, or t
  misc_feature (8)..(10): n is a, c, g, or t
  misc_feature (12)..(14): n is a, c, g, or t
ggncncgnnncnnngcctgggcgcggggcgggaggcggtgaccagcagcaggaggagaaagaacatggcgggcgcatcagagctcgggaccggcccaggagcagcgggtggagatggagatgattcgctatacccgatcgcggttttaatcgacgagctccgcaatgaagacgtgcagctccgactcaacagtattaagaagttatcaacaattgccctagcacttggagtagaaaggacccgaagtgaattgttgccatttcttacagatacaatttatgatgaagatgaggtactattagctcttgctgagcagctgggaaatttcactggcctagtgggaggtcctgactttgcccactgtctgctgcctcctttggaaaatctggcaactgtggaagagactgttgttcgtgacaaggctgtggagtccctgagacagatctcccaggagcatactcctgttgctctggaagcttattttgtacctctggtgaaacgcttagcaagtggggattggttcacctctcgcacatctgcatgtggtttgttcagcgtttgctatcccagggcatcaaatgctgttaaagcagaaatcagacagcaattccgttccttgtgctcagatgacacaccaatggtacgacgtgctgctgcttccaaattgggtgaatttgcaaaagttttggaattagacagtgtgaaaagtgaaattgttccactgttcactagtctagcttcagatgaacaggattcagtgcgcctccttgctgtggaagcttgtgtcagtattgcccagttattgtctcaggatgaccttgagactttggtgatgcctacacttcgacaagcagcagaagataaatcttggcgcgttcgctatatggtggctgacagattttcagagctccagaaagccatgggtcctaaaatcaccctaaatgacctcatccccgcctttcagaacctacttaaagactgtgaagctgaagtccgggcagctgctgcccacaaagtaaaagaacttggtgagaacttgcccattgaagatagagagaccataattatgaatcaaattctgccttatataaaggaattagtatccgataccaatcaacatgtcaaatcggctctagcttctgtaattatgggattgtctactattttgggcaaagaaaataccattgaacatcttctacctcttttcttagctcagttaaaggatgagtgtcctgacgttcgtttgaatatcatctccaatttggattgtgtaaatgaagtgattggaatccgtcagctctctcagtctctccttcctgccatagtggagctggcagaagatgccaaatggagggtccgcctggccatcattgagtatatgccgctgctggcaggccagctgggtgtggaattctttgatgaaaagctgaattctttatgtatggcttggctcgtggaccatgtatacgccatccgagaagctgccaccaacaacctcatgaaactagttcagaagtttggtacagagtgggcccaaaatactattgttcccaaagtgttagtaatggcaaatgatcctaattacttgcatagaatgaccactttattctgcattaatgcactgtctgaggcctgtggtcaggaaataactactaagcaaatgctgcccatcgtattaaaaatggcaggagaccaagtagcaaatgttcgcttcaatgtggccaaatctctacaaaagattggaccaattctagataccaatgctttacagggagaagtgaagccagtactacagaagttaggtcaagatgaagacatggatgtcaaatactttgcacaggaagctataagtgtggtggcacaaaggctgaggaagctagaatttcctgtgaaggacagtggagaacccagtgtccctcgggctgacaagaaccacttcccaagacccacagtgcctggagaggacatggggaagggaccagtgtatcagttgcgtggagatactagagacacacttgcccagctgggaattgcagagctagtgcatttctcccaaagcacagactaataccccagatttaaaaaaagaacataaaaaataaagtaccacacatattgcactt

SEQ ID NO: 372475 - DNA, 435 bp, Homo sapiens
cacatagtaagcactttaaaaagttatctattactgttactattagagttcatcattaattatttaaccttttatttccttaacttcatctgagaaatgaaactctgacttaaattctctataagatcctttcttgtgctcaaattctttggtttcagttacatcgctccttgatgatttacatagtttcattcatgtctgcatgttcatgcatgtatgcattcatgtttctagaatgtaactggggcacttcttctgacaaagcatgcagtgtggcatccttttttggttttttgtgtttgaaaggcccatccaaattggagtggagtaggaaaaaagtgggagttctagaccaaaaatagccctgatctttggtctgtgacattttataggaatcccagtgatttttatgaaattcgaagtctgtaagactga

SEQ ID NO: 372476 - DNA, 1170 bp, Homo sapiens
gtgggaaccgtggagggcactttcccagtccccgaggcggatccggtgttgcatccttggagagagctgagagctggagtacagaacctgctaaggccatcaaacctattgatcggaagtcagtccatcagatttgctctgggccggtagtactgagtctaagcactgcggtgaagaagatggtagaaaacagtctggatgctggtgccactaatattgatctaaagcttaaggactatggaatggatctcattgaagtttcaggcaatggatgtggggtagaagaagaaaacttcgaaggcttaactctgaaacatcacacatctaagattcaagagtttgccgacctacctcaggttgaaacttttggctttcggggggaagctctgagctcactttgtgcactgagtgatgtcaccatttctacctgccacgtatcggcgaaggttgggactcgactggtgtttgatcacgatgggaaaatcatccagaaaaccccctacccccaccccagagggaccacagtcagcgtgaagcagttattttctacgctacctgtgcgccataaggaatttcaaaggaatattaagaagaaacgtgcctgcttccccttcgccttctgccgtgattgtcagttccttgagggctccccagccatgcttcctgtacagcctgcaaaactgactcctagaagtaccccaccccacccctgctccttggaggacaacgtgatcactgtattcagctctgtcaagaatggtccaggttcttctagatgatctgcacaaatggttcctctcctccttcctgatgtctgccattagcattggaataaagttcctgctgaaaatccacatctcccctgggtccggtgttctggaagtgagagagacaatgtcacacttcaaggaggcagctctctagacaggaaggttattcacgtcccatgtcaagtctagctagagttcagagcaattgagaagtgcaattttatctcctgcctttcattctataccctgcttctgaaccatcgtgttcaactgtgaaactcacactttggtgaccctgactccaaaacttaatacacccaaggtcagccccagtgatctgcttcatagcaaggactttgggtgggtcttcccagggagtagggcacccttcagagaattg

SEQ ID NO: 372477 - DNA, 690 bp, Homo sapiens
agacggggatttcgctatgttgcccaagctggtctggaactccggagctcaagcagtccgcccgccttggccccccaaagcgctggaattacaggcgtaatgcactgtgcctggccttttaaaaaaaaattgaggttattttggggacagtagagcatccagacatatcctaatttgcgtagctgctcagttttaaaaaatgcaatgcatttttacctgttagggtatgtgatttctggctggtaagctacaccgaatcttggctagcacagttgaattccatgtcagatttgtaaacgcaaatttgctctctgcatttaaatatattagatatatttaggtaactacatttaaatgtattgagacatttaaataaatttgccgtctgtatctaaatatctgaagtggaccaggtgcggtggctcacgcctgtgatcccatcgctttgggaggccaaggcaagtggatcatgaggtcaggagttcacgaccagcctggccaacatggtgaaatcccatttctactaaaaatgcaaaaattagctgggcgtggtggcgggcgcctgtggtcctagctacttgggaggctgaggcgggagaatcgctggaacccaggagacggaggttgcagtgagctgagattgcaccactgcagtctagcctgggtgacacagcaagactccatctcaaa

SEQ ID NO: 372478 - DNA, 734 bp, Homo sapiens
agggagagacctggtgggagatgattggctcatggcggctgacgtcccccttgctggtctcgtgatagtgagtgagcgctcatgggatctggttgtttagaagcatgcagcacctcctgcttcactctctctgtctctcctgctccaccatggccagaaacgtgcctgcttccccttcgccttctgccgtgattgtcagttccttgagggctccccagccatgcttcctgtacagcctgcaaaactgactcctagaagtaccccaccccacccctgctccttggaggacaacgtgatcactgtattcagctctgtcaagaatggtccaggttcttctagatgatctgcacaaatggttcctctcctccttcctgatgtctgccattagcattggaataaagttcctgctgaaaatccacatctcccctgggtccggtgttctggaagtgagagagacaatgtcacacttcaaggaggcagctctctagacaggaaggttattcacgtcccatgtcaagtctagctagagttcagagcaattgagaagtgcaattttatctcctgcctttcattctataccctgcttctgaaccatcgtgttcaactgtgaaactcacactttggtgaccctgactccaaaacttaatacacccaaggtcagccccagtgatctgcttcatagcaaggactttgggtgggtcttcccagggagtagggcacccttcagagaattg

SEQ ID NO: 372479 - DNA, 1248 bp, Homo sapiens
gtgggaaccgtggagggcactttcccagtccccgaggcggatccggtgttgcatccttggagagagctgagagctggaggtgagctgggctcgcggtcgcccctctcgcgcgccctctttgagaaccacggcttccaacctccctggaaatggggggaacatggccgaggcgcgtggcgaggtcacctcgtggaggccccggagcggcatcctcagcgccccagcgatccggtgcccattaggtgcgccttgaagcctagtacagaacctgctaaggccatcaaacctattgatcggaagtcagtccatcagatttgctctgggccggtagtactgagtctaagcactgcggtgaagaagatggtagaaaacagtctggatgctggtgccactaatattgatctaaagcttaaggactatggaatggatctcattgaagtttcaggcaatggatgtggggtagaagaagaaaacttcgaaggcttaatgatgtcaccatttctacctgccacgtatcggcgaaggttgggactcgactggtgtttgatcacgatgggaaaatcatccagaaaaccccctacccccaccccagagggaccacagtcagcgtgaagcagttattttctacgctacctgtgcgccataaggaatttcaaaggaatattaagaagaaacgtgcctgcttccccttcgccttctgccgtgattgtcagttccttgagggctccccagccatgcttcctgtacagcctgcaaaactgactcctagaagtaccccaccccacccctgctccttggaggacaacgtgatcactgtattcagctctgtcaagaatggtccaggttcttctagatgatctgcacaaatggttcctctcctccttcctgatgtctgccattagcattggaataaagttcctgctgaaaatccacatctcccctgggtccggtgttctggaagtgagagagacaatgtcacacttcaaggaggcagctctctagacaggaaggttattcacgtcccatgtcaagtctagctagagttcagagcaattgagaagtgcaattttatctcctgcctttcattctataccctgcttctgaaccatcgtgttcaactgtgaaactcacactttggtgaccctgactccaaaacttaatacacccaaggtcagccccagtgatctgcttcatagcaaggactttgggtgggtcttcccagggagtagggcacccttcagagaattg

SEQ ID NO: 372480 - DNA, 791 bp, Homo sapiens
gtgggaaccgtggagggcactttcccagtccccgaggcggatccggtgttgcatccttggagagagctgagagctggaggtgagctgggctcgcggtcgcccctctcgcgcgccctctttgagaaccacggcttccaacctccctggaaatggggggaacatggccgaggcgcgtggcgaggtcacctcgtggaggccccggagcggcatcctcagcgccccagcgatccggtgcccattaggtgcgccttgaagcctagtacagaacctgctaaggccatcaaacctattgatcggaagtcagtccatcagatttgctctgggccggtagtactgagtctaagcactgcggtgaagaagatggtagaaaacagtctggatgctggtgccactaatattgatctaaagcttaaggactatggaatggatctcattgaagtttcaggcaatggatgtggggtagaagaagaaaacttcgaaggcttaatgatgtcaccatttctacctgccacgtatcggcgaaggttgggactcgactggtgtttgatcacgatgggaaaatcatccagaaaaccccctacccccaccccagagggaccacagtcagcgtgaagcagttattttctacgctacctgtgcgccataaggaatttcaaaggaatattaagaagaaacgtgcctgcttccccttcgccttctgccgtgattgtcagttccttgagggctccccagccatgcttcctgtacagcctgcaaaactgtgagtcaattaaacttcttttcttcataaa

SEQ ID NO: 372481 - DNA, 1230 bp, Homo sapiens
gtgggaaccgtggagggcactttcccagtccccgaggcggatccggtgttgcatccttggagagagctgagagctggaggtgagctgggctcgcggtcgcccctctcgcgcgccctctttgagaaccacggcttccaacctccctggaaatggggggaacatggccgaggcgcgtggcgaggtcacctcgtggaggccccggagcggcatcctcagcgccccagcgatccggtgcccattagtacagaacctgctaaggccatcaaacctattgatcggaagtcagtccatcagatttgctctgggccggtagtactgagtctaagcactgcggtgaagaagatggtagaaaacagtctggatgctggtgccactaatattgatctaaagcttaaggactatggaatggatctcattgaagtttcaggcaatggatgtggggtagaagaagaaaacttcgaaggcttaatgatgtcaccatttctacctgccacgtatcggcgaaggttgggactcgactggtgtttgatcacgatgggaaaatcatccagaaaaccccctacccccaccccagagggaccacagtcagcgtgaagcagttattttctacgctacctgtgcgccataaggaatttcaaaggaatattaagaagaaacgtgcctgcttccccttcgccttctgccgtgattgtcagttccttgagggctccccagccatgcttcctgtacagcctgcaaaactgactcctagaagtaccccaccccacccctgctccttggaggacaacgtgatcactgtattcagctctgtcaagaatggtccaggttcttctagatgatctgcacaaatggttcctctcctccttcctgatgtctgccattagcattggaataaagttcctgctgaaaatccacatctcccctgggtccggtgttctggaagtgagagagacaatgtcacacttcaaggaggcagctctctagacaggaaggttattcacgtcccatgtcaagtctagctagagttcagagcaattgagaagtgcaattttatctcctgcctttcattctataccctgcttctgaaccatcgtgttcaactgtgaaactcacactttggtgaccctgactccaaaacttaatacacccaaggtcagccccagtgatctgcttcatagcaaggactttgggtgggtcttcccagggagtagggcacccttcagagaattg

SEQ ID NO: 372482 - DNA, 1067 bp, Homo sapiens
gtgggaaccgtggagggcactttcccagtccccgaggcggatccggtgttgcatccttggagagagctgagagctggagtacagaacctgctaaggccatcaaacctattgatcggaagtcagtccatcagatttgctctgggccggtagtactgagtctaagcactgcggtgaagaagatggtagaaaacagtctggatgctggtgccactaatattgatctaaagcttaaggactatggaatggatctcattgaagtttcaggcaatggatgtggggtagaagaagaaaacttcgaaggcttaatgatgtcaccatttctacctgccacgtatcggcgaaggttgggactcgactggtgtttgatcacgatgggaaaatcatccagaaaaccccctacccccaccccagagggaccacagtcagcgtgaagcagttattttctacgctacctgtgcgccataaggaatttcaaaggaatattaagaagaaacgtgcctgcttccccttcgccttctgccgtgattgtcagttccttgagggctccccagccatgcttcctgtacagcctgcaaaactgactcctagaagtaccccaccccacccctgctccttggaggacaacgtgatcactgtattcagctctgtcaagaatggtccaggttcttctagatgatctgcacaaatggttcctctcctccttcctgatgtctgccattagcattggaataaagttcctgctgaaaatccacatctcccctgggtccggtgttctggaagtgagagagacaatgtcacacttcaaggaggcagctctctagacaggaaggttattcacgtcccatgtcaagtctagctagagttcagagcaattgagaagtgcaattttatctcctgcctttcattctataccctgcttctgaaccatcgtgttcaactgtgaaactcacactttggtgaccctgactccaaaacttaatacacccaaggtcagccccagtgatctgcttcatagcaaggactttgggtgggtcttcccagggagtagggcacccttcagagaattg

SEQ ID NO: 372483 - DNA, 1212 bp, Homo sapiens
agacggggatttcgctatgttgcccaagctggtctggaactccggagctcaagcagtccgcccgccttggccccccaaagcgctggaattacaggcgtaatgcactgtgcctggccttttaaaaaaaaattgaggttattttggggacagtagagcatccagacatatcctaatttgcgtagctgctcagttttaaaaaatgcaatgcatttttacctgttaggtacagaacctgctaaggccatcaaacctattgatcggaagtcagtccatcagatttgctctgggccggtagtactgagtctaagcactgcggtgaagaagatggtagaaaacagtctggatgctggtgccactaatattgatctaaagcttaaggactatggaatggatctcattgaagtttcaggcaatggatgtggggtagaagaagaaaacttcgaaggcttaatgatgtcaccatttctacctgccacgtatcggcgaaggttgggactcgactggtgtttgatcacgatgggaaaatcatccagaaaaccccctacccccaccccagagggaccacagtcagcgtgaagcagttattttctacgctacctgtgcgccataaggaatttcaaaggaatattaagaagaaacgtgcctgcttccccttcgccttctgccgtgattgtcagttccttgagggctccccagccatgcttcctgtacagcctgcaaaactgactcctagaagtaccccaccccacccctgctccttggaggacaacgtgatcactgtattcagctctgtcaagaatggtccaggttcttctagatgatctgcacaaatggttcctctcctccttcctgatgtctgccattagcattggaataaagttcctgctgaaaatccacatctcccctgggtccggtgttctggaagtgagagagacaatgtcacacttcaaggaggcagctctctagacaggaaggttattcacgtcccatgtcaagtctagctagagttcagagcaattgagaagtgcaattttatctcctgcctttcattctataccctgcttctgaaccatcgtgttcaactgtgaaactcacactttggtgaccctgactccaaaacttaatacacccaaggtcagccccagtgatctgcttcatagcaaggactttgggtgggtcttcccagggagtagggcacccttcagagaattg

SEQ ID NO: 372484 - DNA, 1141 bp, Homo sapiens
gtgggaaccgtggagggcactttcccagtccccgaggcggatccggtgttgcatccttggagagagctgagagctggaggtgagctgggctcgcggtcgcccctctcgcgcgccctctttgagaaccacggcttccaacctccctggaaatggggggaacatggccgaggcgcgtggcgaggtcacctcgtggaggccccggagcggcatcctcagcgccccagcgatccggtgcccattagtacagaacctgctaaggccatcaaacctattgatcggaagtcagtccatcagatttgctctgggccggtagtactgagtctaagcactgcggtgaagaagatggtagaaaacagtctggatgctggtgccactaatattgatctaaagcttaaggactatggaatggatctcattgaagtttcaggcaatggatgtggggtagaagaagaaaacttcgaaggcttaatgatgtcaccatttctacctgccacgtatcggcgaaggttgggactcgactggtgtttgatcacgatgggaaaatcatccagaaaaccccctacccccaccccagagggaccacagtcagcgtgaagcagttattttctacgctacctgtgcgccataaggaatttcaaaggaatattaagaaggactcctagaagtaccccaccccacccctgctccttggaggacaacgtgatcactgtattcagctctgtcaagaatggtccaggttcttctagatgatctgcacaaatggttcctctcctccttcctgatgtctgccattagcattggaataaagttcctgctgaaaatccacatctcccctgggtccggtgttctggaagtgagagagacaatgtcacacttcaaggaggcagctctctagacaggaaggttattcacgtcccatgtcaagtctagctagagttcagagcaattgagaagtgcaattttatctcctgcctttcattctataccctgcttctgaaccatcgtgttcaactgtgaaactcacactttggtgaccctgactccaaaacttaatacacccaaggtcagccccagtgatctgcttcatagcaaggactttgggtgggtcttcccagggagtagggcacccttcagagaattg

SEQ ID NO: 372485 - DNA, 302 bp, Homo sapiens
aatgttaaaaagaatctataatttaagactccacattttctcttaatgctatacaacctaattgaaattaacaatacattgaaattgttgactgacttgcttttcaaaagaataacatttggttggcaggccaaggcgggaggatcacaaggtcaggaaatcgagaacaccctggctaacatggtgaaaccccgtctctaataaaaatacaaaaaattagccgggcgtggtggtaggtgcctgtagtcccagctactcgggaggctgagacaggagaatggcgtgaacctgggaagcggagc

SEQ ID NO: 372486 - DNA, 1877 bp, Homo sapiens
cgcagggggcgggcccgcggcgcggcgccggaggaggaagtggtgaggttgttgctccttcagcgcctatcgctggctcttggggcgcagagaggggccgcagtctccgcggctgcgtcgagctcccttgcagtcccctccatgttccccggcgccactactccccttcctaaggccgccgcttaccccggggtctatggaagtaatggaaggacccctcaacctggctcatcaacagagcagacgagcagaccgtttattagctgcaggcaaatacgaagaggctatttcttgtcacaaaaaggctgcagcatatctttctgaagccatgaagctgacacagtcagagcaggctcatctttcactggaattgcaaagggatagccatatgaaacagctcctcctcatccaagagagatggaaaagggcccagcgtgaagaaagattgaaagcccagcagaacacagacaaggatgcagctgcccatcttcagacatctcacaaaccctctgcagaggatgcagagggccagagtcccctttctcagaagtacagcccttccacagagaaatgcctgcctgagattcaggggatctttgacagggatccagacacactactttatttacttcagcaaaagagtgagccagcagagccatgtattggaagcaaagccccaaaagatgataaaacaattatagaggagcaggcaaccaaaattgcagatttgaagaggcatgtggaattccttgtggctgagaatgaaagattaaggaaagaaaataaacaactaaaggctgaaaaggccagacttctaaaaggtccaatagaaaaggagctggatgtagatgctgattttgtagaaacgtcagagttatggagcttgccaccacatgcagaaactgctacagcctcctcaacctggcagaagttcgcagcaaatactgggaaagccaaggacattccaatccccaatcttcctcccttggattttccatctccagaacttcctcttatggagctctctgaggatattctgaaaggatttatgaataattaaaatggaaggccacagaaaaggggaaaagaggaaataatacagtaatcgttaatccagcaaaaagaaatgaaaagggaaaaccacatagaagggtaatcccggaaatgcttcatctggtggactgtgggagcagaggcattgccaggacttgggaaacagtcactgtgaaatgcgctgcgtatctcattcactcacttcagctaatgattccgacttggcagacgctaaactcatggaggttcggtttctcctgatacaaaccaaatggctacctggaagaatttctttcaagcaacagttatttttcttatcttcagggttaaaatgtataaaagttatgtgtaattaatctataatgccataaatgataatgcaaaacctaaataatatggtggccggaggggctgccttatatttgaaacatgctttctatcatgcattgactgtatgcattttgttaatgcacattctgtttgtttaaggtgtgtaagatacacacccttctagatgaaactatatgtgccacactttgcactactcataatgataacctcaagactatcagaagaaatatttaaatttccattttatgaagaaaggaaccaaattattatgctttttaaaacaaattaccagtttacataattaatcagggtgcattttaagttctaacttcgtttattgtataatgcatcatttgaaaataccaaggaggaaataccctttgtttttaatgatgcaagagtggacgtaatgctagttggcagtattttattgtaagaaatcaataaagtaattgtgttttataaaaaaaaaa

SEQ ID NO: 372487 - DNA, 1283 bp, Homo sapiens
cgcagggggcgggcccgcggcgcggcgccggaggaggaagtggtgaggttgttgctccttcagcgcctatcgctggctcttggggcgcagagaggggccgcagtctccgcggctgcgtcgagctcccttgcagtcccctccatgttccccggcgccactactccccttcctaaggccgccgcttaccccggggtctatggaagtaatggaaggacccctcaacctggctcatcaacagagcagacgagcagaccgtttattagctgcaggcaaatacgaagaggctatttcttgtcacaaaaaggctgcagcatatctttctgaagccatgaagctgacacagtcagagcaggctcatctttcactggaattgcaaagggatagccatatgaaacagctcctcctcatccaagagagatggaaaagggcccagcgtgaagaaagattgaaagcccagcagaacacagacaaggatgcagctgcccatcttcagacatctcacaaaccctctgcagaggatgcagagggccagagtcccctttctcagaagtacagcccttccacagagaaatgcctgcctgagattcaggggatctttgacagggatccagacacactactttatttacttcagcaaaagagtgagccagcagagccatgtattggaagcaaagccccaaaagatgataaaacaattatagaggagcaggcaaccaaaattgcagatttgaagaggcatgtggaattccttgtggctgagaatgaaagattaaggaaagaaaataaacaactaaaggctgaaaaggccagacttctaaaaggtccaatagaaaaggagctggatgtagatgctgattttgtagaaacgtcagagttatggagcttgccaccacatgcagaaactgctacagcctcctcaacctggcatgggcctgtagtcccagctacttaggaggctgagcaggagaatcacttgaacccaggaggcagaggttgcagtgagctgagattgtgccactgcactccagcctgggcaacagagctggactctgtctaaaaaaaaaatatatatatattaatttgtttatctcagtgttgttgttttttttattattttttctgtttggttgactagaatttctgttctgctaaatatctcagtgttttaatatcctagactcgacattttacttgcctaaccttgctcataaaacttgacatttaaaagcttgtgccaaaaatagtcatgtgttgcttaacaaggatgtgttctgaggaatgtg

SEQ ID NO: 372488 - DNA, 1827 bp, Homo sapiens
cgcagggggcgggcccgcggcgcggcgccggaggaggaagtggtgaggttgttgctccttcagcgcctatcgctggctcttggggcgcagagaggggccgcagtctccgcggctgcgtcgagctcccttgcagtcccctccatgttccccggcgccactactccccttcctaaggccgccgcttaccccggggtctatggaagtaatggaaggacccctcaacctggctcatcaacagagcagacgagcagaccgtttattagctgcaggcaaatacgaagaggctatttcttgtcacaaaaaggctgcagcatatctttctgaagccatgaagctgacacagtcagagcaggctcatctttcactggaattgcaaagggatagccatatgaaacagctcctcctcatccaagagagatggaaaagggcccagcgtgaagaaagattgaaagcccagcagaacacagacaaggatgcagctgcccatcttcagacatctcacaaaccctctgcagaggatgcagagggccagagtcccctttctcagaagtacagcccttccacagagaaatgcctgcctgagattcaggggatctttgacagggatccagacacactactttatttacttcagcaaaagagtgagccagcagagccatgtattggaagcaaagccccaaaagatgataaaacaattatagaggagcaggcaaccaaaattgcagatttgaagaggcatgtggaattccttgtggctgagaatgaaagattaaggaaagaaaataaacaactaaaggctgaaaaggccagacttctaaaaggtccaatagagcttgccaccacatgcagaaactgctacagcctcctcaacctggcagaagttcgcagcaaatactgggaaagccaaggacattccaatccccaatcttcctcccttggattttccatctccagaacttcctcttatggagctctctgaggatattctgaaaggatttatgaataattaaaatggaaggccacagaaaaggggaaaagaggaaataatacagtaatcgttaatccagcaaaaagaaatgaaaagggaaaaccacatagaagggtaatcccggaaatgcttcatctggtggactgtgggagcagaggcattgccaggacttgggaaacagtcactgtgaaatgcgctgcgtatctcattcactcacttcagctaatgattccgacttggcagacgctaaactcatggaggttcggtttctcctgatacaaaccaaatggctacctggaagaatttctttcaagcaacagttatttttcttatcttcagggttaaaatgtataaaagttatgtgtaattaatctataatgccataaatgataatgcaaaacctaaataatatggtggccggaggggctgccttatatttgaaacatgctttctatcatgcattgactgtatgcattttgttaatgcacattctgtttgtttaaggtgtgtaagatacacacccttctagatgaaactatatgtgccacactttgcactactcataatgataacctcaagactatcagaagaaatatttaaatttccattttatgaagaaaggaaccaaattattatgctttttaaaacaaattaccagtttacataattaatcagggtgcattttaagttctaacttcgtttattgtataatgcatcatttgaaaataccaaggaggaaataccctttgtttttaatgatgcaagagtggacgtaatgctagttggcagtattttattgtaagaaatcaataaagtaattgtgttttataaaaaaaaaa

SEQ ID NO: 372489 - DNA, 1287 bp, Homo sapiens
cgcagggggcgggcccgcggcgcggcgccggaggaggaagtggtgaggttgttgctccttcagcgcctatcgctggctcttggggcgcagagaggggccgcagtctccgcggctgcgtcgagctcccttgcagtcccctccatgttccccggcgccactactccccttcctaaggccgccgcttaccccggggtctatggaagtaatggaaggacccctcaacctggctcatcaacagagcagacgagcagaccgtttattagctgcaggcaaatacgaagaggctatttcttgtcacaaaaaggctgcagcatatctttctgaagccatgaagctgacacagtcagagcaggctcatctttcactggaattgcaaagggatagccatatgaaacagctcctccccatctccagaacttcctcttatggagctctctgaggatattctgaaaggatttatgaataattaaaatggaaggccacagaaaaggggaaaagaggaaataatacagtaatcgttaatccagcaaaaagaaatgaaaagggaaaaccacatagaagggtaatcccggaaatgcttcatctggtggactgtgggagcagaggcattgccaggacttgggaaacagtcactgtgaaatgcgctgcgtatctcattcactcacttcagctaatgattccgacttggcagacgctaaactcatggaggttcggtttctcctgatacaaaccaaatggctacctggaagaatttctttcaagcaacagttatttttcttatcttcagggttaaaatgtataaaagttatgtgtaattaatctataatgccataaatgataatgcaaaacctaaataatatggtggccggaggggctgccttatatttgaaacatgctttctatcatgcattgactgtatgcattttgttaatgcacattctgtttgtttaaggtgtgtaagatacacacccttctagatgaaactatatgtgccacactttgcactactcataatgataacctcaagactatcagaagaaatatttaaatttccattttatgaagaaaggaaccaaattattatgctttttaaaacaaattaccagtttacataattaatcagggtgcattttaagttctaacttcgtttattgtataatgcatcatttgaaaataccaaggaggaaataccctttgtttttaatgatgcaagagtggacgtaatgctagttggcagtattttattgtaagaaatcaataaagtaattgtgttttataaaaaaaaaa

SEQ ID NO: 372490 - DNA, 497 bp, Homo sapiens
cgcagggggcgggcccgcggcgcggcgccggaggaggaagtggtgaggttgttgctccttcagcgcctatcgctggctcttggggcgcagagaggggccgcagtctccgcggctgcgtcgagctcccttgcagtcccctccatgttccccggcgccactactccccttcctaaggccgccgcttaccccggggtctatggaagtaatggaaggacccctcaacctggctcatcaacagagcagacgagcagaccgtttattagctgcaggcaaatacgaagaggctatttcttgtcacaaaaaggctgcagtagagacggggtttcaccatgctggccaggctggtctcgaactcccgacctcaggcgatccaccagcctcagcctcccaaagtgctaggattacaggtgtgagccaccacacccggccgtcttcacagatttaaacatgaacaaaaggaaaagaaatagtatgcagctgtacagacatactacagg

SEQ ID NO: 372491 - DNA, 605 bp, Homo sapiens
gaccacaactcccagggtgctccgcgtcctcgccgctgtcgccgccgcggagacaaagatggctgcgagagtcggcgccttcctcaagaatgcctgggacaaggagccagtgctggtcgtgtccttcgtcgtcgggggcctcgctgtaattctgcccccattgagcccctacttcaagtactccgtcatgatcaacaaggccacgccctacaactacccagtgcccgtccgtgatgatgggaacatgcccgacgtgcccagccacccccaggaccctcagggccccagcctggagtggctgaagaaactgtgagcacctccactgacagaggcggcccctcccacggctcccaataaaaatgtgaaaaccaaaaaaaaaaaaaaacaaaaaaaaaaaaactgggggggggcgcacttgggcccccgcgaagaaagcttctgtaagaacccattcgcgatggggcacggcggcgggccccccatagaggtctacgggagaccgggggcccatagagcgagtggttcaccaaaggagaaaactcgggggtccacgcacatgacggccggggaactccaccaccaaaataagaaaaaagcgcccgggt

SEQ ID NO: 372492 - DNA, 330 bp, Homo sapiens
cagcggaacaagcaaacattcatatcccctgcctccagagttccttaaggttcaattgatggaatgcctcctctgcaccagcacctgggcagagacggagtttcaccgtgttagccaggatggtcccgatctcctgacctcgtgatccgcctgcctcggcctcccaaagtgctgggattacaggcatgatgagccactgcgcccggcctatttcaacttaagtgaaaatctcacctgtggccagcggctaccgtgctggacagcacagtgctcatctgaggaggcaggacgcagcctctccgcctctttgcttattctgctgactgaccg

SEQ ID NO: 372493 - DNA, 800 bp, Homo sapiens
aattcgcggccgcgtcgacgagaagacgacagaagggggccgctgtcgccgccgcggagacaaagatggctgcgagagtcggcgccttcctcaagaatgcctgggacaaggagccagtgctggtcgtgtccttcgtcgtcgggggcctcgctgtaattctgcccccattgagcccctacttcaagtactccgtcatgatcaacaaggccacgccctacaactacccagtgcccgtccgtgatgatgggaacatgcccgacgtgcccagccacccccaggaccctcagggccccagcctggagtggctgaagaaactgtgagcacctccactgacagaggcggcccctcccacggctcccaataaaaatgtgaaaaccaacgaacgtgagcatgtgtgtgatcagaggtgggaacaagtagacggtggccggggtgagtgtggggtcagtttattgggcatgcgtcagtcagaggctgggctggccagggtcgggtagggcagcagtttgtctggaccccgagaaacccaactggaatccagggcctcatctgcttcaaagccaaagtcttcctcaaccttaatctgcaggagataaggaacaaggtgttaacaggcctgggaatctagaaaatcccatcagcttcaccatttttgttttcattttgttttgctttttaaagagacagggtctcactctgttgcccaggctggagtgcagtggtgccatcatagttcactgcagcctctgcctcccaggctcaagtgatcctcccacctcagcttcccaagtagctgggac

SEQ ID NO: 372494 - DNA, 396 bp, Homo sapiens
  misc_feature (25)..(25): n is a, c, g, or t
  misc_feature (29)..(29): n is a, c, g, or t
actactactactaaattcgcggccngtcngagccgccgcggagacaaagatggctgcgagagtcggcgccttcctcaagaatgcctgggacaaggagccagtgctggtcgtgtccttcgtcgtcgggggcctcgctgtaattctgcccccattgagcccctacttcaagtactccgtcatgatcaacaaggccacgccctacaactacccagtgcccgtccgtgatgatgggaacatgcccgacgtgcccagccacccccaggaccctcagggccccagcctggagtggctgaagaaactgtgagcacctccactgacagaggcggcccctcccacggctcccaataaaaatgtgaaaaccaaaaaaaagcggccgctcgttgtcgcgcggccgcg

SEQ ID NO: 372495 - DNA, 802 bp, Homo sapiens
aattcgcggccgcgtcgacgagaagacgacagaagggggccgctgtcgccgccgcggagacaaagatggctgcgagagtcggcgccttcctcaagaatgcctgggacaaggagccagtgctggtcgtgtccttcgtcgtcgggggcctcgctgtaattctgcccccattgagcccctacttcaagtactccgtcatgatcaacaaggccacgccctacaactacccagtgcccgtccgtgatgatgggaacatgcccgacgtgcccagccacccccaggaccctcagggccccagcctggagtggctgaagaaactgtgagcacctccactgacagaggcggcccctcccacggctcccaataaaaatgtgaaaaccaacggctggggaaaagggccacaggatagagctcagctcccactccactcaacgccaaagctgtcctggagccagacggtcctgagctctggcactggaggcctgggagccatgcccttgaccagccttgagacctcgagcaagacaaggcaaccattctgaggctgagtttcctgctctgcaaacgacatgacaccctcggctggatgttgcagcggtgacactgaagtagtgacaccagacgatttctgtacttaatgtgatgtcagcacttagtaaacattcatatcccctgcctccagagttccttaaggttcaattgatggaatgcctcctctgcaccagcacctgggcaggtttgttgttgttgttttgcgacggaatctcacttccagcctggacaacaagagtgaaactccatctca

SEQ ID NO: 372496 - DNA, 667 bp, Homo sapiens
aattcgcggccgcgtcgacgagaagacgacagaagggggccgctgtcgccgccgcggagacaaagatggctgcgagagtcggcgccttcctcaagaatgcctgggacaaggagccagtgctggtcgtgtccttcgtcgtcgggggcctcgctgtaattctgcccccattgagcccctacttcaagtactccgtcatgatcaacaaggccacgccctacaactacccagtgcccgtccgtgatgatgggaacatgcccgacgtgcccagccacccccaggaccctcagggccccagcctggagtggctgaagaaactgtgagcacctccactgacagaggcggcccctcccacggctcccaataaaaatgtgaaaaccaacggctggggaaaagggccacaggatagagctcagctcccactccactcaacgccaaagctgtcctggagccagacggtcctgagctctggcactggaggcctgggagccatgcccttgaccagccttgagacctcgagcaagacaaggcaaccattctgaggctgagtttcctgctctgcaaacgacatgacaccctcggctggatgttgcagcggtgacactgaagtagtgacaccagacgatttctgtacttaatgtgatgtcagcacttagtaaacattcatatg

SEQ ID NO: 372497 - DNA, 476 bp, Homo sapiens
gaccacaactcccagggtgctccgcgtcctcgccgctgtcgccgccgcggagacaaagatggctgcgagtaagtgcaggtgccggtggcgcacggggctcgggtagttctgggaacctctgggcggtcctgggactgaggagtcggcgccttcctcaagaatgcctgggacaaggagccagtgctggtcgtgtccttcgtcgtcgggggcctcgctgtaattctgcccccattgagcccctacttcaagtactccgtcatgatcaacaaggccacgccctacaactacccagtgcccgtccgtgatgatgggaacatgcccgacgtgcccagccacccccaggaccctcagggccccagcctggagtggctgaagaaactgtgagcacctccactgacagaggcggcccctcccacggctcccaataaaaatgtgaaaaccaaaaaaaagcggccgctcgttgtcgcgcggccgcg

SEQ ID NO: 372498 - DNA, 752 bp, Homo sapiens
gaccacaactcccagggtgctccgcgtcctcgccgctgtcgccgccgcggagacaaagatggctgcgagtaagtgcaggtgccggtggcgcacggggctcgggtagttctgggaacctctgggcggtcctgggactgaggagtcggcgccttcctcaagaatgcctgggacaaggagccagtgctggtcgtgtccttcgtcgtcgggggcctcgctgtaattctgcccccattgagcccctacttcaagtactccgtcatgatcaacaaggccacgccctacaactacccagtgcccgtccgtgatgatgggaacatgcccgacgtgcccagccacccccaggaccctcagggccccagcctggagtggctgaagaaactgtgagcacctccactgacagaggcggcccctcccacggctcccaataaaaatgtgaaaaccaaaaaaaaaaaaaaacaaaaaaaaaaacaacggtgttgggccgcgcatctgggacctgagggagaaagtttctctgagacccttgtgcgtgtgggggggcagcgcgcccacagatgtgtctgaagtggcaccctgggccaggaggtgtgtcccagagagaaacctcgggtcaggacctgagcggctggggttttctcacccaataaaaaagcgcggggggggacacggagcgtttgggaaccaattcccaaggggaggtcgcgacaggcccttcggccttctacagaggatccaaggcaaacgaatgatgc

SEQ ID NO: 372499 - DNA, 902 bp, Homo sapiens
gaccacaactcccagggtgctccgcgtcctcgccgctgtcgccgccgcggagacaaagatggctgcgagagtcggcgccttcctcaagaatgcctgggacaaggagccagtgctggtcgtgtccttcgtcgtcgggggcctcgaacagtcccatgacactacccccaggatgctccatgatgaccctacactcaaacgtgctcattccatgaccaaccccactgctgcctcctccaggccccacgtatctctgtaattctgcccccattgagcccctacttcaagtactccgtcatgatcaacaaggccacgccctacaactacccagtgcccgtccgtgatgatgggaacatgcccgacgtgcccagccacccccaggaccctcagggccccagcctggagtggctgaagaaactgtgagcacctccactgacagaggcggcccctcccacggctcccaataaaaatgtgaaaaccaacggctggggaaaagggccacaggatagagctcagctcccactccactcaacgccaaagctgtcctggagccagacggtcctgagctctggcactggaggcctgggagccatgcccttgaccagccttgagacctcgagcaagacaaggcaaccattctgaggctgagtttcctgctctgcaaacgacatgacaccctcggctggatgttgcagcggtgacactgaagtagtgacaccagacgatttctgtacttaatgtgatgtcagcacttagtaaacattcatatcccctgcctccagagttccttaaggttcaattgatggaatgcctcctctgcaccagcacctgggcaggtttgttgttgttgttttgcgacggaatctcacttccagcctggacaacaagagtgaaactccatctca

SEQ ID NO: 372500 - DNA, 1284 bp, Homo sapiens
  misc_feature (605)..(605): n is a, c, g, or t
cagttatcagagattctgcagtggtgcccggaccccccgttccatttttaagaattgagataattcgtatactattctgtgtttgtgcttcgtttttgttttttggggtttttttgagacagagtctcgctctgtcgccaaggctggagtgcagtggcgcgatctcagctcactgcaagctcagcctcccgagtagctgggactacaggtgcccgccaccacgacacgcaaactttttcgtatttttttagtagaggcggggtttcaccgtgttagccaggattgtctcgatctcctgaccttgtgatccactcacctcggcctcccaaagtgctgggattacaggtgtgagccaccgcgcctggcctgtgcttcgagtttctattacctttccagatttctgtctctctctgggttcccatctgtggtggtttcttggtctccatcttctcaggtttctgtcctgtttccccatctcttttgaccctagctctctagtgcgcgggatctctccctcgctatctctctggttttccgtgtctctcagtctctgtatttcccgcctctttctgcatcactgattctctgacccttccccatctcancccctggggtcccccttccctctctgaacataaagcgacagaccagctcttctctccagggccctggagacgtgctggtctcagtggcccacctcctgccccacatgcccgtccgtgatgatgggaacatgcccgacgtgcccagccacccccaggaccctcagggccccagcctggagtggctgaagaaactgtgagcacctccactgacagaggcggcccctcccacggctcccaataaaaatgtgaaaaccaacggctggggaaaagggccacaggatagagctcagctcccactccactcaacgccaaagctgtcctggagccagacggtcctgagctctggcactggaggcctgggagccatgcccttgaccagccttgagacctcgagcaagacaaggcaaccattctgaggctgagtttcctgctctgcaaacgacatgacaccctcggctggatgttgcagcggtgacactgaagtagtgacaccagacgatttctgtacttaatgtgatgtcagcacttagtaaacattcatatcccctgcctccagagttccttaaggttcaattgatggaatgcctcctctgcaccagcacctgggcaggtttgttgttgttgttttgcgacggaatctcacttccagcctggacaacaagagtgaaactccatctca

SEQ ID NO: 372501 - DNA, 1003 bp, Homo sapiens
aattcgcggccgcgtcgacgagaagacgacagaagggggccgctgtcgccgccgcggagacaaagatggctgcgagagtcggcgccttcctcaagaatgcctgggacaaggagccagtgctggtcgtgtccttcgtcgtcgggggcctcgaacagtcccatgacactacccccaggatgctccatgatgaccctacactcaaacgtgctcattccatgaccaaccccactgctgcctcctccaggccccacgtatctctgtaattctgcccccattgagcccctacttcaagtactccgtcatgatcaacaaggccacgccctacaactacccagtagaggcggggtttcaccgtgttagccaggattgtctcgatctcctgaccttgtgatccactcacctcggcctcccaaagtgctgggattacagtgcccgtccgtgatgatgggaacatgcccgacgtgcccagccacccccaggaccctcagggccccagcctggagtggctgaagaaactgtgagcacctccactgacagaggcggcccctcccacggctcccaataaaaatgtgaaaaccaacggctggggaaaagggccacaggatagagctcagctcccactccactcaacgccaaagctgtcctggagccagacggtcctgagctctggcactggaggcctgggagccatgcccttgaccagccttgagacctcgagcaagacaaggcaaccattctgaggctgagtttcctgctctgcaaacgacatgacaccctcggctggatgttgcagcggtgacactgaagtagtgacaccagacgatttctgtacttaatgtgatgtcagcacttagtaaacattcatatcccctgcctccagagttccttaaggttcaattgatggaatgcctcctctgcaccagcacctgggcaggtttgttgttgttgttttgcgacggaatctcacttccagcctggacaacaagagtgaaactccatctca

SEQ ID NO: 372502 - DNA, 1049 bp, Homo sapiens
aattcgcggccgcgtcgacgagaagacgacagaagggggccgctgtcgccgccgcggagacaaagatggctgcgagagtcggcgccttcctcaagaatgcctgggacaaggagccagtgctggtcgtgtccttcgtcgtcgggggcctcgaacagtcccatgacactacccccaggatgctccatgatgaccctacactcaaacgtgctcattccatgaccaaccccactgctgcctcctccaggccccacgtatctctgtaattctgcccccattgagcccctacttcaagtactccgtcatgatcaacaaggccacgccctacaactacccagtagaggcggggtttcaccgtgttagccaggattgtctcgatctcctgaccttgtgatccactcacctcggcctcccaaagtgctgggattacagggccctggagacgtgctggtctcagtggcccacctcctgccccacatgcccgtccgtgatgatgggaacatgcccgacgtgcccagccacccccaggaccctcagggccccagcctggagtggctgaagaaactgtgagcacctccactgacagaggcggcccctcccacggctcccaataaaaatgtgaaaaccaacggctggggaaaagggccacaggatagagctcagctcccactccactcaacgccaaagctgtcctggagccagacggtcctgagctctggcactggaggcctgggagccatgcccttgaccagccttgagacctcgagcaagacaaggcaaccattctgaggctgagtttcctgctctgcaaacgacatgacaccctcggctggatgttgcagcggtgacactgaagtagtgacaccagacgatttctgtacttaatgtgatgtcagcacttagtaaacattcatatcccctgcctccagagttccttaaggttcaattgatggaatgcctcctctgcaccagcacctgggcaggtttgttgttgttgttttgcgacggaatctcacttccagcctggacaacaagagtgaaactccatctca

SEQ ID NO: 372503 - DNA, 644 bp, Homo sapiens
gaccacaactcccagggtgctccgcgtcctcgccgctgtcgccgccgcggagacaaagatggctgcgagagtcggcgccttcctcaagaatgcctgggacaaggagccagtgctggtcgtgtccttcgtcgtcgggggcctcgctgtaattctgcccccattgagcccctacttcaagtactccgtcatgatcaacaaggccacgccctacaactacccagcggctggggaaaagggccacaggatagagctcagctcccactccactcaacgccaaagctgtcctggagccagacggtcctgagctctggcactggaggcctgggagccatgcccttgaccagccttgagacctcgagcaagacaaggcaaccattctgaggctgagtttcctgctctgcaaacgacatgacaccctcggctggatgttgcagcggtgacactgaagtagtgacaccagacgatttctgtacttaatgtgatgtcagcacttagtaaacattcatatcccctgcctccagagttccttaaggttcaattgatggaatgcctcctctgcaccagcacctgggcaggtttgttgttgttgttttgcgacggaatctcacttccagcctggacaacaagagtgaaactccatctca

SEQ ID NO: 372504 - DNA, 419 bp, Homo sapiens
ctctgcaaacgacatgacaccctcggctggatgttgcagcggtgacactgaagtagtgacaccagacgatttctgtacttaatgtgatgtcagcacttagtaaacattcatatgtgagttataatttttattgataactgaagagaggggagtacagaacgctcctcctaatgacctcacctcttataaacacccccttctcttttttccccagcccctgcctccagagttccttaaggttcaattgatggaatgcctcctctgcaccagcacctgggcaggtttgttgttgttgttttgcgacggaatctcactctgtcacccaggctggagtgcagtggcgtgaatttggctcaccacaacctccacctccctggtaccagcgattctcctgcctcagcctcccgagtagctgggac

SEQ ID NO: 372505 - DNA, 412 bp, Homo sapiens
aattcgcggccgcgtcgacgagaagacgacagaagggggccgctgtcgccgccgcggagacaaagatggctgcgagagtcggcgccttcctcaagaatgcctgggacaaggagccagtgctggtcgtgtccttcgtcgtcgggggcctcgctgtaattctgcccccattgagcccctacttcaagtactccgtcatgatcaacaaggccacgccctacaactacccagtgcccgtccgtgatgatgggaacatgcccgacgtgcccagccacccccaggaccctcagggccccagcctggagtggctgaagaaactgtgagcacctccactgacagaggcggcccctcccacggctcccaataaaaatgtgaaaaccaaaaaaaagcggccgctcgttgtcgcgcggccgcg

SEQ ID NO: 372506 - DNA, 804 bp, Homo sapiens
  misc_feature (2)..(2): n is a, c, g, or t
  misc_feature (8)..(8): n is a, c, g, or t
gngcgccngaacgcggccgcgcgacacggtgcgagaagacgacagaagggggccgccgcggagacaaagatggctgcgagagtcggcgccttcctcaagaatgcctgggacaaggagccagtgctggtcgtgtccttcgtcgtcgggggcctcgctgtaattctgcccccattgagcccctacttcaagtactccgtcatgatcaacaaggccacgccctacaactacccagtgcccgtccgtgatgatgggaacatgcccgacgtgcccagccacccccaggaccctcagggccccagcctggagtggctgaagaaactgtgagcacctccactgacagaggcggcccctcccacggctcccaataaaaatgtgaaaaccaacgaacgtgagcatgtgtgtgatcagaggtgggaacaagtagacggtggccggggtgagtgtggggtcagtttattgggcatgcgtcagtcagaggctgggctggccagggtcgggtagggcagcagtttgtctggaccccgagaaacccaactggaatccagggcctcatctgcttcaaagccaaagtcttcctcaaccttaatctgcaggagataaggaacaaggtgttaacaggcctgggaatctagaaaatcccatcagcttcaccatttttgttttcattttgttttgctttttaaagagacagggtctcactctgttgcccaggctggagtgcagtggtgccatcatagttcactgcagcctctgcctcccaggctcaagtgatcctcccacctcagcttcccaagtagctgggac

SEQ ID NO: 372507 - DNA, 416 bp, Homo sapiens
  misc_feature (2)..(2): n is a, c, g, or t
  misc_feature (8)..(8): n is a, c, g, or t
gngcgccngaacgcggccgcgcgacacggtgcgagaagacgacagaagggggccgccgcggagacaaagatggctgcgagagtcggcgccttcctcaagaatgcctgggacaaggagccagtgctggtcgtgtccttcgtcgtcgggggcctcgctgtaattctgcccccattgagcccctacttcaagtactccgtcatgatcaacaaggccacgccctacaactacccagtgcccgtccgtgatgatgggaacatgcccgacgtgcccagccacccccaggaccctcagggccccagcctggagtggctgaagaaactgtgagcacctccactgacagaggcggcccctcccacggctcccaataaaaatgtgaaaaccaaaaaaaagcggccgctcgttgtcgcgcggccgcg

SEQ ID NO: 372508 - DNA, 645 bp, Homo sapiens
aattcgcggccgcgtcgacgagaagacgacagaagggggccgctgtcgccgccgcggagacaaagatggctgcgagagtcggcgccttcctcaagaatgcctgggacaaggagccagtgctggtcgtgtccttcgtcgtcgggggcctcgctgtaattctgcccccattgagcccctacttcaagtactccgtcatgatcaacaaggccacgccctacaactacccagtgcccgtccgtgatgatgggaacatgcccgacgtgcccagccacccccaggaccctcagggccccagcctggagtggctgaagaaactgtgagcacctccactgacagaggcggcccctcccacggctcccaataaaaatgtgaaaaccaaaaaaaaaaaaaaacaaaaaaaggggggggggcgcgcccaagagagagtttccccggggggggcccacttttgcggcatccccggttttgtgtgggccaggggggcccccaaagagaggaccacccattatatacccaaaaggcgccggagcgcacagttaaacaagccctcggacaggggaaaccgcggcccaccggggaacccgtggcagagagggcaccttaaaccgcggggggagacaccaaagtggcgcaaaactctccacg

SEQ ID NO: 372509 - DNA, 971 bp, Homo sapiens
aattcgcggccgcgtcgacgagaagacgacagaagggggccgctgtcgccgccgcggagacaaagatggctgcgagagtcggcgccttcctcaagaatgcctgggacaaggagccagtgctggtcgtgtccttcgtcgtcgggggcctcgctgtaattctgcccccattgagcccctacttcaagtactccgtcatgatcaacaaggccacgccctacaactacccagtgcccgtccgtgatgatgggaacatgcccgacgtgcccagccacccccaggaccctcagggccccagcctggagtggctgaagaaactgtgagcacctccactgacagaggcggcccctcccacggctcccaataaaaatgtgaaaaccaacggctggggaaaagggccacaggatagagctcagctcccactccactcaacgccaaagctgtcctggagccagacggtcctgagctctggcactggaggcctgggagccatgcccttgaccagccttgagacctcgagcaagacaaggcaaccattctgaggctgagtttcctgctctgcaaacgacatgacaccctcggctggatgttgcagcggtgacactgaagtagtgacaccagacgatttctgtacttaatgtgatgtcagcacttagtaaacattcatatcccctgcctccagagttccttaaggttcaattgatggaatgcctcctctgcaccagcacctgggcagagacggagtttcaccgtgttagccaggatggtcccgatctcctgacctcgtgatccgcctgcctcggcctcccaaagtgctgggattacaggcatgatgagccactgcgcccggcctatttcaacttaagtgaaaatctcacctgtggccagcggctaccgtgctggacagcacagtgctcatctgaggaggcaggacgcagcctctccgcctctttgcttattctgctgactgaccg

SEQ ID NO: 372510 - DNA, 795 bp, Homo sapiens
gaccacaactcccagggtgctccgcgtcctcgccgctgtcgccgccgcggagacaaagatggctgcgagagtcggcgccttcctcaagaatgcctgggacaaggagccagtgctggtcgtgtccttcgtcgtcgggggcctcgctgtaattctgcccccattgagcccctacttcaagtactccgtcatgatcaacaaggccacgccctacaactacccagtgcccgtccgtgatgatgggaacatgcccgacgtgcccagccacccccaggaccctcagggccccagcctggagtggctgaagaaactgtgagcacctccactgacagaggcggcccctcccacggctcccaataaaaatgtgaaaaccaacggctggggaaaagggccacaggatagagctcagctcccactccactcaacgccaaagctgtcctggagccagacggtcctgagctctggcactggaggcctgggagccatgcccttgaccagccttgagacctcgagcaagacaaggcaaccattctgaggctgagtttcctgctctgcaaacgacatgacaccctcggctggatgttgcagcggtgacactgaagtagtgacaccagacgatttctgtacttaatgtgatgtcagcacttagtaaacattcatatcccctgcctccagagttccttaaggttcaattgatggaatgcctcctctgcaccagcacctgggcaggtttgttgttgttgttttgcgacggaatctcacttccagcctggacaacaagagtgaaactccatctca

SEQ ID NO: 372511 - DNA, 754 bp, Homo sapiens
gaccacaactcccagggtgctccgcgtcctcgccgctgtcgccgccgcggagacaaagatggctgcgagagtcggcgccttcctcaagaatgcctgggacaaggagccagtgctggtcgtgtccttcgtcgtcgggggcctcgctgtaattctgcccccattgagcccctacttcaagtactccgtcatgatcaacaaggccacgccctacaactacccagtagaggcggggtttcaccgtgttagccaggattgtctcgatctcctgaccttgtgatccactcacctcggcctcccaaagtgctgggattacagtgcccgtccgtgatgatgggaacatgcccgacgtgcccagccacccccaggaccctcagggccccagcctggagtggctgaagaaactgtgagcacctccactgacagaggcggcccctcccacggctcccaataaaaatgtgaaaaccaacggctggggaaaagggccacaggatagagctcagctcccactccactcaacgccaaagctgtcctggagccagacggtcctgagctctggcactggaggcctgggagccatgcccttgaccagccttgagacctcgagcaagacaaggcaaccattctgaggctgagtttcctgctctgcaaacgacatgacaccctcggctggatgttgcagcggtgacactgaagtagtgacaccagacgatttctgtacttaatgtgatgtcagcacttagtaaacattcatatg

SEQ ID NO: 372512 - DNA, 903 bp, Homo sapiens
  misc_feature (235)..(235): n is a, c, g, or t
  misc_feature (237)..(237): n is a, c, g, or t
  misc_feature (245)..(245): n is a, c, g, or t
aattcgcggccgcgtcgacgagaagacgacagaagggggccgctgtcgccgccgcggagacaaagatggctgcgagagtcggcgccttcctcaagaatgcctgggacaaggagccagtgctggtcgtgtccttcgtcgtcgggggcctcgctgtaattctgcccccattgagcccctacttcaagtactccgtcaattgggagtttccagggtaatgggctgcgctgtataatcntncctgtgtngcaggggggggggtgggggggggggggggggggggggggggtgggggggggggggggggggtgggggtggggtgtgggctaccctgcccgtccgtgatgatgggaacatgcccgacgtgcccagccacccccaggaccctcagggccccagcctggagtggctgaagaaactgtgagcacctccactgacagaggcggcccctcccacggctcccaataaaaatgtgaaaaccaacggctggggaaaagggccacaggatagagctcagctcccactccactcaacgccaaagctgtcctggagccagacggtcctgagctctggcactggaggcctgggagccatgcccttgaccagccttgagacctcgagcaagacaaggcaaccattctgaggctgagtttcctgctctgcaaacgacatgacaccctcggctggatgttgcagcggtgacactgaagtagtgacaccagacgatttctgtacttaatgtgatgtcagcacttagtaaacattcatatcccctgcctccagagttccttaaggttcaattgatggaatgcctcctctgcaccagcacctgggcaggtttgttgttgttgttttgcgacggaatctcacttccagcctggacaacaagagtgaaactccatctca

SEQ ID NO: 372513 - DNA, 671 bp, Homo sapiens
ataaagtgttttgtagattatataattaattctcctctctctactcttctgttggtctgttgtctttataataatatatgactcataagttttaagcttatatatacaaatatatgttttataacttttagtttacagtcttggttaaaaaattgtctccatctatattttttacattcttcgagatttccataaaagctttgaaatactgcttttctaaaagaattgaagtatggcattagttgtggagttttcatcagttatatcaatttcctttatcacattgaggaaattcccttctatccctatttccactgagatgttcttgttgttgttttatcatgaatggatgttaaatgttgccagatactttttttccatctatggagataatcataaggtttttcacctttattcttttaatatggtaaattacttgtaagattttcaaatgttaaatcaaccttgaattccttagatattccttggccataatgtatcctttttatattttgctgtattttatttcctaataccctttgaaattatatgatggatattggtaggaattttatttttggaatgcctttgtcagattttggtgtgagttacctggtcttattaaatgagatattattaaattattaaaatttttgtttgcagaaataatt

SEQ ID NO: 372514 - DNA, 313 bp, Homo sapiens
gagatttgaaaagagaaaagccacagatagaaaagcaaacagggtcaggtgcggtggctcacacctgtaatcccagcattttgggaggccgaggttggtggaggtcagaagttcaagaccaacctgccaacatggcgaaaccccgtctctactaaaaatacaaaaattagccgggtgtaatggctcacgcctataatcccagccactccggattctcctgctgaggcaggagaatcgcttgaagctgggaggcagagattgcagtgagctaagatcaggccattgcactccagcctgggtgacagagcgagac

SEQ ID NO: 372515 - DNA, 1132 bp, Homo sapiens
tgttaccctggcttatggatgagctggagaggccagtgacctttgaggttctgtcctaaaagggccagagatgggctgccagcttctcccttggcagcctcccctgtcatcctgataagaacatggggtaggagggcattgagggatcaacacgctcagggctgagatttgggcaactccttccccactccctgagccccaggcaggtagaagaccctggatctttgagttgcaggagggtcttgccctaggcagcccaagctggtgtttgtggctttttttttttttttaaagctatcttgattttattttgttttgcccattactttgttttttctcgtgattttacttagtttgctcatatatggcttcatttatataacatgctagagagggcacactaaccccagaggctcatctgtggggctgagcctggggatgggcgagggtgtgtgcaaccagctcgtacaccgctgatgttaggccacgacgcggccatcgggtctagagatgagcagtgattggccaggcaagtgcgaggcccctggggccaaggctgaccactagtgagcacagagaaagccttggctaccatctgggagcagcaggcggacaggaccccaaagtctgcagccaagcccagacagggtcccttccccagatttggagccacatctcagccggggtgggcttgcctgcacccccaaggttctcctgcggtctggagtgggggtctggaaccctgggacttgccccctggagccccggggacaccagccccaggccctgggggaagcccctgtcatccccactcctgcccttggtccctcaaactccagccctgccccatcttcttcctgtacctgtcactgcagcaagttctggggagcaagacgagggtccggacagtggctggtggttattcttccccatccttggggaccagtccaagcatcccatgggcaagcctcccaggcaccccctttcaggaaccccctgcatcccacctctgcctggcactggactccaaatgacctcgtgtcctttacctcccctgcctgccagggcaagtgaggctttcagcgggaggccacctatgccacaggcatagggcatggcccacaccgaggcc

SEQ ID NO: 372516 - DNA, 520 bp, Homo sapiens
gttgattagggacattagtgaatacaaacaaatgatgtttggctatctcaggttgatattttcatatcttaaattttgtagtaggaaacaaagctgaggcagcgctgtcactgatatgcataaccaacgcataaattctctcttgaatcaggacattattcttcaacatggtagaaatacctatttcaatacatttctagttgtttgtgtttgctgtagacattggccactagagcaccactcacaataaacataccagaatgtttataaatgtgtctcaggagatcacacattttgtattttattcaaaccataaattccaaaatgctatgaacttttattcacacttcaaaaagacctgaaaaaatgatagcattgcaaaggtttttttgttttttttaagtgaggatttttttcttttcttttattgcataggtttggtatggtcacattagatgtaaaggtcttcccaaataactgataataaaagttttattgccactcttagtataccatggtt

SEQ ID NO: 372517 - DNA, 668 bp, Homo sapiens
aaacaggcaaacaaataaacagagtatcttttgagagtgataaatactataaaataaataaaacaatgaatttaaagtcagggaagcagagcatttatctgaaaggtgatgtttgagtggagatttgattgacaagaagccagccatgcaaagatctgcattaaagacaatgaaaatattaagtacgactgcaagaagtaggaataaactcagtacattagagaatagaggaaaaaggctagtggctggagtgtggagagtgatgaggggtgaggtgggtgcagtcagagaggacatagtgccagacccatgtccaagacctttgtgcttgtctataagggaagttatagtgtttggcttgaggtgaacttcaaattcctgctgtctttattcttcagctgttcccagggaagaaaccagggttctttaggccactggagcattccacaaagccctgagaaagtcttaatgattccttttgcacaactaattttcttttattgattttgtaacagtgtaccttaattttttcttattctagaacctgtacaagcttataaaatccaagatttttaatttttataacaacaaaaagaatttgtgccattttgtcttttgtcccacacttaataaaatacaatggagattgttttatgtctgtacatgta

SEQ ID NO: 372518 - DNA, 401 bp, Homo sapiens
gcctatactgagctgcagtgtaaagcaggtatggaagctgttgactgtgccattttttctgtgtcttccgccatcacaaactggtatgacgaaatccaggactatgacttcaagactcggatatgcaaaaaagtctgtggccactacactcaggttgtttgggcagatagttacaaagttggctgcgcagttcaattttgccctaaagtttctggctttgacgctctttccaatggagcacattttatatgcaactacggaccaggagggaattacccaacttggccatataagagaggagccacctgcagtgcctgccccaataatgacaagtgtttggacaatctctgtgttaaccgacagcgagaccaagtcaaacgtacgtacatcaatcttaaatt

SEQ ID NO: 372519 - DNA, 3882 bp, Homo sapiens
ctctgttttctcaaagctgaagtcggctaggtttgcaaagctgtgggctgagcactcaggcaatcacactctcagaaactgcggcggctctggactgcagcctcccaaggctccatgccagacaaagcatgcgtgtcacacttgctacaatagcctggatggtttcttttgtctccaattattcacacacagcaaatattttgccagatatcgaaaatgaagatttcatcaaagactgcgttcgaatccataacaagttccgatcagaggtgaaaccaacagccagtgatatgctatacatgacttgggacccagcactagcccaaattgcaaaagcatgggccagcaattgccagttttcacataatacacggctgaagccaccccacaagctgcacccaaacttcacttcactgggagagaacatctggactgggtctgtgcccattttttctgtgtcttccgccatcacaaactggtatgacgaaatccaggactatgacttcaagactcggatatgcaaaaaagtctgtggccactacactcaggttgtttgggcagatagttacaaagttggctgcgcagttcaattttgccctaaagtttctggctttgacgctctttccaatggagcacattttatatgcaactacggaccaggagggaattacccaacttggccatataagagaggagccacctgcagtgcctgccccaataatgacaagtgtttggacaatctctgtgttaaccgacagcgagaccaagtcaaacgttactactctgttgtatatccaggctggcccatatatccacgtaacagatacacttctctctttctcattgttaattcagtaattctaatactgtctgttataattaccattttggtacagcacaagtaccctaatttagttcttttggactaatacaattcaggaaagaaaaaacccaaaaaccaacctcattcacatatggctttttttttaaccaataacaattaggtgtacttctattttaaaacatttcagaaaaaaatatatgttatagcaatactcttactcaaaagaagaaatttcctaactctatcagataaactcatctttagtataaataagcattatttgcaggttgccacaggtggacttttagtaagtaacctaacccatgtttcagcttctaaatctgcaaaatgagcaaggtacagtagcacatttttaggtgattcttagtaactccagtagccttcattagttaaaaacattattattttttgcatgctgcttcgactctaaatatctggttttccctgtctttttggtttactacttccccagattcagaacagaggagtaactaggggatctgattttagaggccttaattttctgttcatggactgttaaaagtaaaaccaaactttcaaaagggataaacctaaatatttacttgttatcattagagagggaacatcaaatgctgggacatcattactaaccaatagcatcagacactggatttaatggataatcacaatggtcgtaatgtatacaaagacatatataccactttctagtataaatttttcaaaaaatacaataataatataatttataaagaacactcttctatgaacaaccaccaccaccaaaaaaaaaaaagccctcagaaaatttctcacaaataaggcaactaatgcctgatatctcaaaatcctttacaaaaggagatagttctagtcaaggagttttgggtatgttacttttttttcttctttttcttttcatctgcctccatcttaagtgcaatttcttcagctgtaagagctcccagtttcttattctttgctttcttaaccttttccttgatgctggccacatcaattttagtttcagtagaagctagacaaattaaaagcacaacacatgtaatactttagattttaccaagtaaaacaaagaatatatgtttaacaaagaatatatgtttaaggcagttaacttcagagtattcttataattgaataattgaaaggtgatcacagtataaaatataaaaacacttgcctaaagcagttagaaatttcttcagattaagataaaacaaatcataaaatactttatatattagtacaagtatacataaaaatggcataaatggcataattgaaccaattactggattcaactatattaagactatttccttaaatcctacttcagactaaattattttacctacattcttttccatattttggaacttctgagtcattattttccatcttgcacattaaaataatttaaaattacatgtatcccttctcaataagtttaatcagctaaccctaagctagaggtcaaaatctacttcctctaatatcaaaacgaaaatttaaagttttccaaatattaattcaatattaattgaatattcaatgaattcatttaatgttagattaattcattgaatattaattcaatgaatgactaattaatagtattttaacaagattttggtatatttaacaacattttggtaataaagacaataatttgagagtgtgtggaagtccccctaatagaagccaactatctaatcaatgccaaaagtgtgaacaaaatagagaaaggaagcagtgaaaaagaatgcaactttttcttaccattcaaagtacaggatcacagcataaaagaatcataagataaaacatcaaactacccagcaacctgagaagcacagagtgttaaagcctccaccgtgtggagaaactaaattagggtaactagctattgagtatattgagtaccttcaaagcactcaactgacaggttttacagactggaaattataatacttatgacatttctaccttttatataaccaataatctaccatagaatgtagtatttttaaagctattaacaagcaatatattaaaataataatgtattatatctgtttctgacccagtctatgtacaatattgctggtgagccctctcccttcagtgtgtcactgttcactttggagggttactttaggaagaggataagtgttaccacaggggaaaaaaatgcagaagaggatgcatcagaagaaatggcatgacaatgttttctcttagtgtcttttaaatactaggttagtgcgaaagtgatttctgccatttaaaaaccacaatcactttcgcactaatagctcctgaataagacctgtcagcatcctttagtctaaggtgatgagaaatccatgttaccgatatagaagccaaactctaagccaagatcacataaagagaagaaaaagtacaacttctgataattcctctttgagaggcatgacagcagagctcagggatcttcttgcatttctacagaagatgcactggctgccctgggtttgtatctttcacaacaaagagtcttttccaagcacagaccagaggtcaggagaggactgtcaatccagtttgcactgaaataggcattagctgcctctaaattataaattatctcagccatcccttgtccttaggattagtaattaatgaaatgctaagagaactgatgaaaagatacaactgtttcttaaaaagattcagacaaatttattatgggtttacttttcctaattaataaagacttttacatcatagaaagcattaccttccttaggtttcacaattggtttttccttaggtggaataaatgctttgtttctttcctcttgtctcttactgatggcttctgcttgtttagcctacattaataaataaaaaatatatcagttaaatgtatttatagttaaataattcaagtatctatgaactttgctattcatgtgagccagacataaagtgccgtacctttattgcttcca

SEQ ID NO: 372520 - DNA, 3097 bp, Homo sapiens
ctctgttttctcaaagctgaagtcggctaggtttgcaaagctgtgggctgagcactcaggcaatcacactctcagaaactgcggcggctctggactgcagcctcccaaggctccatgccagacaaagcatgcgtgtcacacttgctacaatagcctggatggtttcttttgtctccaattattcacacacagcaaatattttgccagatatcgaaaatgaagatttcatcaaagactgcgttcgaatccataacaagttccgatcagaggtgaaaccaacagccagtgatatgctatacatgacttgggacccagcactagcccaaattgcaaaagcatgggccagcaattgccagttttcacataatacacggctgaagccaccccacaagctgcacccaaacttcacttcactgggagagaacatctggactgggtctgtgcccattttttctgtgtcttccgccatcacaaactggtatgacgaaatccaggactatgacttcaagactcggatatgcaaaaaagtctgtggccactacactcaggttgtttgggcagatagttacaaagttggctgcgcagttcaattttgccctaaagtttctggctttgacgctctttccaatggagcacattttatatgcaactacggaccaggagggaattacccaacttggccatataagagaggagccacctgcagtgcctgccccaataatgacaagtgtttggacaatctctgtgttaaccgacagcgagaccaagtcaaacgttactactctgttgtatatccaggctggcccatatatccacgtaacagatacacttctctctttctcattgttaattcagtaattctaatactgtctgttataattaccattttggtacagcacaagtaccctaatttagttcttttggactaatacaattcaggaaagaaaaaacccaaaaaccaacctcattcacatatggctttttttttaaccaataacaattaggtgtacttctattttaaaacatttcagaaaaaaatatatgttatagcaatactcttactcaaaagaagaaatttcctaactctatcagataaactcatctttagtataaataagcattatttgcaggttgccacaggtggacttttagtaagtaacctaacccatgtttcagcttctaaatctgcaaaatgagcaaggtacagtagcacatttttaggtgattcttagtaactccagtagccttcattagttaaaaacattattattttttgcatgctgcttcgactctaaatatctggttttccctgtctttttggtttactacttccccagattcagaacagaggagtaactaggggatctgattttagaggccttaattttctgttcatggactgttaaaagtaaaaccaaactttcaaaagggataaacctaaatatttacttgttatcattagagagggaacatcaaatgctgggacatcattactaaccaatagcatcagacactggatttaatggataatcacaatggtcgtaatgtatacaaagacatatataccactttctagtataaatttttcaaaaaatacaataataatataatttataaagaacactcttctatgaacaaccaccaccaccaaaaaaaaaaaagccctcagaaaatttctcacaaataaggcaactaatgcctgatatctcaaaatcctttacaaaaggagatagttctagtcaaggagttttgggtatgttacttttttttcttctttttcttttcatctgcctccatcttaagtgcaatttcttcagctgtaagagctcccagtttcttattctttgctttcttaaccttttccttgatgctggccacatcaattttagtttcagtagaagctagacaaattaaaagcacaacacatgtaatactttagattttaccaagtaaaacaaagaatatatgtttaacaaagaatatatgtttaaggcagttaacttcagagtattcttataattgaataattgaaaggtgatcacagtataaaatataaaaacacttgcctaaagcagttagaaatttcttcagattaagataaaacaaatcataaaatactttatatattagtacaagtatacataaaaatggcataaatggcataattgaaccaattactggattcaactatattaagactatttccttaaatcctacttcagactaaattattttacctacattcttttccatattttggaacttctgagtcattattttccatcttgcacattaaaataatttaaaattacatgtatcccttctcaataagtttaatcagctaaccctaagctagaggtcaaaatctacttcctctaatatcaaaacgaaaatttaaagttttccaaatattaattcaatattaattgaatattcaatgaattcatttaatgttagattaattcattgaatattaattcaatgaatgactaattaatagtattttaacaagattttggtatatttaacaacattttggtaataaagacaataatttgagagtgtgtggaagtccccctaatagaagccaactatctaatcaatgccaaaagtgtgaacaaaatagagaaaggaagcagtgaaaaagaatgcaactttttcttaccattcaaagtacaggatcacagcataaaagaatcataagataaaacatcaaactacccagcaacctgagaagcacagagtgttaaagcctccaccgtgtggagaaactaaattagggtaactagctattgagtatattgagtaccttcaaagcactcaactgacaggttttacagactggaaattataatacttatgacatttctaccttttatataaccaataatctaccatagaatgtagtatttttaaagctattaacaagcaatatattaaaataataatgtattatatctgtttctgacccagtctatgtacaatattgctggtgagccctctccccccggtacaaatggaaagagaaagcagctgccccactggctcatctcaggttatttactattaattaagtcacaaggatagtctaatccat

SEQ ID NO: 372521 - DNA, 3442 bp, Homo sapiens
  misc_feature (3128)..(3128): n is a, c, g, or t
  misc_feature (3131)..(3131): n is a, c, g, or t
  misc_feature (3136)..(3136): n is a, c, g, or t
  misc_feature (3138)..(3138): n is a, c, g, or t
  misc_feature (3140)..(3140): n is a, c, g, or t
  misc_feature (3143)..(3143): n is a, c, g, or t
  misc_feature (3149)..(3149): n is a, c, g, or t
  misc_feature (3152)..(3152): n is a, c, g, or t
  misc_feature (3169)..(3169): n is a, c, g, or t
ctctgttttctcaaagctgaagtcggctaggtttgcaaagctgtgggctgagcactcaggcaatcacactctcagaaactgcggcggctctggactgcagcctcccaaggctccatgccagacaaagcatgcgtgtcacacttgctacaatagcctggatggtttcttttgtctccaattattcacacacagcaaatattttgccagatatcgaaaatgaagatttcatcaaagactgcgttcgaatccataacaagttccgatcagaggtgaaaccaacagccagtgatatgctatacatgacttgggacccagcactagcccaaattgcaaaagcatgggccagcaattgccagttttcacataatacacggctgaagccaccccacaagctgcacccaaacttcacttcactgggagagaacatctggactgggtctgtgcccattttttctgtgtcttccgccatcacaaactggtatgacgaaatccaggactatgacttcaagactcggatatgcaaaaaagtctgtggccactacactcaggttgtttgggcagatagttacaaagttggctgcgcagttcaattttgccctaaagtttctggctttgacgctctttccaatggagcacattttatatgcaactacggaccaggagggaattacccaacttggccatataagagaggagccacctgcagtgcctgccccaataatgacaagtgtttggacaatctctgtgttaaccgacagcgagaccaagtcaaacgttactactctgttgtatatccaggctggcccatatatccacgtaacagatacacttctctctttctcattgttaattcagtaattctaatactgtctgttataattaccattttggtacagcacaagtaccctaatttagttcttttggactaatacaattcaggaaagaaaaaacccaaaaaccaacctcattcacatatggctttttttttaaccaataacaattaggtgtacttctattttaaaacatttcagaaaaaaatatatgttatagcaatactcttactcaaaagaagaaatttcctaactctatcagataaactcatctttagtataaataagcattatttgcaggttgccacaggtggacttttagtaagtaacctaacccatgtttcagcttctaaatctgcaaaatgagcaaggtacagtagcacatttttaggtgattcttagtaactccagtagccttcattagttaaaaacattattattttttgcatgctgcttcgactctaaatatctggttttccctgtctttttggtttactacttccccagattcagaacagaggagtaactaggggatctgattttagaggccttaattttctgttcatggactgttaaaagtaaaaccaaactttcaaaagggataaacctaaatatttacttgttatcattagagagggaacatcaaatgctgggacatcattactaaccaatagcatcagacactggatttaatggataatcacaatggtcgtaatgtatacaaagacatatataccactttctagtataaatttttcaaaaaatacaataataatataatttataaagaacactcttctatgaacaaccaccaccaccaaaaaaaaaaaagccctcagaaaatttctcacaaataaggcaactaatgcctgatatctcaaaatcctttacaaaaggagatagttctagtcaaggagttttgggtatgttacttttttttcttctttttcttttcatctgcctccatcttaagtgcaatttcttcagctgtaagagctcccagtttcttattctttgctttcttaaccttttccttgatgctggccacatcaattttagtttcagtagaagctagacaaattaaaagcacaacacatgtaatactttagattttaccaagtaaaacaaagaatatatgtttaacaaagaatatatgtttaaggcagttaacttcagagtattcttataattgaataattgaaaggtgatcacagtataaaatataaaaacacttgcctaaagcagttagaaatttcttcagattaagataaaacaaatcataaaatactttatatattagtacaagtatacataaaaatggcataaatggcataattgaaccaattactggattcaactatattaagactatttccttaaatcctacttcagactaaattattttacctacattcttttccatattttggaacttctgagtcattattttccatcttgcacattaaaataatttaaaattacatgtatcccttctcaataagtttaatcagctaaccctaagctagaggtcaaaatctacttcctctaatatcaaaacgaaaatttaaagttttccaaatattaattcaatattaattgaatattcaatgaattcatttaatgttagattaattcattgaatattaattcaatgaatgactaattaatagtattttaacaagattttggtatatttaacaacattttggtaataaagacaataatttgagagtgtgtggaagtccccctaatagaagccaactatctaatcaatgccaaaagtgtgaacaaaatagagaaaggaagcagtgaaaaagaatgcaactttttcttaccattcaaagtacaggatcacagcataaaagaatcataagataaaacatcaaactacccagcaacctgagaagcacagagtgttaaagcctccaccgtgtggagaaactaaattagggtaactagctattgagtatattgagtaccttcaaagcactcaactgacaggttttacagactggaaattataatacttatgacatttctaccttttatataaccaataatctaccatagaatgtagtatttttaaagctattaacaagcaatatattaaaataataatgtattaaaaaaaaaaaaaaaaaaaaaaaaaaaaaaaaaaaaaaaaaaaaaaaaaaaaaaaaaaaaaaaaaaaaaaaaaaaaaaaaaaaaaaaaaaaaaaaaaaaaaaaaaaaaaaaaaaaaaaaaaaaaaaaaaaaaaaaaaaaaaaaaaaaaaaaaaaaaaaaaaaaaaatttttaanaanataancnanatntttttnaantttaaaaatttttttantggttctatattattattttttgggaaaattcccccttaggggggggttttaaaattaaaggggccggggtttaaaacaaggggttagtggaaaaacacccgggggtcccccacaattaaaccctttgggaaaaaatacccctttattgcaggcgtgtgtgtaataaaaaaaaggggccccacaccgtggtgcttctttcaaaaaattgtgcgcccccttataggggacaagggaaaattggcgccgacaaatatttttaaaaaaacccgcga

SEQ ID NO: 372522 - DNA, 3153 bp, Homo sapiens
ctctgttttctcaaagctgaagtcggctaggtttgcaaagctgtgggctgagcactcaggcaatcacactctcagaaactgcggcggctctggactgcagcctcccaaggctccatgccagacaaagcatgcgtgtcacacttgctacaatagcctggatggtttcttttgtctccaattattcacacacagcaaatattttgccagatatcgaaaatgaagatttcatcaaagactgcgttcgaatccataacaagttccgatcagaggtgaaaccaacagccagtgatatgctatacatgacttgggacccagcactagcccaaattgcaaaagcatgggccagcaattgccagttttcacataatacacggctgaagccaccccacaagctgcacccaaacttcacttcactgggagagaacatctggactgggtctgtgcccattttttctgtgtcttccgccatcacaaactggtatgacgaaatccaggactatgacttcaagactcggatatgcaaaaaagtctgtggccactacactcaggttgtttgggcagatagttacaaagttggctgcgcagttcaattttgccctaaagtttctggctttgacgctctttccaatggagcacattttatatgcaactacggaccaggagggaattacccaacttggccatataagagaggagccacctgcagtgcctgccccaataatgacaagtgtttggacaatctctgtgttaaccgacagcgagaccaagtcaaacgttactactctgttgtatatccaggctggcccatatatccacgtaacagatacacttctctctttctcattgttaattcagtaattctaatactgtctgttataattaccattttggtacagcacaagtaccctaatttagttcttttggactaatacaattcaggaaagaaaaaacccaaaaaccaacctcattcacatatggctttttttttaaccaataacaattaggtgtacttctattttaaaacatttcagaaaaaaatatatgttatagcaatactcttactcaaaagaagaaatttcctaactctatcagataaactcatctttagtataaataagcattatttgcaggttgccacaggtggacttttagtaagtaacctaacccatgtttcagcttctaaatctgcaaaatgagcaaggtacagtagcacatttttaggtgattcttagtaactccagtagccttcattagttaaaaacattattattttttgcatgctgcttcgactctaaatatctggttttccctgtctttttggtttactacttccccagattcagaacagaggagtaactaggggatctgattttagaggccttaattttctgttcatggactgttaaaagtaaaaccaaactttcaaaagggataaacctaaatatttacttgttatcattagagagggaacatcaaatgctgggacatcattactaaccaatagcatcagacactggatttaatggataatcacaatggtcgtaatgtatacaaagacatatataccactttctagtataaatttttcaaaaaatacaataataatataatttataaagaacactcttctatgaacaaccaccaccaccaaaaaaaaaaaagccctcagaaaatttctcacaaataaggcaactaatgcctgatatctcaaaatcctttacaaaaggagatagttctagtcaaggagttttgggtatgttacttttttttcttctttttcttttcatctgcctccatcttaagtgcaatttcttcagctgtaagagctcccagtttcttattctttgctttcttaaccttttccttgatgctggccacatcaattttagtttcagtagaagctagacaaattaaaagcacaacacatgtaatactttagattttaccaagtaaaacaaagaatatatgtttaacaaagaatatatgtttaaggcagttaacttcagagtattcttataattgaataattgaaaggtgatcacagtataaaatataaaaacacttgcctaaagcagttagaaatttcttcagattaagataaaacaaatcataaaatactttatatattagtacaagtatacataaaaatggcataaatggcataattgaaccaattactggattcaactatattaagactatttccttaaatcctacttcagactaaattattttacctacattcttttccatattttggaacttctgagtcattattttccatcttgcacattaaaataatttaaaattacatgtatcccttctcaataagtttaatcagctaaccctaagctagaggtcaaaatctacttcctctaatatcaaaacgaaaatttaaagttttccaaatattaattcaatattaattgaatattcaatgaattcatttaatgttagattaattcattgaatattaattcaatgaatgactaattaatagtattttaacaagattttggtatatttaacaacattttggtaataaagacaataatttgagagtgtgtggaagtccccctaatagaagccaactatctaatcaatgccaaaagtgtgaacaaaatagagaaaggaagcagtgaaaaagaatgcaactttttcttaccattcaaagtacaggatcacagcataaaagaatcataagataaaacatcaaactacccagcaacctgagaagcacagagtgttaaagcctccaccgtgtggagaaactaaattagggtaactagctattgagtatattgagtaccttcaaagcactcaactgacaggttttacagactggaaattataatacttatgacatttctaccttttatataaccaataatctaccatagaatgtagtatttttaaagctattaacaagcaatatattaaaataataatgtattaaaaaaaaaaaaaaaaaaaaaaaaaaaaaaaaaaaaaaaaaaaaaaaaaaaaaaaaaaaaaaaaaaaaaaaattattctaataaatcaaatttaatatcacttctctttcaaataatcttttaattcataatatttctataattaactaatataaataaacaaaaaacattgttgtcctcctttaaactagcttttttt

SEQ ID NO: 372523 - DNA, 3745 bp, Homo sapiens
ctctgttttctcaaagctgaagtcggctaggtttgcaaagctgtgggctgagcactcaggcaatcacactctcagaaactgcggcggctctggactgcagcctcccaaggctccatgccagacaaagcatgcgtgtcacacttgctacaatagcctggatggtttcttttgtctccaattattcacacacagcaaatattttgccagatatcgaaaatgaagatttcatcaaagactgcgttcgaatccataacaagttccgatcagaggtgaaaccaacagccagtgatatgctatacatgacttgggacccagcactagcccaaattgcccacaagctgcacccaaacttcacttcactgggagagaacatctggactgggtctgtgcccattttttctgtgtcttccgccatcacaaactggtatgacgaaatccaggactatgacttcaagactcggatatgcaaaaaagtctgtggccactacactcaggttgtttgggcagatagttacaaagttggctgcgcagttcaattttgccctaaagtttctggctttgacgctctttccaatggagcacattttatatgcaactacggaccaggagggaattacccaacttggccatataagagaggagccacctgcagtgcctgccccaataatgacaagtgtttggacaatctctgtgttaaccgacagcgagaccaagtcaaacgttactactctgttgtatatccaggctggcccatatatccacgtaacagatacacttctctctttctcattgttaattcagtaattctaatactgtctgttataattaccattttggtacagcacaagtaccctaatttagttcttttggactaatacaattcaggaaagaaaaaacccaaaaaccaacctcattcacatatggctttttttttaaccaataacaattaggtgtacttctattttaaaacatttcagaaaaaaatatatgttatagcaatactcttactcaaaagaagaaatttcctaactctatcagataaactcatctttagtataaataagcattatttgcaggttgccacaggtggacttttagtaagtaacctaacccatgtttcagcttctaaatctgcaaaatgagcaaggtacagtagcacatttttaggtgattcttagtaactccagtagccttcattagttaaaaacattattattttttgcatgctgcttcgactctaaatatctggttttccctgtctttttggtttactacttccccagattcagaacagaggagtaactaggggatctgattttagaggccttaattttctgttcatggactgttaaaagtaaaaccaaactttcaaaagggataaacctaaatatttacttgttatcattagagagggaacatcaaatgctgggacatcattactaaccaatagcatcagacactggatttaatggataatcacaatggtcgtaatgtatacaaagacatatataccactttctagtataaatttttcaaaaaatacaataataatataatttataaagaacactcttctatgaacaaccaccaccaccaaaaaaaaaaaagccctcagaaaatttctcacaaataaggcaactaatgcctgatatctcaaaatcctttacaaaaggagatagttctagtcaaggagttttgggtatgttacttttttttcttctttttcttttcatctgcctccatcttaagtgcaatttcttcagctgtaagagctcccagtttcttattctttgctttcttaaccttttccttgatgctggccacatcaattttagtttcagtagaagctagacaaattaaaagcacaacacatgtaatactttagattttaccaagtaaaacaaagaatatatgtttaacaaagaatatatgtttaaggcagttaacttcagagtattcttataattgaataattgaaaggtgatcacagtataaaatataaaaacacttgcctaaagcagttagaaatttcttcagattaagataaaacaaatcataaaatactttatatattagtacaagtatacataaaaatggcataaatggcataattgaaccaattactggattcaactatattaagactatttccttaaatcctacttcagactaaattattttacctacattcttttccatattttggaacttctgagtcattattttccatcttgcacattaaaataatttaaaattacatgtatcccttctcaataagtttaatcagctaaccctaagctagaggtcaaaatctacttcctctaatatcaaaacgaaaatttaaagttttccaaatattaattcaatattaattgaatattcaatgaattcatttaatgttagattaattcattgaatattaattcaatgaatgactaattaatagtattttaacaagattttggtatatttaacaacattttggtaataaagacaataatttgagagtgtgtggaagtccccctaatagaagccaactatctaatcaatgccaaaagtgtgaacaaaatagagaaaggaagcagtgaaaaagaatgcaactttttcttaccattcaaagtacaggatcacagcataaaagaatcataagataaaacatcaaactacccagcaacctgagaagcacagagtgttaaagcctccaccgtgtggagaaactaaattagggtaactagctattgagtatattgagtaccttcaaagcactcaactgacaggttttacagactggaaattataatacttatgacatttctaccttttatataaccaataatctaccatagaatgtagtatttttaaagctattaacaagcaatatattaaaataataatgtattatatctgtttctgacccagtctatgtacaatattgctggtgagccctctcccttcagtgtgtcactgttcactttggagggttactttaggaagaggataagtgttaccacaggggaaaaaaatgcagaagaggatgcatcagaagaaatggcatgacaatgttttctcttagtgtcttttaaatactaggttagtgcgaaagtgatttctgccatttaaaaaccacaatcactttcgcactaatagctcctgaataagacctgtcagcatcctttagtctaaggtgatgagaaatccatgttaccgatatagaagccaaactctaagccaagatcacataaagagaagaaaaagtacaacttctgataattcctctttgagaggcatgacagcagagctcagggatcttcttgcatttctacagaagatgcactggctgccctgggtttgtatctttcacaacaaagagtcttttccaagcacagaccagaggtcaggagaggactgtcaatccagtttgcactgaaataggcattagctgcctctaaattataaattatctcagccatcccttgtccttaggattagtaattaatgaaatgctaagagaactgatgaaaagatacaactgtttcttaaaaagattcagacaaatttattatgggtttacttttcctaattaataaagacttttacatcatagaaagcattaccttccttaggtttcacaattggtttttccttaggtggaataaatgctttgtttctttcctcttgtctcttactgatggcttctgcttgtttagcctacattaataaataaaaaatatatcagttaaatgta

SEQ ID NO: 372524 - DNA, 957 bp, Homo sapiens
ctctgttttctcaaagctgaagtcggctaggtttgcaaagctgtgggctgagcactcaggcaatcacactctcagaaactgcggcggctctggactgcagcctcccaaggctccatgccagacaaagcatgcgtgtcacacttgctacaatagcctggatggtttcttttgtctccaattattcacacacagcaaatattttgccagatatcgaaaatgaagatttcatcaaagactgcgttcgaatccataacaagttccgatcagaggtgaaaccaacagccagtgatatgctatacatgacttgggacccagcactagcccaaattgcaaaagcatgggccagcaattgccagttttcacataatacacggctgaagccaccccacaagctgcacccaaacttcacttcactgggagagaacatctggactgggtctgtgcccattttttctgtgtcttccgccatcacaaactggtatgacgaaatccaggactatgacttcaagactcggatatgcaaaaaagtctgtggccactacactcaggttgtttgggcagatagttacaaagttggctgcgcagttcaattttgccctaaagtttctggctttgacgctctttccaatggagcacattttatatgcaactacggaccaggagggaattacccaacttggccatataagagaggagccacctgcagtgcctgccccaataatgacaagtgtttggacaatctctgtgtaaccgaaggagaacaagtccaccgttactactctgttgtatatccaggctggcccatatatccacgtaacagatacacttctctctttctcattgttaattcagtaattctaatactgtctgttataattaccattttggtacagcacaagtaccctaatttagttcttttggactaatacaattcaggaaagaaaaaacccaaaaacc

SEQ ID NO: 372525 - DNA, 838 bp, Homo sapiens
  misc_feature (789)..(789): n is a, c, g, or t
ctctgttttctcaaagctgaagtcggctaggtttgcaaagctgtgggctgagcactcaggcaatcacactctcagaaactgcggcggctctggactgcagcctcccaaggctccatgccagacaaagcatgcgtgtcacacttgctacaatagcctggatggtttcttttgtctccaattattcacacacagcaaatattttgccagatatcgaaaatgaagatttcatcaaagactgcgttcgaatccataacaagttccgatcagaggtgaaaccaacagccagtgatatgctatacatgacttgggacccagcactagcccaaattgcaaaagcatgggccagcaattgccagttttcacataatacacggctgaagccaccccacaagctgcacccaaacttcacttcactgggagagaacatctggactgggtctgtgcccattttttctgtgtcttccgccatcacaaactggtatgacgaaatccaggactatgacttcaagactcggatatgcaaaaaagtctgtggccactacactcaggttgtttgggcagatagttacaaagttggctgcgcagttcaattttgccctaaagtttctggctttgacgctctttccaatggagcacattttatatgcaactacggaccaggagggaattacccaacttggccatataagagaggagccacctgcagtgcctgccccaataatgacaagtgtttggacaatctctgtgtaaccaacagcgagaccaagtcaaacgttactactctgttgntataccaggttggcccttatcgagggtactgagctcgattgtatcatgt

SEQ ID NO: 372526 - DNA, 960 bp, Homo sapiens
ctctgttttctcaaagctgaagtcggctaggtttgcaaagctgtgggctgagcactcaggcaatcacactctcagaaactgcggcggctctggactgcagcctcccaaggctccatgccagacaaagcatgcgtgtcacacttgctacaatagcctggatggtttcttttgtctccaattattcacacacagcaaatattttgccagatatcgaaaatgaagatttcatcaaagactgcgttcgaatccataacaagttccgatcagaggtgaaaccaacagccagtgatatgctatacatgacttgggacccagcactagcccaaattgcaaaagcatgggccagcaattgccagttttcacataatacacggctgaagccaccccacaagctgcacccaaacttcacttcactgggagagaacatctggactgggtctgtgcccattttttctgtgtcttccgccatcacaaactggtatgacgaaatccaggactatgacttcaagactcggatatgcaaaaaagtctgtggccactacactcaggttgtttgggcagatagttacaaagttggctgcgcagttcaattttgccctaaagtttctggctttgacgctctttccaatggagcacattttatatgcaactacggaccaggagggaattacccaacttggccatataagagaggagccacctgcagtgcctgccccaataatgacaagtgtttggacaatctctgtgttaaccgacagcgagaccaagtcaaacgttactactctgttgtatatccaggctggcccatatatccacgtaacagatacacttctctctttctcattgttaattcagtaattctaatactgtctgttataattaccattttggtacagcacaagtaccctaatttagttcttttggactaatacaattcaggaaagaaaaaacccaaaaacc

SEQ ID NO: 372527 - DNA, 3799 bp, Homo sapiens
ctctgttttctcaaagctgaagtcggctaggtttgcaaagctgtgggctgagcactcaggcaatcacactctcagaaactgcggcggctctggactgcagcctcccaaggctccatgccagacaaagcatgcgtgtcacacttgctacaatagcctggatggtttcttttgtctccaattattcacacacagcaaatattttgccagatatcgaaaatgaagatttcatcaaagactgcgttcgaatccataacaagttccgatcagaggtgaaaccaacagccagtgatatgctatacatgacttgggacccagcactagcccaaattgcaaaagcatgggccagcaattgccagttttcacataatacacggctgaagccaccccacaagctgcacccaaacttcacttcactgggagagaacatctggactgggtctgtgcccattttttctgtgtcttccgccatcacaaactggtatgacgaaatccaggactatgacttcaagactcggatatgcaaaaaagtctgtggccactacactcaggttgtttgggcagatagttacaaagttggctgcgcagttcaattttgccctaaagtttctggctttgacgctctttccaatggagcacattttatatgcaactacggaccaggagggaattacccaacttggccatataagagaggagccacctgcagtgcctgccccaataatgacaagtgtttggacaatctctgtgttaaccgacagcgagaccaagtcaaacgttactactctgttgtatatccaggctggcccatatatccacgtaacagatacacttctctctttctcattgttaattcagtaattctaatactgtctgttataattaccattttggtacagcacaagtaccctaatttagttcttttggactaatacaattcaggaaagaaaaaacccaaaaaccaacctcattcacatatggctttttttttaaccaataacaattaggtgtacttctattttaaaacatttcagaaaaaaatatatgttatagcaatactcttactcaaaagaagaaatttcctaactctatcagataaactcatctttagtataaataagcattatttgcaggttgccacaggtggacttttagtaagtaacctaacccatgtttcagcttctaaatctgcaaaatgagcaaggtacagtagcacatttttaggtgattcttagtaactccagtagccttcattagttaaaaacattattattttttgcatgctgcttcgactctaaatatctggttttccctgtctttttggtttactacttccccagattcagaacagaggagtaactaggggatctgattttagaggccttaattttctgttcatggactgttaaaagtaaaaccaaactttcaaaagggataaacctaaatatttacttgttatcattagagagggaacatcaaatgctgggacatcattactaaccaatagcatcagacactggatttaatggataatcacaatggtcgtaatgtatacaaagacatatataccactttctagtataaatttttcaaaaaatacaataataatataatttataaagaacactcttctatgaacaaccaccaccaccaaaaaaaaaaaagccctcagaaaatttctcacaaataaggcaactaatgcctgatatctcaaaatcctttacaaaaggagatagttctagtcaaggagttttgggtatgttacttttttttcttctttttcttttcatctgcctccatcttaagtgcaatttcttcagctgtaagagctcccagtttcttattctttgctttcttaaccttttccttgatgctggccacatcaattttagtttcagtagaagctagacaaattaaaagcacaacacatgtaatactttagattttaccaagtaaaacaaagaatatatgtttaacaaagaatatatgtttaaggcagttaacttcagagtattcttataattgaataattgaaaggtgatcacagtataaaatataaaaacacttgcctaaagcagttagaaatttcttcagattaagataaaacaaatcataaaatactttatatattagtacaagtatacataaaaatggcataaatggcataattgaaccaattactggattcaactatattaagactatttccttaaatcctacttcagactaaattattttacctacattcttttccatattttggaacttctgagtcattattttccatcttgcacattaaaataatttaaaattacatgtatcccttctcaataagtttaatcagctaaccctaagctagaggtcaaaatctacttcctctaatatcaaaacgaaaatttaaagttttccaaatattaattcaatattaattgaatattcaatgaattcatttaatgttagattaattcattgaatattaattcaatgaatgactaattaatagtattttaacaagattttggtatatttaacaacattttggtaataaagacaataatttgagagtgtgtggaagtccccctaatagaagccaactatctaatcaatgccaaaagtgtgaacaaaatagagaaaggaagcagtgaaaaagaatgcaactttttcttaccattcaaagtacaggatcacagcataaaagaatcataagataaaacatcaaactacccagcaacctgagaagcacagagtgttaaagcctccaccgtgtggagaaactaaattagggtaactagctattgagtatattgagtaccttcaaagcactcaactgacaggttttacagactggaaattataatacttatgacatttctaccttttatataaccaataatctaccatagaatgtagtatttttaaagctattaacaagcaatatattaaaataataatgtattatatctgtttctgacccagtctatgtacaatattgctggtgagccctctcccttcagtgtgtcactgttcactttggagggttactttaggaagaggataagtgttaccacaggggaaaaaaatgcagaagaggatgcatcagaagaaatggcatgacaatgttttctcttagtgtcttttaaatactaggttagtgcgaaagtgatttctgccatttaaaaaccacaatcactttcgcactaatagctcctgaataagacctgtcagcatcctttagtctaaggtgatgagaaatccatgttaccgatatagaagccaaactctaagccaagatcacataaagagaagaaaaagtacaacttctgataattcctctttgagaggcatgacagcagagctcagggatcttcttgcatttctacagaagatgcactggctgccctgggtttgtatctttcacaacaaagagtcttttccaagcacagaccagaggtcaggagaggactgtcaatccagtttgcactgaaataggcattagctgcctctaaattataaattatctcagccatcccttgtccttaggattagtaattaatgaaatgctaagagaactgatgaaaagatacaactgtttcttaaaaagattcagacaaatttattatgggtttacttttcctaattaataaagacttttacatcatagaaagcattaccttccttaggtttcacaattggtttttccttaggtggaataaatgctttgtttctttcctcttgtctcttactgatggcttctgcttgtttagcctacattaataaataaaaaatatatcagttaaatgta

SEQ ID NO: 372528 - DNA, 3388 bp, Homo sapiens
ctctgttttctcaaagctgaagtcggctaggtttgcaaagctgtgggctgagcactcaggcaatcacactctcagaaactgcggcggctctggactgcagcctcccaaggctccatgccagacaaagcatgcgtgtcacacttgctacaatagcctggatggtttcttttgtctccaattattcacacacagcaaatattttgccagatatcgaaaatgaagatttcatcaaagactgcgttcgaatccataacaagttccgatcagaggtgaaaccaacagccagtgatatgctatacatgacttgggacccagcactagcccaaattgcaaaagcatgggccagcaattgccagttttcacataatacacggctgaagccaccccacaagctgcacccaaacttcacttcactgggagagaacatctggactgggtctgtgcccattttttctgtgtcttccgccatcacaaactggtatgacgaaatccaggactatgacttcaagactcggatatgcaaaaaagtctgtggccactacactcaggttgtttgggcagatagttacaaagttggctgcgcagttcaattttgccctaaagtttctggctttgacgctctttccaatggagcacattttatatgcaactacggaccaggagggaattacccaacttggccatataagagaggagccacctgcagtgcctgccccaataatgacaagtgtttggacaatctctgtgttaaccgacagcgagaccaagtcaaacgttactactctgttgtatatccaggctggcccatatatccacgtaacagatacacttctctctttctcattgttaattcagtaattctaatactgtctgttataattaccattttggtacagcacaagtaccctaatttagttcttttggactaatacaattcaggaaagaaaaaacccaaaaaccaacctcattcacatatggctttttttttaaccaataacaattaggtgtacttctattttaaaacatttcagaaaaaaatatatgttatagcaatactcttactcaaaagaagaaatttcctaactctatcagataaactcatctttagtataaataagcattatttgcaggttgccacaggtggacttttagtaagtaacctaacccatgtttcagcttctaaatctgcaaaatgagcaaggtacagtagcacatttttaggtgattcttagtaactccagtagccttcattagttaaaaacattattattttttgcatgctgcttcgactctaaatatctggttttccctgtctttttggtttactacttccccagattcagaacagaggagtaactaggggatctgattttagaggccttaattttctgttcatggactgttaaaagtaaaaccaaactttcaaaagggataaacctaaatatttacttgttatcattagagagggaacatcaaatgctgggacatcattactaaccaatagcatcagacactggatttaatggataatcacaatggtcgtaatgtatacaaagacatatataccactttctagtataaatttttcaaaaaatacaataataatataatttataaagaacactcttctatgaacaaccaccaccaccaaaaaaaaaaaagccctcagaaaatttctcacaaataaggcaactaatgcctgatatctcaaaatcctttacaaaaggagatagttctagtcaaggagttttgggtatgttacttttttttcttctttttcttttcatctgcctccatcttaagtgcaatttcttcagctgtaagagctcccagtttcttattctttgctttcttaaccttttccttgatgctggccacatcaattttagtttcagtagaagctagacaaattaaaagcacaacacatgtaatactttagattttaccaagtaaaacaaagaatatatgtttaacaaagaatatatgtttaaggcagttaacttcagagtattcttataattgaataattgaaaggtgatcacagtataaaatataaaaacacttgcctaaagcagttagaaatttcttcagattaagataaaacaaatcataaaatactttatatattagtacaagtatacataaaaatggcataaatggcataattgaaccaattactggattcaactatattaagactatttccttaaatcctacttcagactaaattattttacctacattcttttccatattttggaacttctgagtcattattttccatcttgcacattaaaataatttaaaattacatgtatcccttctcaataagtttaatcagctaaccctaagctagaggtcaaaatctacttcctctaatatcaaaacgaaaatttaaagttttccaaatattaattcaatattaattgaatattcaatgaattcatttaatgttagattaattcattgaatattaattcaatgaatgactaattaatagtattttaacaagattttggtatatttaacaacattttggtaataaagacaataatttgagagtgtgtggaagtccccctaatagaagccaactatctaatcaatgccaaaagtgtgaacaaaatagagaaaggaagcagtgaaaaagaatgcaactttttcttaccattcaaagtacaggatcacagcataaaagaatcataagataaaacatcaaactacccagcaacctgagaagcacagagtgttaaagcctccaccgtgtggagaaactaaattagggtaactagctattgagtatattgagtaccttcaaagcactcaactgacaggttttacagactggaaattataatacttatgacatttctaccttttatataaccaataatctaccatagaatgtagtatttttaaagctattaacaagcaatatattaaaataataatgtattatatctgtttctgacccagtctatgtacaatattgctggtgagccctctccccccgggtataatctcttccggcttctttcactttttgtgatgttgggacggcggttccccctctctgactcctgtgcacagacacttgtttgctgccatcctcctttgcttttcgggggctcggtccctgcgtccagatggttttctgggtgactccaagaagtacatctaggtcgcagcgttttcttttgatattgaagctcacatctcgcactgggctcagtcttcaagcacgctttgttaagcacgatggatggcaaaagcaatcgcttcgccgaggacctgtgcagcttgctgccgtagtgtctgtacggctcgtagtgaagtacatatcatgtgcacaggtgatcgttccgggttagggatgcgagtgccagagtat

SEQ ID NO: 372529 - DNA, 3057 bp, Homo sapiens
ctctgttttctcaaagctgaagtcggctaggtttgcaaagctgtgggctgagcactcaggcaatcacactctcagaaactgcggcggctctggactgcagcctcccaaggctccatgccagacaaagcatgcgtgtcacacttgctacaatagcctggatggtttcttttgtctccaattattcacacacagcaaatattttgccagatatcgaaaatgaagatttcatcaaagactgcgttcgaatccataacaagttccgatcagaggtgaaaccaacagccagtgatatgctatacatgacttgggacccagcactagcccaaattgcaaaagcatgggccagcaattgccagttttcacataatacacggctgaagccaccccacaagctgcacccaaacttcacttcactgggagagaacatctggactgggtctgtgcccattttttctgtgtcttccgccatcacaaactggtatgacgaaatccaggactatgacttcaagactcggatatgcaaaaaagtctgtggccactacactcaggttgtttgggcagatagttacaaagttggctgcgcagttcaattttgccctaaagtttctggctttgacgctctttccaatggagcacattttatatgcaactacggaccaggagggaattacccaacttggccatataagagaggagccacctgcagtgcctgccccaataatgacaagtgtttggacaatctctgtgttaaccgacagcgagaccaagtcaaacgttactactctgttgtatatccaggctggcccatatatccacgtaacagatacacttctctctttctcattgttaattcagtaattctaatactgtctgttataattaccattttggtacagcacaagtaccctaatttagttcttttggactaatacaattcaggaaagaaaaaacccaaaaaccaacctcattcacatatggctttttttttaaccaataacaattaggtgtacttctattttaaaacatttcagaaaaaaatatatgttatagcaatactcttactcaaaagaagaaatttcctaactctatcagataaactcatctttagtataaataagcattatttgcaggttgccacaggtggacttttagtaagtaacctaacccatgtttcagcttctaaatctgcaaaatgagcaaggtacagtagcacatttttaggtgattcttagtaactccagtagccttcattagttaaaaacattattattttttgcatgctgcttcgactctaaatatctggttttccctgtctttttggtttactacttccccagattcagaacagaggagtaactaggggatctgattttagaggccttaattttctgttcatggactgttaaaagtaaaaccaaactttcaaaagggataaacctaaatatttacttgttatcattagagagggaacatcaaatgctgggacatcattactaaccaatagcatcagacactggatttaatggataatcacaatggtcgtaatgtatacaaagacatatataccactttctagtataaatttttcaaaaaatacaataataatataatttataaagaacactcttctatgaacaaccaccaccaccaaaaaaaaaaaagccctcagaaaatttctcacaaataaggcaactaatgcctgatatctcaaaatcctttacaaaaggagatagttctagtcaaggagttttgggtatgttacttttttttcttctttttcttttcatctgcctccatcttaagtgcaatttcttcagctgtaagagctcccagtttcttattctttgctttcttaaccttttccttgatgctggccacatcaattttagtttcagtagaagctagacaaattaaaagcacaacacatgtaatactttagattttaccaagtaaaacaaagaatatatgtttaacaaagaatatatgtttaaggcagttaacttcagagtattcttataattgaataattgaaaggtgatcacagtataaaatataaaaacacttgcctaaagcagttagaaatttcttcagattaagataaaacaaatcataaaatactttatatattagtacaagtatacataaaaatggcataaatggcataattgaaccaattactggattcaactatattaagactatttccttaaatcctacttcagactaaattattttacctacattcttttccatattttggaacttctgagtcattattttccatcttgcacattaaaataatttaaaattacatgtatcccttctcaataagtttaatcagctaaccctaagctagaggtcaaaatctacttcctctaatatcaaaacgaaaatttaaagttttccaaatattaattcaatattaattgaatattcaatgaattcatttaatgttagattaattcattgaatattaattcaatgaatgactaattaatagtattttaacaagattttggtatatttaacaacattttggtaataaagacaataatttgagagtgtgtggaagtccccctaatagaagccaactatctaatcaatgccaaaagtgtgaacaaaatagagaaaggaagcagtgaaaaagaatgcaactttttcttaccattcaaagtacaggatcacagcataaaagaatcataagataaaacatcaaactacccagcaacctgagaagcacagagtgttaaagcctccaccgtgtggagaaactaaattagggtaactagctattgagtatattgagtaccttcaaagcactcaactgacaggttttacagactggaaattataatacttatgacatttctaccttttatataaccaataatctaccatagaatgtagtatttttaaagctattaacaagcaatatattaaaataataatgtattatatctgtttctgacccagtctatgtacaatattgctggtgagccctctccctccgccccggtatcgtgcgcttactttgtagcttagagacaagttatttgg

SEQ ID NO: 372530 - DNA, 3403 bp, Homo sapiens
  misc_feature (3128)..(3128): n is a, c, g, or t
  misc_feature (3131)..(3131): n is a, c, g, or t
  misc_feature (3136)..(3136): n is a, c, g, or t
  misc_feature (3138)..(3138): n is a, c, g, or t
  misc_feature (3140)..(3140): n is a, c, g, or t
  misc_feature (3143)..(3143): n is a, c, g, or t
  misc_feature (3149)..(3149): n is a, c, g, or t
  misc_feature (3152)..(3152): n is a, c, g, or t
  misc_feature (3169)..(3169): n is a, c, g, or t
ctctgttttctcaaagctgaagtcggctaggtttgcaaagctgtgggctgagcactcaggcaatcacactctcagaaactgcggcggctctggactgcagcctcccaaggctccatgccagacaaagcatgcgtgtcacacttgctacaatagcctggatggtttcttttgtctccaattattcacacacagcaaatattttgccagatatcgaaaatgaagatttcatcaaagactgcgttcgaatccataacaagttccgatcagaggtgaaaccaacagccagtgatatgctatacatgacttgggacccagcactagcccaaattgcaaaagcatgggccagcaattgccagttttcacataatacacggctgaagccaccccacaagctgcacccaaacttcacttcactgggagagaacatctggactgggtctgtgcccattttttctgtgtcttccgccatcacaaactggtatgacgaaatccaggactatgacttcaagactcggatatgcaaaaaagtctgtggccactacactcaggttgtttgggcagatagttacaaagttggctgcgcagttcaattttgccctaaagtttctggctttgacgctctttccaatggagcacattttatatgcaactacggaccaggagggaattacccaacttggccatataagagaggagccacctgcagtgcctgccccaataatgacaagtgtttggacaatctctgtgttaaccgacagcgagaccaagtcaaacgttactactctgttgtatatccaggctggcccatatatccacgtaacagatacacttctctctttctcattgttaattcagtaattctaatactgtctgttataattaccattttggtacagcacaagtaccctaatttagttcttttggactaatacaattcaggaaagaaaaaacccaaaaaccaacctcattcacatatggctttttttttaaccaataacaattaggtgtacttctattttaaaacatttcagaaaaaaatatatgttatagcaatactcttactcaaaagaagaaatttcctaactctatcagataaactcatctttagtataaataagcattatttgcaggttgccacaggtggacttttagtaagtaacctaacccatgtttcagcttctaaatctgcaaaatgagcaaggtacagtagcacatttttaggtgattcttagtaactccagtagccttcattagttaaaaacattattattttttgcatgctgcttcgactctaaatatctggttttccctgtctttttggtttactacttccccagattcagaacagaggagtaactaggggatctgattttagaggccttaattttctgttcatggactgttaaaagtaaaaccaaactttcaaaagggataaacctaaatatttacttgttatcattagagagggaacatcaaatgctgggacatcattactaaccaatagcatcagacactggatttaatggataatcacaatggtcgtaatgtatacaaagacatatataccactttctagtataaatttttcaaaaaatacaataataatataatttataaagaacactcttctatgaacaaccaccaccaccaaaaaaaaaaaagccctcagaaaatttctcacaaataaggcaactaatgcctgatatctcaaaatcctttacaaaaggagatagttctagtcaaggagttttgggtatgttacttttttttcttctttttcttttcatctgcctccatcttaagtgcaatttcttcagctgtaagagctcccagtttcttattctttgctttcttaaccttttccttgatgctggccacatcaattttagtttcagtagaagctagacaaattaaaagcacaacacatgtaatactttagattttaccaagtaaaacaaagaatatatgtttaacaaagaatatatgtttaaggcagttaacttcagagtattcttataattgaataattgaaaggtgatcacagtataaaatataaaaacacttgcctaaagcagttagaaatttcttcagattaagataaaacaaatcataaaatactttatatattagtacaagtatacataaaaatggcataaatggcataattgaaccaattactggattcaactatattaagactatttccttaaatcctacttcagactaaattattttacctacattcttttccatattttggaacttctgagtcattattttccatcttgcacattaaaataatttaaaattacatgtatcccttctcaataagtttaatcagctaaccctaagctagaggtcaaaatctacttcctctaatatcaaaacgaaaatttaaagttttccaaatattaattcaatattaattgaatattcaatgaattcatttaatgttagattaattcattgaatattaattcaatgaatgactaattaatagtattttaacaagattttggtatatttaacaacattttggtaataaagacaataatttgagagtgtgtggaagtccccctaatagaagccaactatctaatcaatgccaaaagtgtgaacaaaatagagaaaggaagcagtgaaaaagaatgcaactttttcttaccattcaaagtacaggatcacagcataaaagaatcataagataaaacatcaaactacccagcaacctgagaagcacagagtgttaaagcctccaccgtgtggagaaactaaattagggtaactagctattgagtatattgagtaccttcaaagcactcaactgacaggttttacagactggaaattataatacttatgacatttctaccttttatataaccaataatctaccatagaatgtagtatttttaaagctattaacaagcaatatattaaaataataatgtattaaaaaaaaaaaaaaaaaaaaaaaaaaaaaaaaaaaaaaaaaaaaaaaaaaaaaaaaaaaaaaaaaaaaaaaaaaaaaaaaaaaaaaaaaaaaaaaaaaaaaaaaaaaaaaaaaaaaaaaaaaaaaaaaaaaaaaaaaaaaaaaaaaaaaaaaaaaaaaaaaaaaaatttttaanaanataancnanatntttttnaantttaaaaatttttttantgggccccaatttagcgctcttttgggacataacccccatatggggcgtgttataaaattcaggggggggctttaatacacctggtggtgggaaacactcggggttcccccaattaaactcttgggaaaaaacccccttttccacgggtggggtaaaacaaaagggcccccacggggtcctttcaaaaaggtgtccccttaatgggaaagggaaattgtgggccaaattttgtt

SEQ ID NO: 372531 - DNA, 3796 bp, Homo sapiens
ctctgttttctcaaagctgaagtcggctaggtttgcaaagctgtgggctgagcactcaggcaatcacactctcagaaactgcggcggctctggactgcagcctcccaaggctccatgccagacaaagcatgcgtgtcacacttgctacaatagcctggatggtttcttttgtctccaattattcacacacagcaaatattttgccagatatcgaaaatgaagatttcatcaaagactgcgttcgaatccataacaagttccgatcagaggtgaaaccaacagccagtgatatgctatacatgacttgggacccagcactagcccaaattgcaaaagcatgggccagcaattgccagttttcacataatacacggctgaagccaccccacaagctgcacccaaacttcacttcactgggagagaacatctggactgggtctgtgcccattttttctgtgtcttccgccatcacaaactggtatgacgaaatccaggactatgacttcaagactcggatatgcaaaaaagtctgtggccactacactcaggttgtttgggcagatagttacaaagttggctgcgcagttcaattttgccctaaagtttctggctttgacgctctttccaatggagcacattttatatgcaactacggaccaggagggaattacccaacttggccatataagagaggagccacctgcagtgcctgccccaataatgacaagtgtttggacaatctctgtgtaaccgaaggagaacaagtccaccgttactactctgttgtatatccaggctggcccatatatccacgtaacagatacacttctctctttctcattgttaattcagtaattctaatactgtctgttataattaccattttggtacagcacaagtaccctaatttagttcttttggactaatacaattcaggaaagaaaaaacccaaaaaccaacctcattcacatatggctttttttttaaccaataacaattaggtgtacttctattttaaaacatttcagaaaaaaatatatgttatagcaatactcttactcaaaagaagaaatttcctaactctatcagataaactcatctttagtataaataagcattatttgcaggttgccacaggtggacttttagtaagtaacctaacccatgtttcagcttctaaatctgcaaaatgagcaaggtacagtagcacatttttaggtgattcttagtaactccagtagccttcattagttaaaaacattattattttttgcatgctgcttcgactctaaatatctggttttccctgtctttttggtttactacttccccagattcagaacagaggagtaactaggggatctgattttagaggccttaattttctgttcatggactgttaaaagtaaaaccaaactttcaaaagggataaacctaaatatttacttgttatcattagagagggaacatcaaatgctgggacatcattactaaccaatagcatcagacactggatttaatggataatcacaatggtcgtaatgtatacaaagacatatataccactttctagtataaatttttcaaaaaatacaataataatataatttataaagaacactcttctatgaacaaccaccaccaccaaaaaaaaaaaagccctcagaaaatttctcacaaataaggcaactaatgcctgatatctcaaaatcctttacaaaaggagatagttctagtcaaggagttttgggtatgttacttttttttcttctttttcttttcatctgcctccatcttaagtgcaatttcttcagctgtaagagctcccagtttcttattctttgctttcttaaccttttccttgatgctggccacatcaattttagtttcagtagaagctagacaaattaaaagcacaacacatgtaatactttagattttaccaagtaaaacaaagaatatatgtttaacaaagaatatatgtttaaggcagttaacttcagagtattcttataattgaataattgaaaggtgatcacagtataaaatataaaaacacttgcctaaagcagttagaaatttcttcagattaagataaaacaaatcataaaatactttatatattagtacaagtatacataaaaatggcataaatggcataattgaaccaattactggattcaactatattaagactatttccttaaatcctacttcagactaaattattttacctacattcttttccatattttggaacttctgagtcattattttccatcttgcacattaaaataatttaaaattacatgtatcccttctcaataagtttaatcagctaaccctaagctagaggtcaaaatctacttcctctaatatcaaaacgaaaatttaaagttttccaaatattaattcaatattaattgaatattcaatgaattcatttaatgttagattaattcattgaatattaattcaatgaatgactaattaatagtattttaacaagattttggtatatttaacaacattttggtaataaagacaataatttgagagtgtgtggaagtccccctaatagaagccaactatctaatcaatgccaaaagtgtgaacaaaatagagaaaggaagcagtgaaaaagaatgcaactttttcttaccattcaaagtacaggatcacagcataaaagaatcataagataaaacatcaaactacccagcaacctgagaagcacagagtgttaaagcctccaccgtgtggagaaactaaattagggtaactagctattgagtatattgagtaccttcaaagcactcaactgacaggttttacagactggaaattataatacttatgacatttctaccttttatataaccaataatctaccatagaatgtagtatttttaaagctattaacaagcaatatattaaaataataatgtattatatctgtttctgacccagtctatgtacaatattgctggtgagccctctcccttcagtgtgtcactgttcactttggagggttactttaggaagaggataagtgttaccacaggggaaaaaaatgcagaagaggatgcatcagaagaaatggcatgacaatgttttctcttagtgtcttttaaatactaggttagtgcgaaagtgatttctgccatttaaaaaccacaatcactttcgcactaatagctcctgaataagacctgtcagcatcctttagtctaaggtgatgagaaatccatgttaccgatatagaagccaaactctaagccaagatcacataaagagaagaaaaagtacaacttctgataattcctctttgagaggcatgacagcagagctcagggatcttcttgcatttctacagaagatgcactggctgccctgggtttgtatctttcacaacaaagagtcttttccaagcacagaccagaggtcaggagaggactgtcaatccagtttgcactgaaataggcattagctgcctctaaattataaattatctcagccatcccttgtccttaggattagtaattaatgaaatgctaagagaactgatgaaaagatacaactgtttcttaaaaagattcagacaaatttattatgggtttacttttcctaattaataaagacttttacatcatagaaagcattaccttccttaggtttcacaattggtttttccttaggtggaataaatgctttgtttctttcctcttgtctcttactgatggcttctgcttgtttagcctacattaataaataaaaaatatatcagttaaatgta

SEQ ID NO: 372532 - DNA, 3547 bp, Homo sapiens
tgtctctaaatttactttttttgctgctgacaaagtactgagttgctcagacttgggacccagcactagcccaaattgcaaaagcatgggccagcaattgccagttttcacataatacacggctgaagccaccccacaagctgcacccaaacttcacttcactgggagagaacatctggactgggtctgtgcccattttttctgtgtcttccgccatcacaaactggtatgacgaaatccaggactatgacttcaagactcggatatgcaaaaaagtctgtggccactacactcaggttgtttgggcagatagttacaaagttggctgcgcagttcaattttgccctaaagtttctggctttgacgctctttccaatggagcacattttatatgcaactacggaccaggagggaattacccaacttggccatataagagaggagccacctgcagtgcctgccccaataatgacaagtgtttggacaatctctgtgttaaccgacagcgagaccaagtcaaacgttactactctgttgtatatccaggctggcccatatatccacgtaacagatacacttctctctttctcattgttaattcagtaattctaatactgtctgttataattaccattttggtacagcacaagtaccctaatttagttcttttggactaatacaattcaggaaagaaaaaacccaaaaaccaacctcattcacatatggctttttttttaaccaataacaattaggtgtacttctattttaaaacatttcagaaaaaaatatatgttatagcaatactcttactcaaaagaagaaatttcctaactctatcagataaactcatctttagtataaataagcattatttgcaggttgccacaggtggacttttagtaagtaacctaacccatgtttcagcttctaaatctgcaaaatgagcaaggtacagtagcacatttttaggtgattcttagtaactccagtagccttcattagttaaaaacattattattttttgcatgctgcttcgactctaaatatctggttttccctgtctttttggtttactacttccccagattcagaacagaggagtaactaggggatctgattttagaggccttaattttctgttcatggactgttaaaagtaaaaccaaactttcaaaagggataaacctaaatatttacttgttatcattagagagggaacatcaaatgctgggacatcattactaaccaatagcatcagacactggatttaatggataatcacaatggtcgtaatgtatacaaagacatatataccactttctagtataaatttttcaaaaaatacaataataatataatttataaagaacactcttctatgaacaaccaccaccaccaaaaaaaaaaaagccctcagaaaatttctcacaaataaggcaactaatgcctgatatctcaaaatcctttacaaaaggagatagttctagtcaaggagttttgggtatgttacttttttttcttctttttcttttcatctgcctccatcttaagtgcaatttcttcagctgtaagagctcccagtttcttattctttgctttcttaaccttttccttgatgctggccacatcaattttagtttcagtagaagctagacaaattaaaagcacaacacatgtaatactttagattttaccaagtaaaacaaagaatatatgtttaacaaagaatatatgtttaaggcagttaacttcagagtattcttataattgaataattgaaaggtgatcacagtataaaatataaaaacacttgcctaaagcagttagaaatttcttcagattaagataaaacaaatcataaaatactttatatattagtacaagtatacataaaaatggcataaatggcataattgaaccaattactggattcaactatattaagactatttccttaaatcctacttcagactaaattattttacctacattcttttccatattttggaacttctgagtcattattttccatcttgcacattaaaataatttaaaattacatgtatcccttctcaataagtttaatcagctaaccctaagctagaggtcaaaatctacttcctctaatatcaaaacgaaaatttaaagttttccaaatattaattcaatattaattgaatattcaatgaattcatttaatgttagattaattcattgaatattaattcaatgaatgactaattaatagtattttaacaagattttggtatatttaacaacattttggtaataaagacaataatttgagagtgtgtggaagtccccctaatagaagccaactatctaatcaatgccaaaagtgtgaacaaaatagagaaaggaagcagtgaaaaagaatgcaactttttcttaccattcaaagtacaggatcacagcataaaagaatcataagataaaacatcaaactacccagcaacctgagaagcacagagtgttaaagcctccaccgtgtggagaaactaaattagggtaactagctattgagtatattgagtaccttcaaagcactcaactgacaggttttacagactggaaattataatacttatgacatttctaccttttatataaccaataatctaccatagaatgtagtatttttaaagctattaacaagcaatatattaaaataataatgtattatatctgtttctgacccagtctatgtacaatattgctggtgagccctctcccttcagtgtgtcactgttcactttggagggttactttaggaagaggataagtgttaccacaggggaaaaaaatgcagaagaggatgcatcagaagaaatggcatgacaatgttttctcttagtgtcttttaaatactaggttagtgcgaaagtgatttctgccatttaaaaaccacaatcactttcgcactaatagctcctgaataagacctgtcagcatcctttagtctaaggtgatgagaaatccatgttaccgatatagaagccaaactctaagccaagatcacataaagagaagaaaaagtacaacttctgataattcctctttgagaggcatgacagcagagctcagggatcttcttgcatttctacagaagatgcactggctgccctgggtttgtatctttcacaacaaagagtcttttccaagcacagaccagaggtcaggagaggactgtcaatccagtttgcactgaaataggcattagctgcctctaaattataaattatctcagccatcccttgtccttaggattagtaattaatgaaatgctaagagaactgatgaaaagatacaactgtttcttaaaaagattcagacaaatttattatgggtttacttttcctaattaataaagacttttacatcatagaaagcattaccttccttaggtttcacaattggtttttccttaggtggaataaatgctttgtttctttcctcttgtctcttactgatggcttctgcttgtttagcctacattaataaataaaaaatatatcagttaaatgta

SEQ ID NO: 372533 - DNA, 477 bp, Homo sapiens
ctctgttttctcaaagctgaagtcggctaggtttgcaaagctgtgggctgagcactcaggcaatcacactctcagaaactgcggcggctctggactgcagcctcccaaggctccatgccagacaaagcatgcgtgtcacacttgctacaatagcctggatggtttcttttgtctccaattattcacacacagcaaatattttgccagatatcgaaaatgaagatttcatcaaagactgcgttcgaatccataacaagttccgatcagaggtgaaaccaacagccagtgatatgctatacatgacttgggacccagcactagcccaaattgcaaaagcatgggccagcaattgccagttttcacataatacacggctgaagccaccccacaagctgcacccaaacttcacttcactgatgggacgaagactggcgcagtcttcttccatcaggaaagcagtgctgatgataaggaccc

SEQ ID NO: 372534 - DNA, 481 bp, Homo sapiens
agattccgtcgcttcttccggagccgtacgtggcaccgccccgctcgcgggcggccgcggggcttgctgggaagagaggcgaagccaggtcacctttcaaggacccagaagtagggttttggcctaggtaacggggcagagatgtggttcgagattctccccggactctccgtcatgggcgtgtgcttgttgattccaggactggctactgcgtacatccacaggttcactaacgggggcaaggaaaaaagggttgctcattttgggtatcactggagtctgatggaaagagataggcgcatctctggagttgatcgttactatgtgtcaaagggtttggagaacattgattaaggaagcattttcctgattgatgaaaaaaataactcagttatggccatctacccctgctagaaggttacagtgtattatgtagcatgcaatgtgttatgtagtgcttaataaaaataaaatgaaaaaa

SEQ ID NO: 372535 - DNA, 589 bp, Homo sapiens
  misc_feature (19)..(19): n is a, c, g, or t
  misc_feature (36)..(36): n is a, c, g, or t
  misc_feature (42)..(42): n is a, c, g, or t
  misc_feature (208)..(208): n is a, c, g, or t
aaggcgacaggcttaagcnccatgcccactaaggtncgtctnacattatagattgtaaaattccaggtcacggctacatacatctaatatggtgattcattttctcctcaagaagctgtttttaaatcaatggttcatcttacagtcaactgtgtcttagattcaaatatggcccatggatttgcaggcagtcacttgacctcgtgcngaattcgggcacgaggttttggcctaggtaacggggcagagatgtggttcgagattctccccggactctccgtcatgggcgtgtgcttgttgattccaggactggctactgcgtacatccacaggttcactaacgggggcaaggaaaaaagggttgctcattttgggtatcactggagtctgatggaaagagataggcgcatctctggagttgatcgttactatgtgtcaaagggtttggagaacattgattaaggaagcattttcctgattgatgaaaaaaataactcagttatggccatctacccctgctagaaggttacagtgtattatgtagcatgcaatgtgttatgtagtgcttaataaaaataaaatgaaaaaa

SEQ ID NO: 372536 - DNA, 741 bp, Homo sapiens
  misc_feature (553)..(553): n is a, c, g, or t
  misc_feature (557)..(557): n is a, c, g, or t
agattccgtcgcttcttccggagccgtacgtggcaccgccccgctcgcgggcggccgcggggcttgctgggaagagaggcgaagccaggtcacctttcaaggacccagaagtagggttttggcctaggtaacggggcagagatgtggttcgagattctccccggactctccgtcatgggcgtgtgcttgttgattccaggactggctactgcgtacatccacaggttcactaacgggggcaaggaaaaaagggttgctcattttgggtatcactggagtctgatggaaagagataggcgcatctctggagttgatcgttactatgtgtcaaagggtttggagaacattgattaaggaagcattttcctgattgatgaaaaaaataactcagttatggccatctacccctgctagaaggttacagtgtattatgtagcatgcaatgtgttatgtagtgcttaataaaaataaaatgaaaaaaaaaaaaaaaaaaaaaaaaaaaaaaaaattttgtgggggcttgggccctcggaaaaagttttttagaacattntgtntgggggggcgggggcccatgtttgggtaagtgaacaagtgggcacataagggtgttccaaagggaaactgtgggccatggaaataggggtgggggtttctccgcatttaaaagacgggccgggggggaaacgagaggtgttttgaacaatttccaaaggggagtttcaggaggggaataacggg

SEQ ID NO: 372537 - DNA, 859 bp, Homo sapiens
  misc_feature (571)..(571): n is a, c, g, or t
  misc_feature (672)..(672): n is a, c, g, or t
agattccgtcgcttcttccggagccgtacgtggcaccgccccgctcgcgggcggccgcggggcttgctgggaagagaggcgaagccaggtcacctttcaaggacccagaagtagggttttggcctaggtaacggggcagagatgtggttcgagattctccccggactctccgtcatgggcgtgtgcttgttgattccaggactggctactgcgtacatccacaggttcactaacgggggcaaggaaaaaagggttgctcattttgggtatcactggagtctgatggaaagagataggcgcatctctggagttgatcgttactatgtgtcaaagggtttggagaacattgattaaggaagcattttcctgattgatgaaaaaaataactcagttatggccatctacccctgctagaaggttacagtgtattatgtagcatgcaatgtgttatgtagtgcttaataaaaataaaatgaaaaaaaaaaaaaaaaaaaaaaaaaaaaaaaaaaaaaaaaaaaaaaaaaaaaaaaaaaaaaaaaaaaaaaaaaaaaaaaaaaaaaaaaaaaaaaanccctttttggcccccttggcccaattgatttttaatttgaacaagttttttgtttgggcccaaatttgggcctctttggccaattcccccttatggggggngtattaaaattcactggcccgtgtgttaaaaccgtgggaatggaaaaaacctgggggtacccaactttaatcgtttggaaaaaatcccttttgccaggttggtaattacgaaaaggcccgacccgagacgcctttcaaaagttggccaccctgaagggaaatgaaaattggaccgttatttttgtta

SEQ ID NO: 372538 - DNA, 798 bp, Homo sapiens
agattccgtcgcttcttccggagccgtacgtggcaccgccccgctcgcgggcggccgcggggcttgctgggaagagaggcgaagccaggtcacctttcaaggacccagaagtagggttttggcctaggtaacggggcagagatgtggttcgagattctccccggactctccgtcatgggcgtgtgcttgttgattccaggactggctactgcgtacatccacaggttcactaacgggggcaaggaaaaaagggttgctcattttgggtatcactggagtctgatggaaagagataggcgcatctctggagttgatcgttactatgtgtcaaagggtttggagaacattgattaaggaagcattttcctgattgatgaaaaaaataactcagttatggccatctacccctgctagaaggttacagtgtattatgtagcatgcaatgtgttatgtagtgcttaataaaaataaaatgaaaaaaaaaaaaaaaaaaaaatttttggggggcttgggcctgaaaaatttttaaaacatttggtggggccgcgggggcgcccaagagggaacagtggagcaccagtggggccacacagctgtgtctcccccgaaggaaagacccctggcgtccacggaccagcggcgtgtcggagtttccttccccacagttaaaaagaagccgccggggggcggcaaccaagacccgtgtttctggaacaaattcccaaatggcggcgcccggaggggcacaacggggatccaaccaacgggggtgtccaaggagaagccgcgaatatccag

SEQ ID NO: 372539 - DNA, 806 bp, Homo sapiens
agattccgtcgcttcttccggagccgtacgtggcaccgccccgctcgcgggcggccgcggggcttgctgggaagagaggcgaagccaggtcacctttcaaggacccagaagtagggttttggcctaggtaacggggcagagatgtggttcgagattctccccggactctccgtcatgggcgtgtgcttgttgattccaggactggctactgcgtacatccacaggttcactaacgggggcaaggaaaaaagggttgctcattttgggtatcactggagtctgatggaaagagataggcgcatctctggagttgatcgttactatgtgtcaaagggtttggagaacattgattaaggaagcattttcctgattgatgaaaaaaataactcagttatggccatctacccctgctagaaggttacagtgtattatgtagcatgcaatgtgttatgtagtgcttaataaaaataaaatgaaaaaaatgcatttcttttttttaaatatgttacacaaaatcgaaaaaaaaaaaaaaaaaaaaaaaaaaaattttgttgcggggccgcttggggcccgaaagaaagttgtttaacaccacttcgggggggccggcgcgcagaaggtaatgcgaaccctgggccaaggtggctcccaagaaaacccggggcaggaacaggtggctggtttcccaccaaaaaaaacgcgggggaaccgagtggtggaccaatccgaggctcagcgccaccgctctacacagggcaaggagtgaaatacacgcggcggcagagagaacaccaacaacgcgacac

SEQ ID NO: 372540 - DNA, 566 bp, Homo sapiens
agattccgtcgcttcttccggagccgtacgtggcaccgccccgctcgcgggcggccgcggggcttgctgggaagagaggcgaagccaggtcacctttcaaggacccagaagtagggttttggcctaggtaacggggcagagatgtggttcgagattctccccggactctccgtcatgggcgtgtgcttgttgattccaggactggctactgcgtacatccacaggttcactaacgggggcaaggaaaaaagggttgctcattttgggtatcactggagtctgatggaaagagataggcgcatctctggagttgatcgttactatgtgtcaaagggtttggagaacattgattaaggaagcattttcctgattgatgaaaaaaataactcagttatggccatctacccctgctagaaggttacagtgtattatgtagcatgcaatgtgttatgtagtgcttaataaaaataaaatgaaaaaactcacccccaccacaacatacccccttaccaacatgcggccgcaatttgagcttacttggccaattccccctatagggagtcgaa

SEQ ID NO: 372541 - DNA, 536 bp, Homo sapiens
agattccgtcgcttcttccggagccgtacgtggcaccgccccgctcgcgggcggccgcggggcttgctgggaagagaggcgaagccaggtcacctttcaaggacccagaagtagggttttggcctaggtaacggggcagagatgtggttcgagattctccccggactctccgtcatgggcgtgtgcttgttgattccaggactggctactgcgtacatccacaggttcactaacgggggcaaggaaaaaagggttgctcattttgggtatcactggagtctgatggaaagagataggcgcatctctggagttgatcgttactatgtgtcaaagggtttggagaacattgattaaggaagcattttcctgattgatgaaaaaaataactcagttatggccatctacccctgctagaaggttacagtgtattatgtagcatgcaatgtgttatgtagtgcttaataaaaataaaatgaaaaaagatcctgttgtctcctagctctactatctcgtgatctaacctctggtcgttttct

SEQ ID NO: 372542 - DNA, 178 bp, Homo sapiens
tcacattctcctttttaaactgtttttcagggtttggagaacattgattaaggaagcattttcctgattgatgaaaaaaataactcagttatggccatctacccctgctagaaggttacagtgtattatgtagcatgcaatgtgttatgtagtgcttaataaaaataaaatgaaaaaa

SEQ ID NO: 372543 - DNA, 835 bp, Homo sapiens
agattccgtcgcttcttccggagccgtacgtggcaccgccccgctcgcgggcggccgcggggcttgctgggaagagaggcgaagccaggtcacctttcaaggacccagaagtagggttttggcctaggtaacggggcagagatgtggttcgagattctccccggactctccgtcatgggcgtgtgcttgttgattccaggactggctactgcgtacatccacaggttcactaacgggggcaaggaaaaaagggttgctcattttgggtatcactggagtctgatggaaagagataggcgcatctctggagttgatcgttactatgtgtcaaagggtttggagaacattgattaaggaagcattttcctgattgatgaaaaaaataactcagttatggccatctacccctgctagaaggttacagtgtattatgtagcatgcaatgtgttatgtagtgcttaataaaaataaaatgaaaaaaaaaaaaaaaaaaaaaaaaaaaaaaaaaaaaaaaaaaaaaaaaaaaaaaaaaaaaaaaaaaaaaaaaaaaaaaaaaaaaaaaaaaaaaaaaaaaaaaaaaaaaaaaaaaaaaaaaaaaaaaaaaaaaaaaatataaaaatttagtctatatcaacaaatacctaacttcatatatcacatattcttctatattgcaacaagctttattatctattatcttctctctaaatatatatctctcatatcaatatatatcacattttttcttaatcctcgtatacatcgcaataacctctgtatctctaacataatctactatatggatataccttactccagtatttgtatatttact

SEQ ID NO: 372544 - DNA, 774 bp, Homo sapiens
agattccgtcgcttcttccggagccgtacgtggcaccgccccgctcgcgggcggccgcggggcttgctgggaagagaggcgaagccaggtcacctttcaaggacccagaagtagggttttggcctaggtaacggggcagagatgtggttcgagattctccccggactctccgtcatgggcgtgtgcttgttgattccaggactggctactgcgtacatccacaggttcactaacgggggcaaggaaaaaagggttgctcattttgggtatcactggagtctgatggaaagagataggcgcatctctggagttgatcgttactatgtgtcaaagggtttggagaacattgattaaggaagcattttcctgattgatgaaaaaaataactcagttatggccatctacccctgctagaaggttacagtgtattatgtagcatgcaatgtgttatgtagtgcttaataaaaataaaatgaaaaaaaaaaaaaaaaaaaaaaaaaaaaaaaaaaaaaaaaaaaaaaaaaaaaaaaaaaaaaaaaaaaaaaaaaaaaaaaaaaaaaaaaaaaaaaaaaaaaaaaaaaaaaaaaaaaaaaaaaaataaaatactatctaaattattttatatttataattatattttataataaatattcaattataaataattaattaatttcaatttttataacattaccattcttcatttatatcattttcatttattaactataacttataatatttatataatctctcatactatattaattattt

SEQ ID NO: 372545 - DNA, 720 bp, Homo sapiens
agattccgtcgcttcttccggagccgtacgtggcaccgccccgctcgcgggcggccgcggggcttgctgggaagagaggcgaagccaggtcacctttcaaggacccagaagtagggttttggcctaggtaacggggcagagatgtggttcgagattctccccggactctccgtcatgggcgtgtgcttgttgattccaggactggctactgcgtacatccacaggttcactaacgggggcaaggaaaaaagggttgctcattttgggtatcactggagtctgatggaaagagataggcgcatctctggagttgatcgttactatgtgtcaaagggtttggagaacattgattaaggaagcattttcctgattgatgaaaaaaataactcagttatggccatctacccctgctagaaggttacagtgtattatgtagcatgcaatgtgttatgtagtgcttaataaaaataaaatgaaaaaaaaaaaaaaaaaaaaaaaaaaaaaaaaacatacaaaaaaaaaaaaaccacaaaaaacctcgggtttttttttttttttttttgggatggcaaaaattttttaaaatgggagaccctgttttaatctttttgtgccatgaaactccttaaggcagcctacaaagaccatggggaggttgaggatcatttgaccccaaaagtttgaggttgtataaagcttctgaatgcttgcttgttgggg

SEQ ID NO: 372546 - DNA, 902 bp, Homo sapiens
  misc_feature (483)..(483): n is a, c, g, or t
  misc_feature (491)..(491): n is a, c, g, or t
agattccgtcgcttcttccggagccgtacgtggcaccgccccgctcgcgggcggccgcggggcttgctgggaagagaggcgaagccaggtcacctttcaaggacccagaagtagggttttggcctaggtaacggggcagagatgtggttcgagattctccccggactctccgtcatgggcgtgtgcttgttgattccaggactggctactgcgtacatccacaggttcactaacgggggcaaggaaaaaagggttgctcattttgggtatcactggagtctgatggaaagagataggcgcatctctggagttgatcgttactatgtgtcaaagggtttggagaacattgattaaggaagcattttcctgattgatgaaaaaaataactcagttatggccatctacccctgctagaaggttacagtgtattatgtagcatgcaatgtgttatgtagtgcttaataaaaataaaatgaaaaaacnaccacacncaccacaccaaacacaaccacacccccacccacacacaccacacccgcaacacaccacgaacaagccaccacaacacagaaagcagacacaacaaaacacaacacacacacgcgcgggccgcgccgcgcccacaacaacaacacaacacgcgggggggacgagacaaagtatagagacgagcgcagcaatacgaggcgccaacgcaccgctacagaagacagagggctgctcacacaaaaaacagcgggcgggaggagctgcaacaacaaatgacggcgtcggggccagcgaacaaacgaggccgcagataacccccgccgccgggaaacaaggagaaccagaacgaaggacgagcacgagaaaaaaacaacagacaagagaggagcagacaacagaacgaaacagacacg
